United States Patent Application Publication US 2014/0057251 A1 - sequence listing, part 180

SEQ ID NO: 369014 - DNA, 440 bp, Cannabis indica
tccccggtcacgagttccactcgtgggccaagaggtaggcgggcagaccttgtgcgggaattcatcaagaggagccatactcgacggatccattcaaaataatggagccattccgcctgtcaaccaagcgaatcaatcgttgaggcaaccgggctcttctgtgttcgataggctgggaacgacccatgacctaagggacgatctaaacagaagaaggggacagacgagcagaatactacaacgatcgtgcagcccggagcccaaactcaaatccccgctcagaaagacgctgacgtaatccaacccgaccagaacgccaatcaagtcagcccagccgtacaggcccaactcgacaaattaaagaatatgtttcatggcatgaccggacagcgtaacaatgatcttgagttagaacgtgcacgcggaactcccttctcacc

SEQ ID NO: 369015 - DNA, 798 bp, Cannabis indica
atgatgttgcataatgttttatgagcacaaaggaagtaatggtggagaaagcagttgcttaccacagacttacacttcctattatttgggattggtcaagtacactatacttgatttggatatcaagacaatagattgattgaaattcacttcttgttttacgttagtgcaagtgggagtttgttgggattttatgtcctaaaaaaacccatttcaatataatctgatttgtaatcaatagaagattagaagtcatttatttttacatgtagttttcatgttaatggtttaatgtatacaatttctgttaggtcaaaaacatatagttattcacaattgcagttatgtcaacacagtggaaggtaattgtgattatatgcttcaaaagataatgtccgatgattcattagtgcactggatttacattgatgtgatagtcagcgataaagctcacttacacctttcataagtgttatattctttccagaacattggcgaagtatgctagtatcaaatgtatagagtagacattggactaataccgatgttgatcttagtaaagatattataatcttaccattgtatctttctaagtcaatatcattggttgatcttattaaaagatcttaattctaacatggttaggttcgatctcaagagtgttatttgtgttctctaagttgttagtcaaagcataccatttggtttgggtcacacgtacaacttgggagcatgatagtacaattgagtgggagcgctaaagatagatatggattctattgcttctatctagacata

SEQ ID NO: 369016 - DNA, 552 bp, Cannabis indica
gatcctcctcagttccttcttcaagttcaaaatccgaagatgagacggaagtgagattttctttgagacttttggcctttgaagatgaagacaccaccttttttcctttggaatacttttgggctgaaccactttgggtttttgaggagtggataccttggaccttgttcgagaacacacggtgggcaaagacaccattgctttcacgacatttggaccaccattcgaagaggaagacttcgacgatgtgtgattggatgaataggattcatcatcatcaccaaacccaggggttggagtagcaatcggagaagcaatgactggaggagaagcgaggttgtaagtcgacttttgagcttggatcttcaactttctgacagctttcgtcgaagtagatgacgaactaggaactccggtcactggagcaggtggcacaggtggggtgatcggagaagcagaggcagagccaagagaaggcttcttggacaattgagcatttttggtttttgccatttttcctttgaaaccctagaaagcaaacacactctcaaa

SEQ ID NO: 369017 - DNA, 544 bp, Cannabis indica
aggatcatcctcgtcttcgttctagctcaccttcctctagtgaagcacattctccaaacactgtacccagccatagaatgatggctcgtacagagaaaacaacgtgtctggctgacgcatctgacccttaagtggctcggcacgccactttgcccagcgctgaataggatccagccgtctagatggagggggatcatgaatgggacgctgaggtccaacagatcaaggagcaggacgatgtatgtcctggcagttcctccaaagtggagaaaggggtagaggttgaacccccaaactacggaaagtacaacaaggttgcggagccagtcgatgctgacggagacgtcctggtcgagggcgtggattacgtcagtgaggaacttgctgctgcaattcctcatagaaggcaaggtgccttgggcgctaggtgggtaagccctccgcccagggttactgaggcgcgccttcgtactctcgactaggacggatacctgggcggactggattgctacattcccgcccacaagaatcgtgccacaaaccc

SEQ ID NO: 369018 - DNA, 572 bp, Cannabis indica
attaaaaaaatgaatagcatcaatgctacaatatagcatccatacaaatttctagaatgacatcattttctcttcaatgagcagtgctattaagcaccagtagtgcctagcaccttctcgatatgtcgcattacgatttgttagcgatactccctaaaagatattatattaaattatatgggacccaattagttggaccaatatcgatactgacacataggagggtgctaggcaccacttgtgccctttagcatttctcctcttcaatggtatagtatctcaatattttaccacataatatgtccacctcaccaaaaacatctatcctctaaaattttatcattggagatgttcttatgtggaaaaatattgagatgctataccattaaagagaaaagaatgtcactacaacattaaggaccaatagcggcgggcccctcggccgctattggtccacaaactggccgctaaagggcaatagcggcggacctcggccgctattggtccgccgctattgcttggccgctattaatagtattagcggccaaaaacggggtccgccgctaatacta

SEQ ID NO: 369019 - DNA, 579 bp, Cannabis indica
attggatattggatttctccaaccgatccaatccaatgctatgtactcaaccgaaccgatccaataaatttattggattggattggttccatccgatggatatgaatccttatattggatcagatccatccaatatttttagtccaacatttattaaatcagattgtatccatccgatatttttaatccaatattaattggattgattggctaaaaggttgtggaatctttctttgttttcaaatactaatatacatcctcaaatatacaactaaatactaatatgcatcctcaaatattaaaacaaatagttaagattactaggtaaaaggttgtggattctttcttcgtttcgaaccccgcaatgaccgtagttggccttattctaccgagttgtttgagtaaaaattactaatatatactcaatcacctatgaatggtcatcaatgtattattattattatcatttattaaaacaaaataattattttttttttgtctgagaatatatatatggtgcacttttaatgagtattacctattcatggtaatattgtaaaattttaaatttttatactt

SEQ ID NO: 369020 - DNA, 664 bp, Cannabis indica
tcaattctcgaaataactaaattaaaaacaagtttctaaaataaataattcaagaattaatttttgaattgattaaataaaaaatcagatgacataaataaaatagactcggttccacaacaaaatgactaaaaacaaataacacacaataactcagaaaccggttataatttaaaaatagaactgattttataacataatgaataaaaataaataacacaaaccggttaaaattaaaatataactagttctgtaacatagtgaataaaaacaaaaaacacaatataacttaaaccagttataattaaaatagaatcggttctataacagtgttataatgaaccagatttataacaatgttataattaataaaaacaaataacacaaaataactcaaaccggttgtaactaaaatagaactggttatatagacataatgaatgagtattttttaggtagatatggcatgggtgtaattatttggtgggttggagcatgttgaatggatatttttgtttaagctactttatttaactgatttttgtgcgtgagtttttatcttagttgctttacggaaccaatttttttgtcttaaatttttaactagttgataaatatacggtttctttatattatatttgggttattgtgtgttattatttgt

SEQ ID NO: 369021 - DNA, 704 bp, Cannabis indica
tgaagggtagaacgataaattttgtccctactcgatgtaaatcatctatagaggatctttgattatttgaattataacaatagataattaataatgtatttatatcttggaacatatagagcattcaatataattaagagtgccattccgaatctatagtggagtcatgaaaaataataagttagagaatctactcagtaaattctagatcgatctacttattggaagcttgattatatagacccatatatggtccatgtactagttgagataatactgacttgtagactcaattaattagttttaattaactaattagaattctaaattagactatgtcttacttatgaattttcactaaggaaaggcttaattgagaaaaaaaaaagaagttttagggtttatttaataattaggagactttattaggtctaattaataaataagttagatggcaattttatttgataattaattataattattaaataaatagatttgacatttaaaaatgtttaaagttaaaatatggcatttatgaaagaaaagatgagttgttgaaataaaatggcaaaattgtaactagtggaggtccacaaggggtggcccacttaaggagttatttagccaatttttatcttttttattattccatataatttaaacctaaccctaggaggaacctataaatagatagtgatagg

SEQ ID NO: 369022 - DNA, 508 bp, Cannabis indica
aaacctgtttggaagaactctaacaatttttttgataagaacagagtcatcaagcttttcaccaagagcaaaatactcattagctatatcagataatctttcataaaactcagataaggttttagattcagatattctaagatcatcaaattttgtttgaagcataataaacctagaacgcttaacatcagaagttccttcaaattgagtttaaaggatttgccaagcatatttagcaaaaacagatgaacatataagtttaataaaacccttacctactccattaaatatagcatgaaagaccttattattgtaagtgggcgatttatcatcttcattacaccattcaagcttagttttttaacttagaattaccttcgaaatctaccacaacaggatgagactatcctgaaagaattattctccatgctttctcatcttgagacttgataaatgccctcattctaaccttccaataaggatagttagaatcattgaggagtggtgg

SEQ ID NO: 369023 - DNA, 611 bp, Cannabis indica
aatgtaatgatgggttgatccattagtcggggcctttgagctaggagttgagtaacttcccacacctcatcgtgtttcacggcccctgcgtaccgtttcagctccttgcaggtagttcctccgatgtggggtcctcccgatatcatggccactctcccgtaggtctaggtggcaggccgggaatatgttgagcatctccggggggaacaactggagccaatactcctgcttcaccccctagtgctccttgtggcaaagctccagccgcctgacctaggttgagatggggcaaccggtttttgatccactcgtaaaggtgtcccaatcggatcaagttttcgatctcgtctttcagatatttgcattcattagtgttgtgcccactgtcgttatggtactcgcacctctaagtgggatccctccgggagctatctttatacaaaggaggcgttctctagtagtgcgtattttgcctagtagcaaagtacacacgttcttgggagtccgttaactccgtgaactgggtgtattggggagtatactccattttctgtcgcttttcctccgtccgggtgctgcctttggaggacctttttgttggaaattatttt

SEQ ID NO: 369024 - DNA, 1013 bp, Cannabis indica
aacaacatttctaagtaataaaatagaacaaaacattatgaaaataaatatactaaacaatgaagtgttacaaattcaacatacaaaaaaaatttaataaaaatataataaatatttattatatttttcaatatattttattatataaataattttttaatatatatatataaatgtaattgaattggatcgatttttaattggattttgagattgacatccaataaccgatccaatccaattagaatccaacttttagcatccaatccaatacaattgtaattggatatccaactttttgtaattggattggattggatcggttcggttcaattggattggattggatgatgcccacccctagtcatgaggattaatgtaccaaataaaatacaagctaacatgaatcaaaacatttctaaaagcttaacaagcttgaaacctattaatgataggtacagaaaagagatatctaagaagagaaaatgagatgtatataaaaagaatatcaaatatccaaaagcaggccatgcaaaaagccaacatttggcaagacaaggttgcttaacaacgactactacagacaagacgatggctagaaagtccctatccggccagacgttcaaatagggacttggggggcaaatgttatcccaatttttatcctcatggcgtggcatggttacgtggaaaaaacctgtgccactttgcattacagctcactaaaaggaaggtcaagtcaacattcgagcaaacgaagacctcaacactcaagccacccctggtcggccccatggctagccaagccaggaaacaacattatggccggccaaggattgcactataggtcccacaggactctcctacatgtgcaaagcaagaatgggcgctgcgaattgggccctaaaagcccaactgacagcttgagaagtatctagaatctaagggaatttgagtcttttgtaaatatctagctaactatcctatttttaagggaattgaattgtaaacct

SEQ ID NO: 369025 - DNA, 1028 bp, Cannabis indica
gggtagctctattccagcaaggggcctgacaagtaactaaaacaagacacgctcaactctgtataagaaaattatgtaatcccaatcacacataaaaagtaacatgaatcttttaactcaacctcaaaagtatgaaaagaacgagatcctaactaattataatccaaaagcacatacatgatttgtcaaattagaatgaaagaagattaaatgcaagcaaagaataactcaacaatattgtacaaaaacaagaacaagtgagattagacaatgcaaactcccaaagattttctgagggagtcaaagcgacttgagtctagggccttggtgaaaatgtcagctaattatttctcaatatcaacatattctgattgcaaagatttattttcaacaagttccctgataaagtaatgccttatatcaatgtgttttgttctagaatgttgaacatgatttttgaaaatatttatggtactagtgttatcacaaaaaatagtgaaaacacccaattcaaatccatagtcaatcaacatttgtttcaaccataataattgagtacaacaactaccagcagcaatgtactcagcctcggctgtggacaaggaaataaaattttgtttcttactgtgccaagaaaccaaattgtttccaagaaagaaacaacctacacttttactttttcgatcaacagcattgcctgcccaatctacatcactaaaacaagctaagttagaattagtatctttagaataccaaattcctaaatcgagagtactattaacatatcgaataatcttttttacagcaaatacatgagattccataggattactttgaaatctagcacaaaatcccacactataactaatatcaggatgactaacagttaaatacaatagactaccaatcatactacgataaagagtagtgtcaatcttcactccattctcatcttttgttaatttgaaagtggtgctcataggagtacttacctgtttagccgagtcaaggccaaattttttgacaag

SEQ ID NO: 369026 - DNA, 757 bp, Cannabis indica
caccgaggattcggccatcaacgaaaattgggcgttttgtaatgagtacgttaatggtggatggcatgggcaccacccacactcggtttcagcagattcccatatcatcgccctcccctcactcttgctcttagggatagagctcaagagcttgctcgactaccgggggatgaccggaatatcattcagttgaccttcgaggacaactttgtgcagtacgggctctatccgaaggatttcattcctaagccagtgaaggggaagaagaggaaatctggtactggccaagcggaggaagctgataaggagaatgagttgattcaactgaagcgtgaggctaagttgaagggtggtgcaagggccaagcagtatgctcaagagcccttgaatcctgaaaataacactgaggaagagcaagtgactccgctcaagaggaggaagaaacttccagcccagtccaggcccgtggaacatgcaattttaattagggagcccagttcacctgctcggccgccttctcccgtgtcaggaaaagggaaagctgttatggctgagataagagacttgtcaggtgatgatggactttcgagtcttgctcgggcaatcatcttgcagactactccgtcttgtttttaagcttcttgactattatgctttatgcttctcatgtctttttcctctaaccatgttattttttttccatgcagaaatgtctcagaagatgcttgatgccatgaagaagagagttggaggaagc

SEQ ID NO: 369027 - DNA, 698 bp, Cannabis indica
ataacctctcttccttcttctctttttcgaactaaccctcaaccaaggaattctttgttgattcttggtgtttttagcaaggagtttcaagggaaatcagcccaaggtaagccttagcaaccttatcttctagttcttgaattttagtgttggttgagtagtgattttgctaagcaggggctgttagggttagagatgcttagggttctcattttatgttaattttaagttgattttaagttctagttattgaatttgagctatggaggtggagttgagcaagcttgagctttgaaactcaagtttaggtctttaatggcataatttgcttcattgagtttttctgtgaaatactggctggaatatgttgaatataccctaattaggtactctgaaaagtttggtagcatttggtggaaaatttagcaaagaatgaaaggtttggggtggactggtgcaaaccgactagccgattttaccagacccccaatgcaagatccccaaacacttcattttctcaatttttgtccatttcagtgtcgtggttgggtgtttccctaattccaaagtttgagtaacctctagggggcatgacagaacctagggttatggttttgggtttctcgggattagggttttgctcatgtaacttactcggtttcataatgtgataagggcatccatctagcacgagagtt

SEQ ID NO: 369028 - DNA, 553 bp, Cannabis indica
tttggttaacaaaaatctgcattcacagtttggtgctttcattgagagcctctgtgaaaaagctacaaaaaaaaaaacctcctttctttcgaagaaaaaccacctccttcatggctgaaaacccagaaaatgttaataccccacatgaggaaactcatcatcatcttgggaaagagcacatgggctccagaaggtctaccaacctgcagtccagacagaccacctgttccaggaggactcaacctgaaggtggcccagcactcgaaccacacattcccaaaggacccaacttgacgttcgtcctagtacgcaacaacacgctcaaggagaactcagcgtgggagtggccagaaccctgggacgagggatgaagagcccaatcgtggaggtactctgcctatgggagaggatacttatgaaacggaaaaatactgccttagacgctgtctcgaagaggcgcatcagcgaaacgctgaattagcgcatgatgcagcggcggctaggacagcacagggcactaatgctcaaaatcaacctaaacctggagtgagaa

SEQ ID NO: 369029 - DNA, 745 bp, Cannabis indica
aatctaaataatagtaagtgtagaaattatccggtctaaatcaatataatttagtgaaatattaaataatttaatattacaaaaaataaccgaactaaaataaaatattcaatcaacacttgcagattgaatttgaattgttttgtgcatttttatcagatccaaaaaaataaaatatgaacaaaatagtttatggaaattcaaaaaaaaaaaatagtgcatatggaattaaattcacttttaattaaccatgtactgaaatcaagagtaataatgtgtcctttttaagtcaacggtggcacctaaactcaatcatttaattaattagttctgccaaaataagtaaataaattacataagtgattagactttaatatcgatggaacccatgtgtgcttactgcttactgtttaacgaaagccatcatatggtacacacaagttgaatattccaatttttttcaataaataaacaaacagtagttgtatgtctaaatcgataacgaaaaggaaagcttaaattatatatacttacacacagattcttcatttaattttcctagttattttaccaaaattattaccattaatttttcaaaaaaaatataaattaatattatcaaacaaacatgtaaattagaaaaagctggcctaaatattttaataacgtgattatgatctgataccctccaaaaaaagattctttttaatcaaaaatttggtttttttttttttttttttttttc

SEQ ID NO: 369030 - DNA, 951 bp, Cannabis indica
acaagaaaaaatccccttttccttgctgcacaaagaggccgaaatggagagggaaagagagagagagcttcctttgaaatttttttctatttttgtctaagtttgaaaaataagagaaatgccacctactcacttatttcagccaatatatcatcaaataaaacacatatttctcatttattaagccacaaaaagacaaactaataatggggcaaaatgaccattttgccccttcacactaaaatcacataaataacactaaaggggtatttttgggaaattctaaattcccggccattcccgacattcccaatgtctaataaaccgtcccaaactactaacatactaagttgtgattttactgagccaaacaccgagttccaaaataccgggcaccggaatgcaaaattatgaaaactactacatgacataaaaatgcatctctgaattcaataataacagtataataaattatttaaatagctataaataatttcataattaaacgtgattaactgctaatttccaaattaaactaagcggtctttacaactatttatgtaaagatatatgacattaaatctttgagaatttcaattgaacaaaacactgatatattgaatttttcttttgttgcagtgtgttggaaagagttcatgcttcgatacatagccccatttactctatttcaagagccccatttactctatttcaagttgtgtatttacttgtttgttttggtgtgacatggattccaatagctggaatactattccattgccattctttcttctcatcagcttaagataatatgttcttcccaagttttttgggtcaacttatttgagagaacttgatgcagccgagtatgaggaaatcattgccgccccaagatcatttagcttgtctttcagggtattttatgtacataatgattccaattcttcattt

SEQ ID NO: 369031 - DNA, 520 bp, Cannabis indica
ttaaacttaagtatttacgccataaaattactcaaaaataaattaataaatatttttttaattcatattaaaatcaattaatattacacatgattgtgaaattgctttgaattttatttgtaaggatgctaatcaagtagcacattctgtagtcaatcatgcattgtaaataatgttacatgtgccatttggattgggattgaactttcttgtgctcgtcatgctttacagttggagtggcaattaatgttggtgtgtcgtgttcgtattgtgctgaggacttaaatttactaaaagttgctaacacgaacacggcacgacacgtgacacgaagaaattaaaaaacacagacacgaacacaacttgaataagttcatgccgtgtcgaacccacaaaatcgcatatgtgttggcaggttgtaaactaaattgttgactttgatgtcatcatgtcatgttcgtgttatgttgagttttgaaatttattttagatggtagacatgaacatgactcgtaacata

SEQ ID NO: 369032 - DNA, 1089 bp, Cannabis indica
ttccaagggaagaaaacaaaactactgatgcattagctcgacttgcgagtagcaacataaatgataaagcaaatctgattcctatccagtttcttgaaaaacctagtattaccggtacagaagaggttgaaatgattgatacatccccaaattggatgacgctaatagcagcctacctcaatactagggagctcccagataacagaaacaatgcttggaaaatgaggagaaaggctgcacgatacataattgtagagggagttatgtatagaagaggattctccatgccactactcaggtgtgtcacacaagaagaagctgcacgacttttgtcagaagtacatgatggattttgtggcaacgacgcagccgggcagagtttatccaagaaaattctaagggagggttatttttggccaacaatgattgaagacttcgttaagaaatgtgataaatgcctgagattttcaaagatacctcgggcaccgcccaacgaactaactcagatgcaaagtccttggccttttgccatttggggaattgacctgatcggacagtcagccaaaggcaaaggcggagtgcagtacgcggtggttgcagctgattattttaccaagtggacggaagccgagccgttggaaaccatcacgtccaattgtgaaaaacattattttccggttcggactaccatataagataatctcggacaatggcaaacaatttgacagtcagtccttcagaaatttctgtgcgaaccatgggatcgtaaaaagtttctcagcagtgacacatccccaaggaaatggtcaagttgaagcggtcaacaagacacttaaggacaccttaaagaagaaacttgaagatgctaaaggaaactggccggaggaacttcctaaagtattattgtcatgccgtaccaccgtgaaaacagtgaccgaacagactccattttccatgacatatggatatgaagctatgctgcccatacaactcgaaccgccatcccacagaagattaacatatagccaagaagccaatcatgtactcctcgcagaatcacttgatgaagttgttagcccaagatatgtt

SEQ ID NO: 369033 - DNA, 552 bp, Cannabis indica
ctccggaattgagaaattataactctaatgcccatttctaataatgggacccacagataattaaattcataaataattataaaaatatcataaattagtactaattgcgtttactaatccaaattactaagacggtcattacaaaaggagataaagaaaacaatcaatcacgaaaattagattgcaaatattaaaaagatagacataaaggaagaggagatgaaccacttaatgtttcgacgaaagtttatgggtaatgaaaaactttgcgattgagatttcgatggctgaggccatgggttctgaaattttttaagaatggaaatgtaatctgatgagatgtgcaagaaaaaaggtaaggacggtgagggcatccaaggtgaaaaagaaaagaatcaaaggatgcagaggaaatttgaaagcttaaaattaaaaaatcactactacaatttaggctttgatggacactatatagtgactctcacttttgtgcgagtcactaaatagttaggaatgatttttagtgacgcgcataaatagactctaaatttt

SEQ ID NO: 369034 - DNA, 496 bp, Cannabis indica
taataattcctaacctaaacctagtggttgcctataaatagatagtgatggctcacacttaaaagatgatgaaatttctttccttcaggaaaaattgagccatctattctatactcatagccgaaccacttcttatctttctctcttcatattttcatacccttgagtgatagattgagtgcccacacacatcaagtggtatctcaatcatagtgtggaagactatgaagaatccaaattcaagagaaggacattcgggcccagatcttggtgatactttgcgacaaacaggatacaaggattagaaatctgagcagaagaaaacattaatattccgctgcacccaatgtaaggttttctgaaactttatatgtgtttaatttcattgttcaacaaattcatattaggatgttaaataacatacatggtagtaaatctagatcctggtaaaacaatttccaacagtatcaccatgaccaaaaagtaggcttaacta

SEQ ID NO: 369035 - DNA, 740 bp, Cannabis indica
agatcctggtaaaataaattccaacattaactgctttagagttctttcaatctcaggattcagcagtgtgagtggtgtagcactttgattttctcgcataaactgaaccacaaagcaacaaacaaaatgagaaataaaataaaatctaatttaaagcaaaaacttttagtaataatattagcaataatttaagaatttttaattcccgacaatggcaccaaaaacttgatacactatttttgttgcaagcgtacagtgttgttatagcaaagttttgatactaaaaggttgtcgaaccacaggaattgattattaaattttactaattattatactctttaattttatactttaattaaataacctaaagtaaattataattaagaatcaagtaataaagtaaatagaaaaataaatagacaagtaacaatttttaatcataacgtaaaaacctagagcactgattttcttatttcaaactatgaatatcaatttaccaattatcccaattatcccaatttatcatataatttgtagtttcgaaaatcctaatgtaacctattaacctctctcgagcgatgatagatttaacttaaattaactaacacgatatctctattcattgttaattaaataagcactcacaaaacaatatgattctctttaaatgaaactcatacaattagtggaatctctcaatctcacactttttctatgtcatgcaattctaagtccgattt

SEQ ID NO: 369036 - DNA, 668 bp, Cannabis indica
aaaaacacattatttttgaaaaattttctgcgtgacagtatttttgtaaaagtaaacttaaattccagtattttctaaatatctgtattttgtaaaaattattaattggactttctatttttttaaataataaaatagattttatattgtttataattgtacaaagattttgaactaattttttattaaaataaaacttaataataatttgatctagagatgttacgataaaattggttacatttttagtatctattcatgttagaagtgttcacagattggtttgatccgaattttcataatttttggactaaaccagcataatagttttgtgaatattagaaaccaaactagaccaataaatttgttaaatcaaaccaaaccattaagaacgatttggtttggttcaaaactactatttaagtagaatttataattattcatatattttttttttaagtaaatatactatttttactaattttttaattttatttttcaaaatatatatttaacataacaagtaatagatatatagcatataaataacgatataaaaatattctcaaaagttatacataacataaaaaatttaaaatttatacaataaaaaactagaaaaattacaaaattatacatatagtcatatataaaatatatatataaat

SEQ ID NO: 369037 - DNA, 664 bp, Cannabis indica
tcccagtggatgggagacttacacttccttcaatataaaagttcagagggagccatccctatcgtactctgataactgttattgtatgagaattctattagtggtaggtacttactccaggaacccttgaaatccataacacaggctcgtaacatatcttccaatatctgaatcgtcctttcagactgtccatctgtctgaggatggaaagctttactgaacttcagttttgtacctatagcccgttgtaaactttgccaaaacttagaggtaaacttcggatctctatccgaaactatggattttgttacacaatacagtcttactatttccttgacgtataaatatgcatacttatctactgaaaaggttgttttaactggtagaaaatgtgcagacttcgtgaatcgatctaccacaacccaaatagaatcaaataaacccactgttctaggtaatcaaaccacaaagtccatcgtgatatcctcccatttccactcaagtacggttaaaggctgtaacaatcctaccggtctctgatgttcagccttgatttgttgacaggttaggcatctcgatacgaattctaccacattcttcttcattccgctccaccagaagtacggtttaagatcatgatacatcttggtggtgccgggatgta

SEQ ID NO: 369038 - DNA, 1041 bp, Cannabis indica
gatgttaatgaaacatacttgttagtaaatctagatcctggtaaaaaatattcaacatgctgctgcaaagagctccatttatcgagcttggatggcgaatccagaaatggatttaaggttcttaggggagggcatggatgaagttctagtgtactgcgagcaggccaagaaagctgaagaagaggccgaggtagaggaagaagaagaagacccgtccaagtctcctactgttatcccaatttttgcactctgacgtggcatcacatgatggtgacacgtggaatcaacttcgagtatctgttcggagaatacattctgaacaggatgcctcatatgcatgcctgaagcaaagcgatcaacaacccgcacagagcgaccaacacttagcgaattcaactttcacatcgtaagtcatcaaaaaaatacctataacttggggatcagattacaaagatatggcaagatgtcaaaatcccacgatcaatgtattctgtatttattatgcaatcttcctgcttatatccattgtaacgagaagggaaatacttctttcccaagctcataaccctataaacagtgattcatacactggcaaagggtcgaaaacattctggtagagagatattatctacgaattcatattcagagataccgctgtaagagctataagaaaaggaacctttctccttattattgagtcaatacaaataacgaggattaggctattaccgaactgttcggggctgaacctctataaaattcttgtgtctttacattgctttattatatatctatcgctataaattacttatcgcttacaaaataagactcactgtcgttggctaaaagcgaggtcaacattttggtgctttcattgagagaagaatcaagaatcgctcttcattcaaaatctaaccacaagtacgatggttgtacagactcgtaggggcctggtgttaggttatattaagcctatgttttgggtctgtaaagttagcattttctcgtctattggtttcttttggagcagttttacgcttg

SEQ ID NO: 369039 - DNA, 884 bp, Cannabis indica
atgttttaagtagtgttatgctgcggaaaaattatgaggttgaaggatttaaatcttaagtctttgagcttgaagagttgtgtgttaagcatgattttgggttatttgtgcaatttgaattttgagagttgttgttgatgttgttagctctctattgtgatgatttttatctgtaagaagttaattttgggtatggtatgattgaggttcgaatttatggaaaatttggcatgtttaggccttaaaaatggagtttttgggtgttctgaacccagtcaccgtgacaggagttttggccatcgcgactgggtttggcagtgagaaagtatgttttttccaactttgttttggccataacttttgactcgggactccgtttgggacgttctttatatctttggaaagctcattctgagctctatttgattatctatgttttgattgccatgtttatattatgtgaaagtgaaattagggattaaccctatttgtgaaatcccaggttgtgtgactaggattaccaacacttgatcaggagcacccaggggtttggaatctctgttattgtgggacatcaggtaagacagtagtttgcatgtagagtatgcgtggtggcgcttatgttgaatatgatatatgtaagtaattgtgacggggattagagtaatatgagcggttaatagcctagggttataaccctagtgatataagttgagtaaatgctatgccatgctaaatatatgattatattgagatttaagggttatgtgttcaaggtataatcgggttggactcggtaaccataaccgagataaaccactgtaaggccttattgtatttagtacgtgtgagagcaacacgtaggtctatgccacaaagacata

SEQ ID NO: 369040 - DNA, 826 bp, Cannabis indica
ttttagccaacgacaatgagtggaatttagtgagcgataagtgatttacagcaatcgatatgtaataaagcaatgtaaagacacatgaattttatagaggttcagccccgagcagttcggtaatagcctaatcctcgttatttgtattgacttaagatcaaggagaaaggttccttttcttatagctcttacaacaatatctctgaatgtataattcttagataatatatttagggtatagtctcagctaaactgttttcgacctcttgcccagtgaacatgcatcactatttatagggctagtaagcttggagaggaagagtttcccctctcgtcacaatgcgtataaacagaaagattgtgggatcaatgctgaatacaaagattgtgggattgatgttggatacactgatagtgggatcgtgtgtatgccatatccctgtaatctaaaccctgagttatagggatttcgttgatgactcacaatatgaaagctgaattcgcaaagcgttggttgctctacgcggattgctgattgctttgctctgggcatgccagcgaggcatcctgctcggacaatgcttcccgagcagatgctccaagtggattccacgtgttaccattcattcgattccacgtcagattgtaaaagttgggataacattcacaattaagccattgcttagtgaaaattcataaataatacatagtctaattttattattataattgattaattaaaatcaattaactgagtctacaagtagtattatctcaactagtgaggagaccatggtcctatataaccgagctttcaataagtaga

SEQ ID NO: 369041 - DNA, 882 bp, Cannabis indica
tatgaaatttattttttattttaatatttccaacatgttgtaagccgaaggcaggtcgaccaccaagaagtcttgcataataataaaagtaaaaggtgcctcgcctatagttactgcgagctcgattatgccaaggctagtgatgctatccccgatgaatcttcaaagatttaccatacaaggccttaacatagccttttcgagtaccattttctttagagtctccttataaatgatattcactgagctcccattacctattaacactctcttgattctcttattggcgagttaaatggttatgaccagcggatcaacgtgagggtatctcacgatcttctcgtcttcctccgtgaacgtaatggggggttcctcggttttcaccttgttggaaggttttggggcaaagatagactgctcgttctttatctcttcatgtatctcttctgagcgttattgcttttccctgtaatatgcggccctcccgaaatgaccaagatgtcctctccttccacaggaataggttataacccgtggttatttgggttatcaagatgacggggctggttctatccctggccctatcttcccacatactgcttaaaatggcctcaagcgataggactctctatctcatctttcaattggcgacattcgtcggtcgtatgcccaatatctttataaaatttacaatgtttgttaggatctctattgctcctcgaattcctcatagggtcgggtttaccgaaggataccttctgatcagtggagattcccacctgaagagctgtaagttgcgtggtgtcatccaagtttttaaccgtagcagcagccgtgctaaaacaacttaagtatgccataagtgtttcgtcaggctgctgc

SEQ ID NO: 369042 - DNA, 804 bp, Cannabis indica
aaacctctacaaaatgtacaaaattcccagaagacagttttcatttttcaaaatcaaaaaccaaatatgcaagtggattagaaactaacctttagtttttttctgatttctccctgtgattggtttggatcacttctgaaaccttagagattcaggaagaaaaagcaaatctgggtgaaggatggatgaggatctctaaaaattcagagaaaaaggagaagaggaagttgggaatgagagggaaaatgagaaaatcatttcgtattagcgggcttaattaccaatatccctcataaattgggattgtgacacgtggcagcaggaatgcctaaggtcatcccatccaacggtcagccatgggcgctcctacacgaaaaccgaagagtttcgtgatgtggcaccataaataagataaaacaaaataattacagctcatttttcgaaaccctcgatgggacaaccaaaggtcacctcctcgtgacaacctttcacctgtctctcgcatatagtttccctcatgaccgcatctgtcaagtcgcgaaactaggggcatgtgttatagtgagattttactcacctagaaactcgagaccggattcctgtttaaaggacacgtgtactcaatttccccaaggaaagctgagatgtcaatgagagactcctcgagtttaaacctcacctgagctaaactcagtgggatgatgagaatatgaccaagtctaatcgcattcgcgaggcctgcattatgtgggaccaaggaacggactcaactcgcatatacaacgatatatgcgagtatccttt

SEQ ID NO: 369043 - DNA, 806 bp, Cannabis indica
aagctgacatggtccacagattctctccgttggacactttttcaggactccccttacagcttgaagcttcaccagtctttggaggtctctgtagttcaactgccctagtctgtagtgccataagtcaggtttgtccaagaaggtcctattgcacacgatggtatttcatattgcatagcactgatctacagtcctgtttcctgttaagacaacatacccatcagatgaaactaagcactgtgttttagtaaaacttacagagaggttgtcatcacagaattgaccgatgctgatgaggttggctttgagtcctttcacatacaggacgttcgttaactgagccattccattcacgttcacatcacctctaccagcaatctgccctttgttaccgtcgccaaatgtcacgtatccccctttttcttctttgtagttaactagcagtttcttatttccagtcatgtgacgagagcatccactgtcaaaataccactgcccttcaacaacggcagacagagatagctttacaaccaatccaacatttggatttggtttggacttcattttccattctcgacgaggtttgcgtccatgtgacttatttggttgagggaaactatttggtcgattgattattgctttcaagtaattctgcaatttgtagcacttgggacgaatgtgaccctctcctattgtagaagtgacatgtaggaatgaaattgtcattttgtggcagatttcctacatcaatcctccttccttcaaacttgagtttagtgggtccagttggaacttgtctcttctca

SEQ ID NO: 369044 - DNA, 661 bp, Cannabis indica
gggcataaaacccaacaacaatctcccaccagatacgggcatcttcacgcagcatataaatagcacatctgacccgatcattgtcctcgacctgcataaaaccgaaaatagatgttatcatactcatccactactctactttgaggggattagcaccgccctcaaatactggcagaatctacttcctaaattgctcatacaatggttaaagacgattccctacatccggtggcactaccagaggtgccggaggatcaggtttagggtttagagaaggctgagctcgctgctccctcaactctcaaatttgttcaccatgttgccggatagtctcttgcatcgcagcatataactcttcgcagtttggtggtggtggagggttctcgccctaaccagcaatcgcgagcccagctagctctcggttacctctaccagtccgcctcaagtgaataatctatacacttgcggtcacattctaggtaataactatactgataagtatttccatatatcataatcctttccacccattgcaatgctaatgtaattctaataattaaagcttactgaaccatgagtcgaacgagtcttcgcagccaatgtacatatcaaaccaatcttaaaaatctaaaaaccttggcgctctgataccatgttgtaa

SEQ ID NO: 369045 - DNA, 787 bp, Cannabis indica
gtgtgtggacctattttaccagaacttaacgtggtagttttttgtaggtttttgcaatgttaatcttgtacacataaactccccttttgtaattgtattataatctcaccaaatttatatataacaagtaaatttaaagctatttaaattgttgcttgtatcaatttatttcttttttaaatttttcataaatcctgtgaaaagatgacttcttgataaattatttcactaggaatcgcattaaaatcgcacattcatcgcgcataatatcgccaaaatacacaaactaacaaatctagattagttcacatcgcagaaaaatcgcaccataatcgcacaatgtcgccaaaaatacagaaccaaagcaaactcaaaaacaggatcctgtcagttaatatcgcacaaaatgcaccataatcgcttaaatatcaccaaacaatacggaaccgagcaaccaaaaacaagatcctgtcagttaatatcgcataaaaatcgcacaatcatcgcaggatatcgcccaaaaatacaaaacaaactaaaaattagctatgtcagttattaatctaggagaaaaaagcacaatatccaacaaccagcaatacaacacatattcatttaaatattggagaaatggttcaaactcgagctttgcatatagctctgttgtgccctgaaccgtgacatagcgaacaatgacgaggttccactaccacctgaccactagacggtcgacgcttcgtcggtcttctacatgcattgctcttcctaggccgacctactggttttt

SEQ ID NO: 369046 - DNA, 538 bp, Cannabis indica
tgttaatgaaacatacttggtagtaaatctagatcctggtaaataaaatatttccaacagattgctggtattattttgttagtggtgtatgttgatgacatcattattactggaaatgataatgacggcatctcatcccttaagcatttcattcatacccagtttcacatgaaggatttagggaagctcaagtatttgggtattgaagttactcagagtaaacaaggtattttttatctcaaagaaagtatgtacttgatttgtttactcagacattaatattgggagcgaaaccttgtaatggtctaatgaatctagttgtgcatcttacacgtgatggggaatcatttgaagatcctgagaactatcgcatattggtcggaaagttaaattatctaactgtgacttgtctggatattgcattgccagttagtgtcattagtcaatataaattcatcattgggcagcactagagtaaattttattatttgaaaggagcaccagaagaggtatagtttacaaggatcatggacatacc

SEQ ID NO: 369047 - DNA, 664 bp, Cannabis indica
aaccgatttcagtaaaaaggaaacgtatctagatggattgaatgtgaagattaaacatgacctgatgattactaccaacgacaaaacaacctatgctgaaatggtggaaaaagcactgcgagctgagggcccagttgggtgtatgactgagtctgccaggactccagtggttggcgggactcctacccctcctgcatcaggctttagatggggaggtagtggttcggccatggacccgaaaaggaaagcatcaactgcgaccggtggctcaggtcagaacaagaggttctgtgggaaccagggtcgaggcagtcgtcagggtaattctgagacccgatatacgtacccagagtgccccagttgtaaaaggcaccatctgggggagtgtagaggtcaagggtgcttccaatgtggcatgccaggacattacaaaagggattgccctgaactcagaactgaagcaccaagggctccggcgaaacccagtccagctagggtgttcgccattactaaggctgatgtagaggccagtccttcagtggtgacaggtcaactctcggttaacaactctttttactatgtattgtttgattctagggccacacattcttatgtggcagccagaatctttaataaattggatagaccgcatgatagttacgaa

SEQ ID NO: 369048 - DNA, 618 bp, Cannabis indica
caaatttgactgaaaggcttatgattcatcatctgttagttttgagtctatcactatctatttataggaattcttctaggtttaggtttgaattataggatattaaaatattgataaataaatggctaaaaggagcttaagtggccggccataggatgtgggttccactaattacaattttgttattttatacaactatttattattttctttcacaaatgccatattttctaatttcaatcctttaaatgccaaaactatttatttaataattaaaattaattatcaaataaaattgttatttaatttatagtggtatcaatttctatagtgggaaacactggaacacatacaatcaagaataaattctaatagtttgttagttcgtttattatatcaatgtctaatcaaaatatgtgtgacatagagatactgtagtgtattgagtatagtctggagttcaaagttaaaagtgtttaaactacatgtatcaataacttcttccacccctaagtgttatagagattctgtgtagttttgaatataatctagagttcaatagatataaaagatctttgaactacatatattgcttcttaacttcttccacccatatca

SEQ ID NO: 369049 - DNA, 750 bp, Cannabis indica
tagaatctttgaagttaaaagaaccatgcagacataaactcaaggatcaaatgatgtgacatcttattatactcgtcttacaggactatgggatctgctctaagaatacaggccacaaccatttgtacttatggagcaataaaaattaggctaattatgatttttgccccctgaactttgacatgtaccaaatcatgcccccgaacttttaaggtcgttaaaaataccccctgaactattgagattgatggatttaaggacttttttccaattttagtaaaaaattgtaatatagatgaaagttcaggggcataatttagtacatgtcaaagttcgaggaacatgatttgttagatattaaagtttggggagcatggtttagtacataaacaatcactgaaatagtaattttatgaatgaaattacccacaatgtgccaataattttgatagaacattgctgacataccatcgcttcccgagcttttgtcaggacttactgtcttcaaggttgttaaaacctctgctgcagtaaaaggttgagtaagtgtgtcattaatttctgcatttattgttgttggaatggttgccgtaacaagatctaaggcttgaaggtcaattgtcgaagccgaaaagaaatcattgaaataatcttatacaattgtggtcatttcaacttttgatgttattttgttttgattgcaatccataatatttagtatgaattattgaagttgttatactaaaaata

SEQ ID NO: 369050 - DNA, 998 bp, Cannabis indica
tatatttgagatttagggttatgtgttcaagtaaccaggttggactcggtaactagaaccgagaggaaccattataaggccttattgtaattagacgtgtgagcgcaacacgtaggtctacgctacgtagatataaataggcatgtgagcgtaacatgtaggtctatgtcatacaggcatatgtgaatggcattactaattatatagtgtgataaatatgttatcattattttatactgtcttgctaggcttggttcacgggtgctctattgtgcaggaaagggtaaagttgtttctgatcagccatgagtatgggagctgaacgaagaatgtacatgttcgggccacactagaccaagcgggttggggtctaccagtgatgtcttttgagactctgttttgccgcttaggtcggccaaaggaaaagaacttgtaatattgttttgtaaatacctttgggatcccaacttttgtaacttttaaattataaggtttaaattattacaagttattttcattctgtttattaataaagtttaatttcggcacttattttactagtaatcccaattagcggattagggtttcataagtttattgggtagcgtgcctaattatttagggcgttacaagcccggtcgcccaggagaattatacttgtcgttcaaattgttgggaggcggatgagctccgctccaccctgacctgcgcccatcagttggagaaaattgtgactgtagctagcatcaagccgtccacgtctgggttctttcatcgtttgcctcgggacgaagagacgcccaatcacaattatgggggtttcggagtttggagctagacccatctcatgtccggagccatgcttcctcttcaagattattttataaatttccttgtttttgtcagccttccgccttaccaactcattcctcaagcttaccgcctgctctcaagcttgtttattttttatgtagcccgtggctgggcttcacctagcc

SEQ ID NO: 369051 - DNA, 833 bp, Cannabis indica
tgcgccagatagttgatctgtaaccgacccatccacatgtagtttccaggtcggtttgtcttcattgttaattggctgaggtgctggctcagggttgctttctggtacgcttccttttttgcttgtgcattctaccacaaagtcggccaaggcctggtctttgattgctgttcggggttggaagttgatttcgtactgacccaattctaccgcccacttgagtaaccgtccagaagcatctggcttttgcagtatttgtcgtagcggctggtcggtatatacccgaacaggatgagcttggaaataaggcctcaacttccttgttgctagaatgaggcagtaggcgagtttttctatcaacggatatcggccctcggcctcgatgagtctcttactaatgtaatagactgggtgttgtacgctgttctcttctctgatcagcacgacactcacggcatgttccgtgacagctaggtatattcccagctcctcaccgtccagaggtttagaaagtacgggaggttttgcaagttgtgcctttagctcttgaaaagctctttcacattcttctgtccactcgaactgtttgtttcctcgcaggatgttgaagaatggaacacatttgtccgttgattttgacacgaatctgctgagtgcggcgattcgaccagttaagctttgcacttctttggtttttgttggcgagttcatatccaggagggcttgaattttttctagattggcttcaattcctcgggcattgacgatgaagcctagaaactttcccgagctgactccaaaggagcactttaagggatttagtttcatgttgt

SEQ ID NO: 369052 - DNA, 674 bp, Cannabis indica
actaccgcgaccgcagtgtaactaattgggcgacatcaggtatacaacggactggaatgatattgacaatggaaaatatatcataaacttactgttatatctttctaagttaatatcacttagttgatcttagagcaatagatcttaatcttgagatggttaggttctggcttaactgtgttacttgtgttctttgacttgttcgttaaagttgaccaaatggatctgcccaatacttacatctttgaaacatggtagtacaattgagtgggagcgctaatcatagatatggaatttatatagaagcaaaatgatgatttcctttgagcttgacttaatagacataaatggaagagctcttatttcagtaattatattagtttactgaaatatcatttatagaaagctaagtatattttaaggataaaatacactaaggggtagaacgataaatttgtccctactcgatgtaaatcatctatagaggatctatgattatttggattgaaacaaaagataattcatagtgtatctatatttggaaaatatagagcattctatgtaatcaggagtgcaattctgcatctatagtggagtcaggagtagttaataagttagaaaatttacttggtaaattttagatctacttagtgggagcttggttacataggcca

SEQ ID NO: 369053 - DNA, 218 bp, Cannabis indica
taatataaaactaatcagtacatatcaattaatcctaaattctgacggtgcttttcaaatgcagttactgccaagactttggtgaatggatctgctaagttgtcttctgtgtccactttctcaaccagtacatcccctcttgccacatattctctgatgatgtgatacttcctttctatgtgtttgcttctcttgtggcttcgaggttccttactgtt

SEQ ID NO: 369054 - DNA, 482 bp, Cannabis indica
gtaaaactatttaattttttaaaaactacaccatatttcattagactaaataaatgtgaactctataatcaggttagagaataggaactccggttgttttctttttaaataggttgtgattctagaatatcagttcaaatattaatgagatttgttttattattattttattatatataaataatattttattattttattaaataaaaataaaaagtcacccatgaatttctcataaaccaagaatttcagttatataggcacactttatatagaatagatattcatttgagaagtttttagtattaaaataatattaatgatgatatacatacaaaaagtatagagtgattttataatgcattctcttaaaagggatatactgatatattcttgaattgttttggtattcagaaaaaattttaatctaactttttttcatatttatgtacgttatagctatttaagataacgtacaaaat

SEQ ID NO: 369055 - DNA, 951 bp, Cannabis indica
accctaagtttttttttataccaccattaactttaacagatactctaccttcacgtgtgtaaatattcatccgatttaatataactgatcgattcaattacaatacatcaaatagaattggatatccaattataatttaaatatatcaaatataaattctaaaagtctaattgaattagatcgattgttagatggaacatccaaattcgatccaataaaaatcaaactaaaccaattcaattgttatccagttatcattccattatatttataaatttttaaaatatatttacttatttaagaaaatatattaagaaatataataaaatgattaatctttgatttgtgaaagatacacatcaaatatattaaaatgattcattacacagtcaatataatttctcgtgtatatttagaccatctctaatggttacatcaatttgatataaaaatatttcatgataactaatggttaccatctcttgtgtaatatagaatcttttatttttgatgtaataactctaaaaattcacaccaaatgtcccactaaataaatatattttacttgaaaaatctcgcatttaatattatttacattaataacccaaaatagacaatttatgatataattatatcatgactactggaatctcaagtggccataaaagtgtgtgtgtattgaaagtcctggttcaagtctcaaattatgcattgttgtaatatataaaggcttaaagcaaaaaaaaaaaaaacaatgactactaaggtaagggtgtatgtcgatcggtttagagagtttatttgactactagtaaaaatttaatatcttaaaataattgagtaaaataaaatatttattaattcaattaaacattacacattaaataaaatcacacgtaatatttattaaataattattttacatattaaaaaaaataataattaaattac

SEQ ID NO: 369056 - DNA, 618 bp, Cannabis indica
atattccttgaaacttcaataccaactatcttttgaattggttcaagctccttcatctcaaattctctctttagcttggctttgatacatttgatcacggatttgtctttgctcattatgagcattcgtccacatagagaaataaaaacatagttgtagattgctctagattcttgaaatacaaacagtgatcatatgcgtatcatttgaacccaatttgttgcatataagtatcaaatcttttattctatcgtcttggggactctttcaaaccatgtaaggacctaatgagcttgcatactaattcaactcctttgtcttccacctaaaacccaggtagttacttcatatagatctcttcatctaagaatccatttagaaaggcaattttaacatcaagttgttcaacttcaaactccatttgagctgccaaagacaacatcaatcttatcgtcttgtactttaccacaggtgagaagattttcagtgtagtcaattccttccacctgagtaaaatccttcgccactaacctggctttgaacagtacttgtaacgtccccgcttcaagcctccattgggtccttacacccacggaataaatggctcttatacacgag

SEQ ID NO: 369057 - DNA, 512 bp, Cannabis indica
gttgtttttcttgatcagatattttatttctcgcttcaggttgtagcattcgttggtgtcgtggccgtagtctccgtggaaccgacaaaatttcgtcatgtcccttttgtgggtatctttcttcatgtgcccgagcttcttgtacggaattaatgactgagttgccatatacacactctctatatcttcagttaggatagtaaatgcagtgtgtttggcatgatcatggggagtctgtccggacttctcggtgaatttttgtttcttcccatttccttgcttgtggttgttgcctgaacgcttgccacttgaattgctggaataattgagaagttgggcggatgttccagtggaaggagccttcgttttgcccggattttgctcgccttttgctcgttgaatggcttcctcgagcttgatgaagccttcagctcggtcaaggaatcacttattgagtctaccagtccctttttccttatatccttccatagttcgccaaggacttcaatgcc

SEQ ID NO: 369058 - DNA, 579 bp, Cannabis indica
caacaaggaagctaaggccttacttttaggctcatcctgtgcgggtgtacactaaccaaccattacgtcaagtattacaaaaactggacgcctccgaacgattactcaaatgggtagtggagttgggctagtatgaaatcatcttttagccccgaacagcgatcaagggtcaggccttagtagattttgtggttgaatgtacgggtaaagaagaaagcacttcaaaaagtaacccagagccggtacaagtacctcagctgtgcaatagtgaagacaagtaaacttagaagttgcatgtagacaggtcggctacggatcagctgtctggcgcagtaatttcccttgtcacacatgcacgctgtggtaaaattcaggtttaaggcatccaataatgaagctgaatatgaagctcttatcgcaggcctcagacttgctcgggagatgcaagccgaacacattgagatttttagtgactcacagttagtggtatatcatgtacttggggagtatgaggctcgagaagagaagatgatagcatatctaagaaaaatacatgatctgctcgcacaattcaaaagc

SEQ ID NO: 369059 - DNA, 544 bp, Cannabis indica
gtggactatgcaaaactttaattgcaaaatcacataaaaagctttgtgtcatttcaccttttactactattatttctgtgcaaatcaatcacgaaataggctttattatcattaacaaaaaatctgcgttaacagataagatatcataaacttaccgttatatctttctaagtcaatatcaattgttgatcttaggtctatggatcataatactaatatgtttaggttaaacttagttgtattatttatgttctttaagttattcgtggaagctaactaatgcttttggcggatatttacatcttagaaacatggtcgttcaattgattgggagcgctaatcatagctatagaatttgtagcttctataagtatttagaagtgaaacgatgatttccttcaagcttggttgaatagcgaaaaattattgagatctcatttcagtaattatattagtttactaatatatcatttataggtagctatgtgttttaaggatgaaatacattgaagggtaaaacggtaaatttgtccatattcagtgt

SEQ ID NO: 369060 - DNA, 779 bp, Cannabis indica
ttctgtattttagaatttaatttaaataaaaaataacaaaatttaaaagtaagcaaaatattttatttacaatttaaaatttcatgattaaaataatcttattttaaatttcaaataaggtcactttattaaaaaaaaaattaaataatttaaaatattaaatatctgaccttaaatttaaaaataagacaaaataatcaaattttaaaaataagataataaactaagcaaaaagatagatttttacctattttcaaattcaaatttcactaatatcttaaattaattttaaaaaatattaattaatttaattctgataattagatttgaaatttgacaaataaaaatcaaaatacaaaactacacaaaaaattcaaaattaattccatgaaaaagtatgaaaaaattggaaaaaaaaatgaatttggctcggatggtatgcaaatgcataccatccaggtgcggattggggctgatttcaggcacacggatgctgccagcagcattttcgcgcgcaacaagccttcagacacgctcatgtgcgtgctccttcggacagatgactgtcctaatgcgcgtgcacacaagtgatcacccgtgtccgcgagcgcatgtggggtgtacaggatttcagatttttttttcaaattttcaaaaaatcataactaattcaaataaaatcgaaattgaagttctctaaaaaggtgaaattgcttaattttttccatactatccaacaaaaaataataccagaaaaaaatacaaattattttacgtaa

SEQ ID NO: 369061 - DNA, 727 bp, Cannabis indica
caaagtaaatcattgcgggccccccaaacactccaaagaatcattgccaacttctcaatattctcagttaaatgagagttacaataatattcaaaccagccaccaaaatcctcatccccattattaaaaatcagacccaaacctcgctccacacaagctttggtaaaagaacagccagccataattcccgatttcttaatatatcttatcagagaataaatatataccatagtgcaaaataaaaataccaaaatcttaatctaatattattaatgtaggaagagtttattctttattacctattccttaatatatcctatcacataaaaaatatatactatagtgtaaaataaatatacgaaaaaactaaaatcgtaatatacactaataatttaaatgttcctttttatacctgcatttcatcatgctcccgtgttttttgttcatttacaatagttttttgttcctaaaacaaagaaaccatagtaattttttatatgtaataaaattaaattgtttgtatatacgataatccattaaaaagatatacctcttagctatataaatataccaaaatcttaatctaatattatatagtagcaggagttaattctttatttcctatttcttaatatatcctatcatggaataaataatataccatagtgtaaaataaaaatactaaaaatcttaaatctaatattatagtagcaagagtttatttttt

SEQ ID NO: 369062 - DNA, 641 bp, Cannabis indica
ttgaactctagactatactcaatacaccacagtaccctatgacacacattttcattaaacatggatgtaatataatgaattagcaaattatcagaatatattcttaatcctaatttatgttcctattaatatttactggtgtaatagaagttgataccaataaaagttctttgacattgtatcacaataacttatttgagtgggagaatttttaaaattctaaacccattttcattcggataacacttgtgataggaactttaaaatacaactgagaaagtaaatctaaccattcatatggatagaaataacttatcaaaattctgagaataagatagtagaattcttgcatagtctattcgaatgacttaggcaaaagttcttaatcctcatgaaatattttatggtatctctaatgattacttaatcttaagcaagtattttacattaatgttaatactatattgctatgttgttgacttagtctagaaggaacttacagtttcagactaagataatatgtcagagcaagaaatccctcaaaacaatagtaagaggttaagtgtacttttatgtatgagtttaaccagactcctactgttgagtgggagctatctaagaagtaatcaaacaaggaacat

SEQ ID NO: 369063 - DNA, 666 bp, Cannabis indica
ctaaaaaaattaaaaaacgtaatcagactagaaaggctaacggtttaaaaccgtctgctataactgggtataggcgacgattaataaccgtgcctaatactataggcgacgtctcctaataaaccgtcgcctatacccagttataggcaacgattttaaaccgtcgagaaacccacattagcgacggttttgaaccttcgcttattctgcaccttatacgacggtcgtataggcaacagttatagaaaccgacgggaatactttaaacaactgttgaaaaacattaggaaaacccatttttgtagtagtgtcaagatgttataaacatggcggtgcatctgaacaatcgacccctgcctccatgattagttgatcttaggtcaatcgatcttaatcctgatatggttaggttcgatctcaattgtattatttatgttcttggagttgttcgttaaagttgacctatggatcggcccaatacttacatcttgggaacattgtagtataattaagtgggagcgctaatcatagatatggaatacatagcttctataagtatttagaagtgaaatgataatttccttcgagtttggcttagtagagataaatgattgaggctttatttcaataattatattagttaactgaaatattatttataggtag

SEQ ID NO: 369064 - DNA, 984 bp, Cannabis indica
gtccgggccatatcagaccaagcgggttgaggtctaccagtgttgtgttttttagactctgttttgccgcttaggctggactgaaagaaaaggacttgtaataaaattttgtaaatgtgttttttttgggatcccaacttttgtaacttttagtttataaagtttaaagcattacaagtttattttcattcctattgttattaaagtttaaattatgcgctaactttattaataatcccatttaggggattagggtttcataaatatcttgggtagcgtgcctaattatttagggcattacactaaatctcaatatattcatatactcagcatggcatagtatttacacaacatatatcactagggtaataaccctaggctattaaaccactcttgttagggtgataaccttagtcccagttactaattactcacatacatcatttccaatacaagcaccatcgcacataactctacttgctaactattgtctgatctgatgtcctgaaatggtagagattccaaatcccttggtgctcctgaccaagtgccggtaatcctagtcacaataccaagatttacaaaaatagggttaaccgctgattccacatttataaaattcatacatggcattcaaaaaatagataatcacatagagctcgttttgatctttccaacggtatatagaactcccaaaacggagttcgaataacaaagttatgaattttcaaagttaacactcgaatttgtccaaaaactcgagggcgggctgcggcatgcaaaatccatgccgcggcacctgggaccaactcccaggttccacacaaaggggcgagccgcggcatgctaaaagccatgctgcggcacctgggttccaaacccagaaactagcaagcaaaccttcgaaattcagcttctaaacacattcaaatcatcaaactaacaaactaccaactaacaataatatttgtaatcatcaatcaa

SEQ ID NO: 369065 - DNA, 518 bp, Cannabis indica
gcatcaatggtgttgaagaagctaaacaccgtattttatgtaactttagattacacttaccgtatataagttgtaatttggggtgtaaccgtatatttgttaattttttcctattatagtgcaattgtgaaaatttcccttttttgtattatggttttttttttacttagttttgacaacttaattattctttttgtactattattttatttttttcataaaatttgttgttttcaactctttttttttttttactttttgagttagtgatagttaaaatgatactttttttttaaagtttaaatacataattacactaacaaaccaacaagattacaactcaatgacaaataatacaaaggacaaaatcacagattaaataatgttacaccactaaacaaaatatacaaataaattagagaatagagatgaagagagagattacaactcaaagcaataagctacacatgaaacacaatatataaatagcatatatatatatatatatatatatatat

SEQ ID NO: 369066 - DNA, 572 bp, Cannabis indica
ttataaacataaataaaattatgcatatataacttatggttgatatatatatatatatatatatatatatataaaataaacttacttaagcaatactctttaaagaataacttttacctctccattgcataaataatacgtagatgatgatactaatttatttgagaaatctacaaaatagataaatcaaacattaaagtcagggtaatgctagaactttgtaatggtgtaacgaaaaaagaagaaaaaaaaaagagtaaaccatgcatattgatagctatgtgtgtgagagagtatggaagattttgaattaaagttaaagtttatatggattgtgatataacctaaggttaggaagattttttatttgtttattatatatttttttaaaatacttcctataaaaatttcattaggaatttaagatacggtatgttttcttttttaaattggggaagagctatttaatgtcagttcaaatactaataggatttattttattattattttattatatataaataatattttattattttattaaataaaaactaaaattcacccatgaattt

SEQ ID NO: 369067 - DNA, 571 bp, Cannabis indica
ttaggcagtttttggcagttttgggcggttttaggcggttttgacggttttttggttaaactatttttttatttcaagaaccgaaaccgaccgccgtgtcaaaaaaaccgaaaccgaaaccgaccgccaaattcggtgatgacgtggaaccgaaaattcggttacggtctggtcggtttgatggtcggtttcgatttttcgatttttatgaacacccctagtaattagttttggccaaattactattttacccttctaattacttctttatcttttagtaccgttaacttactagtgaaagtataatttacttcaaatctaaatttgtacacaatttttcagttctagaattaacacttacagcaaactaacattcgatttgttaggaaagttaggattctattattgtagataatgttcccaatcatccacaattagattcccaaaacagaagttgtaagaatcatcttctgtgataaactttaatgagtgaatcaaagaaccaataacatgaatatgagttcatgattactcaagatttaggctgatctactattgatcatctttatga

SEQ ID NO: 369068 - DNA, 651 bp, Cannabis indica
ttgaatggtcggacgagtgcgaggaggcattcaaaaaattgaaagaacatatggccaagcccccatcctatcaaaacccgttctcggagaggacctattcctatatttggccgtctccgagcacgcggtcagcgctgccctagtccgggaagaagagaaaactcaacatcccgtgtactatgttagcaaacgcatgataggagcggagacgcggtaccccatcatcgaaaaactggtttcttgcctcctaatggcctccagaaaactaaggccatatttccaagcacacccgatcaaggtactgaccaatcacccactccggcaagtcctacaaaaaccagaagcatccggtaggctcctcaagtgggcaatggagttaagtcagttcgacttacactacgttccctgaatctccataaaaggccaagccttggcagacttcagtaccgaatgcaatgaagtcgaggcaaccgcgaatatgccaacaccatcaatccccacctggagagtgtttgtggacggagcctccaatgaaaatggatccggagcgggggtggtaatgatatccccgactggacttcgactctaggcagtcctgcagttcgacttctcagcttcaaacaacgaggccgaatacgaggccttgatagc

SEQ ID NO: 369069 - DNA, 561 bp, Cannabis indica
aatttctaaatcaaatttaatttaactaagagaacaaaattagaatttctgaaatcggataatcgagtagagagttatggccgttttagtgcgaaaatttggacttttcccactgcctggaatcaggttaaccggtttcaaagagattaactggttcaccaaaaaccagttaaccggtgaaccggtttgcccagtggcagtctcattgttcgcgtccaacggctataaacgactagttttcattcctacactatataaactcatttttcaatcaaaaattaaggttggttgagcttctattcatcatataacatcattctaagtgttataaactaaagaattatcatcttttcataaacacaccaaccacacacacttgttcttatcttctctcgtgtgcttgcaattctctctaggattttacattattttttatctcatcagagagagtttgctttgtatttcaaaattacatattcactgtattgagaggtgaggttggcaccggtagaaaaataactcgactgtaggtgaggttgacaccgattttgtaaacaaccc

SEQ ID NO: 369070 - DNA, 1065 bp, Cannabis indica
caattaaaattttatcaaaataattaattttgaatttgaaaaatattatggttagaatatctttaaaaatatctaggttaatttcaaattaattaattatttaatttatcatataaggtaattttaatataatatttcaaattaaaaatataatgttatctttaatttaaaaaatacacaatattaaaatatctaaccttataattaaataatatataaatattaaagaaattaataaatttttaaaatctaacgataattttaaaaacattaaaataatctatttttaaatttaaacctcaaaattatcaaaaattagtaataatctattataaattaaacattattaatttaaaattgatatttaagtttaaatatattgaaaataatattttattttgaaatttgggtttcaaaattgcaaaatttgaaatttggagaaaaatcccacaaaaatcgaatttttggggcttgctggcagttaggctgcacgtgcagccatgagagaatggacgtgcgcagaggcaggatgatgcagggtgtcctgccgagaaatctcggcccctacagggtcacatcggcgagtgtcctatctgaaggccgcgtgcatgcggggaagatcgagcttcattcaggaattgtctaaagcacgcgcgcaaaatgctaccttgtacgagggtctcggcgatggtgcacaaccttcaacacccaatagactcgatttttcaaaccaccataactctctcattttttatcggaattgagttccgtaaaaaagaaagttgcttaatttttcacaaggaatccaaataaatattttcagcacgaaaataaaattatttttattgaaaaatttcgtaaaacatattcaatcatcaaataatcacataaaccaacatgaacacatccaaatcaacacacaaataatattcatcgctttaaatccatatttcatgaaagtaaatcattaccatggctctgaggctagttgttggaaatattttaccagggtctagatttacttaaaagatgttgattaacatcctaaatataaattctctaaaa

SEQ ID NO: 369071 - DNA, 429 bp, Cannabis indica
ggtggcctggggttccagaagaccaaagaaatgaaccaggcctttctggccaaatgggggtggaatattcttactggaggacaatactttgtgctgcagagttttaagagccaaatatctgaaagggcaagactttctgaactgcaagtataaaaattcagattcctagttttggaaaagcgtcattaaggcaaattccattttgaaaaaaggtgcttgcaagatggttaccaatggtcagaatactaagatcttgggggatccctggattccgcatcgtaaaggcttttgcccaaaaccaatcgggaatctcaaccccaacatcaatagtgtggctgacttactgttagacaatggtcagtgggatgtgccaaaactgcgaggctgttttgattaagaaacggtctctgacattcttaaaggagggca

SEQ ID NO: 369072 - DNA, 532 bp, Cannabis indica
agtctcgctactattataatttgacgccacagtagttatagtgactaaatactattttagtccctaaatataacaaacagtgactaaaaaattggtcattgatttttttggttcaaattaaacattgtctcatgactaaaaatatttgcgactaaaaattagtcgcaaaatctaactattagtgactaagttgatttagtcacaaaaaatctagtcggtgaaaacttattttcttgtagtgtatgaaggaaagaaaaaaaaatatcgaatattagtttaagtttgacgtatatataattttcactacattatgcattatattatctcattaagaaaacaaataaaagacaaacaaaaaagaaacttataaaaaatttaagcttcgtggtatgttaattttacactatagggtatctatttaatctacaaatatatcatttttatgtgctgatgtatacaaagaagaaatataaaaaaaaaccttaaaaaataagtggttctttaaataaatacatatcttaatatgacgaat

SEQ ID NO: 369073 - DNA, 599 bp, Cannabis indica
atttaattctattgtaagttctgatattaggatagcaagagcatccaaatattctcagcttggagtaatcttgtttaatgttgtaaaggatctgaaatggagagatattgtcaattataggtgagggtaatttgttaatgaggtatgcaaatgctctaacagcctcatcccaaaattgaagtgggagagaggcatgagcaagaagagtgaggtcggactcaataagatgtctttgtttcctctcggccactccattttgctcatgagtggtggggcatgagagtctatgggaaataccatgagtaagaagtattttcaaaggcctgaaactctcctccccaatcagatttaagagccttgattttacaatcaaattcattttcaacttgagttctgaaattgataaatgtagatggaccacacaggtgataggctagttttaggtgcatttaataaagtattttaaaggtgtgtttcaattgattatattcattttgtgcaaaattacgtttgttttctatttatttcaggtttaaatcataaaattcataatttgaattgaaaatgagaagaaatatgttaaatgaaatgaatatgat

SEQ ID NO: 369074 - DNA, 684 bp, Cannabis indica
atccaaggtacaagtaaactacattgtagattaacccatcaattaaaccttgtgtactaataaatcataggaattcatttaatcacagaatcttgattattttccactgtgctgacaacacaataaacaataatatcaatgtgataaggatttggatgataatcaatctgtttctttattgatgattgaatagaaaatattacattgaaaaagagttttatttagggcacaaagcccaacaaactcccacttgcactaacattaaactatcagtacatttcaattaatcctattttcagtctgtgcttttcaaatgtagttacagtcaaaacttggtgaatggattagctaagttgtcttcagtatccactttctccactagtacatcctttcttgccacatattctttgatgatgtggtatttcatctctatgtgtttgcttctcttgtgacttcgaggctctttattgttggctattgcaccagtgttttcccaaagtaaaaccagaggtttttccattccaagaacaacaccaagtcatgagaataactttctaagccatacaagttccttagcatcctcagtggcaggtatgtattcagcctccatggtagagtctaacgttgcggtttgcttagcacttctctaaacaattgctccacccccaagagtaaacaccatcc

SEQ ID NO: 369075 - DNA, 739 bp, Cannabis indica
gtagcgtgccttagcattagggcgttacaaatgtaatgtacaagattgctactaaggtgctctgtaatagattaagggggatacttcctgatcttattgtagagaaccaaggagggtttgtacacaggaggttcattgctcataatgtgctagtgtgccaagacttggtgaggctttatgggaggaaaaattgtaaaccaagttatatgatcaaaattgatttgaggaaggcttatgatacaatagaatgggacttcttggaagagatgatgagagctctaggttttcttggtaagttcattaatcttattatggaatgcataagtactcctaagttttccttgttgctgaatggtgctatgtgtgggttctttaatgcaaagagagggttaagacaaggggatccaatgtctcccctcctctttgtattaggaatggaatatctatctagaattttcaccaaggttggagaatggtcagggtttaaattccatgatagatgtgccccattaaagctgaatcatatgtgttttgcagatgatttgttagtcttttgcaatggagactttatctctgtaatgctgcttctcaaaggacttaaattgttctcagcttcatttagtctgcttccaaatgaacaaaaaacaacaatatattgtccaggaatgcttgataatgaagtttccaagatccttgaggcatctaattgttgggttttatgccctaaataaaactcttt

SEQ ID NO: 369076 - DNA, 504 bp, Cannabis indica
gttgtgaaagtaggatttatatcatgttcttcgctatttgtggtctcttcgaaggagatcaaaagtcgaagtgcatctatgcttgagcggctccaaaataagagcgtcttcagaatctgagcaactccgtaacccgagatagcagtaagagtcattccttcttgggaaattttgctcaggtcggggatgtttgtctcttcacgggagtttgtggataatctccaacgaagatgtttatttgattttgctgatgtgaattttcctcagggaattctttgtgttgctcttaacagtgctgtggatgatctcttgatttttgttgatctctgagtgtcggggttgctcacatcttgtttgactaaacatgttgattctgtgtatacccggttaatcacgtcgtgattttcctccgaaaatcataatttttttttcccacagatggcgccaaatgttgtcggaggaattttgacaacaccaattgtgtgcgagtattcaagggctact

SEQ ID NO: 369077 - DNA, 594 bp, Cannabis indica
cgaaaaacaaagtgtttttctctctctaagctcttacaataaaatctctgagtaattttcttagatttctctctaaagcaattctttcgatcccttttacagtgaagctaagtcactatttatagggccttaatgcatgagggaaggtttcccttttgcttacaatgtataaaataggaaggaatattcattacataattacaatacacaaaataggaaattggaataggttgtcatattcctttgactcaatcccatgattgtagggattatcttcatgcttggacttcatgagatcattctgaagtagtcaagtcctgataagtagtccggaaagccaaacttgcctctgctcggataatctaccttccaccctgctcgggtaataagcagatgtattttatgaggtctgttcggaacatccatctccatccagatgcgaagaatgcaagacacatgtcacttgtgtattctaccacgtcatagtgcaaaaaatgggataacacctaaaatcctaagtcaaaagtaagtaagtcataagtggcaaaccttaacctctaagtctgaactcgctctctctctctttctctctct

SEQ ID NO: 369078 - DNA, 535 bp, Cannabis indica
tttttgttagtggaggctatagccccccacatcaacactactaggtcactgaccataatataaagattagactaattaaaaatttcttttaaaacatattggtaaatttaccaaaagaaaattaagaagactgcatttcccaattttactgctcctacgtgcttcaatgtagctttatataacacaccattttgttgtgtgtactacaatgcatgacatattgtagcatatggacatctcactttttttcttttttattattttattgtatataatatatattattttctttttattattatttcagaaaatagtaaactaatacacttctatttattttggcattaaaaaaaaattaatttattttcttagtatattataattatttaatacattttataaacttttgagagatttaaaaaaaataataggccaaaaatattgtattttattaaaaaaaataatatgataataaaaataaatttttatgaaaatactggataaaagtttacaattttattgccacatggaattt

SEQ ID NO: 369079 - DNA, 1039 bp, Cannabis indica
aattattttcaaaatagaagaaagttttagtctatcaagctaaaaaaattgagttaaaaaaaaaagactaaaaaaaaaaaattaagaccacaagaggacaaaataagaaagctttgacatttataatttttttttttcaaaattgaagatgcttctagtatatcaagttttcgtcattaaaaaatagctaattaaatttttttttctctccgaacttcgacatgtatcaaatcataccctgaactcttttagccgttaaaaattcccctaaactattgagattgctagatttaatgacttttgtctaatttcattcaattttactgtttcagtgattgtttatgtactaaatcatgctccccagactttaatatctaccaaatcatgcccctcaaattttaatatgtactaaattatgccctctgagctttcattcattgttaattttttttactaaaattagacaaaagtccttaaatataacaatctcaatagttcaataggaatttttaatggccaaaaaaaattcaagaggcataatttagtacatgtcaaaattcggtggaaaaaaatcctaattagcctaaaaaaattaaaacaaaaattaaggcacaagagaacaaaataactttaccaaatctatatctcacactagctcataataaattaattaatagaccatgggaatgctaatttaacaagggtagttagatgtgtgcaaaaattaatatcatgtcttacatatatttaaatttccaattaactttaaattaaaatatataaaatttgttactaattagttgtgcaaactatcatatgtcgagcagaaatattttaatagggatttttttaagaaaaattaagtctttacatatatatttattcactacaaaaaatcttacttttagtcacaacaaaatttataattaaaagtaaaaaatctgtgactaattataaaatatcattcttatgttgtgactaaaaagtccgtggctaaatgtattagtcacataaattacaatttgttgtgactaaatgt

SEQ ID NO: 369080 - DNA, 636 bp, Cannabis indica
atattatttataaatttaataaatgaaaccatatttaaaattagaaaagaaattaaaaatatactgagaaagaaaacatttttcacattgcatgaaagtaaatagttcatcacattccattgaaaataaaaggtaattgaagtctacaaagctaatctcatttcaaagataactcattgtcctaagtctcagactcattggtggattttcatggtttttttcttgattgtccaagaatataatatcgaattctacttattttactttaataaatattataaaaaataactaatcaattatataatgacactttagaactgctctaacaacaaataatatatgattactggaaaaatataattgtgtagactaagggaaaagtaagaggttgatgttataagacacatcttctcaatatattttttgggatatgatttgtcccgtaatgtacttttacggaatgtattccgtagcacattagatgggtttcagggtacattaaatgagtgtcaggatacatttttattttttaaccctaattacccctagatcaatctcagccgtcagatcaaataatttcctcatctgacggctgacggctgtcgtacatcacgaattacaatccgtaaaagtaca

SEQ ID NO: 369081 - DNA, 588 bp, Cannabis indica
tgaatgtatatacctatagcaaattaaaattcgatcaatacctaaatatgtcgaacctcaataattagctcataacctacaatataatgcaatacaacaaaattaaaattttaattatttaattacttactagttatattaaaaaatataacaagttactagttactaaattctatagattaatttttgaaaaaaaaataatatatacatatatacatatataatcaattatatatcaaactaacataattttaaaaactttatttctaaactaattcaatccctactacctcattctcattcacaacagatctatacaatacaattacacaatttacacaaatagtacatacacaatatatatacacacaatatacataaacacatattcaataataaaacacaaaatatatacatatatattatatatcaagttaattaatatttaccttatgacaaaaataccggccacctatagcacacacacaatataatattaattaaatagaaaaatcccaaaaaacaaaatataaaagcaaatgtacattaaataaaatagaatacaaatcatatttataccttaatgga

SEQ ID NO: 369082 - DNA, 593 bp, Cannabis indica
aattttctataaaatccaatttttccccctcattcaaccctacatcaaaaattcaaaatttaaaaaccctctcagccgactctaccccttttcctctcaaaaattcaaaaatttcttcaccaaacttccaattctttcatctcaaatccaatttcttaatcccaatccatcctaaaacccaatttctttcatcaatatacactttccatcaaaaaataatccaaatactcatcaatttcaacccaaattcaaaaaaatatattggttcttcatcttcaacttcaaatattcaaagataatcaacattagaggtggagtaatacgtcttcaggtttgtaagtattcttttctattgaatttgaaaagttgcatgaaatattgagcattgtgtgtgattttggttcaaattagtgattgatgtaaggattgttaggtttatagtgtgatttgggattgtgaatgtaattgtgtgatttattggtgaattttcaatttttggggatatagaaaattaaggggaggtgctgcccaatttttttttttagaaaaaaaaaaataacaaaaaaaagaaaaaaaaataagaaaaaaaaaaa

SEQ ID NO: 369083 - DNA, 564 bp, Cannabis indica
cccatcggacccgatgctattttctatttttttaaaatttttttaatttattgaacctgggtccgttggtccccatgtgggtccgatggtcggaccaatcggaccccatcggacccgatggctttttgaaatttttttttaattttttaaaagtgagtccgatgctcctccatggggtccgatggtcggaccaatcggagccgacaacttttttttatttgttttttatttttttaattaattaattatttttgtaattatttattattttatgattaatttatgttatattgatttattaatatttgtaatattaattattcttttattaataattaataattaataattattattttagttaatgttttaagaattattttatttattattgagttatgaatttaattaattatttgtttattaattgttaattttttttattttttaatcaacgaaaatttaattaattattggtttattatgagttatgaattattgtattattttttatttttttattagtaattgttttaattattaataattaattatgaaatatta

SEQ ID NO: 369084 - DNA, 749 bp, Cannabis indica
aagcagtgggacagatgaaccacccgggataatagcaagtaaattgtcccatccacctctaactcccccacagtgcctctcaatcaactctttcaaaggtatactcatttcctcttccacagtgcaaggcttatttacatgcccagacacacaaaacaattttgtccctgagttattcttcctcccaaagctggcaaaccactctggtccacgccttaaaatggttggagaaacagctacagtttcaacatttgtaacagtggtagggcagccatataaacctgcattagctgggaaaggaggcttcaatcttggcttcccttgcttcccttcaaggctctccaaaagagctgtttcttcaccacaaatataagcaccagccccataatggatatgaacatcaaaatcgtaacccgacccgcaagcattctttcccaacaatccagctgcatatgcttcttttctggccttttcaaggtttaggcgctcattcacatactcacctctgatatagatgtaggcagcagtagccctcatacccacaccagcaattaagcaaccctccaacagtttgtgtggatcatgtctcataatttcccgatctttacaggttccaggttcactctcatcagcattgacaacaaggtaggaaggacgaccatctgaaactttcggcataaaagaccatttaaggccagatggaaaaccagcaccaccacgaccacgaaggccagactcttcatttcatt

SEQ ID NO: 369085 - DNA, 867 bp, Cannabis indica
tttttataattaatatgtccaagcttggcatgccacaaatccgtggtgttgttgatggctgaatgacaagtaaacacaggagttagggtataacaattatcattggatcgaaatccttgcaaaatacattgattatcatcattaagtacataacaatgatcactgtcaaatgagacagtatacccttggtcacaaatttgactaatgctaagtaaattagcccttagtccttcaactaacatcacatttttcaatctaggtaacccttcaaaattgagagttcccataccaacgacttttccagctaagccattaccaaaagtgacttccccacattgcataggccgaatgttaatcaaaaagtccttgtcacctgtcatatgtctagagcaaccactatcaaaataccacatttgagatgcagcacttttatcagaaaaaccagctagacaatttttcttaacccatttttgtttcaaacctttatgtttcttttgagatttttccaaattaccaaaataatttgttttaaacatattttgcaacgtgaaacatttaggtctgatatgtccttttctaccacaaaaatgacaagtaggaacaaatctttttacctgagatcttactctttttgtaaatcctggagattttgcggcagcagaaactgcttctgcaacgacaggttgtgaaactgttacagcagacttcacatttgcagcatcaggaagattcgttggaacactagattttacaaacttcgtgattccagaactttccataccatttgatccaatgcctgcaaaacctctttgacctgcattctgagctttttcaaaaataaagatccagggttaagcatttgaatat

SEQ ID NO: 369086 - DNA, 550 bp, Cannabis indica
tacattgtaagcaaaagaaaaatcttctctcgtacattaaggccctataaatagtgacttagcctcactatgaaagggatcgaaagaattgctttagagagagagatctaagagaattactcagagattcattgtaagagcttttagagagaaaagtacttcgttctttctctcgagttaatacaattcaagggaagtaagctagtacctcactcacggggccaaacctctttaaagtctagtgttctttattactttgttgttttgtctctgttttaattacactcttaatcgcttattaattgactttctatcgttggctaaaagcgagatcaacattttggtgctttcattgagagcaaaaacccaagttttctatttttcttaagttttaacaagcttacaagatggtgttgcaaactcttacaggcctggctgatcagggcgacccgatggtgacagatcctaacgtgcagacccttgggaacacgagaggaccaccaaggacaaaccccaaataggccaatacacagccacctactgtgggcca

SEQ ID NO: 369087 - DNA, 793 bp, Cannabis indica
aatccactaaaaatattaaagtataagaaaaagatagaaaagtaaaaatcctaaaatataaatgcaaaataaatcaaagaaaaaaactaaacaaattaaactagaaacaaaaacataaaatacaaattttgatattaaatttacaaaaatatcgcatattaaataccataaaaaaatttaaatgtaaaaaaatgctatagaaaagtgaaattataagtaccatactttttataattttcttatcaaatcttatgtatttttcacgaatatatttgtatgttttattttaaatgctcgttctcaaaagaaattggggttctgggcttaatgggctaagttttgtagttgtactgatgtaacttccatgatacattctaagacttctcatctaatcttattttttgttattttgaagcttttcaaaattttcaacagcaaaatgatctaatttttttatgtagaggaatttgaaaaagaagaagaagagaaaaaagttactacacgtgaatatatttatctatgtaagcatatgtgtaatgtttaaagataatagaaatttacaaaaatgcctaaattttgttaatttttatctttttaccgtatgatttacttttttatggattattttttaattatatttttacaaatacccgtcagaagctacataaaatcaactaggcatggcaaaaagattcattcattcggatcggattagtgatccgatctgacggatcattactgatccgaaacattcggatagttattggatcttggatcagatccgacccgcccc

SEQ ID NO: 369088 - DNA, 521 bp, Cannabis indica
aataacattatgtttggattaaacaatgtattgtattaattattacgaccaaattttttaatacaatatatgttgtattatttaatacataataaatagtttgtattagcttgtattataatatttacaaaagatttggagtcaacaccaatctctgacctgaacccggatcgggactcgaacccaggacccggatccggacccggacccggtatacccggtacccaaacccgtagttggtgttgggatcgagtgtattaaaaatatattataactttacacaatcaattaatataagtcaataccaaatattgtattgtattaaataatactaatacaatacaatacaatacaacacaatccaacacaatacaatataatacattacaatacggtgtaccaaacgagccctataactaataaatttattatataaagtatgattaattgattgaacaaacgtccaatttatattcaaattaagatttatatataaaaaaataattatttaattttgttga

SEQ ID NO: 369089 - DNA, 813 bp, Cannabis indica
ggaaaacgacaacattaaccatgaaaacgataatcgaagcgtgcattgcgtgcctacgtgtgaggagagctacacgtgtttgtcatgcaagttactcacttctatgtatcacatcgcatattgttgtgttggacggacacctcgtgttcatccgatccaatccgtacttttttggtcaaacaacatccaattcgtactaagtgcggatttcatattttagatccaattcgatccgtataagagtttaaatctaatccaatccaatccaatccgcaatagtgcggattggatcaattattttggatcggttatttttttcataataaattatttaatatttcatgaaaaaaaaaatttaaaaaaactatttatatacaaattaaaccaatatatatatatttatctttagatttacactaaaatatacactaattcaatatattacttaaaaaaaattaataaattagaagtttgtgttttttttttaattaatatatattatataatatattttttaaaatatatatataatttagtgcggattgaattggatcggttactttttgaggttcaaacaatatttaatctgcacaagtgcggattttagatttttcaatccaatccaatctgcacaagtgcagatatccgcatttttgcggattggattgaattgaatcatgtagattgaatttgatcgaatactttgtgaacacccctacctgcaattttttcctctataaatgttaaaaaggtcgtaagcattctataaaaatttaagttaagtacaatctcacatataagatggaatattgt

SEQ ID NO: 369090 - DNA, 839 bp, Cannabis indica
gaggcatcaaacaagctcgtttgtccacaaacaaggcttggggggggtaaagtgtttcccttgattttgcccaaagtacgtggacctggataaggatgacacgtggagctgagaggaccagtttttaaaaaaaatcatctaagtcttagataacagaggagtgtctctgggaaggtgcctcccagaggaggcatgagaaagatcttcacgctcccgaaggccaaggacatattaaggcagttccgggaggtactggactctattgaacaatcatctcgcatttaatgccgcatgggggaagacgtattaaaactaccataaacgatatgacagatggcgtaacccccatttctcagctattatgctatgattaatgaggctagtgacggctactttatgagaaatcacatcaatccataaggaataaaagattatatccacctaacccctaagatacctacagtataggtcatgtatttcctattttgtatctgctgggaatatgtgcccttgttaagcctgcacagaaagacaagtgattcattcctagggatcatcccaaaaaaacactataaataccccacaaacgcactgaggtaggggtcgaggattctgggtttagaggaatcaaagagagaaaataggagagaaattcaccaagaacattctctgtaataaatactctcattaataacaaagactcgtagactaaggctcattaatgtcccaaccacataaaaatctcatgcattaaacttcctacagcctttcctatatattatttaattggttgccgaaaatctcggtcaacaatacacttaaatactatatcttttttt

SEQ ID NO: 369091 - DNA, 693 bp, Cannabis indica
acttttccaactttggagtctttctcagtttgcagtctcaatatcaaggcagagaataatccaaatgtctcagacttctctctaagaaattcgacccaggtaaaccgagagtagtcatccaccaaaaccattacatatctttttccactgagactttcattctgcattggccccatcaagtccacatgcattagttccaacacgcgtgaagtgagaagtctattaattggaggatgaggtgtcttatgctattttccaagctgacatggtccacagattctctccttggacactttcatgtcaggaattccccttacagcttgaagcttcacaagtctttggagatctctgtagttcaagtgccctagcctgtagtgccataagtcaggtttgtccaagaaggtcctgttccacactatggtattgcatacagcatagcactggtctacagttctatttcctattaagacaacacacccatcagatgaaactaagcactgagttttagtaaaacttacagagaggttgtcgtcacacaattggccgatgctaatgaggttggctttgagtcctttcacatataggacgttcgttgactgagcactccattcacgttcacatcacctctttcagcaatctattctttgttaccatcgccaaaagtcacggatccccctgttgggttttatgccc

SEQ ID NO: 369092 - DNA, 517 bp, Cannabis indica
aataaccctaggctattagaccgttcctattagagtaataaccctaatcccggttactaaacaatcatacatatcattttcaatataagcgccactgcacatactctacgtgctagccactgtcttacctattgtcccgcaatagtagagattctgaatccccgggtgctcctgattaggtgctggtaatcctagtcacacaaatccgggattttcacaactagggttaacccctgatttcaagctcataaaatattttcatggcatttaaaattaagataatcacatagagctcgaaacgagctttccaacgatataaagaactcccaaatcgaagttcaaaatcaaaagttatgcatttcaaaagttgcactcaaagtgccctgaaaatcaagggcgagccgcgacatgcccaagccatgcagcgtcacctgggaaaaaacccaggttccaccaacaaggggcgggccgcggcatgctcagagcatgccgcggcacctgggtttcaaacccggaa

SEQ ID NO: 369093 - DNA, 669 bp, Cannabis indica
ttagagaaggggaaggacaagcgccggtcacccataccgcggtcacgatctcgcagtccgcgagggaagaactccaggggccgaagcccaagaagacgcagcccgcgaagacagcgaagtccgaagctggccaagtctcctccaaagaaggagtcctcgccaaaaaggaagggtggacctcgcttcgtcaattatactgaactcgcagtccctcgagaccatatctacgcaattgaagaaagaaacggagtcttcaagaagccgccccccatcaggggaaatcgcgacaggagggaccctaaaaaattctgtaagtaccacaaggacattggtcacactactttagaatgttgggtcttgcaggatgaaatagaggagctaatccggagagggaaattcgacaagtacaaaaagagcgaggaaagtcgtccccaagcggatgacaaaggagaaaaccagaatgcgagtggctccagaacacctcgcaatatcctgactataattggaggacctcacatcgcaggcgactctcgcaaatcacaagaacgatatgccagagaagccaaggagaagccgcttaccaatgtgaataatcttggtgagcggcccgagaagctctttaagaaagaatgcgacgacatcacctttatggagagtgatgcgagatgg

SEQ ID NO: 369094 - DNA, 1389 bp, Cannabis indica
ctgctcggggatgaacctctataaaattcttgtgtcttattattgttatattatatattcgttacgacatatcgtttattgcttatcaaaaagactcattatcgttggctaaaagcgaagtcaacattttggtgctttcatttagagaaggatcgcaaattgctctttttgacactcaacacgatggtgcaaactcgtagaggcctgttggactcagcaaattcacagatgcttgatccgacattacaggaaccagggagttcaaggggtccacctactgtcaattttggacagacatgaagcgtggtgaatggtgaaacagctcctgttactgaaactgcacctggtgtgcaagagactgggaataacagttctgcacatagccagggcattcataacacgactgttctgcttggagccaacactcagacgaccatcggagacgcaaccgaattgtaaaatctccatgccacgctcggactcatgcacagtcatagtgacactctgcatcatgattaggatgaactgcgtgccgcagtaaatctcgcgtttgacaaacaaaggcgtatgttcactgaatggagagataaagagatggaggaattaagggctcaccatgcagagatcaaagatcgtagtcggcaagctaccgtgctgatacgaagagcctacgaaactataggtcagcaaacgccgaacgtcattcccctgggagaaacggaggatgacccgacgatgaatacttcccagacaactaacggtcagccgcccaatccccagctacgagttccactcgtgaaccaagaggtaggcgagcagaccttgtttgggaaatcatcaggaggagacatacctgaccgatccaaacagaataatggtgttattccacctatcaaccaagcgaatcaatcgctaaggcaaccaggctcttctgtgtttgataggttgggaacaactcatgacctaaggaacaatctaaatagaagaaggggaataaacgagcagaatattccaacgatcgtgcagcctggagcccacactcaaatccccgctcagaaagacgctgatgtaatccaagctaaccaaaatgctgagcaagtcagcccagccgtacaggcctagcttgacgaattgaaaaatatgtttcatggcatggccagacagcgtaacaatgatcttgagttagaccgtgctcgcagaactcccttctcaccagagatcaatctcctgccactgcctcacaagttcaaaatgccaacgtggaagatgtatactgggagagaagatcctctttcccatctcaagtactttgagatgcaaatggatttacaaggagtacgaggggatgtatgctgcagaatctcctgctactctgtcggaagccgcaca

SEQ ID NO: 369095 - DNA, 698 bp, Cannabis indica
aattcaaaatttgttattttgttaaatattttttttttttttttgtaaaaagaggatactttattcaaaaaacaagcaagaaacaaccaaactaggcacaagccaacaaaaggcaaacgacagccaataaaccagcagccaccaaaacaagcaaaggactaccaattcttaattacattaagtaaatatgcattcccatggctccttttaaagggccatttactcgaaactctaagttgaacaatgtttctaacttccaaactaatacttttgggagaagcacaagtgaagtcaaaaaaacaacaatttctattagcccaaatctgataatagacggctgctgttaccatgttcaggaggcgttttcggaggtcacgcctcttgaaatcacgcctgtagctaagatcattgttcgagctcggccaactgtagtttccaagccaagagtttacttcttgttgaacctgcttagtgaagatccatctatagaaaatgtactcgtgagattcctcttcactatcgcacaccgagcataaggtactttatagcggcataaacttgctaagaaaataacgagtaagcagttgggtgttgatgatttgccaataaacaaatctatgttttgggagcagaaggttgtcccaaatgcctcttgagtattggactttaggcttctctacaagaaggttgtaaatacc

SEQ ID NO: 369096 - DNA, 595 bp, Cannabis indica
acgaagatctggctatcttcgttaatggttgctcatagacctcgtatttgagtaactcttagatttactgctcctcgtattattcatactttctcgatcatcactacgccgaggtctatcccctcctcgcgtatgtctttctgattgactgtgatcttgggatcttgaacgtcccaagctagaacttgcctcgtcctgcacagtccttctccttcaggagaggttagatgtacgcacccaactggggtaagtgtctgcctcctccctattagtgtgaaaaggatgctgaggatgcctcattggtaacccacttgccctaggtgtcacaagatttctctcgttattacgagagatctccttttccctagttctgggctgtcttatgttctcgttcctacgagaggattctattcccctggtttgtgaatccttagaatctccgaggtacctctcgacgaggtgcctgattgttcggttattcgtctcctagaacatccctagtttccccaggttgcttctgttgggattttatgccttaaattttactcatttcaatctaatctaatttgttatcaataaaagattagaagtcatt

SEQ ID NO: 369097 - DNA, 494 bp, Cannabis indica
taagtaaattattagttgaaaaacatgtatgattgactatgcaatataaattcataaattgtatgttgtgatagactcttgaagagattttgattatattatatatgattgaagattaaacttttatttctgttgcccctgattttgcccaatatacgtggaccaaccggatgatgacacgtggatggaaagggtttagtatttgaatgaaacaaccaagtcttcttaaagcgaaggattaccttagacatgcctcccggagaaggcatgtaagtctcgtatgctcctggagagcaagatggcagcatagcatctccgggaggtgtcaggtttcatctgaacagtcatctcgcatttaatgccgcatgggaggaggcgtattgaaactgccataagcagtaaagtctgacgacacaacccccaatctgtacctactaggctatgattaataaattctagtgacggctactctgtgaggaatcacatcagtcaaa

SEQ ID NO: 369098 - DNA, 854 bp, Cannabis indica
aacaactacccatactcagaatcgaatttcacctttaaagcgccaagcttgagttctaaaactcaaagcttgatcaaacaacaaactacctaccaaaacatgcttaaatcaacataacttaacatattttaacttcaaaaacaaagataaacacctgtaacaacaacagcaaccaattcctcaaaagatgcatgcataatcaattattttacaattcaagaaataaaaaaagagttgtaaagaggttaccttggcttggatttaacttaaagctgctggaattagcaaggatttgaagaataaaaatcaaaaccctagctgatctagggggttcgaaaatgagagagagaatttgagagtttaaggcttcctttccaagtttttcttatttttgaatatatgaaataaaactttgttttattaaatatctcagcccatttatttaataaaaatctaattttattaattaataacaaaccactaaatcaacaaactaatggggaaaaatgaccattttgcccctcccacactaaaagtcataaaatggcacttaggggaattttgggaaattccaaaatcccaactattcccgacatttccaatgcctaaattattgccccgctatactaaaaatactaggatgtgattctaatagccaaacattgcgttccaatgttgccggatacaaatcatgcacaaattatgaaatttctatatgtgacataaaaatacattccgaattcaaataaatcatcataaataattaattcaatactaataaataaatttcataattaaaccctaattatctgctaattcaaaattaaagtaaggcggtctttacatagagtata

SEQ ID NO: 369099 - DNA, 579 bp, Cannabis indica
ataaaactaatatttacgtggtttgtcacgtaactctcatctagtatacatatatatgtacacaccgaaattaagaaaatatcataccgacaagaatagtattcaatcatcagattaaaatataccatatagatcaaaatctaattgcaaaatctccaaatttcataattaacaaaatcattggatgttcaatcaatttagcaaaagatggctctggtaccaattgttaggatttataaaacactcaagaaatataaatatcatggatctaaatatattcttaaaagtgctttaatatagaaaaccctaaatcacaaatctatagaatttttgctaaattaaagaagaagaagatgataaaagatgagcggaagcactaacctgaaaccattgttggagattgcagagaaagttttgatcttccaagaatacattattttattaggtattttctctgatgaggaaggagagaatacagaaactctagtgtttcttggggatcattacctatttataggctcattaaataatgagttttaggtatttataatttggcccctcaaaaaattataaattaac

SEQ ID NO: 369100 - DNA, 654 bp, Cannabis indica
ttcgatatttataagtcttctagtcaagccgatattgagaatacatgcaatatggttgagtcttgtactcaagataaaaagaaactaaaggaggagttttcaataggtcaacaagtgttggtgattcattcaaaattcaaatctttgacaagtaacgttatctcaagatggaaaaatccttttaaagtcaaagagttacttccttgtggccttgtaagtattaaaagtgagaaaggtgatattctaaaggttcacaagtgtaagctgaaggcatgcactgatgagctcctttgaccatatcaaccacctaggggtaatgatgatgatccccctactactgatggtggtgatacaactatggacctgtagtcctagcttctctggtgtgttttctctcctttaattttattgcacagtggggacactgtttattttaagtttggggatgggaaggcaattttcatgtttttaatttttttcattttttttttcattattttggtttttatgggtatatttaaggttatttttattattgttggatgactatatcaacgttaacttatgacctatgagaattcgatgatgaaattatgctaaactctttgacattatttagtatgtgtgaaaaactttggattgtgtgcttaacct

SEQ ID NO: 369101 - DNA, 687 bp, Cannabis indica
tacacggagttaacagactcccaagaacgtgtgtactttgccactaggcaaaatacacactaccgcagaccacctcctctgtacaaggatagttcccggagggaccccaacaagagatgcgagtaccataatgacattgggcacaacaccaatgaatgcaaaaatctcaaagatgagattggaaacttaattcgattggacacctctacgagtggatcaagaatctgttgcctcatctcaacccgggtcaggcggctggagttttgccacagggagcaccagggggtgcgacaggagtattggctccagttgttcctcccggagatgcccagcatatccccggcctgccacccagacctaacggaagagtgaccatgatctcgggaggaccccatatcggaggaactacccgcaaggaactgaagcggtatgcaggggccatgaaacacaatgaggtttgggaagttactcaactcccagctcaaaggccccggctgatggatcaacccatcacattcacggaagaagacgctaagacggtgcgttttccccaccatgacccgttggtcatagagacccccattgccaataaagtggtggccagagtcctgatcgacaacatgagttccgtgaatttgcttttcaaagaggcctttgctgcaataggcctgacggaccgagacctct

SEQ ID NO: 369102 - DNA, 640 bp, Cannabis indica
catgtcccaccaaactaaagcgtcttcttgaaattggaaagtggcatagaccactctatcatttcagtgacgcccataaaattcaggatcctggagatcacagttagccattgcccgactttcataacatctggacctcctagaaaaactagaggtgcttgcttacggaacctttcatacagagattccatccggttcattgcaaccaccggttcggcctgcacagcagcgtcaggagctaccaatatctctggtgcaggaactgcaggaacaccctggtgtcttaattgcggaatcacttcctcttgttcattgattttagtttgaatttctgcaaacctattttcccaattctgggcatcttgagcagcttgggcaacctgtggcgggttagcatcaccccgaccacgtgccctgcgcctgagacctctaccacgaccatggacatttggggaaatctgagctccctgaccttcatttgatccaacggagttaccctagctcctggtgtttcgcctggtgtccatactaatctgaacagcctgcgtaaccaagagctagtctggtcagatcatgatcaaagagaaacttactaataccgcttatttagaaattataaacatgcacctattctactatc

SEQ ID NO: 369103 - DNA, 584 bp, Cannabis indica
cagattctaattttgggtgcaagttctaggtctgggttcggttttgttcttcgtctgggttctggtcatagtcttagtcccagatctagacaccgcctaccggtctattccaggccccattacccgaatctcgagtcaagatcaagatcactatcacgggtctcagtctggttctggttcagggcccaggtcccatttccaagtttgggttcggaatcgagaatggggtgcggttctaggtctcgaccctagttctgtttccctagtctgattccatgtttgggtttgagtttacgttcgggttcaggtcccaagtctatgtttgggtttggatccaggtccggcttcctattcgggtgtaggtcggatttagagttctggtcctggtctggttacggttctggattttggtccaattttagttatgattccaagtcaaagtcttagttcaagtcccggtcaacgtccggttttggttccaattttgggtcacggtctggttacggttctggattttggtccaatttaggttcgggtcccgagtcaaggttagggtttggatccgggtcctgctcccaattcgg

SEQ ID NO: 369104 - DNA, 703 bp, Cannabis indica
gatgttatgataaaactagttatattttatgtatctgttcatgttagaaattatcttaaagttaattatattaaaaaataaaattattgaaaactaagctcatggtcttatatttttaccattttaaaaaatataggatctattttgtcatttaacaaaacagatagtctaattaataacttttataaaataaaaggtctaaaataatatttaaccataattattataccttaactaattgggagtgctaccattcctaatccaattggaatgtacatagttaacaagaaataaatgagtttgagacaatattgattttaaaagttggttttaacttttgaagctctaaaaatatttttactgttgcttggggtaattattaaattttagctttaaagtctagtaattttttttttaacagaaatcaattttaataattttctcaataaaagtttattgagaagttaaaagtagaaacccaactcaactgggccaaaagaataaagtaaactataatttagtcatatgtactgcttgtgttttgacaggttagttctcaaattttattgggaggtaaattgattcaaaaattatataagttttgacaacctgatcatcaaatttttttttttttttttggcaacttagcccctaatttttaattttcttgaaacataaagtcttcattttttttttttttttt

SEQ ID NO: 369105 - DNA, 592 bp, Cannabis indica
gagatgactttcttgaagtccgcgcccgtcctcaaccgcaagccaaaaagtggaacagcgacgacatcgcccgtcattactcagaagaggaagagtgacgttataactactcctaccgcggattcctccaagaagctggctaagatcgcgcaagacaaagggaagaaagtcatgatcgagccaactatccgagcctgcgattttttggctatgcaagagaagttcatgggcgaggagttcatatccaaggcggagaggatcccttctgaagagcttgttctgcgctctgtggagttggctttgcagtcgatgaccctgttcatgaaagacgttgccgctggttctaaggaagctgaactgctgaagaggcaaaatgcccagctccaggagagcataaagaaactaaaacaagacgcggctgataaggacagggagcttgaagacctttgcaagtctaaggagcaggtcgagctcgaggccaagaactctcaaatgaagatcgaggagatgtctcgggacttagaggtcgagaaggagaatgggaagaaacagtatgaccaggcagtttctgactatatttacaccactcttt

SEQ ID NO: 369106 - DNA, 558 bp, Cannabis indica
aaaaggaaattagatgattgtttttcatatgataattttgttaagcccatacccaaataggggaagagtactgctaagaagaaatctaatatcgttaaagcagaggaaattgaaggaagtcctattgttgttcgttaaaaggggaagaatcaaaattctcgttttattgaggtttgatatgacatacaactttaaatcaactgttatgcaactatttaaaaatcaatatgcacaatgtattaaagaaaacatttctccctgtatgagttctaaaaaatttaaaaaagtcaaataaattttcttttaacatataattgcttggatgtagaagaataggcttagattgtcctttatctgaacggttggtaaccttctttcacttaatatttcagttacaattgagtgttttctttattgcattccagcacttgtttcaatttgtgtataagttcttcatattttcaatccattgacactactacaatgttagcctttagaggcagttttttcaaccccatttataaaaatggaagctaaagggtgtgaaaatacccgcta

SEQ ID NO: 369107 - DNA, 678 bp, Cannabis indica
tctaaatatatttaaaaatctaagaattaagttaacgctaattataatctaaatacatttacaaatctatgtagtaacgatatatgtatatgtatagacactgactacacggtactattgttgctccgcttctgctttcaagtaatgaatccaccgatcacgcataatatttatctcatcattagtgtacggagtagagaacctatcatgtcaggtcaacatttgtattggatcttctatgaccatgaaactgtcaatgaatttcatgacgtagtatccacactgtttgtcattgggttgttgaggacaaataggagtcatccactgagtaggtcgatcaggtcctcctaccatttggttatacatggtgaacatgttagaatatgtgccctaaataaaatccatttcaatataatcaaatttactagttaataaagatcagaaataacattttaatgttgcatggttcacatgatttattttatgattattttttaatgtataaattctattaagtccagaacatatttatttgtacatgattatagtgttgtcagcacagtggaatataatcatatttatatgttcgaaagttttaattccctgatttttcaattcaccggatttagactgacatggtaatcagcgataggtattcttacaccttggataagtgtt

SEQ ID NO: 369108 - DNA, 975 bp, Cannabis indica
gaatgtttcaaaatccttagaaatacaacctaatacttaatcccttaaactgctcctttggagtgagctcgagtaagtttcttggttttattgttaatgctcgaggtatcgaagccaatgcagagaaaattcaagccctcctggatatgaaattgcaaacaaaaactaaagaagtccaaagctcaactggtcggatagctactctctgcagatttgttttaaagtcagtagacaagtgtgttcctttcttcaacatccatcgaggttataagaaatttgaatggacggaggaatgcgagaatgccttttaagaaataaaaagacaacttgcgaaacctcatgtactgtcaaaacccttggacaaagaagagttgggaatatacttagctgttaaagaatatgttgtaagtgtcatgttgatcaaagacgaaacaaacgtccaacatccagtctattatatcaaaaagcaactcattgaagctgatctacgacacccattgatagaaaagcttacttactgcctaatcttagcaacaaggaatttaaggccctacgtcaaggctcatcctgtttgggtatacactgaccaaccattacgccaagtattacaaaaacatgacacttctggatggttactcaaatgggtagtagagttgggttagtgagaaataatccttcaaccctgaatagcagtcaaaggacaggctttggcaaactttgtagttgagtgcacgggcaaataaaaaagtagtccaaaggacaacccaaagccagtacaagaattctagagaaacaataatgaagacagacctacttggaaattatacgtggactggtcactgacaaatcaactatctggtgcaggaattgcccttgtcacacctaaggggcaacacctgcatgtggcagtcaaattatgattcaaagcttccaacaatgaagcagagtcgaagccctcattgctggcctaaaact

SEQ ID NO: 369109 - DNA, 1277 bp, Cannabis indica
aatcacgtaatacgcctatgttagttagggtgttacacagtcttaggtgttggccagctcttgaccgcttcgatctttgtaggatccacctccactccatctttggaaactatatgtcctaggaatgccaccttctctaaccagaattcacatttcttgaatttggcatatagttggttctccttaagtcggcttagagtcatcctcaggtgttcctcatgttcctccacagttttggagtagataagaatgtcatcaatgaatacaacaacaaacttatctaggtactccttgaacaccctattcatcatatccatgaaggctgctggggcgttagttagtccgaaagacattactaagaactcatagtgtccataccgtgttctgaatgctgtcttgggtatgtcttccttccggaccttcagctggtgatacccagatcttagatctatctttgagaacacagccgagccttgcaattgatcaaagagatcgtcaatccttggcaaaggatacttattcttgatggtcaccttgttgagctcacggtagtctacgcacatcctcatacttccatctttcttcttgacaaagagtaccggcgcaccccaaggtgagtaactcggtctaatgaaccctttgtctaagagctcctgtagttgtattttaagctcttttaactcattaggtgccattctgtatggagcctttgaaattggattagtccctggggctaattcgatgatgaactccacctctctgtctggaggtagtcccggtagatcttctggaaagacctctggaaattcacagactatgtgcacattctccacatttagttgcgtctctattgctcgatccactacgctgaccaagaatgccatgcatcccgccttcattagctgactagcttttagggaagagattaatggagtcctaagggccagcttgtcgcccttgaaaataaaccgatccccagcctttgtttcaaaaacgaccagtttctttcggcaattgattgtcgcaccgtgactagatagccaatccatcccaagtgcagcgtcatgatccttcatttccagttctatcaagtaattcgtcagttgtcttttattgagtttcgtatatcccaatatgggtgctacaatccttcgtcgttccttcccctctaatggattagagcctccttcaaatgtcgatgttttttttatctttcatatgatggctcaaagcggtgtgttggctgttgaactgaattcctcgtgctttactgctta

SEQ ID NO: 369110 - DNA, 771 bp, Cannabis indica
ttattagtgtgtccgtccctgccctacaccaactcaagattcaattaaaacgacagggacaaaattgtctaagaaaaatcaattaaagaaaagatccaaacgacaaagaaacttgtcgtttcctcctgcatgacaaatcgtttacacaaaacgatttgtcgttcttcctcgaacaaaaccaagtgcaaccagagctaaccctagctcacttttcactacgaaccttcgagagttcctcaaactctctatttctctctggttctcaaaccctagaaccagagatcttcctcaatctacagatcgatcttacccagaatccatgatcaatcaacaccataaatgactgtgggagtggcgagtgggacgatggtcgggtgctaagtgactgtgtgtgtcgtgtgactgtgtgtgatttacagtaatgaagaatgaagaaagatgaagattgaagaaaaaaaaagataaatactaatagtaatagattaaaatttagaatatgaatagcctagtattcattgattggtcgattgatacatttattaatgtattgaaagttgaacatatttaaaaatttaaatgtacattcctatggaaatgataatgaatagttgaataatgaagtctggtggtggaatacgaaaggaatagaagagcaagagtcagatattattattaatgtattaatttttaataaaaaaaacacagtttttaatttaaattttcgggttacgggttctaacccgaccaccgaaattatgtaatatgtgaccc

SEQ ID NO: 369111 - DNA, 548 bp, Cannabis indica
tagcactcctgagattgaacctagacatgtcaagattaagatctttttgatctaagatcaaccagtgatattgacttagaaagatacaacgataagattataatatctttagcaagattaatatcggtccttgtccaatgtatactccatacatccaatactagcatactttgtcaatgttctggaaataacataacacttatccaaggtgtaagtatactttattgctgattatcacatccgtgtaaatccagtgcactgatgaatcagggacattatcttttgaagcatataatcacaattacattccactgtgttgacatcactataattttgaataactatatgttctggacttaacagattttgtacacattaaaccataaacatgaaaacatacatgcaaacatcatatgacttataatcttttattgataacaaatcagattagattgaaatgagttttatttagggcataaaatcccaacaaactcccacttgcgctaacataaaacaagtagtgcatttcaatcaatcaattgtcttga

SEQ ID NO: 369112 - DNA, 609 bp, Cannabis indica
ttattttatttcatatttgttatatatattatatatataaaaaataataaaaggaaaaaaataaactaatataattatgcctagtcaatagtatatgttagatcgatttacttttgttttatttttttaagtaaaaaaaaaaattattttcatgaataggcaaaaaaaaaaaaactaattgatttaacatatatatacatatttgattagagagaaatttgaaaactatttaagggaatgtaaaaaaaataaaaacacgaatatttttttaaaagaatgatatgaagcaaaaaaaaatgaaagaaaataataaaaaaattggtaaaaaatttatgaaaagaaatatttttccattttttataaagtaaatagccaatatttattataaaagaaattaaaagaatgatttattgtggtacatattatctattaaaaaataaaattttaataaaaaaaattatataatttaattaagtttttttattgtctaaataacaaacaaacaagttaataaaatcacacattttaattatctgtaaaaataaatagattaattattagtttgaaaaaaataaaaaaaaaataaatgagatgactcattttaattat

SEQ ID NO: 369113 - DNA, 819 bp, Cannabis indica
tatatatatatgcattatagaagtacaaacaaacaactactactttatatgattggccaacctgcaaaaccttctttctgtctcaccaaaaacaagtatatgtatatatacccaacttattttcccaattctatcacttacctttaaaaacccttagctgtgaaatactcaagtttacagctcattatattattttcagcatttatatacatataaatattatataaaaaaaaactattatataccctttttcttttaaaactttttaataattattaggtccttttgttctatcttacttttctttttgtgccatgtaatctcttctttaatttgctgtaaaagaagccatttttattgggaatttatttttcattttattaattcaacaatttgcttgtaacttttcctagacagcatcttaatttcttgtacaaaattaacttaaaacattattttatacatgtagtgctacttaaattaatatatatatatatatgctattatttttttttggaaaatttaatttaatttttacaattatggattaaataattttgctaccaaaatattttttctgataatggattattagatatagacgtattatttcaaaaattgatgtagtggtactggtaacacaattaccatcatatagcttactaaagtagaaaaattgatagtagtaatcggttattataccaataaattttctaatacaactaattcgaccgattatttttaaaaattgaatatatgagtacttatagttacctactactcaatttctaaataataaaaaaataagtgaaaaaaata

SEQ ID NO: 369114 - DNA, 1347 bp, Cannabis indica
aagacttgtgacttaggacccgttactcgagacctagaccagaacctagacccgtacaagaactcagacccagaccaaaacctagaccaagacacaaactgaaacccaaactaagacccaaacctagacctagacccggacccaaacctggactagtactataactcgtactcgaacccaggattgggacccggactgagatcaggactgggacccaaacccgtactaggaccgagacctgaacctcgattaggactagaactcagactaggaccgggactgagacttgggaccaggactgggacctgggaccaggactgggacctaggaccaggactgggacctaggacccgatactcagacctgggacctgagaaccgaaccgtgaactagactcaaactaggccaagacccgagacaaggaccattactgaacacagaccaggacctacacgcgaccctaaccaagatcaggaactaccactttgacttgaatcggcgaccaagacccatgacttggacctaagatccgaaccaggacctaagacatgagctagaacagcaccatgatctagattttgacccgagacaggacccaagacctgaggctcggaccagacccatagtcggtgtctaaattagggaattcgacctggacctggacctagacccggaccaaaaccagaacccataccagaactcgaaatagactcgacatgtggttggtgtttggattggggaccaagactcagacctaaaccaaaacacggacctagacccaaaccaggactcggaccaagaccaacacccaaaccttaaatcgtaccttgtgacccgaaatttgaacactaaaccctaaaccttaaaccctaaaccctaaactctttacagttacccctaagacctaacccctaaatcctaaaccctaaattcctaaatactaaacccaaaaacctaaaccctaaaccctaacctggacacaggcctagaacaatacccataccgagattggaacccaagacccagatccaaacccaaacctagacctaaactcaggacctaaacctggacccaaacccagaccagaacctggtctgagatctagaccttgagtgggtcctggatcgtgtccccgacccggacccgaatagggacttggactcagatcgagacccgaacccgactcaaacttgaacccatactgggacctagactcagacccaaacttgggagccaaactcgaacctgaacttggaccttgactgggacctaggatccggacatagatgggggacatgggccccaaacccgaacctggacccagatctggaccaaggatcaagacct

SEQ ID NO: 369115 - DNA, 500 bp, Cannabis indica
aaaaccagcagcaaaccttcgaattttaacccaaaaactcaatctttcattgccaatttcacaaccaaaacacaaatttgcacataggattaatagcacatactaaatactcatttatcacatgacatgcatcaaaatcccagaattcaaattgctcaaaaacacccaatatcatgcttaagattaacaaaacctaagctcaaactcaagaacttcaaaaccaagttcttcaagtcaaaaccagcaattagacattaaatttcacacctgaaatttcaacctagaattaccaataatctcagcccaactcattaacaagcatacaacaattctaaactcaaatccaatccaagatagctccaaattacccaatcatgaagcaagaacaacctaacccatgcataaccaaaattaagaaacttaaacatgtttctatcacaatattcagccaagaaacatgaattaaaaatcaagaaaactacctcaaatacttgcacaac

SEQ ID NO: 369116 - DNA, 560 bp, Cannabis indica
actagaaacaaagagtgaaaactaaccgaaaaatatgacccgaaacttagactaattttagcctaacaaatttccccaaactagattcttactcgccctcgagcaagataaaaaaaaaataaatactactaaatactaatttactaactatgctatgagataatcacaatactactgtctcatgtgttgttctcttccattgctcaaactagaatttgaattccactaactctaacaattaatttagatgctcaatttgtcacacactgcataaacacaagatgactttacaatcgaaacaatgttataatggttttactctttctaaccattccacaacccgatagctcataagcttgcatgcttacatctctccactaatgttgacaacatcctttcggaatcaatacgactttttgaggtttagaaagtatggcttagatatttggaaaatgaaaaacaattttggctaaagatatcataagcacaaaaataacccacaagcttcttctaattttcaaatttcccaaagtgttcccacaactaaccatgattgagaa

SEQ ID NO: 369117 - DNA, 689 bp, Cannabis indica
aaagcctaaggaagtacaggcccggaaaggaagaatggcggcacttaacagatttattttgaagtcaactaataaatgtctgccgttcttaaacatattgtgaggcaaccaaaagttcgagtggacaaaagagtgcgaagacgccttccagagcataaaaaggcatctcgcaatgcctccactttttgcaaaaccaataactggagagacgttatttctttatttagccatctcaaaagatgcaattagtgcacctatagtgcgagaagagggcaagcaccagtaacctaagtactacgtaagtaaaaggttactaggggcagaatccaggtatccccctctagaaaaacttgcgttatgccaagtccatgcatatcgcaaactacggccatatttccaggctcaccccataaaagtgttaaccgatcagcccttaagataagttttatcaaaaccagatgtttctagaagattgataaaatggttgattaaactggggcagttcgacataacataccatcctcgaacatccatcaagggtcaagctttagctgacttcttgatagaaggtataactccagaagaaatccctcatggtcagtgagacgcggaaacctggaagttatatgtggatggtgcatccaacgaacagggttcaggtgcaacggtgatattaatatcgccggaag

SEQ ID NO: 369118 - DNA, 725 bp, Cannabis indica
tgatggagagtacttcaaaattgactggatagtcaacatggtatataaggagaccattgaaattttgagaaaagattactttattaagcaattatggaaaggcatactcacccagaatggggaaaagcttatgatttgagatgcaatttaatagacatgtatttgagtgattgatgaatgttggatcacaaagtaggttgtttattaaacaacgaactgtataattgagtgtaaaataagttttagagtgattaaccaagtatgaagatagtgatgattgcaagagaacactggtggcgtatgaactagggagcaaaaccttagttgtaatgacaggaaaagtatacgagggtcttagatgttgatgaattagcatcatcaacaaggggctcactataagttggcatagtagttcataccaaggggttctcaataagataaagaatatacgtgaatgaagtatgtatatttctggatgtgtttgaaaagattatcaagatttttaccaaacatagaaaagaaacttcaggatcaaggaatgatgtttaattaattgttattagttgagaattaaaaaaacaggtaattccaggttagttataggtacctggtatgagcaatattgcctctaccgtataggttacattaattcactttataacggtagttaactgtaagtgattgagaaattttaagttgtgccagttcaagagaaattgatgcaa

SEQ ID NO: 369119 - DNA, 627 bp, Cannabis indica
aatcgagatacccacctctagaaaaacttgcactatgcttaattcatgcatcttgcaagttgcggccatcttttcaggcacatccaattaaagtcttaacgaatcaatcattaagacacgtcttataaaatcctgatgctttaggaagattgataaaatggttgattgaattgggacaatttgacataacttatcacccgagagtattaatcaaagaacaagctttggctgactttttaatagaaggaataaactccgaagaagaccttgatgttgaacgcggggcagaaacatggaaactatatgttgatggggcttcaaatgagaatggctcgggggcaggagttatagtgatgtcaccagaaaactacaaattccactatgcactgagatttcagtttgatacttcaaataacaaggtagaatatgaggccttattagcatgtttaaaaatagctgaggcactaaaagtcaaaaacattacgtgctatagtgactcatagctaattgtgaaccaagtcttgggagaataccaagcgaaaggcctaaaaagggctaaatatttagagaaagtttgaaaaaacttagaaaagattgattatttaaaattgaacaaattccaagaga

SEQ ID NO: 369120 - DNA, 584 bp, Cannabis indica
catttagactatcccaggtctttaagaggcaatatgtcttctgtacctgggaaactgagataaggtaaggtggacttctacttatctcttagtcttgacttcttcccgattcaatgaagcttcttcatgataggagtgtagtgggggatttcaattagcaagattatgaggttaatatattcctttatatgccacatgtcacttgttaggaaccacagataacatttacccccaagctttcgggactctttgagttgcgagagcttggagtcttcttccaactcttggagataggtcttggacacatgttgattgttgggatcacggatgtatcctttgagctatcatcaattaaatgactaaaaattaaaagtaccatggatgtggcatgcatgtggcacctttaatacatttgttgatggcacgcgcatgcaaggggcacatctcttggaatatgctataataatagcagttcgattgaaatgacctctcttttaaatgagcacgatacttgaggcatgtaatgcaaaaaataagtgccatgggcaagttttaaaactgcctatctttttaaacttcccatc

SEQ ID NO: 369121 - DNA, 535 bp, Cannabis indica
ataattactaagagtttaatttcttatttatcatgaaattaataaatatgattatttaattgatgagattcaataaataatctaatttattggagtttagtatataggtccacggccccagattgccatcttgcaacattgttaagcgtatatataaagctaaataatgatgttcataaaatttattttgaattagaaaatagtatttatttattttgtaataataatttatttaaatttattatttaaataaattgaggagaccaagtattgtcaagacaaagacatcactattgtatagttaagacaattatgacgcctgacactatgtaataacacagtaataggcatttatggataagatgagtctcattaaattgtttttagattaattaattaatttaaaagataaatatttatttaaacttaaatttaaaaaatagttacaaatattaatataatagagatattttctccaagtaaatgagatattctcagtagctgtaaaatatagttgtacttatatatatatata

SEQ ID NO: 369122 - DNA, 511 bp, Cannabis indica
agagaatcacattatttaagtattaaagacgtacgaatggtcagttacatgtctaatttattataaaactagtaaatattccacgcgcgaatgtataaaatattttaaactatatataaaaaaaataaattatttatttaaattaataataattacttaataaaatcatattaaaattttaactttattcttaaaaaatttgtgacataaatacttaaaattttaaatttgttgctaataaataccgaaattaaaaaaatagtaacataaatcttcatttatggtttaatttttattctgatgtgtgtgttaagttctgtgttcaaattttattgtgtctatttttaatatttgagttttagtgttttattgaggttctaatatttgagtttgtatttatgtgatcattttttatttatttgtttatttatttttataaattttgagaacttaaaatttgatgttgtttctattgattattagggttgaaagtttgatttttcatacggga

SEQ ID NO: 369123 - DNA, 602 bp, Cannabis indica
tattaataattaattcaagatgaactttccaaagtattagtattttttaaattttaaaatgaaaattaaaattataaaatatagcttaagaaattataactaaggttataaactggtaaaggttgtgttggaggttaaggtttttgctctagagagaaatttgttagattaaattttggtaggattatttagctaaaattaatcaattataattaacgttttctaatcagaatattctgttaacattttgatagaaaaataaataatagcattaaatcaagaattctgttgcatagccacattttatataaaaaaagatatattttaaaaaacaagtcacccaataatttctcataaacaaagaatttgccacattttatatattcagatgtggaggcaaataatcataacctgatcgagccaaaaaaaataaatagaaaaattctttagcaaaatatatataatatataaacagtagtaaattcttatttagaataaaatccaactaaataatgtaagtatatttagaaaagccaatcatagatgtacaacagtaaaaacccaatcgtatttttttttatttaatgggatttcttttattt

SEQ ID NO: 369124 - DNA, 637 bp, Cannabis indica
ctctcccaatctgccaattttttcaaagtctcgcaaatctgaccgtacaccgtatacttttttattttattcataccctttgtcctcttctgtattttactttttactccattgcttctgtgagacataataatttggtgggaaaaaagaataaaggagtattgccataacacaatctctaatgttaggatgttaaaatttttactatcacttaaaaatatattatttacattatcaaaaaaaaaatattattcattttatttttttatattatttgtagtactttttatttaataaaattcaataaacatctcttcaaattattaaaataatattatattcttaatatatataataataattcaataaacatcttttaatatatataataaattttctctctatataataaaataatattaataaaaaagatataatagatgttatgacatgatattcttgtgtggtattctttatttttgtttttgtgttaaatatcaacttcattaaattaatatttgagtacaaaatattgagcatagcagctggagcattagacacaaaaatactacgactagagaaggaccgtgacatcctagcaacaacatgtgctagacggtttgctgatcgtttaaca

SEQ ID NO: 369125 - DNA, 677 bp, Cannabis indica
tcaggaaccagccggttcatgtagtgggcaagcatctctttcccttcttggcctctggaagcaccgacaaaggtggagtaggtgcccgcacctgttcaggttcacttttgacaagctcagacccaccctttggtggttcagacctgtgcaagcttcctccccgagactccttggacttagcagcttttggggtagaggggtttgcagcagttagctacttggaaagatcaatgacctccccaacaggcctcctttcctgagaagaggacccctcaccgcctttagccttcttggccggaggagaggcgctagagcttccgcccattctcttcttcagagcgtcaagcatctgccgaaacatgtctgtacagaacaaaaaacaacatgtttagaaaaaatagacattggaaacataaggcataatagtcaagaagataaaaaacaagacaaagtagtatgcaaggtgactgcccaaacaagactcgaaagtgcatcatcacttgacattgctctcacttaagacataacaactttctctttaccaaacacgagaggggatggccgagcaggtgaaatgggctcccttatgcgaatggcatgttcaataggcctgggcaacccgaaagtttcttcttcctcttgagcggagtcacatgctcttcctcaacctcatcttt

SEQ ID NO: 369126 - DNA, 621 bp, Cannabis indica
ataccctaaatatctcaaaaaataggaaaaaccagtgttccaaaaactcccccaaccagcagaccggttcccaaccggaagtccggttctgggtcaccaaccggtcgaccggttgctacaggttcctcagaactggaattccagttctgtgctgggaacctaaaaaattctccccatgacctcaaaatccaaccaaactctaccaaaatttccagtatacctgtacaatgcatttacaacataatccaaccaaaaagtcacagaaaaaaccaatgaatcaaaggatgccattaaagcccaaaccttgagcttcagagctcaagcttgctcaataccctcaccacagctcaaagctaataaccagagctcaaaattaactcaaaatagacttagaatttgaaccctaagcataccttaacctaacagccacaatttctcaaaatcacaagttcaaactaagtaataagcttatcaacacataaacaagagttctagggttacctccacttcaagagcacttaatctttagcttaattctagaaaattgatgatgaaaagaggtgatctcctctggtttttgccccagccgaaaaagaggaagagagagagagttctatgttt

SEQ ID NO: 369127 - DNA, 739 bp, Cannabis indica
ctctacagagataaaatgtgaaaaatctacacagatcacaaaagtctcaaaatatttttttcacttagaaggattttgaacatgagacgaagacagttgttagataagtcaaagattatgactgtgaaagttttttatcacctcgagaacccttatgtggtggcggatgcccctagtagaaaaggcctggacaagttttcagtacaaccatgatctctcctcagctagcaattgatatggttaagtcaggtagttggcaaactcaatcaccttattcttcaattagatttattcaaaagaatcagaaatgctcaattggtagatccagaattagtaaaaactcgggatgatatcttagctggtcaagctaaggacttctcattgttagacaattaatgttactttataaaactcaaatttgcgttccaagcagtattgagcttaaaaaagaaatcttagatgatgttcatacaactccctattcgttatatctcgataccaccaagatgtacaaggatttgaaaccttattatcaatggtgcggtatgaagaaggatgtggtaaattatatattcagatgcttgacttgtcagcagatcaaggataaacaacagaggcctacagggttgttacaacctttgcgactccttgagtggaaatgggaggatattactatagacttcgtggttggtttacctagaaccactagtatgttcaattccatatgggttattgttga

SEQ ID NO: 369128 - DNA, 361 bp, Cannabis indica
aaatacaaggtccattttgtcatttaacaaaacagagggtccaatcgacaacttttgcaaaacacagggtccaaaatggtatttcccaaaaaaaaaaatgcactaatgaactctctatactttattaatttcgcattcagaaaaaattttagtccaatttttttaatattcgtgtacgttttatttatttaagacatctttcataaaataaaataattatgcatgcaacagattatttgaacccaatttttgacatgttaaattttttaaaatttttcaaaattttataagatgttttaaataattataacgaataacaccatgagaaaaaaattggactaattttttttttcagatgttg

SEQ ID NO: 369129 - DNA, 643 bp, Cannabis indica
ccacttattagatcttcagggtcgctggacctaaaaatatttttattccacatatagctcatattgcattcacacatgctatataaatctccgtaatttataaattacgcttatttactcacttatagaaaattttaaattttatgctaaatagattagtaggatcataatcctacttattacctgattaactcataatgtatatataaaccttaattattcaccattagacttatcgagatattacaccttcgaaagagaagggaagggctcggtgataagtatttggtcacgaaccgcctagtatgactcattaaggccagtatgaaaccgaaagaccttttcttgattctgaaattttgtgttatcgacagatgcttgataagtgcatagaagacgagttcggagctcattgatctcatcccatatagcccgaagcttggtgaaatatgtagtgacagattcataaccttggcgtaaatctgtaagagattcttgaagtttaaaaagacgaggtccatttccttgactaaaacggtcaataagctcattccacatttcatgagcagtatcaacaaaacattatactgctctttatatccaaagaaacacaatgaataatccaagacattaccatttggtt

SEQ ID NO: 369130 - DNA, 523 bp, Cannabis indica
ttaattcaaaaaatgagcttcatcttcacttggacaatctctaccctatggtccaacattctactcaactcgctaggatagcaatccaagtttaagtagttggagctgaaataagaagaaaataaacaaggttagtagatccagaattaataaccaaaaaggataataattctcttaaagacatgagtttatagcatagatagaaataccttgtttttttgccaaagctcttttccgttgcaatagaagcactttcctttttgctttgcattgggattagcagcctttttcttattagttgtattaacaactttaagaggcttctcgctattcttccacttcttctttttgagtttcgaaatagaggcagtgtatgcttctgccttagccgtacaattagtagtgccagaactaggagctttgtttcctcctttcagtggtcctccaatcaaattgtcaactgtccgaaggttcttgattaactcgtggaagtcaaaagtcaacttgttcatgacatagtttg

SEQ ID NO: 369131 - DNA, 758 bp, Cannabis indica
ggccaatctgacggattcaatcttcatccaccttgattccatctttacagacaatgtatccaagaaaagacacttgacatagccaaaatttatacttcttcaatttggcatacaatttatgttctcacagtcggtatagaaccatccgaagatgttgctcgtgctcctgttctggttgagagtacacaaggatgtcgtcgataaaaacaattacacaaatatcgagaaaatccttgaattccctattcattagatccataaaagttgggggagctttggttagtccaaaagacataaccagaatttcatagtgcccgtaccttgtgcaaaaatccgtctttagaatgtcctcctctcagattctcaactaacgatagcccaatcgaagatcaatctttgagaagaccattttcccctaaaactcattgaaaagatcatcgatcctaggtaaatgacacttgctcttgatagtcaatttatttaattcctgatagtcgatacatatccgtaaagatccgtctttcttcttaacaaaaaatacaggacctccacagggtgacacagtaggccatgtaaaccccaagtcaagcaacccctgaagctgaattttcaattctttaagttctaccagagccattctgtaaagtgccttagaaattgaatttgctccaggtaccaaatcaataatgaaatcaatttctctctgcgctggtaaacccaaaagttcatcaggaaaaacatctaaaaactcccgaaca

SEQ ID NO: 369132 - DNA, 1212 bp, Cannabis indica
agcccctggagtaagttggctgactgaaatgacttggctccaagattacttaaggaaatgaagttcaagcttcctactgctctagttattttggtgtgataatatgagtactagtgtactagctgcaaatcttctatcacgtgagaccaagcatatcgaattagatattcactttgtaagaaacaagtacttgaaagataactagatattcattatgtgccatcccaatcccatgatcagatataaattgcttacaaaaaggttctcacattctcaatttcaattcgtagtagataaccttggagtgattgtatcaccctctcgcttgaggatggtgttatagaatgaaattatgcagggacattttagtcatggtgaggctctccaagtttgttggaggttaaggcaatctcgagacattggtcacaaaactgtcctctcatattgttagtcacaaaattttagaaattctctaacttgtaatgaatattagtggcacatgtatggctttaattcaattttgtacctctctgctaactagctagacatttctttataattcattatatgttattaaaataaaaaatgtagtactacaaactttctaagtcttataattttgattttcaattttatcacattctttcccaattaagaattaatgggacaatttcatgaaaccaatattgtgtaatttatcatgtcttttgtgtctttgcttgaagtatccaaattatttatttttctttaaacaaataaaataataataataataataaaactctaaaacatttaatataccttcctattattagcctaattctattttggaagtcaatatttagctactaaacatatgtaaatgtagttatcaaatcctatgtatagaataactttttcgtacaacaaggaaaatataagacatgaacctattaaattttcatttagtttgacttcgatcaaattataagataagctaatgcatgcatgtatgtatgtttgattaataattagtcattgataaataaatgtactacttatgaatgataattattcagaaaatatgtgtttttattctttgatttttttatttaatttaaaaaaaatatctcattttcacattatatatatgttggaattgttctatcaactcaaaaaattaaaaaaaaattgaaattgagttaaatacttttatataaatatatttttaat

SEQ ID NO: 369133 - DNA, 593 bp, Cannabis indica
cttccaagtatcagatcgatgatctgactttcggatcatctttgtcttcaccaaaaatgggaaaataggtactttcagggaagaaataacacttcctgtgtgctaaaagcatggcatggtgaatgtcaacctgggctgattccgatgatgtctgaaaactcttctaagcatcttctctgtttttagaaaagattaaggttcaactacttctggggaccaaacagatgttctgaatggccataactgggaccctgcgcccaagttgacacctggcactgggtccagcgcccaagttgacatattgtcaacatggctgtttccaatcaagttctcgaaaaagttttctgggcatttgttttgtcatcagaaataatgaagattcaagcaaactcagggagaaaaccacagactcgagcccctagaaatagggcctagcgcccatgttcacctagtgctaggcctagcgcccaggttgataattaacctggtgcgctagttttgattgctcaattgtcaaatctgatttgaccattgaatccagaatagtcaaaaatagggtaagagacattttcctcaagttcaagaaccttgga

SEQ ID NO: 369134 - DNA, 508 bp, Cannabis indica
aagtcgaaagacattttacctaatgcacctaagcaagacttctttgaaaatgtgtatttatttaatcaaagtggaagaatattatattttgatatattattttgattgattaaataaatgatacaagtgtgtcactcattttaatctagtgggggattgatatattattttataatataataagtgtagattaaaatgtggtaatatatattattatgtgaataatatatattaagtgtttgataaataaatttgtaacctatgatttcaatatacactttgtaacctacatgttgtaacttggagaggagttacaatttgttgtcacttgtaactcttgtgctgatcacacattattagtataataaaagagttgttacacaatttgatgataggattgaaatgttatgaaatatagttgttacaattatattaattctcattatatgagagaaatgagaagaggtgtttgaattctaagtgtgatcacctaaacattataaaagga

SEQ ID NO: 369135 - DNA, 1429 bp, Cannabis indica
cactcgtgttggtttgtaggatcaattgtcagtccatgaagcagctagagcgacgtactcgtgtataagagccattcattccgtgggtgtaagggcacaatggagacttgaagcggggacgttacatatacactactccatgcatttctcaaatgatgcctcatgagtagacccattccacttaaaccatgtacacttccaagacttcacataattagctcctaaatctccataggtaatacaatttcatacttatcatttatggtaccataagggcactactactactattacattgcattattagagcactcacatcatcttctttaaaatacctttcaatgtaaaaatttagctaaaaatgatcaaatgactcatacatcaaatgagttattctaaagttattttaaaaaatggtttcgtagcatctctaaatgtagctacaactattcaatgagctatattattttattattattttactctcactcttttctcataccatctctttatttattttattgatttttctctattattttatataaatgtgtattgaaaataataatatttaaatgatatagagataaaaatagaaaagttgagtataatgtaatgtcagaatttagaagtaaaaatagaaaaagtagagttttggtgaggtattataaaggatagagtaaaaaaagtgttaggagtgctcttgctctattaatagtacaacaatgctattaattttatacctttaattattgtaatgctacagcttaaattaaatgataattatcatttataatccttttatttctaaaactatatgagcttttactatttttagaactaccactctctaataaattgaagaaaataatttaatttataaaattattatttctacatcaaggtaattagactaacataatagaaaataataactgaatattttagttattgtagcctaccctcgttaaaagaatttcgttctcaaaatttacttactagagaaaaactcaggacttaaccttgggcttaaccttaaaaatttatgaccaactctgtccagtatctcgaaaggacttataaatcttgggcttaacttttccttatttttaaaactcataatccccttcattggtgatacctttaagaacaccaagtctcctacaaaaaactcaacctcccgccttttcaaatttaatttttctatctactttgggcagtaagcatcctttgccatatcttttcaactgcttctgaagtttttcttactgtttttggacccaaatactatctttctccgacctcatcctaatgaattggtgatttgcatttttgtccatacaacatcttttacgatgccattttgattgtggcttgatagatattattataggttaactctattagaagtaaatacttactccatgag

SEQ ID NO: 369136 - DNA, 498 bp, Cannabis indica
aaagtattggtttttttattatttcataatactgttattttgaagttgttgctacgagaaaataatatttttttcgtcaaaaaaataagtaaaaaaacatgtaaaaaaaaatccatcaaaatataaataagaaagaaaggtctataaacatataaaaaaaatattctgtaaggttgtaaaaaaaaaaataaattagattaggcactatttttggtaaaaaaaaattacatttttacgtttaaagaattttttttacatttttataatttttaataaaaacaacaagaaaactacatcaacgtaagataaaaataacatcaaaataattacaaaaaataacatacagataacaaaaaattaacaaaatcgtaaaactgtatttttgtaatttttttgttatttttgtgtatttgtgaaataacaaaaaaaattggtaagttaaaaaataccccttttattaatcaattaattaaatttacctctaattttatatttatt

SEQ ID NO: 369137 - DNA, 1144 bp, Cannabis indica
atagatagtttgaaccttgtttctggcgtggtaaattttttgaatttttcaaaattttacagaatgtcttaaataattacaatctacataaccataaaaaaaaattaaactaaaaaaatctctcgaataccgaaatagataaaggtacatcaatacactaaaaaaatagattgtagaattttcttaaattaaattcttaatttcattaataaaatattaattatatacataaataatataaatatatataaagagagaattcgttgctacagtgacacatcatataaaccgtacactatagttacacggcaaatataaggtgggaaatggagtctcgttggagtcttttagggctgtatatcatatttttatataacactatgttaaactttaatttatactaaaatattatatatttaggtgtccataaaagttaatactacaaatatttttaaattaaaatattgtataaaatacaatttaatataatactatacaatacaatacggtgtaatgcagcgtaccaaacgaattcttaatgtattaaatagtataaatccaatctctttaaagttgctcttatacgtttggtttttatatcctttcagttttttatcgtctgattggaagtgatgagttggtaatgctctttgagaattcaatacatttctgtattgtatcaaatttcactagggaggggaaactaaataattatatgatggccttgttttagaaaaggggggtgtaattttctgagaaagaagtctgtaccaaaatctctaaaaaaggctatttattcaaaaaaaaaaaaaatcaatattaaatatagtaacttccccttattatgtatattaattcaaagaaccaaattatggtatactctcgtacatagtgaactttgttcgtttcttatttttagtgggattgttttttagactaattaggtctttcttttctacttattcgagtgtatgtcttcaacatatgatatgtaaaataaaaataggaagcccatccatcgtcaaaggaaccttgttatggaatcttttgtggagttgatcgagaatccaatcatatatcccaatagattttggtctgtcaaacgattgtcggtcttggatgaaatcggtcaatgccgaagtcg

SEQ ID NO: 369138 - DNA, 568 bp, Cannabis indica
aattatatatatatttaaaataattcctcaaaatattagggggtcatggccaccccataccataacatagttccgccactggtcataagtttagagagccaaaatgttagttattttctatcacaatataaaacattaatattatatacatggtgcagtataaatattgcagtttttttaacatttattttgcctaactacacagcaccacgactgtagtaaaaatttaactatagttgcaccacaatagggttgttcaaaaaaaagtacaaaccgcccaatttgaataaactgtctaaatcaaatcgaataaactgccaaaaaatacaacctgaataactttacgaaaaattcgaccatccaatgaatttattgaacgggttgaatattattctaacccgcttaaataactgaataaaccgatttacatattttttactaaaataatctataatataatatataaattacatttaatagttaaactattttatatttaaagtttatatgtttaatttaaaatttagaatttatagttcataattagtatttgaatattgaagttgaa

SEQ ID NO: 369139 - DNA, 760 bp, Cannabis indica
atgttttgatggatggtttgttgtttgagcaagctttgagttttagaactcaaccttggctcttcaatggtgtttttcaattctgagcttgggtagttgttttattgcttggaatatgtttagtggggtatattatgcaggtctggaacgtttggtaaggtttggaatcgattttgttagggtttggatgtttttgggtttggagggttttacaggacctgtaaaaccagttacccagatttgttgctgggttccccgaaaaattcgtgttgtcaatttatgctagtttcagagctttagttggttaattccctgctatttaagggtatttccatgttaagttacagtagataagtttttggtttaaaacctaagtccccgtttgtgatttagcgtatcacttatttgtgttgttatcgatgtgatttaggaacctataattcacagagcagttgttccactcaggtgggccagcacacctgaattcagaattgaggtaaggttagtataatgtcatgcatatattattacatgtttagcatacatgttgtttatgactgttataatacattgatagcggtaataatatacttagaaatgtactgattactgataaatgtatgttggctgaaatactgatcgatgttgtcacatcaatatggctagagtatgactagcatattgagtataggctgacactatggtcgatagtattgtcgtatgaacgttctagactaagtactgtgtgggacacggggat

SEQ ID NO: 369140 - DNA, 568 bp, Cannabis indica
acataacaatcactgaaatagtaaaattaaatgaaattatacaaaaattcttaaatctaacaatcttaatagtttaaggggaatttttaatggccaaaaaaatttaaaaaatatgatttaatacatattaatgtttaagtgaaaaaaatcttaagcgttgaataatgatataccttaatcattttagcatttctcattgtttgatggttgtctttgctgcattgagtgttgttgggaggtggtgtgggtccccactggtagcatctgagtagtaatagacagccgaagtgggcccggacacgttgatgctgactgtaattcatcctctttcggcccaagttcacattcacatgatcaaatctgtcacaattaacttttaacaatatactaatactattttttattgggaatcattgtctttctctctcatataattaagagcaaattataattatatatgatattttaaaagttattatgataaatatgtttaagtttgaccaatttatataatatattttttttattatttttaggtcttttatggtatttgatatgctatatatgt

SEQ ID NO: 369141 - DNA, 675 bp, Cannabis indica
ttacctcaattccaaattcaggtgtgccggtcaacctgagtggaacgaactgctctgcgatttacaggctcctaaaccataacaaccacaacactagataagtgatacgctaaatcactttccggggacttaaactagaacctaagagtttccctatcgacaaaaagcatgacaataccctaaacaacacacaaatgggaagaactagggttcccaaaaatgtcccaaccagtagactggttctacaaccggaattccggttctacaaccaaggaaaccatcagcaaccctagttcctggaagccccaaccggtcgaccggttgctgatggcttcccagaaccggaattccggttcagtgcaggaaatttttaaaatttcatttctcattcaattcaaacccaaactctttcaaaccttccagacctgttctaaataccccaaataacaattccaaaagcattaaaacaaagcttagtgcactaaaacaaaaatcaccatgtgagctccaagctttgagttcaaaactcaagcttggttaaatctaataaacatgcatcacaacctgctcaaatctacttaaataagcataactaagtctctgaaaacaaccacaaaccactacaaacaacacagcaaccaagttcatcattttaccttgaaaatcaaagttttg

SEQ ID NO: 369142 - DNA, 729 bp, Cannabis indica
catctacaagcattgcactaaacactttgatgatggtgttttcatggcctggcaaactaatggccaaaacatcaagctcgacttttatcccaagcctgaagaagtccttgctcgcttctgggagaagaagaagagacttgacgctttgctcaaggagcgcagggggcctcgtcttccgtctcgcattgattaagccaatccattactactatcactatctctttcttttttcattttacatttacagtccctttttccttttttcagacaattttaatctttttctttaaggggagacaattttaaggcccgtcctcaggccctcagtatttttttagagcttgttattgggtccgaacatctttatatttatgcttaaatacatattttgctttaactttgctaaacttttggcctgttttacatttgtccatgtggtatgccttactacccccctgtgtggcatgaaaaattgtttttaagacactcagctttacacatataaatttggaggttgcatatactttttggtacaaatttacttgacagagcctaagtttacattttctgactattggtaatactttcggaggtgatcaccgttccaggccctaggcaccatggtgccgtccattattttgagcttgtaggtcccggagccaatttcgtcctcgatttcatatggcccttcccaattaggcccaagtacccccactccgggttcttgag

SEQ ID NO: 369143 - DNA, 596 bp, Cannabis indica
taatatgaacccagtttggctccgggtctaggatctgagtatgtgagcaaaaaaataaaatataatatcttagataaaaaaattatttttgaaaatcgaaaacaaaagtttgatgtttcttttttataactttttaaaaataaaaaattttgccaaacaactcctattagtttttaaaaacagtttttaagttatgaagccaaacagtcccaatatttttctaaagaacaaccgtgtatatattatgaaaaagaaaaattaataatcttaacaaagttaaagaatacggtagacccgtaattttgtaaacttttttataaatgtcgggtatttatgaaataatatctattctatataacagaattcttagtttatgagaaattcatgagtgactttttatttatattaaaaataaaatggtttatgagaaattcatgggtcactttttatttatatataataaaataaataaaataaatctcactaaatcaaaaaaaaaatacgattgggttttaactgttgtacatctacgattagattttctaaatatacttatgttataattgtttgtttatgaaaaattattgggtgacttt

SEQ ID NO: 369144 - DNA, 539 bp, Cannabis indica
gtataaagaaaagaatatgttaaagatgatttactcattatttataccaaactatacgaatttatttacgttttctttgttttacaattctgtaaatctttatttacattaatacaattttattgattttttagattcacttttacgtcagtcttttctgtttttggcttcctctgcgacttcggctatcagtacaacttagttgttttgatggcttcgacgaattagtgtgggtgttggctctttctttgaaggttatcagttgatcgttttttagattcgaccttaacaacagtatcattggcgttgagcttaggagtcttcatcaaatttagctaaatttttacttttacttatacctagaagtatacgataagtataaattttatcttatttttactatttggataattattatatgaagatattattgacatacgtagtaccaatcaatatatttaagccctcttcaacgatgtagtcccatacctacacagtcttagaatcatcccacttgaccttccccaggcggtgtggga

SEQ ID NO: 369145 - DNA, 504 bp, Cannabis indica
tttaaaccaattgatgcatcccgagacttcataatagaagattcttattaaaaaaaacataaccccaactaatatagcatctctttgctccatggattgaaaccactttacgtggatagtatgaaacaaaaaatcaactttatccacgcctttcaattttcatacacgacttacaaaaccttccaacaaactaatagaagaattctaaaacatgacttcatcctcaatatcatccatatcattttaatccctttaactcttcttatttcctcatccaattcttgaacagatttagagctcaaattttgaaaaacatgattgtaaaatcagtggtgataacaccttaccttgcttagcttcctcaaagaacttctgatttgtgaacatccaatgtgaaaattctcgttgaatcactcgttctctacaaatgttgaattgtcgacctaggagagagagagagagagagagagagagagagagagagagagagagagagagagagag

SEQ ID NO: 369146 - DNA, 496 bp, Cannabis indica
atacaaacttgccaggtcccattaggcttcggcaccaggaccgaatcatgtcgctcgttaatagtttgtccacctccttctctaaggcttcgacctttactgagtcgagtggacgtcgtttccgctggaccggtggcatgtccgggttgacattgaggacataggtgatgacgtggggacttatgccagtcatgtcttcttggcaccatgcaaaaacgtcaatggcacccttcagtgtctttattatcttttctttttcctctaggtctaggctctttcctagatggagtactttggtggagtcgaggtcgtacactgatacttcctcgatgtcctccattggttctacaattttttcggatcccatacgaggatccaactcgtcttcttcagccatttctgactcaatagtttctcagaccatcagcacgggtaggtgagcagcaacgttatagcattgcctcgcctccccttgatttcccctcaccgtccctat

SEQ ID NO: 369147 - DNA, 683 bp, Cannabis indica
gagatgagcttagcagattttgatattattctaggaatggatttcctatatatatactcaaccagtattgactgcaagaggaagatggtaatcttccaatcagaaagagaagaaccatttgtatttgtcagttcggttcggggatctcggatcccggtgatctcggccctgtcagctagggaattgttgtgtggtggttgtcttgggtttctggccgtggtggtggacaccactcggccagataccattcggccagaggacatcaaggtggttcgggatttcctagatgtttttcccgaagaacttccgggtttaccacctcagcgggagattgactttgtgatagatttagcacacggagtggaaccagtttccaaggctccttatagaatggctccagctgagcttaaagaattgaaaatttagcttcaagggttacttgacatagggtttattcggcctagtgtgtcaccttggggagctccagtgttattcgtcaagaagaaagatgggtctatgagaatgtgcatcgactatcgagagttaaacaagctaacagtgaagaataaatatccactacctaggatcgatgatcttttcgatcaacttcaggggaagacggtcttctccaagattgatctccgatcgggttatcatcagttgaaaatccgagaggaggacat

SEQ ID NO: 369148 - DNA, 221 bp, Cannabis indica
aaaattgaaaaaatggaattttggctgccagtaggctgcatgtgcagcctcgagaggctgcaaaaagagccttacgcgcacggaagggagaaaacgtaggatgcttgaccgtggtttctcggtcacatgcagcctccctggcgcgtgtgtcccatgtccgaagcaggcgagctgaccgagcattcagacaaaaaattgtctgaaatccgcgcgcgcacacc

SEQ ID NO: 369149 - DNA, 611 bp, Cannabis indica
tataccccctaccccctacactctcatggtacaagtcatgcattttacaataaacgtaatgacattctcaatggtatatggggacatcgacattacaccataactactgacaacggacaatgggtcttggggggtcacctcgagatgacaattgtcacctccctcaagttgggtctcggggagtcaccccgagatgacgattgtcacccctaaagttgggtctcggggggtcacccaacgatgacgactgtcacccccctcaagttgggtctcaagggttcacccaacgatgacgactgtcacccccctcaagttgggtcccggggggtcacccaacgatgacagttgtcaaggaagaggtctcatcagaaagctaggtttttagcttggaggcattagttggatgaagagaccatagccttccttttataccatcttcaatagggttagggttgaattattaggaataaaaaaatgataaaaatagagtaaaaaacaacttgatggctgcccacttaatgagccccacacaagtttgggccttgtaatttttcccaactattttacctatttttcataaataccactttttgcactatcaaccctataaa

SEQ ID NO: 369150 - DNA, 545 bp, Cannabis indica
attattattttttttacattaaaatattgattatatatataattttttaaaaaattatatataaatatgtttaaattaaattagatcggttatttttacatatcattcaatatccaatctacacaagtacgaattttaaatcttctaatctaatccaatccgcacaagtacgaatatccacacgttgcgaattagatcggatcggatattttatgaatacccctagtgatagtggcagaaagaaagaaagaacagtgactaggtcatggatctagagaagaaaataaatgtaatttattttaaattattttttaaattttaaatatcttttaaatgatttttattttgtttaaacgtagactactaaaagagtaattctttttattgtaacaacaataacaataaatcatgttcatatgttcatatttataaagggaaatttgataaattatgcttaaagattagaggtggtgtttaattatactaccttttaaaaattttataactattctcatcttttaatagtgaccccaaaatacccctct

SEQ ID NO: 369151 - DNA, 458 bp, Cannabis indica
ttttgtttgaacaactaaataagaacgaataaataactaaacaacaactttacttaaatatgcaaatcaaccagacacgaacaaattgcgtcaatctatttttttttaaaaaaacaacaccataacaacaaacaaaacttgaaaataactataaattatctacacaacaacacataatatgcattaatttttgtgtcaacaacctcaaatatatataaaaaaaaacaacacaaaaacaatcgtataatgcatgtactcaatattaatattttgtgtcaacaacctcaaatacataagaaaacaacacaaaaataatcctaatatatgtactcgtgaagaactaaacgtatatacttatttttttcttaattaaacaactacataacaactaacacacaactgtgtaatatacttattttcttttgtttgaataactaaataagaacaaataaataact

SEQ ID NO: 369152 - DNA, 966 bp, Cannabis indica
ccactacaaattaaaaaattagtaaatattagcaacaattaagttaagtaattcataatggagtgcaaaattaaataaattacttaaattaaaaaaaaaagatttacctggtctctgtttgtggtgcaacctcagaggtagctcgtctataatgtaggggtaggagctgagacatcgccaaaattgccaaaaatcacataatattacagagaacacattgttcagagtaaatcgcacaaaaatcgccaaaaatcgcatgaacatcgcataatataacagagaacccattgttcagagtaaatcgcacaaaaatcgccaaaaatcgcataatataacagaaactatctaagctaacaaaaataacacaaaatcgcacaaaatcgctcaaaatccctaacaaaaacttgaattcaatattaaatcgcattaaagtcgcataaaattgcataaaatcgcacaaaacaccaaaatccaaaaaaaccaatttcccctagcctacattcatccccaaacacaaaaactagcaattcgaaactttaataaactacatatttcagttatatcacagattcacaatttaaaggataaattgcaaaaaaaaattaaaggaagcccatacctggttcgtcgacggtgccggggacgatgatgaacggaaactggatctcgtgggtctcgtgggtcgactgggatcgagtggctctcgtgggtcgactgggatggagtgggtctcgtggggttcgggtctcgtgggtcgtcactgttcgtgtggggtcgaatgggttcgtgtgggtcgacgtcgactgggttcgtgggtcgactgcgtgtggtggttcgaatggtgtggtggttcgaatggtgcggtggtgagaatgagggttaggttcgaatgggggaacggtggtgagcttgaaaccgagaaaggaagagagagaggagagagagggaagttagagagattggggg

SEQ ID NO: 369153 - DNA, 915 bp, Cannabis indica
aagctcccccaaatggggccttaataaagataatttgcttacatagcgagttagtccaaaagacttaatatgctctatgatatgataaggactcgcacgtcctagatcatcgacattcataacgtatcaattgagaatattttaccaggatctagatttactaacaaatatgttgtttaacatcctaactatgaatatctctaaaacaataaaattaaacacataagggtttaagaaaaccttacattgattggagcggaatataatgactcctttcgttcaagatctctagcccttgattcttttttgtagcggaatatatgaatgtattttctaatttaattaaatttcctcaaatagaaacaaataattaagtatcttgaataatattaacttaattattaattctatttaagttttaaaaaaatattttaatttaagttggtctaaaattaataaataaatcaatttttaacttaaatatatttttccacttaaatattacaaaatataaattagttactagaaatcactatctagaatcatttctttaaactaagtgtgctttttaaattaattttaaaataatctaatgaaaaattaattttatttatttcaaaattaattatgttactaattcaattttaaattaggttaaactagtctaattagtctaatacaattatttaaataaggcaaatggaccttcacaattggggttgttcaggtgagggaggactgggttcagtatgtcgtacccactactaatggccccctaactctcacacaaggcccaaatgagaggaatttaaccttaaattaaataattcttattcattgaataagcccaatactaattgggcctaaataaaactatcataggtgatatttcattttaacaatctagtccattta

SEQ ID NO: 369154 - DNA, 504 bp, Cannabis indica
cccgaactcaaaagtggacccgaacccgtacgctgtgacctaaaattggaaccaaaaccggaagtttaccgagactggaactcggacttggacatggaatcataactgaaatttgacatagatccagaatcgtaaccggaccaggacctgaactccaaatcagacctagacccgaattgggagccggacctagatcccaacccaaacctagtctcgggacccgaacttgaacctgaactcagacccaaacacagaactagactagcgacatagaaccagggtcgggacctagaaccgcaccctagtctcaatcccaaatgcaaactcaaaaattaggacctgagacctgaaccagaaccagaccgagacccgtgatagtgatccaaatcttgacttgggattcgggtaatggatcctcgaacagactagtattcggtgtctagatctggggctcaaacaaggaccggaacccagatgaagaaccaaacccgaacccagacctag

SEQ ID NO: 369155 - DNA, 829 bp, Cannabis indica
ggtcagaggccacattgctagtcattagacctcagagtttgtcccatctgtttgcatatcagtatgttcagattgttgaggttgagaacctcctacgatagaatgacttcctaacattggagtcgatgtccctctgagtgtttattgatgagagacttgggtctctgttcttatagtagttgagtctagtgatgccattggtgtaattggaactcgaaaccgactttgagcaacactaggagtcgtcatggtagcctttagtgactccatttgtgattttattgcggtattttcactcctaaatatcgcgttctcctccttaaaggttgcattttctcactccaaaactctagttcgctcagccatctcgcgcatctgggccattattatggcaagttgttcattgacattggttgttcttgggcaacaaactctccttcttcttccatctgaagtgtggtaatgatagatcgctttctcacagtcagtttgtcagggccccaggtgggcgccaaattgtagacgctaaaatctacaatgatcggaatgagcgttagtgggcaccgacaacctgcggaacaaagacaaaaggatgaccctgaaaccttgggacaccggggtggtgccggccgaaggcattccgacggtcaagtcagtaaatttatagtgcaaagtagaaaagaaaataagaaatctaaacaaatacttcctgtgtctatggttatgtgatgatcgacggtcaaaccttgctcaccggaatgagaaagagtacgtcacatcgtagagaaatgataagtttagtcgtaaaactatagagagagagagagag

SEQ ID NO: 369156 - DNA, 584 bp, Cannabis indica
atgtcatgaataagaaggaacaagactttcacgagttggttaacgaccttcagacatttgaaaatttgattggaggaccacagaaaaagggatctaaagctcataattctgggaatgctaatggggcggctaaggctgaggcaaactttgcctctacttccaaaccaaagaacaagaagaagtggaagaatagcaagaagcctgttcaagctgtgaaaacagttaaaaagaaaaaggctgctactactggtgatataccaaaaggaaaatacttctattgcaatgaaaagggccactggaaaccccaatgccctaaatttctagcaaagaaacaaggtatttctttttatataaactctgtgttttagagaattattatccacttggattattaattctggacctactaaccatgtttgtttgtttttcttcttatttcagctccagctgcttgaactcggatgctatcttagcgagttgaatcggatggttggacagatgggtggagatagtccaagatgaagatgaagctcgaattttttttatatttttgaattaattgttttaaacaatttggatttcaa

SEQ ID NO: 369157 - DNA, 612 bp, Cannabis indica
gtaaagtcgaattgcttacaagtcattagtgatttacaaaggtctaaatatatagcttctctttatggctatattctctctgattgtaaggatttggttgatgattttgatgctatttcttttaattttgttaacgatctgctaataaggttgcgcatgcttttgcataatcttttcttggtgaggctaattgtactttagtgggactttatctactgtaattgtatctttagttttagataatttgaattaaaaatattatcttttaatttcgtccccaaatgcaaatagctttaatgcggtgtctcatattcaatttcaagacattgaactccctatcaatatataggacataatgcaccttttttattggaagatattgttggattaacattcttgaagttaaagcatacaatataaaccaattactcttcaaataaataaaaaataattattattataattttcaaagaatcaattactcttaggaggcgtttggttgggaggaatgaaaatataggaataggaatgggaatgggaatgggaataggaatggaatggaataaaatttaaaatggataaaaaaattgataaaaaataattaaatttttt

SEQ ID NO: 369158 - DNA, 517 bp, Cannabis indica
cagttaatttactgttgaaattgtctatactctactaataaatgttatattttctgaattttgtctgtacgcgcgttgcaacaaattattattttataaatatattttttttccttaaaaatgagcacagggtaatgatgttgaacctaataactaataatatatatttttttaatttttaattgtatcactttttaataacgtaaaaaaaattaacataaaatttagtatacgtgcttcgcacgtaactttttactagtatatatatatatatatatatgagtgctgaattcaagtgaagttattgtctcttctactaaaagtctacattacacaaaagcagagaaacgtaacaagttgcctttcatatatataatcttttatttatttttttagtttaaactagctgtatctctaattaatcaaaaaataataggataattacgtaagttatatttcttagtaaaaaaattaacattttatatttatttattttttttactattttactaatttt

SEQ ID NO: 369159 - DNA, 563 bp, Cannabis indica
ttttcaaaatggtaaaaataagactctgagcttaatttctgacaatttttttttaatataatcaagttgaagacaattactaacacgaacagatacagaaatgtaaatagttttgtcataacacattttgatcgggttattattaaattttattttgacaaaaaattagttcaatgtccaatttatataccattttggaaaatgcagggtctatttttgtcatttaacaaagcagagggtccaattaataacttttgcaaaaacagagtccaaaatggtatttaccctttttttaattacttacatataccattgattaaagtatgtcaattgaaagtaaacaaaatgaatcaaaaacaaaactatcttaataaattatataaactagcttaaatggcctttttatcactactcagaccgaaattataaacattatccactacaagaaatgtcacttttaccagcacagtttgctactgcgctggtaaaagtaacttttaccagcgcatttcacaaactgcgctggcaaagagatcaaagttttaccagcgtacatttgcagt

SEQ ID NO: 369160 - DNA, 607 bp, Cannabis indica
aaggaaatatgttcttttgttattctattattttgcctgcttttaattatactaataagagccatgttgatcatgatttgtgtatattgttgttccacagcctagtttctatgtcatcataagtagatcaggtgtgcactcacctgtaggtgaaagacctagaatctgtacagaaagtgaattgaatctgagtcctggtattatggtggttatcaggtgcaactacctggttttagatgtcgttttctatgaatggtattgaaaggtaggggtctagtggacggtgtgatatgcatttgatgtttgattttgtgattatatgtggtctctctactttgttatacattttgacaatggtgataagatatgttattatttttttaaaagctaactagaaatttttattaaagtaaggatcctttgatattagttatttttctactaaatttataagctctcccctttttctcctattctaggaactcagtttgatgctagtggatgaagatggtattgttgaggaagaaagtcattattagtttagtcttattctacttattaaactttcaatgaaactaattttgtatttaagctggaatggatggtc

SEQ ID NO: 369161 - DNA, 523 bp, Cannabis indica
gggtctagtgtgcgagatttaggcccaagtctaggatttgggtcggggtttggggtctgggcccaggtttgggtgtggggtcagggtccgggtccaagactcgcttcaagtttggaatctgggtttgggtcggggtcctggtttgggttcgggttagggtctagaacgggtcggggtctgagtccttaaatccaacaatctcaatagttcagaaggcattattaacgaccttaaaagttcaggggcataatttgctacatgtcaaagttcaggaggcaaaaatcataattaccttattaaataagaagaaaatataacaataattatttggtgtagtggtaaaaggttttactttaaactaagagatcatgtgatcaattcccaatcattactttttagttttgtttaaaaatatttaatgtgtagttataagagattgaagctcggagctcttaagagtttttaaaaattttaccattatactaagcactaaaactatcattttcataatagttaaactata

SEQ ID NO: 369162 - DNA, 645 bp, Cannabis indica
attatcatattttttaataatatttatttatttataaaaaataattaaataatattttctctcttctcttcttttttctcattttttttccttaattatctcttttgacactttttttactgtaagtattttcttcccctgaacaatattaatatttaattttcaaaatacataataaacattcttaataagtgtacgaacaacaaatcaagtaaattattattattatactaaatacaaataaattaaaggtatcactaggaaaaactgctatttttagtgaaaacattttagtcacaacataatttttttgtaactaaatgcgacttttagtcagaaaatttcaccgtatacccattttaacttagtccatttcatttataccgttctttttatattatttcatttatagccacttttataagtcatgtcccattttgcccttagcttaatgaaaaaaataaaatcaattacttctccagagtccaaatctaatgatcacctccgctcctcctcttgcgataattagattccgatatgatataaaaaaaaactattgtaaaatatggaagctttctactgatggaatatagtaacttttaaaataaaaacaaattaacgatatgtataaactaaatatgcatt

SEQ ID NO: 369163 - DNA, 744 bp, Cannabis indica
aatatcttgaataagatagactcgtggagtatgcagatttaactgcaaaaacacgtaaaatacttagcgttattataattattatacttattaattttcctatacatatactgtgtttaatttattacaaaaaaggtttaatttttttgttaacgaaaatctgcgttaataaacaacatcaccgagaactagtaaccaactgccgcgatacaagaactgccgcgatataagaaaataactactataaatttgatatttctattttataattaattaacaactaatatagcaagtgggtatagtttaaaagtccaaatttttgagccaataaaatacactttggttttccaaaaaaaaaaaattaataacaaaatttacaaatattatcgaaactaccattaaaacacttttagatgtgtagcgtagacactgtagggtaggccgcaacggggagaaagaagagagagcgataagatgagaggtgtcggaggaccacttctttgcataggcgatctcctaaacgacgtcggagaatcaaatcctgacacttccaaacccgatctccatccttacccttcttcttccatctcaccgcatcccgttgatctcaccacactcttcgaggttttttctctatcgatcgattctttcatgtttcataaattgtttcaattttgtctcgtactccattattgcttttctatctacatctctctctctctctatattgcttcaattcaattg

SEQ ID NO: 369164 - DNA, 517 bp, Cannabis indica
gcggtgtgggattgcacagcttacccggtatttccccttacggatcacgggactactgactgtcacacttgtactgcaatttttgaatccgatataacgcgcacttccttccaacctgcatcacaagccctgttcagagcaagaatgatcgctgtaaactacaatgtaattatagcgtgattgttagaatttttttatcacttataacatatatgtaataataatatttaattttataaataaatatattacatataattattacaagcgtatatgtaaaaatttaaaaaaggataaatactattttggataaaagttattaattagattctttattttgttaaataataaaataaaccctatattttctaaaatgataaaaataggacctgagtttaatttttgaacttttttttaatataaccaacttgatgacaatttctaacacgaacagatatagaaaatgtaaacagttttgtcataacatatttagatcagattattattaaatttattt

SEQ ID NO: 369165 - DNA, 744 bp, Cannabis indica
aagattacaaaagtaattgacttaaaataattagactccctctagtgatttgtcgcaaccctttgtaatccaccttactaatctgatctctgaaacacaccaagtagtaaactcccttcagctattgatgtgtgcttacttccttccgaagtaaggcttaaacaaatcttctcccgaagatatatgctcacttcctctcgaaatgagatttggaaaagtcttctcccgaagacccacacttgttcaaagcttctcttcactctattctatgaatagtatgagatcataataagaaaactaaaacctagttgaacactctaagtttttacaaatgaaacactcttctcacaaagaaagatatgaaaatatgagactagaagagatataaatcatttatttatagaacatggaaatcctagagacagccacaaaaatgatttcccagcagtacaaaattttcttaaaaaaatttctgatttgcaacatcagaatcgggtttgcagcaaaagacaagaccagaaaggaaactttccaaatttaaccaagatcacgaatttggacttcaaacctgccaaataaatttgatttgatttgttctaataaaagcaaaactgaaatcatcaattaaaaaaagggaaagtcaagttttctaaagttagacaactttccataagagaattccttcttttacaagaagtttcctaaaccaaaaagagaccaactgagaaggaatatttccttaga

SEQ ID NO: 369166 - DNA, 1000 bp, Cannabis indica
gtctggggtcaggtcccgaatctcggttccgagtttggttctttgttcctaggtccagccccagttcttgggtctgggtctaggtccgggtcacggtcttggtttaggtccaaggtcacatgtcccagtctgggtccaagtctcggtatgggtttaggttgagtttgggtttaggtttgggtcctgttacagtcccaggtctgggacccaaactgggaccataacccaaactgggacgtggactcagatcgagactcgagacccgaacctgaaccggaacacgaacatggacccggaccaggacctaggacttgaacatagattggggatccagacctgggaattgggcccacaaactaggaaaagaactttggcctcagaacttggatcgagatccatgacctgaccccaaattgagacccacactcgggaaccaaaatcaaaacttgaactggagccagactgggatcttggaatatgaccggaacctagactcggacataaacccggcaccagacccaaccgcgaaccctaaccgagaccaaaacccagacttgaacctcgccctagacaaaaattaggacgcaaacccagactcgaacccaaactcgacctgaacccatacctgtgacttgaaactaaaccaaaaccagaagcgggtcaggacttaggaacaggaccaggacctggacccataccttaaactataaccgaaccaggacccacactcagacacaaacccaccttgggattgggtcccaaacccgaaccgggatgcgggaccaaaaccaagacctaaacttagacccgaacatggaacaggactcaggacccagaattgggattaagaccaagaattgcatgcaagtctcagtctcggacctagactgagaaccagatcgagacttgggacatgaatcgaaaccagactgtgacccgtgattgggattcagatcttgccctgagatccgggaactagggcttggacaagacccatagt

SEQ ID NO: 369167 - DNA, 412 bp, Cannabis indica
cttgttaatttatctaagaactctagcatgcataatgatcatttgttattttgcgatcatttatttacgagaagagagcacaaatggcatgattatgttataacatgcatttaatggttattgctcttgattctcattagctttaagcaatccaaggacctctgccatgttgatgctggacggaactaaccacaagcagtggatagaatctctcatgatgaatttgactcttatgagagtggatttggccttgagaactgatgcacctccaaaacctactctcagtttgattcgatcagatcaagctacaatgctcaaaaggagcaatggactgttgaggggatgactgtcattcttgctaaggaagaggaggacttgaaaaaagggaaagcaagaagcatctccatggtaa

SEQ ID NO: 369168 - DNA, 701 bp, Cannabis indica
aactctcaccagtgtctttccaatcgttccaccaacacaaggaataatgtgggctattagtataaagtttataatgttcttcttgagttctcaacacatgagcaagaacagttgagggagaaacaatttactttccactctctaggtattttgaaaataatagagtaaatgaagtgtcatgatttcttaaatcaggcttctatttatagtagttaaaaccctttaattaaatcataattaattgtttaaatatgattttgtaagtggtgatgtgagtttgatattttaattttgttgagaaaactaaaaatattaaatgatatttttcaaagtgaccttaaagagtcatttcaagggaaaaatagacaagtgatattttataaaaatttcactttatgctagaaatgtggggtgagccacaaatttaatcaaaaatgtgttgagacattattgattaatttatttgattttgaattcaaattcaaaatcaagtttgactatgtgcataagtgaaaatattgacatatttggtgtcaaattttggtgaaaataatttaaagaagaaaattaaatttaagagaaattatagagacaaaacagtcttctatattttaaaatcaagacgttatcttgatagtgaaatgtaaaagtgtaggggtgatactccaacgtgaaaagtttaaaataaagtataatttaga

SEQ ID NO: 369169 - DNA, 753 bp, Cannabis indica
gagaactattttaccatcattctgtggtgtagctgcagcttcaacccatttagatacatagtccacaattaataagatgtattgattgctgaaagatgaaggaaaaggacccatgaagtctattccccacacatcaaacaattccacttccaagattcctggtaaaggcatttcgttcctccttgagatattacctgttcgttgacaacgatcacatgccttaacaaaggtactagcatctttaaatagtgttggccaaaagaatccactctgcaacaccttagcagcagttctggtcccaatgaaatgtcctccacatggcaaagcatgacaatgatttaggatagaatacatctcctcttcaggcacacatcttctaattatctgatcagcgcagtgcttgtagaggattggctcttcccaataataatgtttcacctcagaaaagaacttcttcaattgttgacgtgaaagctcaggaggagttattttcgcagccaagaagttgacataatcagcataccacggtaccatcaggttttccctcacactaaagagttgttcatcaggaaattgctcatttatctgtacctctttcgtattctggctctcttccagctctagtcttgacaggtgatctgctaccagattttcagtgccctttttgtcctttatctctaagtcaaactcttgaagtagaagtacccaccgaatcaatcttggctttgctatccttctggtcataaggtattt

SEQ ID NO: 369170 - DNA, 559 bp, Cannabis indica
tttatttattttttatatttttgtacataaaaaagttagcatcaggtgaccatcggactaccatcggaccactatcgaatcaccatcggaccatatctgctaccatttttttttatgtttttgtacataaagaaaagtagcatcaggtgaccatcagaccaccatagaccatatctgctaccaatttttttttatttatttttatgtttttgtacataaaaaaaagtagcatcaggtgaccattggaccataccatcggaccaccatcggaccttcgtcttcaacctttactcattttaacaataggaaggcatcagaccactatcggactactatcgggcttgacaaaaaaaccaattttttgcccaaaactcagatttggcaatttttgaccctaaatctaacatttactcacagataacaaacattaatcatacaatttattcttttgacaacattgcctatcataaatcacccaaaaaataatgacaaaaataaataaaaaatgggtcgaatgcttaccttcgacatctcagaggtagtcgggtctcacggtggt

SEQ ID NO: 369171 - DNA, 544 bp, Cannabis indica
agattcatgtcctttaccaataatttgcttcgtcataagatcctgaaatacgcaatgatcagaataaaaagaaatacaacagttaagatcacgagtaagttgactaacagagatcaaattaaaagaaagattaggtaaatgtaagacggacgacaaaggaagcattggagtaggagtaattttaccagacccaagaacacgagatggtgacccatcggctaacgtaacagtagaagtggaagcgtggggttgaagattagaaaagaagctagaattacctgtcatatggtctgtagcaccagaatcaatgatccatttggaagacgaggaaaggagacacgaattttgtttacctgaatcagcaatagtagtgatagaagaagatgaatttggcatattcatctgccgaaacaagaactggtctactagaagccattacaaatattttcgttccaccaaacttcacatgcacgaattagcgaagcatataacgcatatttaactgaaatggacaacgaaaccacaggggaggtcgaggagaaca

SEQ ID NO: 369172 - DNA, 623 bp, Cannabis indica
atctcctccaagcagaatagaatgagtcattatgttgttggacaaaatcctcaaggtatagcatctggatttatcttgcaagttaaactcatcagtaaaatattagtaaaattaaaaagaaaaaaagaaaaaaactaaattagtactaaaaaataaaaatttgaaaaaaaaaaaaaattgaaaacaacaaaattagtactaaaactaagaagaaaaattaaattagaacaaaatttgatttttaataatattaacaaataatctccgacaacaatgtcaaaaacttattgtgatattttgcacacgcaagtgcacgtatcgtttacaagtaatagactcaacaagagtgaggtcgatcccacgagaattgtagttatgtacgttaaattaaatttgtacttctatttggttaaataaaaattaagagtaggttaaaactaggaaatgataaaaacagtgaaaggagaaacaatttaaggaaattaacagttaataaaaactagggcttcaatttcaattgtatctattgaatatggcttaatatgattatcttcctattatcaatttctatgcagtagcaggtttataaatgtaatttatagtcttctcagatatataaatct

SEQ ID NO: 369173 - DNA, 1200 bp, Cannabis indica
ataatggcgaggattgatgacatcctctacgttgacgatgccatcaagaaaaatgctgattcacagtcagcaccggatctctttgggagatctggtggactaggcggtcttcctctccagaagaagatatctcccagtcctttctccatacatcatacaccttttgcatcgcccctcgctaccccatctatgttctcttcgacgccacttgatggaagtcccggaaggacatctcttgctctgaagaaaaattctgatttggataaagtatggtcatatgtcgggaatcttagcgccaggcgtactattggggacgctcctgagcggaattaagcgaagtaacttatcgtcgttgtagctgacattaaccccaagaagttggtcatcaatattctcaaggaaatctcagactcattatgtggttcttgatggtaggtattggaagtttaaggagcatatgtatattctttagtagtagaattttagtataggttaaagttttgatcatgttttatcatatgatgttattgtagatgaaggataaggatactatgcatgtttttatacttagtggtatttatgaaaacttattcaacctccacacataattctgatgcacttggttaattttctttttaaaaactaataaaccacctaaaattcttacactatcaaagcaaattatgaataataaatgctatatttaacatcagactaatgctaagaggcatcaatatgagttttaagtatgatgtgcaataaagtagtattcgaatttatataaattaattaaataacttttaagtatattattaatcaattgtaatgtaactctttaggttttaggtgttgttaagcacaactagttcacaataacaatacttttaatgcttttaaaatactatttgtatattcatagatataaattagatgaaattgtaattaatttagtttctaatgtttctttaattctttttgaaatttaatagttttgtgtttttttcaacaaaatttatttaatagttattggaaacataagaataagtataattttctaaattatttagacattttaataaataaaaaagaattaaaaactccctaattaatgccaattaatacattatttatatagcttaaaaaaatacattatttatataatatggaaaggggtgttcatccgatccaatccgcactttt

SEQ ID NO: 369174 - DNA, 758 bp, Cannabis indica
aaaataaaatttaattataatccgatctaaaagtgttatgacaaaattgtttatattttctgtatctgttcgtattaggaattgttttcaagttgattatatttaaaaaaaaattgtcaaaaattaaactcagggtcctatttttactattttggaaaatatagtgtccattttgtcatttaacaaaacaaatggtccaatcggtaacatttgcaaaatacagggtccaaaataatttttacccaaaaaagtttaggggcataatttggtacatgtcaaagttcgaggggaaaaaatcctaattagccttataaaatatttaaataaaaggtaaaatagacttttaaatttcttttattatatttttattataatattatattaattttgtaatgaattgtaattgtaatgaccattacaaaggttttttattgtaatgaggattacttcatacaatataataaccattacaatgtaatggattataaaatttgaaaaaagaaaacaaagtaatggacatgttgattacccattaaaaagtatatcagtcccacaaaataacaaaacttttttcattttaaaaattgtgtcaaacataagaaagactcaacattactatctccaaaaaaaaaattaaaaaaacattactattctcacatactcaaaccatactatgtttggtaagagggactgatgggtggatggagaggggtggagggagagtaataaaaggagagactaagtgcatgtttggcatc

SEQ ID NO: 369175 - DNA, 459 bp, Cannabis indica
gttggcttaaaggttgtaaagttgctcggggtgcgcctgtgatctcccatatgttctttgcagatgacaattatttgcattgtcatgccctgcaggatgagactaatagggtgatgtcgttgcttcgtaattttgaactagctttgggttagagaggtaaatctgtccaagtcttattttctttagcactggactgtaccggttagtaatataattaaaatcacattcgatgcaattatctttagcaatcagaataagtataggcgtggttaggtgtcgctgaactcttctggtcagcttattatggctcagacagtcgaatggactattggggttaagaaagtgttgaggtggttgaaagaaataagactgcatgatgtggtggtggagtcggacagtttggtcacaatccaagctatccgaagttcgttagatatagcttctatttttgggttctac

SEQ ID NO: 369176 - DNA, 528 bp, Cannabis indica
gaatcagtatcagtttaatctaagaaaaggaatattgaaaaacaataaaaaaaatcttaagatcaaaaagagaaattgtatgttagttgataagggtggtattttaatacccttagactacactaagttttctagacttgcgttaatgctataatctacttatgagatggtgattactctagtgatggagcaatgacttttggagaagtgtaaaaaccaattcggagtctctaactctactagtgagactgaatgttaaagtggcctagaaggctactagataattattcagcctatagaaagatctatactatttttggcgttattcgagtcatggattaactactagtgttacttcctgactaacacatatatagttgccaaacagtaaagaatccagtaccctaagaggagtaaacatatagaaaggaatttcacactatcaaggattttgtgactaaggagatgtagtggtggagaaggttggtaattgaatacaaactgtcagatcctattacaaagaaaata

SEQ ID NO: 369177 - DNA, 664 bp, Cannabis indica
gagaaattcatgaaggttgttgggatcatgcaggttggcaaaatttgtctaaaaagatcattaagtaaggatattactggccaacgatcaataaggacacacatgagtttgtcaagaaatgtgataagtgtcagaggttttcacatatacctcgtgtaccgccaacagaacttagagtgatgatctcgtcctacccatttgctatatgggggattaacttaatttgggcattacccactgggcgaggaggggctaagtatgcagtggtagctgtagacttcttcactaaatggacggaggccgagcccctcgtctccataacctgtaagaaagtccttgactttgtcgtcaagaacgttatctgtaggtttagaattcccatgaagatagtatccgataatggaacccaatttgatggcgatttgttcactgaattttgcgagaggaataaaattgtcaaaagcttctcgtcaatatctaggcctcaggcaaatggacaagtggaagccgttaataaaaccctaaaggagactatcaagaagaagttagatgctgccacagatgggttaacgagctacctcaggtgctctgggcccatagaactaccgagaaaacagccacgggacacactcctttctcgctagaatttggcttggaagcaatg

SEQ ID NO: 369178 - DNA, 520 bp, Cannabis indica
gttaaacaacatacttgtgagtagatctaagatcctggtaaaataattccaacaactggtatcagagccatggtaattgatttgcttgcaagaaatttggactttaaaacgattatttgttatttggatggtttcatgttgtattgagtgttatatgatgattgattgatgtttgtgaattttcgtgaaaaataattgaaattttgtttctggaattatttttattggatagtatggaaaaaattaagcaagttacttttttacagaactcaatttcgatttaatttgaattagttatgattttttgaagatttgaaaaaagataaggttgttgtgcaccttcacgcgcgcgcgaaaccaagtcaacctcggtcacacgcgtgttcagacaggattttgtctgaaaaacgcgcgcggatgtctgatgacaccccattccgcgcgcggagatgctgccagctcccctgtccgccgagttttctcggccagtccctccctgtgcgctcgcggacggtatgca

SEQ ID NO: 369179 - DNA, 424 bp, Cannabis indica
ttttaattattatttaataggatataattccttataaaaagagagctcctctagctcatttttcacattcttctaagtccttgttaactcggacactagtcctgatgacgtggagatcaatggttgacacgtggtaagaaagatgacatctcagagttaagtagtcttgagtcatagtagatcgacctgggatgggtcactagcctgcacctaggttgactttggaaactctagaatggaagttcagacttcaataacttgaatcaaactcattctctttcaatattatgtaccatgaagacatggagaaacctaatccaaggtctgggagctaaaattacacaaacctgcaacccagaagccaacctgcgcacctagtgttggaattattttaccaggatatagatttactaccatgtatgtt

SEQ ID NO: 369180 - DNA, 592 bp, Cannabis indica
gcccgattacccacatcaaccagtttcctttgcagatcaaagcttatgtgggtttgaagctcaagaatcaatggtttgaggtatttcaatccttattcatagtgtatatatgtttgatttaattctgcattttatacataaacatatatatttcagtttatacaaataaatgtctaacaattcattctcttggaaaggtaaatatatatattatggaatattgagtttataaagaagaggacgttgcatatgtaagctttaattattaattcttacatatgtacgagcatgccattgttcaagaagagaaataaaaaggctatgatcgaagataatgaaagaaaaccaagattcattacaactctattataaaataatacaatgattaaaataagaaattaattaaatatatattacaacacatatatatacactatatatattgtatatatatataaaggagaggtagaagaagaaaattacaacacatgtaatatatataatacatatatatataacaatagaagaatatatatatgtatatacactcactcacaaccttgagtgtagattagtggggatcaccatgact

SEQ ID NO: 369181 - DNA, 515 bp, Cannabis indica
taatgtttccaccgggaccattgcctcacaaccgtatgccattgagaatggcgagtggccggttgtggttcttggggttgtacggtaggcccataacactcttggaaattcttcaggccaattgtttttgcaggccagcaactttttctttagggtgacttttaggattttattgacggcttcggcttttccatttgtttttggccttgccaccgcgaacaagcttttgatgactccgtgttggttgcagaagtcggtgaattcttcgcagtcaaactgctttccattgtttgagactatcttgtgaggcaagccataccgacacactatgtttttgataacaaagtctagtacttttttagcagttatagtcttaattggctcggcctctgtcaactttgtgaagtagtctactcctactatgacatactttacccctccctttcgtgttggtagggacccaataagatctatcccccaaaccgcaaagggccaggggctagtcatcagggtaa

SEQ ID NO: 369182 - DNA, 750 bp, Cannabis indica
cacgtggcaattttgatttttctaaagtggcctaacatctctaaatctctaagggtcggtgtggtatgcatgattggactgaaaaagataggattagacaagattggattatgttgaaagtaatcctgtgtttagtttaagaatagattggactattttattttctttttttagtaaaaaaaaaacttaaattaaaataaaaatatataataaaaaataaataatttacagcaaaaaataaaaataaataaattataaaataaaataaaataatatatcttatataattaagtatatattataaatatataataaatattttatcatattttttatttaataaataattaaaatagtaaaataaaaatacttgaataatataaaattatttatcttaaacattaatttaatataaatattaattttttaaaatatttatataaattttctagtaatttaaaaataatatataattttattgtcatattgtttttcttagaatcaatctaagtaactattgtttaattaataatatttttaattttaaaaacttatgtataattattcaaaattatacattttcactaatcttatgtacaaaatagtcccaaatttaaaaattaatgtggtaacacttttttaatcagttttttatttttaaaattagaaaagtgaaaatattttccaaatcacattctataaaatgtttttattttttcaatttttaaattaaaaatctaaattttaaaa

SEQ ID NO: 369183 - DNA, 518 bp, Cannabis indica
tcccctcttgccacatattccctaatgatgtggtatttcctctttatgtgtttgcttctctagtggcttcgaggctctttactgttggttattgcacaagtgttgtgacaaagtaaaaccagtggtttttccattccaagaacaacacaaggtcctaagaagaagtttgtaagccatttagttccttagcagccttagtggtagctatgtattcaacctccacgctagagtctgatgttgcggtttgcttaacacttctccaaacaactgctccaccccaagagtaaacaccatcccagatgtacacttcctgtcatcaagacaagcctaaaaatctgagtcggtatagcctacgagatttaaagcaccaccctggtagactaacacataatgcctagcacttttcaaatatttcagaatatgcttagctgcagtccaatgttcctctcctggatttgtctgatactcacaattcaaactgcatagtatatgtcaggtctagtgcataacattgcata

SEQ ID NO: 369184 - DNA, 778 bp, Cannabis indica
ctgacttcggtcagcaagactcttccgaaaaaaaacgtatattagttttaaggccaatatttttggtttttttttaactgacttcggtctcacctatttcccaaaaaaaaaaagtttttttttttaattttttttttgaatattttcaaatatatatatttttgtttataaataaacttatcctggtcaattaaatttcctaattcttaaaaaactaaacggtactaaatttattaataccatttaattctttttttttaaaaaaaaaaaccttttatattcacctacatgactaaaatatatttatatatatatttaattttaagtttttaatcaacatcaaaaataaaaattgtttattaaaattgagaggaaagacatcagatatattttgctatcatctatatttttagttttttagttttttctttttttttttctttataaaaaaataaaagacttggagaataatacaatttattggaattttcggagagaaatttatcaacagttaatgaaaggtatgtatttgatatttactctttgttcatgtatctatattgtttattatttttaatttcatatctgtatttctgttatatttgatctactagactactagccaccatcaatcatatatattcatatcttaatttttataattgacagtgtagttagtagtagtaggtagctagtttcttcttctttattttttttatcttttatttcttaaaaaaaactaaatatatctatttatataattaatgctgaaactaat

SEQ ID NO: 369185 - DNA, 542 bp, Cannabis indica
ttatttttatttttgtatttttacactataaaatatgtaatattttggcatttaacacaactcccaactagcttattgctagtccctagcaattcaagcggataacaaaatattaccaatatgaataaatcaaaagaaactctgactaattgaaacaaataaaatattagcgtaaactctagaaaatactaaataaaaatttgtaatagatataattccagattttgtgtgtgtgcttcaaatcatattatttgcttaaattcataacacagattatatcgaaaaatctttaaagtaaaaagtctcgactccaaatcctcacaggtattgaaatatttgaaaagaggaagggttgtcactcttggagttggaaagatatattaattgacgtctgaatggataaagatttttaggacgacagtgtaaataattattgacccatagataggctaattgaaaatattttgaaattaaaatgacaagttaaattttagaatttcattatagtacctaaagccaaaaataaagaaataaagaacgat

SEQ ID NO: 369186 - DNA, 1156 bp, Cannabis indica
gaagatttggaacaaaaaaaattggtagatataattaatagggaaagtaataggcaaatgatatgttccccattataatgttttgaaaccaatagttttggggtcaaatttgttttttctaatttaaaaaaaaagagtttttaggggtcaattttgatacataaatgataaataattaatggtagtgggggtctttgatcaggatagataaatagataagttgtgggttggatagagttgattggatcctcttagctttaatatatggctttcactgaataatggacaagttcagtgtcttgctggctatagtataattgttttcactaattcgtaatgttaagaatctctctctctctttaacaatttttgttgcatatgatgtataagttgtcaaatttcgataacttaagataaaactcacttgccacgtaaagtatagtgaatagaaaaaaaaaaaaaataaagaataactactgagacactattttttgtaaaatatttatatttttacttttaaagaatatttttttatatttttacgattttcaaaaaaataacacgaaagtaacataaaatcaacaagaaaacaatataaaagtaacatgaaaataagatcaaaataacaacaaaaaataacatacagataataaaaaattaacaacaaatgaacaaaattttaacataaacaccatattttatataaataaaatcaaaaaaatcgtaaaaatgtttaaaattccgtaaaaccgtatttttatgcatttgtgaaattaagcacgagaagtggtatatttgttgactgttatattaatattactatataattctataattgttctttaatgtaacaattagtatttcttaataaaagatttgagttcaaagaacagatttcgataaatgagatttattgaaatgttagatataccgagagagtggtttgtaatatttaactaatttgaattaatgaatcaaattccacaataacaacaaaaattagtgacaaagttaatactttctaatttcgaatattagagtcgcaatataattattcaagaatcatatattaatagtctcaataattattcaatacattaagataatattgaatataaaattttaggggaattactctatatactgttttttttaa

SEQ ID NO: 369187 - DNA, 525 bp, Cannabis indica
tcattatattccgttgcacccagcataaggtattcttaaactcttatgtgtttatttcattgttttagaattcatattaggatgttaatgaaatatacatggtagtaaatctagatcctggtaaaatatatccaacatcactctcatccagcactttcaacctaccaaatctagtttctaactctgttagacaactaaaagatgagagacaccttctatagtgatttagagtctccttcattgttcttcataatcgacccatagtgatagagtgccatgccgatacataggaagtcaagtactcaatcatagtgaggaagacggtggtaaccaacctgaaagagagaaagagatctatgctcagatcttgttattactctgcgatagaaaggaacaaaactaagagatttgagcggaagaagtcatattattctgctgcaatcaatgtaaggttttctgaactcttatgtgtttaatttcatcgtattagaaaattcatatttaaatctaaatcttggtaaaata

SEQ ID NO: 369188 - DNA, 561 bp, Cannabis indica
aactctttgaactttagactataattaatacaccacggtatctctacgtcacatatattttgattagacatggacataatataatatatgaactagcaaattaatagaacttattcttaatctagtaagtgttccaacaaacatgttactatcgtaatagtaaattgatatcagtaaaattcattggatagataatcacaatactttattatttggaagatactagtgataacctactaaggaactttagaataaaactagtaataacttatttgtattatgaggataagataggaaatttttgtaatgtctattcaaaagacttaagcacaattcctggtccttatgaaatgttttatggtatctgtaatgattacttaatcttaagcaagtattttacattaatgttaatactaaaatgttatgttgatgacttagtctagatggaacttaatgttccagactaagacaaaatgtcacaacaaaaggtccctaagtatcaatagtaagaggttaaatgcacatttgtgtatgaatttaaccagactcctactgttgagt

SEQ ID NO: 369189 - DNA, 1284 bp, Cannabis indica
actaggtagcagtatacccccttatcggtcctgaagctagtgcactcttgatctgctacgtgcatcttaatttggttgtaaccggcgtatgtgtccatgaaggacagtagcttaaatccagaggtggcgtccaccatctggtcgatccttggcaaagggaaacaatcatttgggcaggctttgtttagatcggtgaagtctatacaaacccgccaggtcccgttgggctttggcaccagtaccggattggctagccattccgggtagtagacatctcgaatcatgccactcgttagtagtttgtccacctctttttctaaggcttcagccttcactgagtcgaggggacgtcgcttctgctggaccggtggcatgtccggattgacattgaggacatgggtgatgacgtggggacttatgccggtcatgtcttcttggcaccacgcgaaaatgtctgtggcgcccctcagtgtctttattattttttctttttcctccggttctaggctctttcctagccggaggactttggtggagtcgaggtcgcacaccgacacttcctcgacgtcctccattggttctacaattttttggatcccacacggggatccaactcatcctcttctgccatttctggctcaataatttctcggaccatcaagacgggtaggtgggcagcaacgttataacactgcctagcctccccttggtttcccctcacggtccctatcccaccttcttgggtagggaatttcaggcataagtgtcgtattgacgtgactgcgccaaaatctaccaaggccggtcggccgaggattgcgttataagctgttgggcagtccaccaccacaaatgtgcaatacttgaaagtgctttggggtgtgtccgggcacaaggtgactgggagcctcacttttcccatcgggataagtgttgttccattaaatcttgtgagttgggaaccacttggtgaaagatctcgatctgttaggcctattgcagtgaaggcctctttgaataatagattcacgaaactcccgttgtcgatcaagactctggccacgatcttattggcaatgggagtctctatgaccaaagggtcatgctgaggaaaacgcagtgttttagcgtcttcttccgtgaatgtaatgcgctgatccattagctggggcctttgagttggcagttgagtaacctcccagacctcatcgtgtttcacggcccctgcgtaccgtttgagctccttgcgggtagttcctccgatgtggggccctcccaagatca

SEQ ID NO: 369190 - DNA, 560 bp, Cannabis indica
cattgatagaaaatgaatattaataagttgtgaaagatatattgtattgtccaatgtattctaggaaactaaaatttaaaatttttatttgggatctaaaatttaaagtaaaaaacttaaaagtataccaaatatacaatgagtaattattctagctcggaccaccactactaatctaactctaagtttaagttgcctcaagtaagcatatataagtaggagattttctaagatcgaggatttatatcattttagaatagaatgtcaggaatatagtcatctgcaccattcaatttcataagaagaaattagagtgacatcataagcagatgatttacaaaccattcatccaatgatatactatttaagcaaatttgaaatgaaaaagctaagaggatactaataaaggataattttgaataaaataagagtccaacgatgtcccggaaggtgagagtcaaaattattcttattttataaattcttcattatttcatatttcaaacactagtctaagttgttatctttggatgtacaactagatgttacatttataaata

SEQ ID NO: 369191 - DNA, 530 bp, Cannabis indica
taaggcataaaacccaacagctaatagagattcctctaaagtgtatttcattagattgcgttctgctagtcaagaaagtgaatacttttaaagaggacaggtcagttttatcgggtaccatagttggtatcatcgacgccttatctgttttacctagtgcttcccttcatcacgtttaaagagtgctaaacatgttggatgctctatgcaatgatagggatcatattaggagagcttgatggctctcttgtttccaagtttgtaattgtttcttttcctttccctcttgtgggttgttgcaattacatcttcaaaaaaaagtgttaaaattctaattgatttgatatcatttctaatatatattatattattttattgaaattatttttattttcttaaaagtttttttgacatttgtattttcaaatttttttattaataatataattaaggagaattaccacatatactgttttttttaacattttttttttccacatttacggtttgggtttctaaagtggttgtag

SEQ ID NO: 369192 - DNA, 551 bp, Cannabis indica
gtagatctaagatcctggtagaaaaatctagatcgtcttatctgaatattaagtagtgttttgggataaacacttattggtttaccgttgttatgacatagggcctgagatcatcaatcgttccaagtaggtcgaccaacatacctaaaccgaaacttgaggtaagaaaagataatgtaccacatagcatgacatgtttcgtaattgtcaattgtctgattaggcaatgacaatgtgaatgtgatatacaagctcacctaattaggtgatgtgatatatgggtaccaggtcatggcaggcttgcctgattaggcaatgtgatatagaagttcacctgattaggtgatgtgatatatagatggcaggctatggcatgagcttatttgtttaggtaatgtgatatatggataccggtattcgggttgttcttgtgaggcaaccacgataaattcataactttaaattgaaattgttgttaggtttcttctagtcggtgatcttggttaggtagcggcagtgacatatgggtgtcagtgttggaaattatttta

SEQ ID NO: 369193 - DNA, 559 bp, Cannabis indica
tcttctctataccctcgaaggtcatcacacaaagaataagtgagccttcacaaaaaataacaataatgtataacaagagtaaccctaacaccagagaagggaaatctagacctattacgtgaaaaatcaagggaaaacattcccagaaacttcaaacaccaaacccagaaaaacaaacaaacagtaaagcatgccataaacacaaacagtaaagtgagggatgcgagaaacttacatgaagtgttggaactgggggttgctgttgatcaacaaagaaatgtagactgacagtaacgaacaaaggttagcaaagaaatcggtaaagtgtttgaaggttttctggtatgaggatttctttctctctggaaaacacgaagaaacttggcgaaaagatgaaagtaaccaaatgaaagaaaggtggtggcttttataggccaaggtgcatgtggaacaggcacaatcacctaccaatcgaacggttggggaagcgcacgattcgaattcccaagaatcaacagtgagattgatccgtaattaaggtggtggaaacgtttgagta

SEQ ID NO: 369194 - DNA, 515 bp, Cannabis indica
atacaaaatatatataaaaaaatatactaaaatacaaaatggatgacattaacttttttttcttaaatgcaaagagatggtagttagaatattatgggtttgtcattatttttacattagcttatttatttttcatgtacttttttttttttaaaaaaaataaatttatacaattattgtgatacattgaaattttttgtgcttaataaagactaatttattttctaaagaatactaataaatatcgaatgttacaaattaatgtgcaaaattaatgcaacacatatgctcttattttattttgttggagaaaatgtcaagctcttaaaaattaagaaaaatagaataaaaaatgtagggaatgccacttaaactctttggtgctttcctttatatatataaatatatatatatatatatattgatgattaattaaaatcaattatctgagtcttacaagcagtatatttttaactagtatggggaccgtgtgcctatacaaccgagcttccaat

SEQ ID NO: 369195 - DNA, 558 bp, Cannabis indica
ttggaaaccttggaaaataaaacatgttaaatttttttttttgtatttttataacatatgtgattacttgttattttctgaacttgtgtatgaatttttgaaccaaaaccttacttctgtttattgatatttgtagtgccaacatgaacaacccacaccccgacccactcctagtaaatgccttagcaaatgaactctatagtgtgaaaatacatcctggtagttgcataaactcgcacctgttgatgatgaatctgaagttccaaaaggcaaatctacttggaattgaattatcaaaggaacaatgggtacaattcatacttaatagtcttcctccggagtataatgcatttgttgtatcctacatgatcaacaattttaactcctccgacatggataagctcgaagcagaattacgagctcatgaacggaatttgattgcaatgccacctcctggttttgcaaactttaatcagaggaaaaggattaagcatgaagcttctaacaaagctgcttcttcaagtacaattattagacataatcttctatgttcgaatt

SEQ ID NO: 369196 - DNA, 530 bp, Cannabis indica
ggcaaatttttgaggctcttgaggtgaaaagtagggagaaaaagggcattcctcagcacatcttcttctcaaaagcttacaagcagcacaaggtgttatggtgttatggttttaaggtcccagcaactgctgtaagataggggaaaaggatcttgtagaggacgagaatggtgagggagaggaaggccaaggcggtgacacatgggaaaagataggatggtgagcggtgcatgattcgggcggtgggtactagtcccattgcgagcggtgatttttctgggtttagttttgggaagaagagaaagaaataaaaaaaaaaaacctaaccctaaaatcaggtggtgaggtctgggtcgtggtggcgttggctcggaaggaagggaatggtggtgggtggtggttggtggctaggttagagagaggagtcgaggtggcttggggtgatcggagaactgccggggtggctgccgaggagatcaagagagcgagagtgatagagcgagagagatgtttcagacgaaaaagaaaaa

SEQ ID NO: 369197 - DNA, 908 bp, Cannabis indica
attaagaatctaataaataatttaaataaactaagattttttgaaaaaaaaatcaaacttatttatatttataaactcatatcttaacaaataaaaaataattaaaaattcaataaaatataaaattattttgaaaaaatattataaattaaactgaaaaaaatgttatggttactttaaacaaatctatattttttgattaataataaaatatactcaagtttttttaccataaaatttaatctttacgaattgaatttttaatatataaatgaatcttctaataaaatataaataatttttttatatcgcttaattagttttaaaatttaatttattttttatttttttttaatcattcaaaatgatttttttaagatctaaattaattttttaagatttactaaaaaaaaatattgactctttcttttttattttaagggggtacgatttgatagttgtcaaagtttagagggcaacgttgccaattgacaaagtcacgtcattatttaaacggaataataggacagaacctaacagaaggactaaatttctgtaaatgtaaaagttcagggagattcttaacaaatcgtatattttaggggccaaaatcaatattgtcgaaagttcaaggggcaaagtagttacaaaacacattttatttttctattttcaaaaataaaaataaaagtagttattaaacacattttaatttatcagaaacaaaaaataataaaaaaaaatactttcattttgtgatttaaaaattaaaaagtaaaggtgatgtttggtaacaattatattttctaattttttacgtcacaaaataaaagtataatttttttatattttgttttaaaaataggttaatcaggaattttccctatgaactttgacatgtaccaaat

SEQ ID NO: 369198 - DNA, 551 bp, Cannabis indica
ataaataaacaaaatcgaaaaaaaattaacaaataaactaaaaaaccaataacaataacctaaaaacaaataatcaaaccctataataaacaaaaacagaaaatatatttgtaagccaaaactttccatagtaaacaagaaaaatacccatcaaaaatctaaaacccaaaaataaaccataaccatacagaaataaaacaaaataaacttaaacataacctaaataaacaaaatcgaaacaaattaacaaataaaccaaaaaaacacataaacagtaacctaaaaacaaataatcaaacctataatcaacaaaatagattacaaacatcatgaaaaataacaaaataaaaacaacacccaaaaaaccacaaataaaaaccgactaccatataaaccaaaaaaatattacaaacaaacatcaaaaacatttaaaaacataaaacaataaactataaaatctaaaaataaattaaatccctaaaaatcgtaaacccaatacaaccaaataaaaaattaaaaatcataaaaataccttcaaatcattacgaact

SEQ ID NO: 369199 - DNA, 629 bp, Cannabis indica
gtcattaggcttaagaatctaagacagttttgatacgtagcaatgcctgttgagggaatttgtcccatatttaagaagaagccatgattgttgcatggatggagagttaaattatgaattattattttatgttagcaatgccttctaggttttggacatgagccaccacatatattgtgtcaaatgatttatgagaataggaatttatcttaatatttgtcattcgatttgtaataccttttttatttgggtaaatagcggtataagtaccctaagttttatgtttgtaagcgacataaactcaatgtttatttttagttggcataagtacccaatgtttgtaaaactgtaattttcttccagtattgtcagtacagactctgttttgaatttattaaaagaatagatactatatatttttatctagatccaattatcaaaaatttaggccttatatgtgtcctatttaagactatcaaattatgtactaataaaattagagaaaaaattacagttttgcaaatattgggtacttatgtcgctaaaaataaaaaatttggtttatgctgcttacaaacataaaactttgggtacttatgccactatttgttctttttattttttttctt

SEQ ID NO: 369200 - DNA, 553 bp, Cannabis indica
tctcatccgttgattgtgggtggaacgcttcaccggggtttggtggaggtaccgttggagatgaagcctgtgggaagaaagagagatgagtcgactaggtttatttttaggtattttattttttatttttttattcatttcagtttctatttttaatattaataacttaatatgaatgttaaatttagtttattattattgtttgacattttaaacgaatctttatttttctttaaataaaaaatcaaaactaaatggctttgaccaatcagaagttccaagtatttatctagttggcatttaactgaaaaattaacatcaagtacctcatttgtaataaaatattgacagaaagtatttttaccacaaaaaaattaacttaagtattaatttgcaattagaaaataaacttaagtatttacgcctcaagtaattaggtactaaaagtttattcccaaatagtgaaagagggacaatagtttgagaattgggtaggctataactttgtgtatgtttttttcttatttgtggaatagtgatgatggataacttt

SEQ ID NO: 369201 - DNA, 508 bp, Cannabis indica
tagaaaaagagaaaaagaaaattggcaaatactcacccaattgacactcactcactacgctccccacaactcccaaatatgcaataaaaattagtatcttataaagaccaatgcgtcttggggtgaggtgaaaaagagaatgtatctctagctaggctatgtagtggctaagaaaagaaaatgttaatatcaagctcaagggggaaaactagggataaaatattcataagggtaggcttcaaggttcaaacggtccaaacacggcctatatcacttcctcggggtagggatgtctaggatttcgcctcaaggaaaaattgctaagtaattctagaggcttaaactctcacaaaggtttagttcgaactaattagtgacacaaaccatttagtcaagctatgagcacaatcaagagaggcaaactttcaacaacgaagggcaaccaacatgctaacttaaagcaggcagcttaaaactcaaaaagaaaaacattcagtttcaagaacta

SEQ ID NO: 369202 - DNA, 531 bp, Cannabis indica
gatgtcatgtatattgaaaaaaatgtgtgtgagagtattgtcggtacctaacttgatattcctagcaaaactaaggatggtttaaatagttgttttatatctcgttgaaatgggtatatgaaaatctctggcacctgaaaagaaaggtaaacgattatatttgcctcttgcttgcttcactttgtctaaaaaggaaaaataaatagtttgcaaatcattttcaaatatgaaagtacctaatggttactcatctgacatcaaaaacttgttaaatgaggctgaattgaaactaatgggtatgaaatcacataattgtcatgtgttaatgcaatatctgcttcaatcgccataagatcagtcttgtcaaaaaatgttcgagattgtttgacacatgtttgcattttctttaataagttatgtaggaaggaattagaaatggataacttagatgcattatatgaacatgcaaaacattgtgcaacctcgaaaaaaattttctgccatcttttttcgacatcatgatacatttaa

SEQ ID NO: 369203 - DNA, 820 bp, Cannabis indica
aagatcgtagtcggcaagctaccatgctgatactgtaggtcagaaattgccgaatgtcattcccctgggagagacgaacgaggatccaacgattagtacttcccagactgcaaatggtcagccgcccaatcgccggtcacaagttccactcgtgggcccagcggtaggcgagcagactttggtaattcatcaggaggagtcatacttgatggttccaaccagatcaatggtgtcattccacccgtcaaccaagcgaatcaaccgctaaggcagtcaagcgcttctatgttcgaaaggttagggacagcccatgacctaaggaatgatctaaacagaaggaggggagcaaacgatcagaatgttacgacaatcgtgcagcccggagtctgtactcaaatccccgctcagaaagatgccgacgtaatccaaattgaccagaatgccgagccggtcagcccaaccgtacaggctcagctagacgaactgaaaaatatgtttcacggcatggctggacaaagaaataatgatcttgagctagaccgagcacgcggaactcctttctcgcgggagatcaatctcctgccactgccccacaagttcaaaatgccgacgtggaaaatgtacacggggagagaagatcccctttcccatctcaagtacttcgaaatgcaaatggatttgcaaggggtacgaggagatgtatgctgcagaatcttccctgccactctgtcagaagccgctcagcaatggtatttcaagttggctcctggaaagtttagttcatggaaaaccttctcttcgaaattccatgcacaattct

SEQ ID NO: 369204 - DNA, 859 bp, Cannabis indica
aacattaaatgttatttctgatctatattaatagtaaatctggttatattgaaatgagttttattagggcataaaacccaacaccccagcccttcgatttcactgtctgaagctaacttagccagacagtccgcgtgagcgttcttttcccaggggattctttctactttgtagtccgtaaactcgtggagcagctcccggactattgttacatatgcggccattcgctcgccgcgtgtttgatactcccctgatatctaatttacaaccagctgtgagtcactatagacttctattcttttggcccctagggccttcgctaatctcagccctgctatcaaggcttcatattccgcctcgttgtttgaagctgacaagtcgaaccgtagggctgccatgatatcatcgcaacccccgctccggatctgttttcattggaggctccatccttaaacactctccatgtggggatcgatggcatcggtgcattcccggttgcctcggcttcattacattcggtgataaagtctgccaaggcttgtccttttatggagatgcggcggatgtagtgtaagtcgaattgacttaactccattgcccatttgaggagccttccgaacgcttcttgcttttgtaggacttgccggagtgggtgattggtcagtaccttaattgggtgtgcttgaaaatacggctttaattttcttgaggccattaggaggcagaaaactagtttttcgatgatggggtaccgcgtctccgctcctatcctgcgcttgctgacgtagtacacaggatgctgagtttttctcttccggactgggcagcgctgagcacatgctcggagacagccagatat

SEQ ID NO: 369205 - DNA, 710 bp, Cannabis indica
gggcataaaacccaacacgatgaacaacagctggcctttcttcaggccatgatctgtacaggaacccctttttagaatgagttgcagcaggaaggagcacctagcctccaggactttcaaaagagagtccaaaaatacaataatttggaagaagcccaaatagtggcttactgagggtattacccgaccggggtatcaagatatgcgccaggagcacagccttcgagagctccacctcctgccactccccaaacaagtggaatagagttctccgctaccctagggtacaaccaaagcctcgctttaactcccgcattgtcgcattttggtgcgcccatgagcaacccatatggggtgagtgtctaaattctgtcccagtccgcaccagccaccagtatggcaggagctcaacaaagctcccagagtaagagatcctccaaaggtagcacgtagactgaggacaaaagacagcgaagggggtatactccacaatacactcaatacatggagcttacagattctcaggaacgtgtgtacttctccatccgaaaaatacacattaccggaagaatccacccttgtatagggatagctcccagagagaccccaacaaaagatccaactgttgggttttgtgccctaagtaaaacctattttaatataatcatatttactagttaataaagatcagaaatcattttatgttgcat

SEQ ID NO: 369206 - DNA, 617 bp, Cannabis indica
ggtgaaaataccctgtttgtgttgattgaagaggctcctaagcagctaggtgagatgcgccaaggagtcaaggaaaagttcgagccttggaagattgctaacaataaagcttgatactttatgttgtctagcatggtcgacaccttgaagacaaggtttgctaatactctcacgactgcagatatcatgaaccagttgattgaattgtttgggatggcgtcagattaagctcggtttgagacgacgaagaattttatcaatgcacggatgaaacctcatcagaacgtacgtgatcacctactccgaatggaaatttatttccaggaagctgagaatcatggagctattatagatcagaaaactcaagtgagtttgatcttaaatagtttgactctagcttttctgcccttcacctcaaactatgtcatgaacaagttgacttttgacttccacgagttaatcaacaaccttcagacatttgagaatttagttagaggtccagagaaaggaggaaacaaagcttctagttctggcactgctaatggtacggtcaaggctgaggcaaacattgcctctacttcgaaacccaacaaaagaagaagtggaagaatagtaag

SEQ ID NO: 369207 - DNA, 897 bp, Cannabis indica
aaagggttttatttagggcacaaaacacaacatgtaccccactgaaatggtagccgaattttaggtataacaatctccccttaaaaagtttgtttttagtaaaaagtgctttttaataattatagaggatttttgtcataatcctttttggaaagacgtgtcctttaattttggcggttgtatggttttgagggtaattatgaattgtctcgtcatattctgccctattcccaaccgttagatttcccaatccttggccttcttgtcactagactttgtgtataaaagggcggctcaagctttccattttcacaaacttatagtttttggtgagatccatcttgagattggattatctctttcttgctaaaatgtcccatctgagtttagaggttcacccctccaaattcataacaccaggatgcaccaactgtttttcttctccattcattcccaaggtcttcaaaccttaattgaaacggaaatgatggattccaaggttgaggagcttccaactaatccaaaccaaggaacccccttgattgttaccggcgatcttcacaagtgactcttgagagtaagtattgtttcttgtgaatggtgctttgagtcggatcattattattttttgaagatggatctcactaaaaaaccataacaccaggatgcaccaacaatttttcttctcctttcgttcctaaggacttcaaacctcaattggaaccggaaacgatggattccaaggctgaggagtctctgactaatccaaaccaagggaaccccgctgatcgttaccggtgatctttacaattgactcttgagagtaagtattgtcccttgtgaatggtggtttgagtcggatcagttacattttttgttgctccatcgtacccccct

SEQ ID NO: 369208 - DNA, 993 bp, Cannabis indica
taacaaatcaagtacatacttccttttagatagaaaaatgcattatttactccaagtaacttcaactcccaagaaatacttgagcacccccaaatccttcatgtgaaactgcatatgaaggaatggtttaagggatgagatacctctagtatcatctccaacatcatccacatacacaaccaaaataataataccggcaattgatcttttatagagcaaagaatgatcaaacttacttttcaacataccaaatctcttaacagcctgattaaatttaccaaaccaagcttagggactttgtttcaaaccataaaaagatttgtgaagacaacagactccccatgactccccttgagcaacaaacctaggaggttgctccatatacacctcttcctaaaggtctccatgatgaaaagcatttttgatatcgaactgatgcaaaggccaatgatgagtagctattatggaaaagaacaatcgaacagatttcaatttagaaacaggagaaaaagtatcacaatagtccactccataggttggaccataacccttagcaacaaggcggtcctttaagcgagcaattattccatttggattgactttaatcataaagaccatttgcatcctatggcttgctttcctgaagtaaattaaccaagtctcaagtatcacttgcaactaaagcattcatctcttctatgaatgcagcaggccaaccaagatgagatgggcttcacgaacagttttaggtatcgaaatagaccgaagagaaacaattaaagaacaagaagcagggagaaatgattataaggaactaaagaagaaataggataggtacaaaaacgtttacctttacgtagtgcaatggaaagatcatagctggggtccggatctaatgacgaagaaacaggtgcaggatatgaaacaggaggcgggagaggtggaggtaggggtgttcttaaaaactgaaaaaccgaaaccgaccatcaaacc

SEQ ID NO: 369209 - DNA, 699 bp, Cannabis indica
tatttatttaataattaaaatcaattatcaaataaaaattaccatttaatttatttattaattatacttaataaagtctctcaattaacaaataaattctaaaacctcttttctttaaaattaaatccttgcttagtgaaaattcataaataagacatagtctaattttagaattataattgattaattaaaaccaattaactaagtcttgcaagcagtattgtctcaactagtgtggggatcatgggcctatataactgagcttccaataagtagatctaggatttaccaagtaaatcctctaatttattaattcctctttgcaccactatagatttggaattgcactatatgttccacgatatagatacgctatgaaattatccatcattctaattctaataatcaaagatcctctaaagatgatttacatcgagtattatggacaaatttaccatttcacctctcaatggattttatcctcaaaacacttagcttcctataaatgatatttcagtaaactaatataattactgaaataagagctcttccatttatctctattaagccaagctcgaaggaaattatcatttcacttctatgtcaagatagaagctatagattttgtatctatgattagtgctcccaaataatactcttgaagatcgaacctaaccatatcaggattaagatcatttg

SEQ ID NO: 369210 - DNA, 570 bp, Cannabis indica
acctggagtgttcggtctcgggacatctggggttgtattttgtagtcgttgtgcgaccagattttattatattttgagaatgtttgtaaagtttaaatacgggatcccgacttttgtaaataatatataaaatgttataaagtttagtaaattaattaaaaaaatttatttggcacgattttcaaggaaaactctttgatcagtaaaggtggcatattaattagaaaatcactataacatgtctaagttttagggcgttacaatgcctctccatccacgcgtgtttgcatactctccaaatttttctaatttttctaattttcaagttttttaaaaataatttttaatgaaaataaacttcaaattttggtagatttttatgtagaatcttatttttgaaatataaatctaattaatttaaattaattttagatattaggagactttaaatttgaaaaattaatttttctacaaatttgctattatggttgttttaaaatttgattatttattatttattattttatttataaattttaattataagatcagatatttacatattatatt

SEQ ID NO: 369211 - DNA, 710 bp, Cannabis indica
cagtccacttagtaaagtagtcgactgctaccactgcatactgcactccgcctttacctttaggtaactgcccgattaggtcaattccccaaatggcaaagggccacggactttgcatctgtgtcagctcgttgggcggagctcttggtatctttgaaaatctctggcacttgtcgcacttcttaacataggctctcgaatcttcaatcatcgttggccagaagtagccttgccttagaattttctttgataagctttgtccgggtgcgtgatttccacaaaatccatcgtgaacttcagattaggggtgttcaataaaatttacaaaccgcccaacccgaataaacttcccaaaccaaacaaaataaatcaacaaaaaatacaacccgaaataatacaatgaaattccaaaccgcccaatgaatatattgggtggtttacaaattattctaaatcgcccaattaacccgaataaaccgagttaaaccgatttatatatttttttaataaaagtgtatatcttatattatataaattacatttattagttaaactattttgtatttaaattttggacattttaatttttaacttaaaacttagattttatagttaataagttttattgtattttgatattgaagttaaagtttaaaatctataccatattatcactttttttttattattttattcaattattttatgtt

SEQ ID NO: 369212 - DNA, 590 bp, Cannabis indica
ctctctctctctctattatttctgtaaattgaaatgtgaaccacacataagctaggagttagttgagtctatttatagacaaaccaacctaactaacttaaccataaaaccggtaaagcagttaaaagcttaaagaatattctgccaagtcttagtttctaggccatattacaacagtacatatattttatcggtttgcgaaaaaattaaaaataatttatagtactcaaaatagaaataaaaagaagtttttgcaccagggaacctaattttgcacttatttacggatttggcctcgctttaaataatacggttttataccgtttttttttcaaattttttatgccacgtataccgtttaatgtgttattggttttgtccatatctgatacgtgtattacacgtttatagggatatagctagatttgcctttttcagttagtcccaatcagtcacgatcatttccttctttttctttaatcttctctctctctcattgttcagtttcaaaactttttttgcttaaccagtcacgatcttagacggtttatttcctcaaggttctatatattttgaattgatcaagtaag

SEQ ID NO: 369213 - DNA, 600 bp, Cannabis indica
agatggtggttactctgggggtggtggaattattctagaaggatgtaaaaacccatctctaataattgaagctccatcagtgaagctaaattacttagttgttttcgaaagcacaagaaacttattcaaactgaagaaacttcttaactggttttatctctattccattttggatagaattagaaacatgtctactatctattcagatgcacttaataaacagtatagaattcagtatccctagaggagtaatgcatatagataatgatgttgcataatgttttatgaacacaaagaaagtaatggtggagaaataagttgcttaccatagacttatagttcctctaatttgggtttagtcaaatacactacacttgatctggatatcaagacaatagattaattgaaatgcactacttgttttatgttagtgcaagtgggagtttgttgagattttatgccctaattaaaactcatttcaatgtaatctgatttattttcaatagaagattagaagtcatttatatttacatgtagctttcatattcatggtttaatgtgtacaatttctgttaagtccagaacatagagttattcaca

SEQ ID NO: 369214 - DNA, 799 bp, Cannabis indica
cattactcacttttatcaccttcgttgctaagtaaactccagagcgaaaagagagagttttctgcttcagagttgtcgaagtgccttcagacgattgctggcttgcttgaacccggacattcgaatctttgagtaagtttctgattccctttatgctttcctttgcatgtttacgctttgaatgtaactttgttgtagaaagaacgtttaggaaaccctagggtttgaaacttctgcgactcttcttttccatgtccttatgttagctttcagccgtagggcttattttagaactgcattgcgtctattttccatcttgcttattccaagcttcatgaacttttttgccctaactcaagaaaactttctgacttcttgagtttagacttttctttgaacatggtcgttctttaatctgttgggtactcctggtcggcatatttgcttgtttttcgtttgatactccgtccaacactcatcttgtgtgttgtcttttgtagatgaacccaggtgagtcttgggagcccgagcatcagatcgaccaggagctgcttcaacttctgcacgaagtccacccacgtcttcgtgctaactctccttctagagaaggaaattcttctgactccgtactcagccataggatgatggctcgtacgaagaaaaccacacgtctggttgacgcttctgacactcaagtggctcggctcgccactttgcccgatgccgaaccgatggaggaggaccgtgagggggacgctaaagtccaggaggttgaagagttggacgaggcgcgtccggg

SEQ ID NO: 369215 - DNA, 457 bp, Cannabis indica
aaggagtctggaccaccaacgactgggtatgaactggtcaggagggtccctgagcgggtgcaggcaccaactccacctttgcccatgctgccagaggccaagaagggcaaggagatgttggcccactccggctggttcctgaggtcagtgagcaactggctggtgctgatagcgactcatctctggatgtgttggtgggcggagtcttgaaggagctcaccagggttagtctttttctttgatacttcccttttgacttttcacacttagctccatatgctgactttttcctttgtgcaggccggtttgaagttggcttacacttactcccgggctaaatctgctacttccgagagtgcggctctgtccgacaccttgaaggtggaggtggacttggccaagaggaagctgaggaggccagggcaaaaactggagctattcggcatgagctgggcaa

SEQ ID NO: 369216 - DNA, 772 bp, Cannabis indica
tttgaagacagattttatggccttcgggcccaccctttgaacgagggcccagtccctttcaaccatcaaaagcacatgaaggagtatcgccaccgcttcttcctttcctctagtttccaggctatggaccgcccggagcttcttacagagtgggtcaggatcccaccttacatgcggaccgcgcctacccgagtattcctccattgggccaagactttctccacgtatgacaagaattccctcaacgttggggacttggtcactacagagaactgtcggaaggccaagctgatatccgagaatcagtcggtggatgacttcaatctttccaaggtcatctgcgcgaatgtaaggactccggctgcggaaagggcgctccaagtggacataatcgcctcggcggaggaccggtaccagaggtacctctttaggagggaacaggagctggcctacatcaaggcccaggcggcagccgggaggactcttcgtctggaagctcctccggagcggaggccctccaggcccaagcctgtggcccctgttcccaacactggtgctcctgacgccagtacttcatgttctggtaagtctcctttagtaattcattatgtccctcctgtccgagagtaacccagcttagacctatagggttcgatgagcgcctctgtaggtttagaatgccttccacccggtgggggagtcacgccaaggaatattatttttcccagttaggccatttcttgggtcgatcccggatgggctctggacctcc

SEQ ID NO: 369217 - DNA, 719 bp, Cannabis indica
atcgatctcatgtcgacatgatgtcaacattgtgtcgacaattttgtttgctaaataggcgggatcatatacttggaatatcgacagtatgttgatatgtttgcgacaatgtgatgtaattactttctgtgattgctaagtgtgatatcgattgaatgtcgacatcatgtcgatattgtgtcgacaaattctcaaataacttatgtatgttaatttgctttttcatcgacatgatatcgacaaactattgacaacatgtcgataatggtcatccctgacctttcttagcaggatatcgacatagtatcgatattctaccgataaactgtcgagaacatttggaaaacccaaatttcgacagaaaactagatctacaagatctctacgatttcaaactaaaaaataccagtttcaacaaatacgacacatataacgaaagcaaactacataaagtctaacaaaatgcttaaaacacaacttatccattataatggtgtaagattcttgagtgattggggtgtgttccgattttttaccaccgcccaccgagaaataaacattcgacagggaaaagagagagggaagagagagagggaagttttttcagtttttctagagagagaggtgcatgggaagagagagcgaagtttttttagtttttaacaattttttttattttaaaaaaaaaagagtaaaatgggaagttcatgtaattaatg

SEQ ID NO: 369218 - DNA, 1067 bp, Cannabis indica
attatgttgctaattcaattttaattaggttaaactagtataataagcctaatgcaattatttaaataaggcaaatggaccttcacaattggggttgttcatgtgagggatggctgggttcagtatgtcgtacccactaccaatggccccctaactctcacacaaggcccaaacgagaggaatttaacctttcattaaataaatgttattcattgaataagcccaatactaattggacctaaataaaactataaagggtgatatttcattttagcaacctaatccatttaaatatctaaaaataaatgggtttcctatatgcatctaagcccaaaaataaacatataggttcacacatgtcaaattgatttggatggcccctatcatgtttctaggtttacacagatgaaagaaatacaaaatttacctgttacaatttatttatgggatctattgacaattggacaatgattaaaataagatcattggatctgtcaacaacttaaccataacaatttacatcaaataaataatatgtttgttaaaaaaaatttgaataaacaatataaataaaaaaacaacaatgttcatgtaacaaattgtgaatcaagatatttatataattaaattattattttaactatacaattaaattttaaaaatttaggattgttaaaaacaaccttaaatatctcttttcaaaatttaaaatttgaactaattttaatatatctaagtttatttgaattattttatcaaattaaattaaatatctaataatataaatgatttgaaaataacctaaaagatattttcaatatcatcttctaatcttataaaataaaccaattttaaaatagatatggttaggcaattattattttagaaataaaataataaaaaaaataatagttatcctaattatatgtcaaaatatctcaaattaagtatttttcaaaattctacaaaaaaatatctacgttatttaaatacttgaaatactatttataaattttaaataagtaaaatgttataaaatatcatttttctaacttataatttatgaa

SEQ ID NO: 369219 - DNA, 562 bp, Cannabis indica
aaaggtaattgtcttgtgatggtttgtttggaatccaatattattgatgtgcccttaaacaattggtggttagatactggtgctacaattcatgttacgaattctttgcaagcagtgacaagtcgaagaagaccgagtaggttggaggagtatgtgtacatgggagacgatactaaagtcagagttgaattttttgggactgttaatctgaagttgaatactgggcattttttggagttgcatgatgttgcttatttaccctctattaggaggaatttgatctatgtatctattttagatagactagattatagtcttcattttggaactgaaaaactgactttgtatcatgactctatgttgattggtaatagaacttcgtgtagaaacttatataagcttgatttacttgatgttgctcttattacttctccctcttttccttcttcttcttctcttaatgttgttgttggttctaaacgtgcaagatcagatatgaaatcttccatgctttggcacaaacgtttaggccatatttctaaagatagaatggagagattgg

SEQ ID NO: 369220 - DNA, 757 bp, Cannabis indica
tttttaaaaaaaaaattatttataaattaatttttaaattaaatttatattaaaaatcgaaataatactaaatataatctccaatatattataaaactaaaatttataatgttattacaaaactatatatattaaacgtcataaaaactaaataaaagtattctgaattcataaacagtaatatctacagtgtaaagtaaaaaaaactacaaatcaacaccatcatcttcgtcatcagcgggaggggcagcctgtgaggaggaaccagctgcatggccaggaggctgaaatggtgaaatcggtggaatgggaggcagatccggcatggtaaaccatggaacagcgctggccaattggatcatatgttgttggaacacactcatgatctgattttgagtcatcatcatctgttgttgccactggttccgtgcctcttgttcttccacccttcgcttcagtgcctcatattcctcttgagtgacactggcctgcccagatgcacctaccctgggagttgctctttttgccctcgccttaggtcttggcaactgtccgagtcctctcaagtggcgtgactgctcacccaatacctgtgtcatgatatgcgtatctgccagaaattgggtggggtcgacacagtaatggcggggggcatcacctatcacttgtttaatatcccgataagcataatggtaaataattaggatttataattatattatgggttaataagataataagtggaattatgatccta

SEQ ID NO: 369221 - DNA, 873 bp, Cannabis indica
tccaccaaagctttaattttcgcagggttagcctcaattgctcgctggttcaccataaagccaaggaattttcctgatccgactccaaagaaacatttgagaggtttgagtctcattttaaatcgtagcagtatcttgaacattgcttgtaggtgggtgacatggcctttcgcatgttgagattttacgagcatatcaacatatacttccatctccaatcagatctgcacacatcatgtttactaacctttgatacgttgctcttgcatttatcaaaccaaaatgcattaccttgtaataatacaaacctcgatctgtaatgaaagaggtatgttccttgtctggttcatacatcgaaatttggttatatcccgagtatgcatccatgaaattgagaagttcatgacctgcagtgggatcaaaaagttggccaatgctaggtagtggaaaaatgtcgtttggacatgctttatttaaatcagtgaaatcaatgcatgtgcgccatgagccattaggcttgggcactagtacgggatttgttaaccagtttgggtagaatgactcccttatgaagccacatgccaaaaggcgatctacatcctctttcagcgcttggtacctcacggggtccattttgtggcacttttgtcggacaccttgcactttggggtcaatgttcaaccggtgacacttgacctgcgaagatattccgaccatgtttgaatgtttccaggcaaaaacatccaagttttgtttgagaaaagtaacaagcttttctcgctgttgaaaagctaatttagaaccaattttcaaaactttgctattatatgaaggatcgattggtacctcaatggtatcttctgcagcgttggg

SEQ ID NO: 369222 - DNA, 601 bp, Cannabis indica
acccttaagaacggtttggtttgatttgaaactatagtttaagtggaatttataattattcatattttttaagtaattatactatttttacttagttttcaattttatttttcaaaatatatatgtaacatgataagtaatagatctataacatataagtaatgatataaaaatattctcaaaagtcaaacataacataaaaattcaaaattcatgcaataaaaaacttgatacacaaaaaagttctaaattatgcatattgtcatacataaaatatatatataaattaattatttattataaacggtccggtccggtttaaccgttaattatttatttcgaaccacaaccgaaccattacgccgtaaacgatccggattgaccaaaccaccaaaaatggtttcctcgattacggtttacaatggttcggattgtagtggttcagatttaaaccgcaatattttggtttatatgaacagccctagccgacaggtactccgacgacttttacggctccttttctgacaccggtgataactcttgcagtcactgtagtttcattttattttattttttaaaaaaaaaaaaaaatttgaagaga

SEQ ID NO: 369223 - DNA, 755 bp, Cannabis indica
gcataatgtcgcgaacatatcgcgaacaatgtcgcgaatgttcattttcaataaattcaaccatatctctttacgaaaaaaaaatacagaacagtaaagaaacatacccgactgttgaacaatagtgtaatgtcggttgccttcacatcttgtttctgctggccctccggtgttttccagctcaacattctggggaacttggtcccgttgcagtgggcatacttcttccctaacttctcaattgcttcgtatgcccagtaacagtgtactttgcctcctgagcaatcttcttctcaatcttcttgtcaacattatccttgtaatgttgcatattctttcctaatgtctccatcagcttacgaaaagcgcgctcgccccacggatacttgaagaaaaattcgagatcgttaacaaacttcaacatctcaggccaaacttggacattgccctcctttgatactaatacaccttcagtgaaagcgatcagtccaagcttgtaggcatcatctttatcttcgcacctctcaagttggagcataagagaatccaactgaacagaactcttcccttcaaaatatgtccgaactagatggtcgttggacttggcgtgtatttcctcgtctgtaggggccctacccgtaggtaagccagtaatgagtccaaactctatccgtccgaatctcatgtcatttctccctacatgaaaccaaacctcatcctccttttctgtgtccactttcatttttcgtaagagg

SEQ ID NO: 369224 - DNA, 842 bp, Cannabis indica
tgaaaaaaaaaattgtatttggcacgcatggtatgcaatgcataccatctacgcgcgtgtccaggggagcacagccaagaaacctcagcaaatgaggttaccaacagcctttacgcgcatggaatggggtttcaaacaaccccgtgtgcgtgttgtctcggacaagtgttgtccaaacacgcgtgacacttgagtgccacgggtgttctgtgcgcgcacgtgaggtgatcccacccctgatatttttccaatttcaaaaattcataagtaattcaaataaaatcgaaattaagttcagtaaataagtgaattgtttaatttttttccatactatccaagaaaaataattacagaacgagattccaattattttatgtaaaaaattcgtaaacatcaatcaatcatcaataaacacatagatcaacatgaatcacatccaaatcacacatacattgttttaaatctatatttcttgaaagtaaatcatggctctgaggccagttgttggaatatatttcaccatgacctagatttactaacaactatgtttattaacatcctaaatataaatttctaaaacaatgaaacttaagcacatataaagtttgagaaatcttacattggttgcagcgaaatataatatctccttccacacagatctctaacccttgttattatcaagatttgagcttgattctccttccgttgtttggaatcttcacagtcttacacactatgattgaggactaacttgctatgggtgggcatgcactcaatcactaaggctcaaaatttttatgtgaagaacactcaaaggattcaaattttagaagaagaagaag

SEQ ID NO: 369225 - DNA, 938 bp, Cannabis indica
agtttccaattctttttgccgaagtagctttcgtacccttgctcatctaaggcatttacagagatcagattaaggcgcaaatctgaaacatgccttacattcttcaatgtcaaatgacaaccaacattcgtttgaatacttacatctccaattccaataattttggagcatgcagaattacccatcttcacatttccaaagtcaccagctttgtatgtggtaaacatctctctattgggagtgatgtggaaagaggctcctgaatctaccacccactcaaccatgttgtctccgacatgcaaacattcatcagcaatcactattgccacatcttcttctgtagtggcggctgtagctgtgttgctgtcaccattgtttctcttcttggcctcctgcatttcccgcttcaaaatcctacaatttttcttaatgtggcctggcttgccacagtgaaagcagccatcagttctgcttctagattttgatctacctctggacttgtcatttttatacctgccttctttgttttgacttctccccctattttctgaaataagggcttgagactccacacctctcgccttgttttgcttttcaaacgaaaccaaggcctctgcaatgacttcatactccaacttgtccttcccataagtaagagttgtgataaggtgatcatatgatggaggaagtgttgccattatcaacacagccttttcctcatcactaaactttacttcaaatcttatcaattgagaaatcatgccattaaaattactcaaatgctgaagcatatccacactgtcttgcttccgcatctgatacaactccttccataagtagaacttgttagaaagattcttggacatgtacaaattctctaaagtctcccagatttctttagtcgtcttgcactctttcgattctatattttgcaagac

SEQ ID NO: 369226 - DNA, 899 bp, Cannabis indica
tttttattttttttaaattttggtttcttatgttcttaagattggaaaagcttttctggtatctaatcaaaaaccccatttcacaaaacagtttatttgagaagattaggcaactaattcaggagggtcagtataaggaagcaacaaattcacggggtgaacttgaaggtattataagctctaacagcaatgaagtggtacttatgaacataaaatgtggaatcaacattctatgacgtcatgaccttaattcaagatcagaaccaataaatattcaagtatttcatcaatataaatattcaagtatgaataaatcagaacaattcaaaatcagaaccaataaatattcaagtatttcaataaattcataaacaaataacactccaaagcttaaatatgaaaaacttaaatagatctatctaacattgttgttgccgttgcttagttactgaattcttaaacaaaaaccactagaatttatataaaactaatatttacgtggctcgccacgtaactctcatctagtatatatatatataactcttacatttatcctaaaggctctaaataagagcttctatatagataagaatccattttagataggtatcgcaacaagtttaagtgtttcgaacagtatcatattattatatttaaatcatatgctacgattcaattatgacaagtttatctgcatagttatccacttgtacatataatctatatatatatatatataaatattttgtgataatcttaaaatcaccgaaatgagtatagttcccaatcaaacaaaatgattcattctctaattaaatattaaaggagtgtcgattataatttttaataattatataagtaccatttttttgtaaaatatttatatttttacgtttaaa

SEQ ID NO: 369227 - DNA, 545 bp, Cannabis indica
tggaatgaaataaattttaaaattcaaaaaaaaagttgataaaaaaattattaaattttttttcatcatatattggaatagtctttctttctatttcaaaatagattagttattccaccaaaatgttggaaagggttattccaatactttgatatgcaaccaaacaaaggaatggaatgaaaattgtttcctttccattccattccatttcattaccttcaaccaaacgccaccttaaatttttcaatttgtaagtgacataaatttaataaattttttagcagtataaatacctaatgtgagtaaaattttaattttcgtcattacactttgtttgaatttattgaaaaaattaaaagtaacggatatatactatatgttttatttaaattagtgagcttataagtgccttatttaagatactaagggctcgtttggaataccgtattaggtcgtattatattatattgtattatattgaatttgattatatatcatatttttatataatattatgttaaactttaatttatactaaaatatta

SEQ ID NO: 369228 - DNA, 619 bp, Cannabis indica
attcgggtctaggtctgatttggagtctgggtcctggttcggttacggttctggatttaggttcaatttcaggtatgactccaagtccaagtcctagttctagtcccggtcaacttccggttttcgttccaatttttggtcacagggtacgagttcgggtccagttttgggtttaggactgggttaaggtccgtgtgtgggttcgagttcttatcagggtttgggtccagggctgggtcccaaatcatgaaaccgacaatgggttttgtccaagccctgggtccagatccgaatcccaatctcgagtcctagtgttgttccatttctggtggtgagtcacgagctggttcctaggttcaagttcgggtctggatcgggtagcaggtcccggtcctatcctgattcttggtccaagtccaggttattgtgtgtgttttggtcccggtcttggttcaggttcgagtcctagtctcggttcgggattaggtctctgttggggtttttatctgggttcgggtttgcgtttaggtcctcgcagtagtcctagtcctagttcagttctagttccatttgcgattcttattcgagtttgggtttgagttcgggtcgtagttcaagt

SEQ ID NO: 369229 - DNA, 399 bp, Cannabis indica
atattaaatgtaatatattttataataaacgtttgtacactataaatattaattacttaattatatacatgtttttaattctaatacaaaactcaaaggccacaaataattatatacctgtttctaattctaatacaaaactcaaaagtcacaaatattaacaattgaatgcaccttatttatttattttattagttttagttttttttttttggataatgtatttgccgcactcaatatatttaatgtaacacccacaatataatatactcactatgtataaactttagttaattaattatacctatttctaatttttatacaaaattcaaaagccacatgttgttaaaattatttggccattattattatctatctatatatatattatatttatat

SEQ ID NO: 369230 - DNA, 561 bp, Cannabis indica
aaattctttgtgctgctaatatgataatgagttatattaaaaaactagtattattttatgagtgtgtatatataatacgtaaatgcatcaaattataataaaataaaataatgaataattgagactttaaataaaaaagttataagtaaacttagattaataaaattgaatattaaatatgtcaataaatagtatatattacatataatatacatgttcggtcgattatcggtttaatcgatcggtttgcgaattacactaaaattgaccatgttaagccggttttaaccaaaggtagttttttcggttttcgattttttcggtgttggttttttcggtgttcggacggtcggtttactcggtttggtcggtttcttggattttttgctcacacctaacgttcggttttggttccaattttgtgtcacaaggtacaggttcgggtccaattttgggtttgggactaagttcagttccggatgtgggttcgggtctttgtcagggatcgggtcaagggctgggtcccaaatccagacaccgactacgggttttgtccaagcc

SEQ ID NO: 369231 - DNA, 723 bp, Cannabis indica
gggatctcggatcctgtaatttcggtactaacagctaaggaattgttatgtgatggatgtctagggtttctggcggtggtattagataccactcaacctgactctgttcggccagaagacatcaaggtggttcgagaatttttagatgtttttcttgatgaacttcagggtttatcacctcagagagaaattgattttgttattaatttggcacctggagcagaaccggtttctaaggccccttatagaatggctctagctgaacttaaagaattgaaaattcaacatcaagggttgcttgacatagggttttcttggcctagtgtgtcaccctgggtagctctggtactgtttgtcaagtagaaagatgggtatctgcgaatgtgcattgactaccaggaattgaataagctaactatctagaataaatatcctttacctaggatcgatgatctttttgatcaacttcaggggaagacaatcttttcaaagattgatcttcgatcgggctctcatcagttgagaatccgagagcaggacattccaaagacagcgttccgcactaggtatgactagttttctagttatgtcgtttggactaaccaatgctcccgccgatttcatggatatgattaatagggtattcaaggatttcctcgatatctgtgtgattgtgtttatcgacaacattcttgtgtactctcaatcagaagaggagcatga

SEQ ID NO: 369232 - DNA, 577 bp, Cannabis indica
caaggaactagaagctactcatacgaagttagcataacagaggaagctcactgagagaatgaaacgaatgatggagcacctctaaaacaagtttgaggacttggcagagtttgacgacgaccatttagtggaagtaatgaccgaagagcatgatcatggacaaacggaggtcgaaacctcaaatgcttacaaggataaaggtaaaggcaaagtagatgagctcccacaaaagtctgctccaaaacctcctcagaaagacacgaatctagccggtgagccctcgaggacgcagaaggccactgatgcttttaagcctggacgctcttctgatcctagaggcaaagccgtgccaaagaggaaaagtactagagtacctaagaaaatgggtgagggaaccacctaagccattctgtcaaccaggacaaaaagatgattgtgggacacttatgaggacagctggtccaccgtagacctttgtcggtgattagacgccaagtacgagaagtacaaagttaaaaggcaaggccacattggggtgacctcaggaaccaagtaataaaatgagggacgtgatctt

SEQ ID NO: 369233 - DNA, 785 bp, Cannabis indica
taacctaaattccagtatttttgtaagtttcccataaaaatcctatctatttttataaaatatcaagttttttttttctttaagacgaatcaagtcatcaaaatcaaataaagcattagtgaatctttgatattggaccaccccactataaatgtaagtgtttggtttcaccaattggaaatgtggcccattatggcccattattaagtatagcaagcaatccattattatccctacttgcataggatttggattaatttgtttttctttttttgtctatattctataaaatccatccctttttttaatttcaattataattttgatcgtgacatatttttataaatgtatatattaatttatatttaaaaaacatagctaaatttatagattatgctatgatatctttttatttaagatattttttatgttgcatttcattatttattttaggaactaatgagtaaagtatagcaaattactcatataattacccaaaaaaggtaaatgtgcaaagaaaataattaacgtcacttttaaaattaaaatataaaaatattttttgtaaactcttatgttcaaataatttttatatatatatttttaaggttttatataataataataacttgaaaaactttaaaaaagtaaacaaaaaaaaaaataaacataaaaataatacaaaaatatcaaaaggccgtatttccttaataaaatcttaaaaatcgtaaaaatattttatttcgtgcaactgtcgtattttttataattttttttgttatttt

SEQ ID NO: 369234 - DNA, 560 bp, Cannabis indica
aatgtaatatgagctatatgtggaataaaaatattttcagatttggggaccctaaagactcaataagtagatatataagcgtaatttgttaattacggagatttatttgaaatatgtggatataatatgagttatttgtgaaataaaaatattttcaggttcggcgaccctagagacccaattagaggccaaaaatgtcataacggttttagttagaaatattgatgggactattagaataaattgatttttagaaatactgaagtattttggggtactcggaatcgaccaaataccctaaaaatatagatttcttagcggctaagaaataataaaataattattaataataaagttttattaatattgttattaatattatattattattattattatatgaaaaacttatcacgtaggataagtttataaacttttattatatatattatattagttacagtaatataaacgaaatgaacgtatgaaactctcgttcttccttctacaacaaaatcttctcctcttatatcaatttttttcgattttcaatctgaaac

SEQ ID NO: 369235 - DNA, 581 bp, Cannabis indica
agtgcagaacttagaagtgagatcctctcaagaaagctcataccactccatattaactgcatcctggcactaccaagatgtatcaagatcttaaaccctactattggtggtgcgagatgaagaaagatgtggtgaaatttgtatcccggtgcataacttgtcaacagatcaaggctgagcatcagagactggcaggattattgcaaccactggcacaacctgagtggaagtgggaggatgtcaccatggacttcgtggttgggttacctagaaacacgggaatgtacgattcaatttgggttgtggtagaccaattcacaaagtgtgcacattttagaaacaatctttatagtggattagtatgcagatttatacgtgaaagagatagtgaggttacatggcgctccaaagtccattatatcagatagagatttgaagtttacttcaaaattctggcagagtcttcagcgggctatgggtaccaaactgaaatttagtacaagtttccatccttagactgatggacaatccgaaaggacaattcagatactggaagacatgttgcgagcctgtgtgatgga

SEQ ID NO: 369236 - DNA, 681 bp, Cannabis indica
aattatttttattggatagtaaattaagcaattcactttttttacaaaactcaatttcaattttatttgaattaactatgaatttttgaaaatcggaaaaaatcaggaggggtgacacctcccatgcgcgcgcggatccctcttttctcgggtgcgtgcggcttcggacaaggctcctgtccgagttttctcggtcagaagggcagagttgtctgaatttggggccatgcgcgagcgggacaccttgctggcagccttcttggccgaggtttctcggccagcccttccccaggacgcacgcatactatctataccaaatccatttttttttcttttttcatgctttttcatggaattaattttgaattttttgtgtagttttgtatttagacttttatttttcatatttcaaatctaattatcagatttaaattaattagtttttttaaattaatttaagatattagtagttcttgaaccttgaaaataggtaaaaatctatttttttttacttagttggttatcttattttaaaaatttgattattttatcttatttttaaatttaaggttcagatattttacattttaaattatttaattaattttataaaatgaccttatttgaaatttaaataaaattattttaatcaagaaattttaaattgtaacaagatatttt

SEQ ID NO: 369237 - DNA, 718 bp, Cannabis indica
tctcagttcagattacagatgtagcattttatatgtgacaaggaccgatatgaataaagatgtctttatctaacatgttgtttattataaaaacctaattcatattataatgatgatcaatagtagatccacatgaactcttgtttatgttattagtttctttgattcactcgttaaagtttctttgagaagatgaactgtaaaattgtgcacaaatttaaatgagatctaaattatacttctactagtgaattaatggtactaaaggataaataagtaattagaatggtaaaacagtaatttgacaaaaaataattacgaactaacacatgaagggctaatcactagaattgattatattaatggacaatgtagtaaaactcaataaatataattctatacttactaagagtttaattttatatttatagtggagtaatcatagaattaataaacaaatgttatttgattgataagactcaataaataatctagtttaatagagcttagaattataggtatatggttcccgaatcgccaccttgaaataatatcaaggaaatgaataaagagtagtatcacgttgttcagaaaaatctattatgaattggtaaaatagtaattatttatttttgtaataaataaataatttttcaaattaatttaatagaaaaagacaaaagttgttaagataaaatttgtcaagataatatttgtt

SEQ ID NO: 369238 - DNA, 580 bp, Cannabis indica
attttaatataatattttaaataaaaagacaaatttatctttaaatttataatatgttaaatatcaaaaatatctaatcttataattaaataataaataaatattaaagaagttaacaaatttttaaatctgaccataataggaaatatttaaaattggaaatattccaaaatggaaatatttaaaattgaaaaaaaattccaaattgaaaatattttaaaattggaaatatttaaaaaaggaaaaatgaattttgggaaacaatcccataaaaaattggatttttggggaaaaagccccaaaaatcgcaattttgggttttgctgccagtaggctgcatgacacccaaaacacgagcggagcaggtggagtgctgccctatctgccgagaaaactcggcgggctgcaggggatcctgggcgaggacgcacaagcgtgctgtcgggtcgtcaaggccagtcacgcgcgcggatggggaaggtgttcgagggtctggtgtgcatgaacaccaccctcgacaccatgaaatcccgatttttaaaaaattcatatctttttcgtttttcatcggaattaagtt

SEQ ID NO: 369239 - DNA, 673 bp, Cannabis indica
cttttgggccttttttttttcttctgagaacactactcaatgaaacttagatcaaaataaagttgttagttgatcaaaataactcagtaatttaagtattcaaatgttgaaacctcttttacgagctcaaagaaattgttgtagcgtgatcaatcatgaaggtcaatgataatttctattaatcacatagataaaaattattgaatttggattttattatcccaaaaattactcaatatggcatgagataaattgacacgtaacaaaaaaatagacagctagtcagtaaataataaggaagattgagagtcggatgcactagctggaagataataaaatataacacactattaaaattgttgaatcaggtaggaaaggtcctagagtgttcaactggccaatcacccaaccaattgtgtaaattgtctgactagtggtgcctaactgacatggagcagcataattcttctcaagagtttcatatgaagataatctaatcagttcaaccgaccagtatgtttgacttattctaaatctacgaaaatagctcctaaattcctaaaaaagtaggttattgttaaaattagacctctctgtaatatttattattacagttttacaagataaagagaaaatacaaataaatacaacagaataccagaacagatcctat

SEQ ID NO: 369240 - DNA, 825 bp, Cannabis indica
tagtttaaacatataaaaggaataagatgctctcatctcattgaattttgacaccttgtcaaattaatgctattcaaccaaacctagatgagagagttccttccttagtggtttcaaacctccttcattgttcttcacttattcaaaatcttagtgatgagtgccatgcccacacatagcaagtcaagtacgcaatcatagtgagtaagacggtgataaccaaacctgaaggagagaaagggatccaggttcagatcttgattatgctctgcgacagaaaggaatcaagggctagagatcttaaacgaaaggagtcattatattgtgctgcaatcagtgtaaagttttcttaaaccgttatgtgtttatttcattgttttagagaattcatatttaggatgttaatttaacatacttattaaatctagatcctggtaaaatattcccaatagaaacaatggtggaagctcataaaataagaataaccttggctctcgcctatcgggacaacgttggattcttattttgatcgaataaaagatggctagaatggtgtccatttctgatgagctgacaactctattcaatgaatgatatctttgactctggcctaccgggacactgtattagtttgttggaaaccttcgaaattatttagatgtgtttgttttgtattttcacatgtctttgttgtttgctaaatgcgtaataatttttgaattgtgtatgaatttatattgaaccatgttgttttctgttattaattgactttgacaaggtcttctacctgtgatggtacaactctcgaggaagagaattgtgtat

SEQ ID NO: 369241 - DNA, 752 bp, Cannabis indica
tgtatacatatttttaatttttttataaatatgtgtggattggattgaatcggttacttttacatatcaatcaacatccaatccgcacaagtgcagattttgaattttccaatccgcactttgttttatgaataccagtaatgttgtttttaattgttctgttttgttgttttaagttgttttataaaaagataatatttttgtaaataatttcgtgtgacagtaaaaattgtaaacttttattcaaaatccagtatttttgtaaaagcctcattattataagtgaatataaaattctacatttatatttaaattaaattatatgaaaactactactaaagttcactaaaatgcttcattgagttgaggttattggacttttataatttttaaaacatagtaattcctttaaagaaaaatgtttttttttcaactttttattaagatttttggcattcatgttgttaattttttttttttttgaattattaaaattgttggatttaaagttttttaattcagttccattcaattttattaaaatgtttgttgtttatatattaaatcgtgcttccaaactttaatatctactaaatcgtgtctcttgaactttcacatatactaaattatactcctaaatattcatatatgttacactttcgttaataaaactaaataaatgtctttaaatttaattatctcaataattctaaaaaaaaattaaccacttcaaaatttttaaaaaacataat

SEQ ID NO: 369242 - DNA, 911 bp, Cannabis indica
cgtgccatccaccatgaagtactcatcagcaaaatgcctgatcttgttgatggccgtatcgtccgtgcccgtcaaccacttgaagtctggttgagagaagtagaagtacctcgacctgccttgctcgggggttgacttcaaatcaaagaaccaagcaacctcgtggggagagggcataccccatttatgggaggcatagagaacgaagtgggcaaacaaatacttgatgcccttaggagtgaactgggccgggcagaggccgaagaagtccgccacatgtttgaagtattgatgcaaaggcatcaatgccccttgttgaccatgggcacccgactaggcgcacattcccgtttcagggtttgtggcacgattgttgtaggtgggaatgtagtaatccaagtcgtccaggtatccgtcctggtcaagagaccgaaggcgcgcctcagtaaccttggacggagggcttacccacctggcacccaaggcaccttgccttctatgaggaaccgcaacagcagttcctcacagacgtagtccacgtcctccaccaggacgtctttgtcagcatcgactggctccccagcctcgttgtactgcccatagtttgggggttcaacctttgcctcttcctcctcctcggaggaactgccaggacgtacatcatcctgcccctcaatctcttagacctcagcgtccccttcatgatcctcctccatctggacggctggatcctgttcggcgctgggcaaagtggcgtgccaagccacttgagggtcagatgcgtcagccagacgcgtggttttctttgtacgagccatcattctatggctggctacagggtttgaagaatgtcctgctagaggaaggtgggctagaacaaagacgaggatgatcctcgtgcagaagttgaa

SEQ ID NO: 369243 - DNA, 673 bp, Cannabis indica
tttaactattttatctccatatatataacaaataagttttcttgccacgtaaattaactcgataatgtaatatttaattattaataacatctctattggagtactatatattttggcacttttgttaaaaaaataataaaaaaaaatagtatatcaaaaattatgttaattttttgttactagtttgtatcttgaaatgctactgtactttatatattagagtaatttcataaaaaaaaatatactaaatataatattttctctaatttttgtaccagattgtaccttaaaatactattgtacattatatattaaaataatttcataaaaaaaatatacaaaatataatatttgctccaaaatattatattcttattttaaataaataaataaaataaaataaaccttacaaatttaaactaattcttcactatgtatttgttcttatatgtatgtattatgtaataaagagtaatttgcggcaaaactccctcaactatcaatttacttgcaaaaaaccatccaacctcatattttggtgggaaaaccctccaaagttctgtcccgtttacatttttaaggtgttgtctgtccagcctcgttaagtcctaattttgcacacgtggcaatgacaggtcactaaaaattatcctacgtggcaatattttacaaa

SEQ ID NO: 369244 - DNA, 591 bp, Cannabis indica
cactccacttatatattgatcaaaaagaaaaataaaaataatacaagtacactaaatataactacaagactaatatagaatattcacaactaaaattttcttatatttaatatttacaatattttaagtattttaaatttaaattaaaattttattatataaaatatcgacataatttttattttaaaatatatatataataatattataaaattaataaagaatattctattaagtaataggatattctgttaagtctctctcgcgctcaattcaacaaaaacactctctctaaaccctttgctctttctctctctacaaacctctcatcttcttcgttttccatggttcagaacgatgagagaagaagagatggagaagcttcttggagtggtgaaggactgtgtgagcaagcatctctactcttctgccattttctttgcggatgttaggttataattaacctatattttaggtctttaaagttagcattatctcgtctattggtgtcttttggagcagttttacgcttgattttcattatctcaagttcccggggtgtaaagttctaattcagtcaaatggcgaaaa

SEQ ID NO: 369245 - DNA, 1041 bp, Cannabis indica
aaccatgcaacataaaatgttatttctgatctttattagtaagtaaatctgattatattgaaatgggttttattaaggcccaaaacccaacaggttcctcacaggaggcagggtgccttgggcgcgaggtgggtaagtcctccgtcaaagatttcagaggcacgcctccgaactctcggccaggacgggtacctgggcgagctggactgctaccttcccgcccatggaaaattgcgccacaaatcctgataagggaatgtgcgcctggtcgggggctcacggcgagcaagtggcgttgatgcccttgcacaagtacttcagggatgtggcagacttctttggcctctgcccgacccaaattactccaaagggcattaagtatttgtccgctctcttcgtcctctatgcttcccaaggatgggatgctccttccccccacgaggtcgcctggttcttcgacctgaagtctacccccaagcaaggcaggtcggggtacttctacttctctcagccaggcttcaagtggttgagcggcacggatgacaaggccatcagcaaaatagggcgttttgttgatgagtacttcatggtgaaggattcgagtatcacccggctcggtttcagcagattccgacgtatatccgtcctcccctcacccttgctcttaaggatagagctcaaaaacttgtctggttgccggaggaagacaggaattgttgggttttatgccctaaataaaactcatttcaatataatcagatttacttattaatatagatcagaaataacatttaatgttgcatggttcacatgatttatttcatgattatatgtacataatgtataaattcatctgaaacccttttcacatacttgatcctgtttattgtgccgtcaacacattggaaagtaaacatgactatgtgaataaagtttcctagattatcagacatagggtttactgatatgataatctacaacagagtttacttgcatttggagaagtgctatgttctttccagagctttgattaaagtaaag

SEQ ID NO: 369246 - DNA, 654 bp, Cannabis indica
aggacttagcctgcgaacccataagccaggttagtcagacagtaatcataaaacttaataccgcgcttatggattttgaggcaacacacttaaataaacaaccgtaatgtaatatgcttcctaacatgctttaataatcacatataatactaaacaagtacgggcttattgaaccatgaaccaggctttctctgatgaagattctacatgtcttggcaagcttcggttcaaacttggcatctctgatactgaaattgtaacgccttaatgctaaggcacgctacagtaatttttcatttagagtgctatctttgctaatcaaagaattttctcaaaaaaacctgtcaaattaaaacttttataacaaatattaaactttataatttacatggtcatttataaacaccgagatcccgtttctaaacttttatacaaaatatgtcaaaatacataacaaggttgcacagcgactacaaaatactaaaccccagatgtcctgagactgaacactccaggtcgcgccaccacgacatgtacaacctcatctcagccaggctcactcctgttcagcttttgcgttccctttacctacacatgaagtagaactgtgagtcgacagactcagtaagaaaggcatataacatatcatataat

SEQ ID NO: 369247 - DNA, 1155 bp, Cannabis indica
aatttaaaataagataatataatataatatcttaatttaaaatttagatatttctaatataatattcttaatctcataatttaatgaattaaatataacaaaaaatgaacaatttaaaaaataatatatttgatggttatgatattatcaattttatttaataattaaatcaaacaaaatatcctaagtttgaaaatttttatggttagaaaccctaaaatttctattgaaaccaaaattaacaaacttttcaaaatttcatgttattttgccaaaaaaaaaattaattaaaataaatatctaataagataacatatcaaaacaaatatttttctaatcttataatttaatttaatataatatatttcaaaaataacaaattttgaaaacctgatatggttagcaaaatttgaaactttaactagattatttctaaattttattaatattttaatatcaaaataagatcacttcaaatttaataattaaataagtaatatctgatcttataattaaaataaataaaataaacaaaataataataaaaaaaattaaccataaggctagtttgtggaaaaatcaaattttcaaattcaaaggctactaatatccaaaactaattttaattaattaaaaaatcaataaaattaatttattctgataattttttaattgaaaatttagattctacacaaaattctaccaaaatttgaattttgtttcaatgaaaaatgatttttgaatcaaaagttatcacgaaacaaaattgcggcacaggggtatgtattgcatacccctgcgagcgcgggagacaggaggctacatgcagcctctatgggcgaggaagctcggcgtgtggggggcaaacttcggacatgcccctgtctgaaggggttttgtccgagcgagccgcacgtggtgtccccatgcgcgcgcggatgtgtatcccttagatattttattttttaaactttaaaaaatcataataaaaaatccaaataaggttctgtaaaagcctaaatttatttaattttttgtctactttccagtaaaaatattttcagaacgaacaaaaatattttacaacatacatttcgatttccatacaatcatcaaatatgcacataaaccatcatgaaaccatccaaatcaata

SEQ ID NO: 369248 - DNA, 701 bp, Cannabis indica
agaagtgatgaagggacatttctggggtactccatcaacaatcgtgcttacagggtattcaataaaaggactctctctgtggtcgaatcaatgaacgtaaaatttgatgacttagaaggacatgaagaagtgtgggtcgaggatgatgcccctgtcctctctggacctagaccagtcatcactagaccacctcaagtgtatcctgacactcctactgagtctctaaatacagaaccaggtgtatcaggtgacaatcaagcaactgccagtgacccagagagaggaaatgaagttaatagtgccctgaccaaagaaccccaacaagctaaattgtataaaaatggacccccatcctgggttcagaaagctcatcttcaggccactgtcataggagatccgaatgacaccatggtcactagacgaaaactgcagaacttgttagcctttgcatgctatctatcacaaattgagcccaaaagtgtcagagatgccctgttggatgagttcaggttggctataatgcaggatgaaatgggaaattttaaaagacttggtgtctggataatggtccctcgaccagatggtccaaatgttatagggacaaaatggatttttaaaaacaagtctgatgaatttgggacagtgactcgaaataaagctaggcttgtggctcaaggatacagtcaggtagagggaatcga

SEQ ID NO: 369249 - DNA, 682 bp, Cannabis indica
ttgttttgttgtaatgtactgtctactttcagacgcttccttcagctctcaatgaaagcaccaaaatattgaccgaggttttcggaaaccaatataataatagtaattaagaaagcttaaaggaattaagagaaagatttttgcgtgcttggggcattaatgagccttagtccacgagtctttgtatttatgatagtatttattacagagaatgttcttggtggatttttactcttctagttcttatgaaacccagaattctcgacccctctttaatgagtttggggggtatttatagtgtttttgtggggtgatccctagaattaaggtacatgtatttttgtaactatcagtaaagccacacattcccaatgaataaaatcataggtaatgcatggtctaatccctaggttctgtaggggttttatgagtgtagtccattatctcttttgactgatgtgattcctcacagagtagccgtcactagactttattgatcacagcccagtaggtgcagagtggggggtgtgccgtcagactttaatacatatggcagttccaatacgcttcctcccatgaggcattaaatgcgaggtgactgttcagataggatctgacacctcccggaggtgctttgttgtagccttcctctccgggagtatgtgagacttatatgccacct

SEQ ID NO: 369250 - DNA, 415 bp, Cannabis indica
gtaaaataaatttccaacagaaacaaccttcttagtcagcataaccgttttaaggataaagacaaggagcagttggatagttattagatattatcccatgtgcaaataaatgaaacttggggaatgtccatgtttcatcagtagttgtaaatgaatcaatcccaataaaaataactgccaacctatatacctataaataggggcaaaatccatggaaaaagggacgtcaacatagagagagaattctattatttgttattactgagatttatactctatattcaaataaatatcctcaataatatggactcgtggagtatgtagattttaactacaaaaccacataaatatcttatgttcattattattattatttaattgtgtagtaaatttattacgtaaaaggctatatatt

SEQ ID NO: 369251 - DNA, 521 bp, Cannabis indica
actaatcaattaaaaattaaaaaaacaactataaatttctatataataactaataaataaatatatatacattaaaaaaattaatttacatataaattttttttcatagagaaattagttaatattaactaacataatttatcaaaaaaaaactattaagtaatatgccaaaaatatcaaaattctaaacttattatatttattaccctctcttccctcacataataaaagtaagtacttaccaataattgtttaatttattttatgtacaaagaaaacttattagaaagaatatcaatgatgattataagtgagatacggcgatgacatcaactttaaatatagtggtgactactaatgagataaggtgatgatagttgttttaaaattatatgatgaattttctatacatttattatctttattctgtattagatctctattttgtgtaaaaaaaaatatgggtaaataccattttggaccccgtattttgtaaaagttacagattggaccctgtgttt

SEQ ID NO: 369252 - DNA, 584 bp, Cannabis indica
tgaagtctcctatcttccccgtatcgtgacgggtaaccagcaaattatcatgtttaatatcaccatgaactattttctgttacaaagaaaaagaagcaccacagtatcaataccacgtgatcacttcatatgattggaagtaagagctcaaaataaggaagcacatggggcacattattggtacttcaaattccaaatgtacaaattgtgtcacttatccctatctatctatataaaagaatccaaagtattgatataatcaaacagcttttgacatatgaatacaatgcaacacctcatcagccaaaggaaaaaaaagtatttggatttacttaagcaacatgtccatgtcaattagccacgtgtgatgtgtttggtccagaattttcctatatttttgttaatcaagtaaacaaagagaccactttatttattgaccagccactgtctttccattcacaagatagccactgtctgaatccaaattttcctaattaatcaagtaaacaaagagaccacttttcccccatttcataatctactcatgagaatttaagtcatgtatgtgcagttcaataaaaaaa

SEQ ID NO: 369253 - DNA, 584 bp, Cannabis indica
actcctcaccgcccttagacttcttggccggaggagaggcgctagagcttccgcccattctcttcctaagagcatcgatcatctgccgagacatgtctgcacagaacaaaaacagtatgattagaaaatagccatcagaaacacaaggcatgaaaatcaagaagctcaagaacaaaataaagtaaaatgcaaggtgaccgcccgcacaagactcagaagtccatcatcacctgacatcgatcttatctcagacatgacgactttcccttttccgagcacgggagaagatggccaagcaggtgaaatgggctcctttatgcgaattgcatgttcaacaggcctggacgaggtgggggagtttcttcttcctcttcagtggagtcacctgctcttcctcagcctcatcttcaggattcaaaggctcctgagcatattgtttggccctcgcacctcctttcaaatgagcttcacactttagttgaatcaactcattctccggatgagttcattcagtccggccagcaccagatttcctcttcttccccgtcacggacttaggagtaaagtcctcgggataaagcccg

SEQ ID NO: 369254 - DNA, 515 bp, Cannabis indica
gtgattttataaactagtttaatactagtagaataattaattattaaataccgtgataatattaaaaacttgacgaaaataaaatactaaaacggacattataacggcataaaaagtgtgctctaggagtccctgctataaaaagttttgctaaagaaatatatacaacacccatttaaacacaaaatcaaaatacacaacaaatagagtgtgatatcccgaaaaatatattgatattttaattggagatattttattaaatatgtgattatatgggtattagagtaggattataatcctacttaaactaattatgagttgattaggggaatatgaattaatgaataagaaagcataatttattaattacgaagattgtattggaatatgtgggtattgtagataccataatttgaataaaatattttcgggcctggcaattgtagaactcgacaaaatggtcagaaatgtcacgatggttgaaattgtattatattggaattataccggactag

SEQ ID NO: 369255 - DNA, 503 bp, Cannabis indica
atgaaaaaaaaagtgttattaaagtttttaataattttttttatgatgtggaccaataaaattttgacacgtgacaattttaagaactacaaacagagctattaaattgggtacctatagactaacgagaatattaagcttgagtactgtaattttttgagagtagggactaatctgtattaaagtaaattttttggtaacttatgccgtaatttaatatcaacacatgacattttcggaataactatcagatttgttaaaatgaggaccaacagacttacaagaatctcaaacttaaggactattactgctatttttcgagattagaaacttatctgcattaaagtgaattttttagtgacttttgccacaatttttcctaaaaataatgattatttatgcatactaatgggagaagttaattccctaaacttgtacatttcaaaattttaaaaataggtccactttacattaaacctaaaaaaatacccctctcatttttc

SEQ ID NO: 369256 - DNA, 603 bp, Cannabis indica
ggggaaaattttgggtttttctcgaacatgaattttggctcggggtattttcaagacctggtttagggtatttgggaattgtatagcctatttgaaacaatggagagttagaattggttcggttatgaattagggtttattttgagaattggataagttgttaatcgagttttgttatcgtgacataggacccgagattgccgagtatagttccactcaaatcgatccgcacacctgatattggtttgaggtaagaaaagctttatgcactgttaagcgtgttagtaagtaacgattattaatgactcgattatgatcgaggtattattgaggaacgtttattatcgtttgtgactcgattataattgaggtaataatgtgaaacgattattatcgtttgtgagtcgattatgatcgaggtaatgattattatcgtttatgactcgattatgatcgaggaaaagacacagtcattaccgttattgagaatgaataaagatacaatcattaccgttatgagtaattactcgttgaaatcgcagataggttttttacttatcgttcgctttatcaggcagctatagtgacatacatagctcatgg

SEQ ID NO: 369257 - DNA, 996 bp, Cannabis indica
gagagagagagagttatgtgcgaccagtaatgtatttggtaatttgtgtataaaagcttttaaataggatcccagtgcttgtaaatagtttgtaaattattaagtttaataattaatagaaaagttttaatttgacacatttttcaagaaagtctttgattagcaaagacagatttgtaattaaaaactactgtagcgtgccttagcattagggcgttacagttataattaaataatatataaatattaaagaaattaacaaatttttaatatattaccataactaaaaaataaaataatcaattattaaattcaaatctcaaaatatcaaaaattaataataataatctattaaaaattaaatattattaatttaaaatttatatttaagtataaatgtattaaaattattattttatttggaaattagggtttgaaaattgtgaaaatttgaaattggggaaatatcccacaaaaattgagtttttggggttgcgtgcccagcaggaggctgcatgcagcctccttacgcaagtggagaggggtgatgcagggtgaggcgccgaggaaactcagcatttgtagcctcaggacaagggtgcacgcaacatctcatgtcttaagacacgagcatgacataccttcaaacacaagttgtgtccaagatgtgcgtgcgtgatggtgtcttgtaagaacacctggtgtgtgcgagcaccatggtcgacaccattcaaccccaaaatttcttgtttttcatcagaattgagttacgtaaaagccaaaattgcttaatttttcacaaggaatccaaataaaatattttcagaacgaaaataattttcatggaaaaatttcgtaaaacacattcaatcatcagatatgcacataaaccaacatgaacacatccaaatcaacatacaaataattttcatcgttttaaatctatatttcataaaagtaaatcattaccattgctttgataccagttgttgggaa

SEQ ID NO: 369258 - DNA, 446 bp, Cannabis indica
ggggttcaacctcttcctctccctccgcctcggaaggacagcccggaggcacctcgtccagctcctcaacctcctagacctcagcgtccccctgacggtcctcctccatcgggacggccgaatcctgctcggcgttgggcagagtgacaagccgagcaacttgaagatcagaagcgtcggccagacgcgtggttttctttgtacgagccatcatcctatggctgggtacgagatcagaagagtttccttcgctagaaggaggactagcacgaagacgaggatgaacctcgtgcagaagttgaagcaaatcctagtcgatctgatgcctaagttcccatgactcacctgggttcatctacaaaagacaacacacaggatgagtgttccacggagtatcaaacgaaaataagcaactatgccgaacaggagtacttaacagattaaag

SEQ ID NO: 369259 - DNA, 656 bp, Cannabis indica
acacaatgcgaacggaagtggacttggccaaaaaggatgccgacgatgcgcgggttcaacttggggctgttcggatagagcagggagaggtcaacaagaaacttctagcggctgagaccaaagttgccgagctaaccaaggaactgcaggagacgccatcaactgagcagctcgaggctaatattgcttctttgtcttgggacgttaccagtcttcaagacgaaagagagggtcttcgaactcttctccgcaagttggaggatgaaaataaggctaaggaggaggaactcgaggctgaggttaagaaccaaaagtctgaggtggcgaggctcggggagaaggtgaatgccttaaagacagttggtcgcctcaagttctttgtacgagtcaactgggtttgaaggggtcggaggatcatcattttgtacgcattggatggtaaatttgtaacatgctaatgaactcgacccaatttgaatttaactaaacatctttattcatttattggtcggaaatatgtctgttaccatagtaacttacatcaaagctattatgttgatctgatctgatctttagcttagcataaaacaaaaaaaattgcagaaataaaaatcttaactttcaaaggtaggtcatccgacctgagtacttgataa

SEQ ID NO: 369260 - DNA, 1370 bp, Cannabis indica
ataatttaaatattagaagtgaaaagattaaaaaaaatatctgcatcactttttagagaaattttttttagtaaaagttattttcaaataaagaaaagtttttacaaagttgcttacaattatgtaaaaattaatttacaaactttaatctgtattttgtaaaacacacttttattatatatatatatatatattaatgtttttgggtatttttcaaaattctctaaataaaatataacaacacaacatttattaacaaatatgaccaggtttctagtagcttttttcctttctctctttgtcattgcctcattcagctggaattccactcataaatgtattagctttatttttttcataataataataataataataataataataataataaaatttgaaagaccaaaaaaataaacccaaaataagctatcaaaaacaaaagaaaaaagacaatctataattgcagtgcattctgatctgaaaaaagggaactgtgtgactccaaggacccaagtcctcttaacatgaaaatagcctccctagagggaaacatagtgggtttgatagggtcaaataacaataattgcataacaacaacccatatcctactaaaaataaataataaaaacttctaagaagaaatgggcaacttattttcattcaatcaatagagttattaatcatatcataatgcaatggttgtggactatcttttatgagttgataatttttgtcacccaatatgatttaaaaaattatgatgtttcacaatattatattaaatgatattgcatccattaattgttagaactccatacaaaaattaatttttacaatatttatatgtaaaatgataattaaaaaaaaaattgtagctaaacctcttaactattattccttttatatttaatttttcaagctcaaattttaatggtaaaactctcaaaactttaacaaatttaaggtgtcatctaatttttacagttaactgccaacataaactgcgtatgtgtgcactcttgtatatgtggcacattgatacacctaatattattatttaaaaattatataaattaatttatttcaaaatttatatttttttttattttttaaatttttttttttatttttattaattttgtttaattttaaaataataatagtatattccaatataaatgtatcacgtgtacaagagtgtacacataaacagtctatagtggcagttaacaaggtaataccttaaatttgctaacagttcagtaatttgaaagttttactgccaaaatttgagtttgaaagattaagtataagtgaaacaataattgggagagtttaactgaccaaaaattaaaaaaaaaaaaaaa

SEQ ID NO: 369261 - DNA, 505 bp, Cannabis indica
ttaaaaaaatattaagagtaatttttaaaaattatttaagtttatatttttttttaataatggggtgtacttatcattttgtggggtgtaaatagaactctccatttatttacagcgcacaaattatagagattgaaatcaattaataaagtattacagaatataaaagcaattgacttaaataattttatactatctttaataatttaccgcaatactttataattcacttatccaatataattttttaacaccactaataataaattctcttcagcttttaatgtgtatgtgcttacttcctcccgaaataagtcttgtttaatgaaactcttcaccttattataagaatagtaaaagaacaataatatagaaagggaaatttgattttctatgcttaaaaaatcttaaaattatatccctaaacctaaatgttataacataggcaatatatgactacttttgctttatccctataatacccctcacatttgaaccaaagcaa

SEQ ID NO: 369262 - DNA, 748 bp, Cannabis indica
tcaaaattcaagggataaaaatcctaattagccaaaaaaaaaaaaaatatgtgagagctgatactgttggccagtgggacaccatacaatgccatttagtaatgctctatttagaagcaatatcaataaatatatataaataaacaaaaaacaaaaaaaaaaacatacatttagagattttgtttttgattttttttttgttgaaatggtattactattaattttgtctagatattgttattaggtgaaattattatattttataattgttattaaattaaataatattaaagagtgttataaataatcttttattatataattttttagtcaattttcgtagtgaatcattttaaagttttcatggtggtattcttatattaatatttataacactattcttgtaaatttttaaatagtttacagtgctaaagatacatttgaagttttttgaatgtgtgtgatacgtaaactaaaatatcaggaactctattttcggtattgtaaactatttagaatttttaaaaattttacagagatgatactgtaactataacaaataccgctctaaaaaaatttgaaaaaaatatattctaacatgtgatttcaagcgtgtaaattgattaaaaaattgtaataaaaagttataattagcttctcactaatattaaatgttaagtgtgcattttagcatttttttttctatttcaagaaattagatatatataattagagagagagagagaga

SEQ ID NO: 369263 - DNA, 794 bp, Cannabis indica
tttcaaaacaacaaagccaattctaaaccagaaaatcaaggaaccaagaaccatcctccaaagaaaaacaggcctttttgcacccattgtaacatactcggtcataccattgaaaggtgttacaaaatacatggatatccaccaggttttaacaagaataaacaaaaggaagaagctgctaatcaggtgcaaactagcaaggaaaacaacaccaatactgaggacaacaacacatttcttccccaattaagtgctgcccaatatcagcaacttctcaaccttttggcaaaccaacaaccgagtcttacacctgctgatccgagttcatctacaggtaactcaggtatggttttaacttgcagcaatatttcagtttttcaacactcctggatagttgattcgggtgctacaagacatatttgcaataatgcaaagttgtttcaatttatatgtcctgtaggttcaactaatctgatattacccaataatgatgttcttactgttagtcatagtggtgatatcaaaattaatgattctctaactcttaaagatgttctatatgttcctaaattcaagcttaatattatttctgtgagctgcctcattcatgacagtattgcttctatttttttccaaactgatggctttcatattcaggaaaatctcaccaagaaaatgattggcaagggtagagtcaaaaaatggtctctacatgttggatcctacacctaaagatgcacatgtgtgcacggttcccgctgacatatggcattcaaggctaggacatcctctaa

SEQ ID NO: 369264 - DNA, 733 bp, Cannabis indica
ttttacaaataaaaatttgtaataaaatacctacttatttaaaactaaaatatatcctaattgtgttttctcctaaatatgaacaaaaaaaatatagatacacatctataataatatatataaatatattatacatacattttaaaaaagtatatacatattgaaaaaaatataactttttagactactgtataatttttttttttttttttgtgtaaatatataaatatctatactcttaaccaatatatacacatataatttatatttcatcaaaaaatatacacctcaaaataattaaataatatatcaatttctaaaaaaaaattatatatatacccatgtttacatatataccacatttattaataaaaattaaaaaaaaatgattataaaaaagagagaagaaattgacccaaaaacattggtttcctcttgatttcgtttgttgcagtgctctagcatttccacacagagaaatgactaaaaaagagagaaagcgagaccaatttttaaatatataattagatatttctcaagtaaataatcaccaaaaaaaaaaatcagaaaacatacttacccataagattatcattaaggtggtgatatgtaggggtaaatttaaaggagcaagaggagagggattgatggtggtaggggcggagacgaaagacgaagagacgaaaaggggggatagaaattaatgaagagtgaagatgaagatgatatatat

SEQ ID NO: 369265 - DNA, 888 bp, Cannabis indica
ctattcattctttattattgataattatttttgttagcttattatattttttaaaattctcactctttattttaactaagagtgtgtttaaaaaatataattggagattttttctaaaaaaaaaaaataatatatatataattggagatgctctaattaattataaaacatcacatcataataatatcataataatattaggtaccttgatattaatactctacattatttacaatcaaaattgtccattaaaattttggtgcattatataaggtcactactacaaaaaccccttttagatgcggtttttaaactctttcagcgtcggttttcgcaaaattcgctaccgacgctgatcagggcgacgctaaagggtcatatgaaccgacgccatatggactcctatggcgtcggttcctagccaagaaccgacgccataggtggcgtagcaaccgacgccaaaaggtcgcgaatttcagttttttcaatttttttaatttaaatatataattttaattacattttaattatatatttactaatttatatattattttatttaatttaaattacaaatttatttttaaaaatgtaaattaaatattatttaaatttgggtaaaatacataatttcatttcataaaagtaattaaatattacacaaacactaatgtaaaattagtcaaaaatattaataagttaataaatctaactacaaatctaactacaagttaatctataaaaattacataatgaaggaaaattcttgggcctttcaacctcaatcgtcaacgtgaatcagcgccatcaattgttctatccactttcgctgtagtggtaacaattccgtttttggatcgtattgcttcttacccccaaactgttaaa

SEQ ID NO: 369266 - DNA, 563 bp, Cannabis indica
aattgtcaatagatcttataaataatttgtaacaggtaaattttataatttctttcatctgtgataaacctagtaacatgatagggctcgtacaaattatttgacttgtgtgagcctatatattcacttttgggcttaaatgcacataggaagcccatttaagtttaatatttaaatggactaggttgctaaaataaaaatatcaccttgatagttttatttaggcccaattagtattgggcttactcaatgaataattataattaattcaaggttaaattcctctcatttgggccttgtgtgagagttagggagccatagtagtgggtacgacatactgaactcagccctcccttacatgaatcaccccaattgtggagatccatttaccttatttaaataattgtattacggtaattatattagtttaccctaattaaattgattagcaacatataattaactttaaaataaatgaaattaatttttcattggattattttaaaaccaatttaaaaaaaaaaatacacttgtttaataaaatatattttagaaagttattt

SEQ ID NO: 369267 - DNA, 697 bp, Cannabis indica
caactcattagttttgaaaataactttaaggttacccaaatatattttaaataataaaatagcacaatatagctaattgattattaagatgtttacaaataaagttttagaggtaaccaaattgtatctcaaattatataattttaaaatgatatttttacgtaaaagtaattaattaattttttatcagcatcataagtaaccaaaatgttacttttgaaaactcaggaaaataataaaaaaatgaaatttgggattaatttcgtttcagacatattattttaaaattaaggtattttttaatgacgtggcaaggtattattataattgagatatataaaggtatttttgtaaataatttatatttaaagtatattattgaaaaaatcccaatataatccttgctgagtaaatattaggccatgtgtcacttcgtagggcagccaccaagcatttcccttaaatgactaaaataccctttaaacctataacttaagcatttcaaaactagcggtaaaatggtcgaattccacaaccccgcttaacctcggtattttgttttctataaaatatttctcactaagaaatatggttctcaacttacccatgtgatcaaactagccatccatcgcatttgctgctgtcgccgagcaaaacttagaaaaatagcatatttcacatataagtcaaataatac

SEQ ID NO: 369268 - DNA, 515 bp, Cannabis indica
attgatttactttcaagaaatttggacttaaaacgatttgtgtgtgatttagatggtttcgtgttgatctgtgtgttatttgatgattgattgatgtttgtaaaattttatgaaaaataattgaattttcgtttttagaattatttttattggatagtttggaaaaaattaagcaattcacttttttacagaacttaatttcgattttatttgaattagttatgattttttgaagttttaaaaaaagataggatgatcactcactccccacgagcgcggaaccgagtttccctcggtcagatgcatgttcggacatgttttttgtccgagcgacaagcccaggggtgttttatacccctttccgcacgcagaaatcatgcaagggactccttacgctgagttttctcggctgatctccttgtggcgcgcacggatgtgtatgcaactgcataccatccgtacatctcacattttttcgattttcttcaatttttcatgctgtttcatggaattaa

SEQ ID NO: 369269 - DNA, 686 bp, Cannabis indica
aacaaatggatcaaaagtggatctaaacttatgaaatgagtcataaattggaagagcaatattagactcaaatcaaagtgaatcatggtagattcaaaaattgtgaaaagataacaaaattggagaaacaattttgaatcttaaataatcaaagtggtgaacaaaattgatgagagttttgttaactttggtgtattgtttgggttaatatcattgaggagataacttcaaaataatgggtaaaaataatcacattattttataagtggtgatgtgagtttgatatttaagttttgttgagaaaactaaaaatatcaaatggtatttttcaaagtgaccttaaaaagtcatttcaagaggaatacacacattagtgatattttgtatacactttatggtagaaatgtaggggtgagctacaaacttaatcaaaatgtgatgagacatttttgattaatttatgtgattttgaatttaaattctaaatcaagtttggctatgtgcatatgtgaaaatattgacataattgatgtcaaatttttggtgaaaataatttcaagaaggaaataaaatttaagagaaattatagagacaaagtggtcttctatattttaaaatcaagatattatcttgataagtcaaatgtgaaagtgtgggggtgcatactccaatatgagaatttgaga

SEQ ID NO: 369270 - DNA, 1043 bp, Cannabis indica
acattgtttagtagagatgggatcatggttgatctggaaaagattgaattcgtcagggattggccaaggccaaagacaatcactgaagttagaagttttgtgcgtttagttgggtattaccaccaatttgtagaagggtttttcaagatctcaatgcccttaatagagttaactaagaaaaatcaacagtttatatggatagactagtgtgaagcaagttttcaagagctgaagcaacgattgattacaactcgtgtattagctctactgtcaaatcaagaaaagttcatggtttattgtgatgcatccagacagggtctagggtacgtgctgatgcaagttgatagggttattgcttatgcttatcgtcaattgaaggagtgcaaacatcgatacccaactcatgacttagaacttgccccaatggtctttgctttgaaaatttggcgacactatggagaaatgtgagaaatctataccgatcacaagagcctcgaatatttctttacttagaaagatttgaatatgagacagagtcagtggttggagttagttaaagactacgattgtaaaattctctatcatcctgagaagatcaatgtagcaacaaatgccctaagcaggaaaggactcgggcatgttttcaacacaactatgatttcccctcaattagcagaagacatggtcaaagaaagcatcgagtttgtagtaagcaaacttaataacttgacactgcaatctgatgtgttagaacgtatcaaagttgctcagctaactgatctagagttagtaaagatcagagaagaggttctagctggacgagccagagactttatagtgtcagatagtgggatgctattgttcaagaccagggtttctgttcctagtagcgcggaacttagaaatgaaattcttgaagaggctcatactactccatactccctacatcccggcaccaccaagatttaccaagatcttaaaccttacttgtggtggagtagaatgaagaagaatgtggtagaattcgtatcgagatgcctaac

SEQ ID NO: 369271 - DNA, 545 bp, Cannabis indica
tccgaagagaaggttttccatgaactaaactttccaggagccaacttcaaataccattgctgtgcagcttccgacaaagtggcggggaagattctggaacatacgtccccttgcactccttgtaaatctatttgcatctcaaaatacttgagatgggaaagaggatcttctcttccagtgtacatcttcgacgttggcattttgaacttgtggggtagtggcagtagattgatctctggtgagaagggagttctgcgtgcacggtctaactcaagatcattgttacgctgtccggccatgccatgaaacatattcttcaattcgttgagctggccctgtacggctgggctgacttgattggcgttttggtcgtgttggattacgtcagcgtctttttgaccggggatttgagtatgggttctgggctgcacgatcgtcgttgtattctactcgtctgtcccccttcttctatttagatcgtcctttaggtcatgggtcgttcccagcctatcgaacacggaagagcctggttgccttaacgattg

SEQ ID NO: 369272 - DNA, 713 bp, Cannabis indica
ggggatttatctggatgcatttggaacaaagctctcttcacttacttcactatcaatcggagtcacaagatcatgattcatctcagtagttacacttccttaaacacaattaatgactcgttcccagcttgtatccgaagcagaaaaaagaactttataatagtcaatcatcaccgtagccaatccactatcccaatccacccacacaccattgtcattcttgagtgaaacaatctggttatttttctttctcgtatttgcacaagcatggaaatattttgtgttcttgtcccctgcttgtaaccaaagttgctttgatcgttgtctccaaaagacctccttctgtgtaagaatctcaaaaagttgttcatgagtatccttatatttctgtaccgaagtatcatctctacgccccttcaatttttcaactccttattacattgagcaatacgatccttaaagtttccggttatatcttttccccattcagcaagggaggtgctacaacacttaattttctggtacaaaggatcatcattaaatatttcccaactatcatgaacaatctgcctacacataggctccctactccaagcattctcaaaccgaaatcttttaagaaacacctccggttttcgaaaagcaagatcaagccaaagcggagagtgatctgaagctgagacttccatgttaaaaagcttagcagccaaaaa

SEQ ID NO: 369273 - DNA, 758 bp, Cannabis indica
atcactggcacagaagaaatcgaaatgattcatacattccaaaactggatggcaccaatagtggcctacctcgagtctaggaaactaccagataatcgaaatgaggctcggaaaatgagaagaaaaactacacggtatatcatagtagagggagtgatgtacagaagaggattctcgatgtcgttgctcagatatgtcactcaagaagaagctgcacggctcctatttgaagttcacgatggattctgtggaaatcatgccgccggacaaagcttatccaagaaaattctaaggcaaggttacttctggcaaacaatgattgaagattcaaaagcctacatcaagaagtgtgacaaatgcgagagattttcaaagataccaagagctccacccaacgagttatcacagatgcaaagtccgtggctctttgccatttgggggattgacctaatcagacaattacccaaaagtaaaggtgtagtgcagtatgcagtagtagcagttgactactttatcaagtggactgaagctgaaccactcccaaccattacatcaaagaaatttgaagactttatggtgaagaacataatatgccggttcagactactgtacaaaatagtctcagataatggcaagcagtttgacagccaatcctttactgatttcgatgtggaccatgatatcatcaaaagtttctccgtagtggcgcatccttaggcaaattgtcaagttgaagcagtcaaaaaaaccttgaagga

SEQ ID NO: 369274 - DNA, 767 bp, Cannabis indica
tcttataaaatctctttaaatctatagaaaaataatttgtattacacttacatatagataagatctacattgttgtaaagagagcgattacattcaaggtaagtgactgaacccttaattttttaatttttatttgaatgtaaaaaaataaccaaaattgtatttttagcttgattcttgtttttcacaaatatatatatatgatagaaacaacaataaaaatatcatactacccatattattactatttgtagttttgagttgaaaatcccatttttgcaaagtgaacccaagattgaagatgaatcgcaggggatcgactattaatggttgagctcgactatgtcagttgagatggtgattttagtagagctcgactatgttagttgagattacaattttagagagcttgactgttgtcagtcgagatgacaggcgtaagggtagagctcaattagatttgatcccgatttatatttttaattgttaaacttttttatcgatgtttgctaaaagagtgacattcaatagatatgataattctaatgagctcaactagcttgccctaaagcaaaacccccactatgccttgtaactttgatacccaaaatgtaatccacttctccaaggtctttcatttaaggttgagaaagaacctctagttcttctatctttcatgtatcactaaggattaacatgtcatcacatataggtcaaacaatatcacactaatcttcaaagtttttgaattacaaacaactgtctcc

SEQ ID NO: 369275 - DNA, 640 bp, Cannabis indica
gtcttgacatacttttgcaggtgtggaattttttttccttattaggaattcaatttctcgcttcaagttgtagcattcgttagtgtcgtggtcatagtctctgtggaaccgacaaaactttgtcatatgccttttgttggtatctttcttcatgggcccgggcttcttgtacgggatcaacgattgagttgccatatatacactttctatatcctcagtcagaatagtgaatgcagtgtatttggcatgattcttccggggagtctgttaggatttatcagcgaactttcctttcttcctgtttccttgcttgtgtttattgcaggaacgcttgcaacttgagcttgaattatttgaatagttgggaagttgggcggatgtcccagtggaaggagcctttgacttgcccggcttttgttcacctttcgctcattgaatggcttcttcgagcttgatgaagccttcggctcggtcaaggaaatcactcattgagtctaccggcccgttcttccttatatctttccaaagttcatcgaggacttcgatgccccctagtatcgcgaataactttccatcctcggttacccgtgaaactttggttgcctccgtcatgaatctgctgatgtatgccggagtggct

SEQ ID NO: 369276 - DNA, 589 bp, Cannabis indica
tttaaaaaaaaattcacatttacaggcatactcatcaaataaatatatagagtaactgtttatttttatttattgctggtgtacagcaaagtatacacatttgcagccatgctcatcaaaagaacaaaagctcacgaatgagagagggttgacgaggtggacaaaggcacctgttggtcctgtacgcggggggcccaggcgcagagagcctctgcgcgtgacacgttgcgctagagaggggcttttgggctcctttattggtgattttgtggacttcaaaaatacaaatattcatggttttgagctctatttttgccatttttcatttcttttcttttaataatgctattttttttaattcaaacaataagcacaattaaatcacaacaaaatattttcaaaataaaatatatcacaataattttaataaaaatatttatttaaaatttaatttgcatttccttaaataaaaacaatacattttctttattacttttatttctttgtttatcttttttattcataaaatgttatttttctttataaaattaattgaatattatattattttcaaataaaaatatattac

SEQ ID NO: 369277 - DNA, 1316 bp, Cannabis indica
tggtttgttaaaattttgtttatattttagtggacaaaaaggatttgaggaacaacaaaattttcttcaaaatatgtctggtttaaggaatatatatattgaatatgaatattcaaagttcattcaaagctaacttaaattttaaatgtcaacagacttcataattaaaagcaacaaatcggggaagttttactttttcctttcatatatgcacaaaaaaataaacaaataaataaattaataatatataaatacattgagtgtcatagctagccattgactaccatgtccatatccatatacttgatatatttgaattaatgagaccaagaaaaagcattccatatatgtaataatatacaacaataaaaaaagaaaacttggtccaatgttgtgaatattagaaatatgttattaccatgttatacacgtacgtaattgaatttgtttattctctacgtaagtttttttttttttagtccgggggggtatatctaatagtttaattgtttttcttttagtaaaaaaacttctttttttttttctttacttcttacgattgggtttaatagttctaattgtttttctttttacaattggcttctctcaggttctccttcgtctctgtactgtagtgctcgctgggattagattcctctttggctgtgttagaaatgtgaaagtgtatggttgaggaagtagggataggtgagtgtatggtatatggtctatgggattccatctcaaaattaattgataataagaagagtacgtaggtcatgcattttatgtatggtatttagtttctacatattattaatgtgagactctctaacaggctcattcgagttgtggtttagaaggtgggttgtcgtcgggagtctcgtcaagttaatgttgggagccggtggtttcgaattcttctgctcattaagggattctcccctacatctttttagatttggctttttctcggtggtgccggtggggctaatgtgagtctgacggtagtggtggatcctgggttcgtgtgagggctggccctaggcgggctagacccgcgcctagggctccctcattttaggagctcaaataaaaataatattttttaaaaaatatatataggtaccgtttggtaacacttttgtttttaattttttaatctacaaaatgaaagcaaattttttttaaaaaaaaaaaaacttaaatttttagtaaaaacaaaaatagacgttctataaccactttgtttttctaatttaaaactagaaacaaaagtagtagttctgtaaagttcatttttatttttaattttt

SEQ ID NO: 369278 - DNA, 535 bp, Cannabis indica
gcctatatgtttgcttttgggcttagatgcatataggaagcccatttatttctagataactaagtggactaggttgctaaaataaaatatcacccatgatagttttatttaggcccgattagtattggacttatttaatgaataacaattatttaatgaaatgttaaattcctctcctttcggccttgtgtgagagttaggaggccattagtagtgctacgacatactgaacccaaccctccttcacatgaacaactccaattgtgaaggctcatttgccttatttaaataattgtattaggctaattatgctagtttgacataattgaaattgaattagcaatataattaattttgaaataaataaaattaatttttcattggattattttaaaattgatttagaaaaatacacttagtttaatgaaatattctagatagtgatttcttgtaacaaatttatattttctaatatttaattaagtagagacatatatttgagttgaaaattgatttaatttaattaattttggac

SEQ ID NO: 369279 - DNA, 609 bp, Cannabis indica
gcccaaaaacacaacacatattaaatttttataataaaactaattataatattacaaatatatatttactaataaatatttaattttaattatttcaatttttttttttttttggtaaatttgagaaatatattgcataagaaccaaaattgaagagtcatatacatcctgaacaaatcagttgagaattctcaatttatcaaattaattttttatatatatatgattaagagtaaatattatttttgatcctgtattttgtaaaaattattaattggaccctctgttttgttgaatgacaaaatagattatatatatattttctaaattggtaaaaataggccataaactcaacttataacaattttaatttttaatataactaattttaagacaaattcaaacgcatacagatacagaaaatgtaacaagttttgtcataacacttctagattagattattatcgagttttattttgacaaaaaatcaattcaggatcttatttgtacaattttaaaaaatacatggtccattttatcatttaacaaaatagagggtccaattggtaacttttacaaaacacatgatttaaaatggtatttacccta

SEQ ID NO: 369280 - DNA, 591 bp, Cannabis indica
tttgatttggttgaagacaatagctcatttggatgagatgagagcatcgaataaaattttagagtaaaaattagtaaaatggctggccatttaaaactgctttctagttacaagaattacaaggaaagtgtggagtctgcaatagtagaactcacaacataagcaacacccccaatcccaatatcaatagggattaaaaatcatcaataacatttattactctacatttataagattgatcatgtatgtcttagcttcattttagtctgctgataggttggcggtaggattgaacatcgggtgggtttattgagttttggattcgcgggtttcgaattcacgggttttgagttaaaaaaataaaatcgaacttggacccgaatagggcacgggttagcgggttggcaggttttgattgaccgaagtggcgggttgactcggtcaactctttaaaaaaattaattttttattcaaataattatttctttcatttttttatttattaaattaaagatatataatataacaataaaacattactattataatatacaaaacatgcacaatatcaatactattataaacaacaat

SEQ ID NO: 369281 - DNA, 606 bp, Cannabis indica
ggagggcaagttaatagaatttgagataaaatgaatatggttttatctcaaatttaattggtattgagagaagtagcatgttcatcttatatatcttattatctctgtatacattaataatgtgggactctctaacattccctcaagatggtagctattttattttttcacgatcttagacaacttgatcataagcggttattttttggctcgctatccctgatcacaagtgactctttgttctattttttggatcaatatttttggatctttggtggctcttttcttttggttcactatctccgaatcacaagtgattttttttttaagctcttggatcagttttttttttttgaattttggtgtactcttttttgtttggctctacttggtatcggttttttttaggtttggacacttgtttagaggtttttttatttgtttttgtctactattaatatatatatatatactagatgaaagttacgtggcgagccacgtaaatattagttttatttaagttctagtgtatttttgtttaaaaatttggtaactaatacgatatgttttataaagtaaacttgttaaaaatgtcataattgtgta

SEQ ID NO: 369282 - DNA, 817 bp, Cannabis indica
cttgtcatcctcaaaccgatggtcaaacagaagtagttaataaaactttatccactttattgagggctatcataagtaaaattattaagacttgggaggattttttaccacatgttgaatttgcatttaatcgttctatgcattctactactaaattttcaccatttgaaattgtttatggttttaatcatttgactcctttagatctatcacctttacctgtttctgagcatttgaatttatatggcaaaaaaaagcaaaatttgtgaagcaaatccatgagacggcacgactcaacatagaaagaaggaccgagcaatacataacgcaagctaacaagggtcgtcacaagcaagtttttgagcccggtgatagggtatggttacacatgaggatagaacgattcccagtccaaagacgttccgaattgctacctcgaggagatggtccgtttcaagtgcttgaaaggatcaatgacaatgcctatcgactcgatttacctggagaatataatgttagtgctacttttaatgtttctgatttgagcccttttgatgcaagtgaaggggggaatgatgagaacactaaggctaaagatacgagtaaacttccaggttgcccgattatgagggcgcgaaccaagggattcaaagaagaactcagcaacttagtcaacagagtttaaaacaagaggagaccgcagtcaacactgaaggagaaaaaatattgtgcttctcatcaaaagtagactcaatttagaccaaattgagcttatcacgtttttcaaggtcatttggcagttttccttttaattttg

SEQ ID NO: 369283 - DNA, 839 bp, Cannabis indica
atctagatcctggtaaaacacatattccaacagaccagggtagaggcaatcgccagagtggcaccgaaactcgatacacttacccaaagtgaccccagttgtaaaaatcataatctcggggagtgtaaagggcaggggtgttttcagtgtggtatgtccgggattataaaagagattgtccccaactcatgactgaagcaccaaagactgtagcaaaacccactccagcaagggtgtttgcaataactcaggctgatgcagaagccatccccttagtggtaacaggtcagctctcggtcaacaactcttgtttctctatgttgtttgactatggggccactcattcgtatgtggcagccataatttttagtaaattggatagatcgcatgatagttataaaatagggtttggaaccatattgcctggtggagagttagtcatctccaaaaggtggattaggtatatgccaatcagagttgaagatagagagttaagtgcagacctaatagaaatgaatttagcgaattttgatattatactgggaatggatttcctgtccaagtattcaacaagtattgattgtaagaggaagatggtaatcttccaacaagaaggcaaagaacggtttctttttgttggattagttcagggatctcggatcccagtaatttggtactaacaactagggaattattgcgagaaggatgtctagggtttctggccgtggtattggataccactcggcctgactctgttcagccagaagacatcaaggtggttcaggaatttttagatgtttttcctgatgaacttccgggtttaccacctcaaagagaaa

SEQ ID NO: 369284 - DNA, 780 bp, Cannabis indica
aacaattgatatcttattcacatcaaaagtactaaatagttgcttttcacaaaactcctaaaagcgaaaaaaaatctagaaacgagatttttttcagtttttttctattttcggtaattattttaaatttcggtatagatgctgacgtggcacaacggtatttgtgcaaataattttcttaaaggtatttttgtaaataaaatcaattttaagtataatattgaaaactcccctaaaataaatacatgttctaattatatacccctctcaaacacattaaataaaatatgctacttaattagttttaaaattttaatttattttttaattttttttattcattcaaaatgattttttgttaagatctaaattaattttttaaaatttactaaaaaacattgaatttttcttaattagttttataaggtggaacatgatatagttagagctgcacacgggtcgggtttttgggtggtcgggtttaggttttcgaattacgagtgttgaaaatgcacaaccgaacctgattttcgagtggtcgggtatgtcagatttcgggttgggtatgccgggtttcacttggtcgggttcgggttttattgggttgagtttttcttttataattaacatatttatgggcttcagtagtgaatttggttggaacccaatttcaatttttaagtaggaataattacataaggcacaattttttgtaaaatatttacatttttacgttcaaatgttttttttatatttttacgatttccaaaataacacgaa

SEQ ID NO: 369285 - DNA, 961 bp, Cannabis indica
aaaaacttaaattcataatctaacataattccatcaacactttagaatgagtgtttagttcataatcacaaacataataaccacaataatcatattcataattaaataactaagtaaaagaataaagaagaagaagaagaaaagaactctaataatgatagttgataatgattgcttgaagtctcttctctcttactcttcaatatattttctaatctcaaagttgcttgtttctctctctctagtcgttcctcaatatgatttacatgcttctttatataggccaacaaagatagatcaatcctcttagaattagggctttttttttttttaaaaaaaatgataagtgttgctctatagcgcttataccccgcgctatagcatctaagagaaaaaatcccgaacccgtgctgaaattatctttttttttttcgttaaaaatcaatttttttccagccgggcactatatcacagaccctctgcgctatagcacacaacactaattttttctgcttcgaccttgttgagtaaatcatgcataacttttgcgtttggactcaaaatgagatgatttaacatgttttggaaagataggatcgagctctatcattttgggttttataaggtcttcgagaaaatgataaaatcattgtcaaaaagggctcaaagatctctgtccatcacaaaatgtcttttcagcataaacctacacacttagagaaaatacatcaaatctatacaaaaataaatactaatccatttaataattgactaagaatgagtgcataaatgtgcactcatcaataactctcgcagctctacaaagataatacatcaatatactatggtttgaaaaataatgaagaacaatggattatttttttaaggcttaaaaggttcatatataaggtttaaaaaaacaagatttcaacatttacgctcaaattgggtaaaactagag

SEQ ID NO: 369286 - DNA, 510 bp, Cannabis indica
tccggtagtgcgtattttgcctagtagcaaagtacacacgctcttgggagtccgtcagctccatgtactgggtgtactggggagtgtacccccttttttggcgtttctcctccgttcgggtgctgcctttggaggatcgtttactccttaagccctgggaagggcctgccaggctagcggttggagcaaagtgcgagggagcttgtccatttatccctaaggggtttccaaaatgggatgatgcgggtgccaaggcctggccctgactatatccgggagtagcagagaactatatgtcgctcattagtggagccgtggtcgggacagtacccgagggcggtgctccgggcatgtactctgctatcccggtgggatagtatcctccataggccactatttgggcctcttcaaggttgatatatttttggactgtcttctcgaagtcctgaaggctagcagccccctcttgttgtagttcgttccagaagggagtcactgtacagatgcctg

SEQ ID NO: 369287 - DNA, 742 bp, Cannabis indica
aaaagtgagatttaatatgctgttgttatggatacaaattaatttaggataaagtatctaaattatttatatgattttatgacttgctttgtttaatattttcttcgtgattaaattttaccaaaaaaatataaggagttttcacataagattgagtttgtaaattttaattagattacaaactacttaattcaacttgtcaattgaataggaaggaaagaaatttagtaattgcattaggaaaagtaaaataaatgatagttagagatcataataatcattgtctttattattgttcactactacaaaaaccccctttagaggcggtttttaagccctttcagcgtcggtttttgcgaaattcgctaccgacgctgatcagggcgacgctaaagggtttatatgaaccgacgccatatgtacccctatggcgtcggttattagctaataaccgacgccataggggtacatatggcgtcggttcctagccaataaccgacgccatatgtggcgtagcaaccgacgccaaaagtacgcgaatttcagttttttcaacattttttttaatttaattatataattttaattacattttaattatatatttattaatttatatattattttatttaatttaaattacatatttattttttaaaatgtaaattaaacattatttaaatttgggtaaaatacataatttaatttcataaaagtaattaaatattacacaaacactaat

SEQ ID NO: 369288 - DNA, 757 bp, Cannabis indica
ggacattaataagaacaaaactgtaacaccctaatctatagggacgcacgtgtgtgattttataaactagtttgatactgatagattaatttgttattaaaaaccgtgataatattaaaaacttgactaaaataaaatactaaaaatgaacattataacagcataaaaagcatgctccgggaacccctgttataaaaagttttataaaagaactatatacgatgatgcctcaaaaacataaaaccaaaatacacaatagatacagcccaaaacaactcatggcaactcggcacgtaggccggcgtggtcaatatgtacattgctggaaaagactatcacctcatggttgatcaagcttttatttgcctttacctgcaccacataacacccatgagtcacaaggactcaactagaaaagtaataataataatcatatagtttattattcgaatactgtcatttatacacaatcagaatcaaacaaccatgaattgttcataagatgaattccaaatcactactagcatctaccaagaataaacatcagtatacaaatatttggtaatacaaaactattataccaataatagaattcatattcatttaatcatataaattatatatatgtattacctcataagtaaccatcttaattacatcacgttgcctaatcaggcaagtcgatactttaatctgataatcctgtatttcatttcctaatcaggaaagcttgtgccatagcctagcacccatatat

SEQ ID NO: 369289 - DNA, 471 bp, Cannabis indica
gggaaaaaacccaaaaaatcacaatttggtgaatgctgcccaggaggctgcacgtctagcccaggaaggctgcacgcagcctcctacgcgcgcggaccaggtgatgggagggtgggatgtgcggggacatcttggcgtttcacgcgcgcgcaaggggatggtgaccgagggtcttgtgcgcatgagcaccaccctcgacaccattgtttcttaatttttcaaaattcatatctttttcgtttttcatcgaaattaagttccgtaaaaataaaaattgcttaatttttcacaaggaatccaaataaaatattttcaaaatagaaaaaatatttttcatggaaaaaaattcgtacaacacaaactttcatcacataagcacataaatcaacatgaaaccatccaaatgaacacaaaacatatgaaaacatcgttttcgttcatattacatgaaagtaaatcattaccatggct

SEQ ID NO: 369290 - DNA, 708 bp, Cannabis indica
cttctgtctctttattgataattaaacgatagagattacattgaaatagagttttgtttagggcataaaacccaacaagttaaggtgtcttctcctctagaggcagagacctttgccctttgccatgccattgctttatgctctagtagaggttggtgttccactcactttttctcatattgccaacagttggttaaggctattgaggttagatctcccctggtctggcaacttatttatgttttcctttatttgttttctttgttgggtgatcacttttgtaataatatttttgaggaaattacactattttttttttaaattgataccattaatttttaccccctttgaaaatatattatatttacctattgttttattcattctaccaattttacttttataatttcacgatagtcttcattctcctctaattaaaattttgtcttaacttttccacaaacctacacatccatctccaaagaatacaatctattatgtttaaaattgtatcttagtgtttatgtgagagtgtgaggataatttgggtacaactcatagaaaaaagtatatttaaattaaattttatttagagataaatttatttaatgtataaaaaaaataatattcttcaacttttcttaataattttggcttcctagagataaatgataaaatatataataatataaagttatatacttaatt

SEQ ID NO: 369291 - DNA, 871 bp, Cannabis indica
gccaacaaaaactaaaaaatctacaaagtaatcttggagcagtagcatggcctcggacatcatgtgggtttgactcctggccctgaagtcgccgtagttgtggttgggcgtctctttgtccctaaagaggagatgaaaaacttcggtcgtagaaggcttgatcccagcaacagtaactatcttctccagttggtgagcacaggtcagggtcgagtgtaactcgttcgcctcccagttagtggaccggcaggtgtatttctcgtggaccactaggcctttcatcacttcctctaaggtggtcaatttcttgggcaccttgtctgaatattttgctccggttgaggtaggggtagacatgctttgagtttgatgaagcgctgaaatctcttggtcaaagccgaagaaaccgtgctcatgacagtcgcggagaacctcactcatctgaaaatgaactccagcaattagccccctaaccaaaccctaaaataaaagaagggaatgggagtcccctaactgctggaaggagcccccctccggatgtcagccaaagataggaaatccagagtttctcctaggcaaacatcgggcacaaatatcaaaaggcaataaaaaagagaaaaggaaaaatggagaaaagagacaagagtatgaaagtcacttcatactcttgacgatccctaagtaaataaattgaaaaggggaaacgacagtaaacatgcaaggaattacgacacacgacggtcttcaccatgaccgtcttaccatagaaattaagtacgattaaaacgaagacattatcctaagtttttccctaacatgcaaatgaacaataaaaataaagcgtacccagagacttacacaatggtgatga

SEQ ID NO: 369292 - DNA, 508 bp, Cannabis indica
agctcactagaaaaaaagttttgaggcgtgtggttcttttatgtttttcaatgtggttatatctgcttattgttttacatttatttttgtgttgttttagtagtttttttattctaattttctaagattggggttgcaaatatagctgctattgcatctggtattgaggttgtgcataatattgttagttttttgaatccctttttcctttcttttttgtttgatttgttttagtgttgttttacagttattttgccgtaattatttatttgtcgtcaatttcactattttttctcaatctcaccagaaataatggttgttttccgattgttccggtgttccagtggtagtttcgcactactataaaattgggctttagaagcagtttttaagggcttttagcgtcgattttgacgaaattcgttaccgatgctgttccaagtgacgctgtaaggtaaataacaaccgacgccataagaaccctatggcgtcggttattatgaaaaaa

SEQ ID NO: 369293 - DNA, 795 bp, Cannabis indica
agtcccgatttgggccagttataaataagaataacctctaaattgtaattagttatacattttccaagtctcgtattaacaaagtatacctctatataagaataagtacatcttaataaaatatatacatatgttttgtcaatttatttacataaaattaataattttattccaaattgtaacatatgtattaccattatatttactctaaaataattctattataatatagtattaataattatttattgttattattattacattgatattttttagtattttttttttctagtataactctatttagttatttataacctctcaattagaatataatttgcttggtcccaagtctattcttgaatagaggttctactgtataaaaagaaacttaaataaacttccacaagtttttttttttctctctttatttcatgatttaccatagcaaataaaaagaagtttattgcaattttacggaattctacatagaacccttattgcaactagcgctgtaacctaaattgtaacaaaaaatcgtatagaaacccctattgcaactagcgttacaaccactttagaaacccaaaccgtaaatttaaaaaaaaaacgttaaaaaaatagtatatggggtaattcccctaaaaagaatataacactctatttaattattttttatttatcaatatatcatagcacataataaagaaataccgtacaaaataaaaaaaaaaaaataactaaaaacttaaaattaatatttaatagttttttttttacttttctttcctt

SEQ ID NO: 369294 - DNA, 607 bp, Cannabis indica
aaaatcggaggtgcctgcttccgaaacctgtcatacaagggttccattctgttcgccgctaccactatcttggcctgagcaacaggggcaggtgccataggaacttccggcaccgacactgcaggagcaccctgctgcctcaacctctacatctcatgatcttgctcctctattctggcttgcatctcagcaaacctagtctccaaattctgggctgcctgggcagcctgtggcgggttatcatcaccccgaccacgggccctgcccctgggacctctaccacggcccctagcatgcgggggaaactgagctccttgaccctgatttgacccgaccgagttgccctgactcctggtgttccgcctggcgtccatcaagtctgaacagcctacgaaaccaagagtttacacatcaggtcatgatcaacgagagctaactaatgccgcttaatttggaaattaaaaacaatacatgtgcgtattctactatcaggctactaacatgcttcctatcaggcttttcttgtttcataaaaattaataaactagtaaagcaataaaagcttactgaactgtagaacgagctaactgctgatgatgattgtaca

SEQ ID NO: 369295 - DNA, 676 bp, Cannabis indica
tgatcaaacctttctgacaagaaagggatcgaattattataattttttgattaaaaacctatctgatgagaaaggaaaatcaaaagttataaatgagatataactcataactcgcatttcaagttgaatactaacgggtcgccctaaaagaaagtattaaacgagacatcaatgtgtcttgaaaaaagcacttaaacctaacacatgagtagatatactattcatgtaagcaataaaaaaatatatataaagtaacaagatcattaaaagtatattcaaaattagttgaaatatattataactgtattgcgaggcaaaatcaatgaccactcgcaaatcgagaacatggcagatgataaattgctcacgcgtgtagtaggctattaactacttaatgtcaaagggaaatacgagcaatgggaattcctaaaatatttgtgtatgatcaaaacatgactgtttaaattgtgaataaaatgcaagcaaacaagtacatgtcaaattccaaacataaaagtacgaggcatttgaagataaaataaaaagcaaagttggccatccaacttcgcaaatttgtctttacaaaaagtgccacatggggcaaaccattgtctcggctctagggccatttccttacccaaaaaaagaaggagataaataaaaaccaagcctacat

SEQ ID NO: 369296 - DNA, 509 bp, Cannabis indica
cacactagttgagataataatacttgtagacacagttaattgaatttcattaatgaattataattctaaaattagactatgtcttatttatgaattttcactaagtaatggcttaattgtgaagaaaagagattttagggtttatttgttaattaagagactttgtaaagtctaattaattaaaaaattaaatggaagttttatttaataattaattataattattaaataaatatttttgacatttataggattaaaattgaaaaatatggcataagtaaaataaaagataaatggttaaaaatggcaaatttataactagtggggcctttactatggccggccattatgtgtttattttgttattattttatcttttttattccatttaattaaaaccctaacgctaggtgaaatagtctaaaaggaataggatgctctaactttcatccaacctaataacctagtttacattctgtcagataactagagtttttgagagcctcctt

SEQ ID NO: 369297 - DNA, 544 bp, Cannabis indica
gtacttatgatagtgtatatatatataaataaataatattatattaaatgtgcggctgaaataatctagatagtgagtgtaagtgataataatattcgtaaatttaaagattttgcaccttaaatttttacatatactaaatcatgtcctcgtttaaaatctttatgaactattgagattgttggatttaaaaatttgtgtccaatcttaataagaaaattcgagggcataatttggtagatatcaaagtctagagagcataatttagtacataaaaaattactgaattagtaaaatttaataaaattagataaaaattcttaaatccaacaatctcaggaagaaattttaacagtcagaaaagttgagacagcatgatttgatacttgtcaaaatttagagagcaaaaatcctaatatttattatgatcgctctatttaaaatatactaggtgattgttacgtgccaagccacgtatagttttatttaatattttagttttttattttaattaaaaattaaaatagtataattatttgaacga

SEQ ID NO: 369298 - DNA, 547 bp, Cannabis indica
cgtgttcaaagctctgttcaggtttttcattccaactcctattcataaactctaataaattctttgactattgtaaatctattttgtcattatctacacattacatatgaaaatttagtaattatatgtattactcattttgatatttgccacacgtatagaggaattttcagcacaattatgagaattttcatgaaatttgcttttattgatcttaccttgtattatctatatctattagaaaaatatcttcatattttgttattatagtgctattgttgttaaggcgtgatcaccaaatcgctatgggatgtgaaactcttggtggttgtttgcatggcaccagtgggcagggtagttactcatggaacagttactagtggttactgtctaatatagggcccgtttggcacagcttttgaaaagctaaaagctgcttttcaaaaaagctgtgacaaaaaggtgtttggtaagcagttaaaaaataacttattgaagaaattatggaaaagctacagctaaaagctaaagctggtacaacccaact

SEQ ID NO: 369299 - DNA, 635 bp, Cannabis indica
gcccgcaaggcgtcggacagagccgtactcttggaagcagtagatttagcccgggagtaagcataacccagtttcggcctgcacaaaggagaaggtcagcgtatgaagctaagtatgaaaagctaaaagggaagtgtcaaaaagaaaagactaaccctggtaagctccagcaagactccgcctaccaacacatccagagatgagtggtccacaccagccagctgctcaccgacctcaggaaccagccggttcatgtgatgagccatcacctccctgcccttcttgacctcaggcagcacaggcacgggtagagatggtgcttgctcccgttcaggaatcctcctgaccagttcagacccagatgttggtggcccaggctccttagacttggcagattggggagtaaaaggattcgcagcagccagatcctcaggaaggtcaatgacctctccagaaggcctcttctctgaagacccctctccgaccttggacttcttagtcggaggggaagcactagagcctccgctcatcctcttccttaaggcgtccatcatctaccgagacatgtctgcacaaagcaaaaacaacatggaaagtaaaaaccagcaaaaaatacaaagtatggaagccaagaa

SEQ ID NO: 369300 - DNA, 603 bp, Cannabis indica
agaagtggacaagaacctcctcaagctttgggtagaaattgagcttaaggttttgaccgttagtctgctaggccataaagacgccatcatcaaagcgctcagtgcaatggttgcagacaataggggctaggaactcatcccttttagccttcttcagcgcctgatctttgaaatccctgagctccttcacctcaacagtcaagttggtcgtcgtctgcgaattagcctgatgcagctcttccatggacttcagcctggcaaacaagtcttcaactgcctccttggactccctcagctcgcgcctcgccttagccgcggcctcatcccgggtcttcagctcctccgccttggctgccagtgcctcctgatgcttcctctctgcctgagcctccctctgttgggcctcttcccggaacgctttcgtctcagccgccaaatctctcagactctccatggcctcgtccatgacgtacccatgatcaattaaagtctttgagaggcgaccggtctctacagcgatgtggcacaaaaaaaagagtaaagtataagagatcgtatgtcagagtaaagcacaaaagaaaagaagaaaccattaataaagac

SEQ ID NO: 369301 - DNA, 510 bp, Cannabis indica
taaatgttgagttggggagcaatacaagtttcgtgtgtggtgaagtatttatgaaactcaagagattgttcgaaaagggacgagatgcagagttggtgatggttctcgaattaatatagtgatggatctgtggctgccgaatgaagataatccaagagtaacttcgaataatcctgctcttattgatcaaaatgttaaagcacttatcgaaactgatacgttggcttgggatgttgacttggtgcatgatatgtttaatgaaagggatgctaacttaattgttagtatttcgttgtcttcaagtcgtttatgtgatgtttggtactgagttgggagagcttggaccatttctcagtaaaatcggtttataagttcttaccattgagcaaagagttgggtgcacaggatgataattttgtcttttggaatactctatggaagctaagtgttcctccaaaagtgaaagacttgtatggcgtgctgactctaactgtctgcctacaaaatcca

SEQ ID NO: 369302 - DNA, 988 bp, Cannabis indica
tatgtgtatgtgtctatgtgaataagaataatttttctggtgttttttattataaaataaataaaatacaccaactcaatatattactaaaaaagattaaaaaagtaggagtttgtgtttttttttaatattactagaaaattaatatatattatatatcataattttttaaaaatatctataattaagtgcggattggattgaatcagtttactttttaaggtcaaacaacatccaatccacacaagtagtgcggattttagatttttcaatcaaatccgcgcaagtgtagatattcgcattttgcggattgaattggattagatcgtgcggattatattggatcggatacttaatgaacacttctatgtttcagctgaagaacgagagagaaaagacaattctatatattgaatatgatgaatgttacaaaggtttacatacaaaaacagagtaagaaaaaagtagttacaacgaacaaccatcctaactacttttaacaaaatataactaactgattaaaaaaacacacgcctaaggagactatgccagctcagatagatcattagccttgataggccctctccaacttagtgtggtgaaacacacaacaccaagtttatctcgcaaaaaatgaaactaagaattggagataggcttagttagagaatcatctagttggtggtttgcaggaacatgtgttaagctatttttagcctaagttttgggtcacattttatagttatttttcttcttaattattgtttttggaatagaattacgcttgttttctttggtttcaggtttcaacacttggaatgtataaattggacaaatttcagaaaacagtgatctataaaatagagaaaattttaaaagagaataaagctgaaacttcaagcctaaattcgactatgttctgatcatattttggaaaaagtcaaaacataaaagttttagatctctttcttatctttccaacgcatct

SEQ ID NO: 369303 - DNA, 620 bp, Cannabis indica
atttgctatcctgctactaccagagcttagatcgctaagttttggattgaaaattgaagaaaatagatataaggggagaaagttttatcgaaggaaggagaacgagggtttcgttcgcgttcgttctgttctgtttcactgataacttaatatatatatataaaattaacttacgttaacttatatataaataaataatattataataatatattaatattaataataataatataataatattaataaaaactttattattaatagttatttattatttcttagccactaagaaatttctatttctaaggtatttggccaacttcgagtaccctaaaataccccgatatttctaaaatcaacttatcccaataatctcatcaatatttctaactaaaactgttgtgacatttttggcctccaatcgggtctccagggtcgccaaacttgaaaatatttttatttcacaaataactcatattatatccacgtatttcaaataaatccccgtaattaacaaattacgcttatatatccacttattgagtctccagggtcgcccaacctgaaaatatttttattccacatatagctcatattacattcacacatgctatata

SEQ ID NO: 369304 - DNA, 540 bp, Cannabis indica
gtcacaataatattctagaaataaatttttttttcttaaatagattaaatcatagagattattattaattttctttattagtagagaatttagtaataaaaattataatatttataaaatatataattttgtctaaagtaaatatgaaagcttgaccatacttaatcatatagctcgactataatgtgtagagctcaaccattataaataatatagctcaactgtatgagtaaagctcgactgtatatggtcaagatttctaaagagttcaattgtcattagtaaagtctgacttttaatggtcgagatttgtaaacactaaacaaaatattagtaaattgttcaattatcattagcccaactgtatgtggttgagatttataaatactaaatgaaattcaagttatcgttcaactgataagtagagctcaactgtataggttgagatttgtaaacattgaacaaaagattagtaaataactaaacacaaattactaagggtcccattgttgacaaaaaatatctactgccatcttcctt

SEQ ID NO: 369305 - DNA, 685 bp, Cannabis indica
aacccaaatctggaaagagaaataaagaaagatctcaccatgattgaaaatccactgaatgaaatctgaaatcagccccgagatgttttgggagtagttctcattgttgaaactcctccgatgttggtgggaggtggtttcgggtctgggcaaacgaacaaaaggggcggcgactagttctgggcaggaggaagagtcgactttgggtggtttctggtcgtggaatgggggcggggctgctggagtggaggtcgtcgatttgggggggctgactgggttcggctgtggggtcgacggagcaatggaggaaaaaaggggggtgcggttctggggtaatcggagcaatggacggagattggagaggagcggttctggggaaatcggagcaatggaggtcgaatgtttctggggttgaaaggtgggggctgggaacggaaccaggggttgaaggagatggggctgggtgaaaaatcgggtagggtaaaaaattttgaaattaaatttttttttttttggaataataggatagattaaaataaatataatattaatatatataaaaaaaatacttttttttttattaataatataaatatatatataagtaaaataggagtaatatgtaatagatggacctttcatctcgtaatgtgagtgatattacgcctgctgtagcaaaatttcc

SEQ ID NO: 369306 - DNA, 574 bp, Cannabis indica
ccctattgtctcatcttgctcaaccttaaattgtgttattaagttttctgaatttctttcatattttactatttttaaatcatacttgctttcgatttaccgaatagaatcataagtataatttagtggtacttaatccaattccctgtgggatcgacctcacctgtgtgagatttactacttgattgcgtatacttgcgtagtgtttataatttttcgcaacagatgaataggactctactggaaagagtgaggtgcatgctcaaaggtgctgcacttgacaagaaattctggggtgaggcattgaaaactgcatgctacttgataaataggtgtccttcaacagctctaaagttcaaaacacctcaagaatactggactggacatgtccctactgttgaacacctcaaggtgtttggttgcacagtctttgcacataccagacaagacaaactagagccaagggctctcaagtgtttgttccttggttaccctgaaggggtaaaaggatacaaattttggtgcttagaagaggggcataaaaagtgtataattagtagagatgttgttttca

SEQ ID NO: 369307 - DNA, 791 bp, Cannabis indica
ttatatgttagattatgttgttttaagcatgaattggtagttgtttgaaggtttaaccaagttttgagttttagaactcaaacttggagctttaatggtgaaattcaaatcttagctttaattgttgttttgttgcttggaaaatgtttattgaggtataatatgcaggtctggaaagtttgattgagtttgggaacgatttggttaggggttgaatttttgttggtaaactgggtaaaaccggttacccgaattttgcagcagggaaaaccggtttttcagcttgtcgtttcgcggcagtttcaggtttctagttggttgattccctgctagtttgggatattaccatattaagttgcagtagatagggtttttgttgtaaaccttagttccagtcgtgatttagcgagtcacttatgcgcattgttatcgatgttatttaggagcctataattcaccgagcagttgttccactcaggttgaccggcacacctaaattcagaattgaggtaagattagtagaatatcatgcatatgttattacatgtttagagtacatgtgttattgcctgttagattacattgatagcagtaatagtatacgtagagttgtactgattactgataaatgtatgttagctaaatactgatcgatgctgtcacatcaatatgactagggtatgactagcatattgagtataggctgacattatggttgacagtattgttgtatgaacattcaagactcagaaccgtgtgggacacggggattagggttatgatctggtgta

SEQ ID NO: 369308 - DNA, 725 bp, Cannabis indica
atactgcgttgtggcgctaccttggtatcataagagtactgtggtactccatgtttctcacacagatcagtgataatgccagcaagcccaagtccaccaccacaagacccctcaaccattatatcaaatgtcactcgaatgatgtcccccacattcaaattataacctttcataattccatacacccacttaagcctgtccatctgagcatctgaaaaatgtttgttcgggagcatccttgcactaacaaagtatagccacgccttggctacctggttgagttcacaccgaaacaattgatatggttctccatcataggtatgaaacctaagtcccggataccctagagtttcggctatatccacataatccaaactttttgcccgaatttgctgcttcaaaggttgctgttctacagtaaaggttgggagctcataaagagcatgaatttcagctgtggaagcaggcactctaacccccctaactctcaccttgtcatcctctctttctggccagttggctaagaattctagagctaaggtttggttgctacgctcggtgacatccacaaacttagtccactgcctatttaagatttgatctctgatggacgcaaatacagcaggaatgtttgcagtttggctcaggttaacaatatcaatccctctatcttcaatgaatgccctatccttcaacttcaaaaaccgctcttgagcatccatatt

SEQ ID NO: 369309 - DNA, 514 bp, Cannabis indica
gcaacctcctgggtttgttgctcaaggggagttagggcgagtttgtcgtcttcgcaaatctttatataaattgaaacaaagccctcgtgcttagtttggtaaatttagtcaggccattgaaaaatttggtttgtcgaaaagtaagtcaaatcattttgtgttttataaaagatcaactactggtatcattttgttagtggtgtatgttaatgacatcgttattactagaaatgatactgaaggtatctcatcccttaagtctttaattcataccgcgtttcacacgaaagatttaagggagctcaagtatttcttgggtattgaagttactcagagtaaataaggtattattctatctcaaagaaagtatgtacttgatttgttaattaagacaggaaaattaggagaaaaacattgtaatgctccaatgaatccagctgtgcatcttacacgtgatgggaaaccatttcaagatcctgagaaatatcgcagattggttggaaagttgaattat

SEQ ID NO: 369310 - DNA, 1052 bp, Cannabis indica
cccaaagatttgatatgcacagtagtcgcgactatgggcaaaacacgagaattttggacagtttttgactttcaccatttagagatagcaaccctaatttctatataggagttgcgtgttttagaggcaaggggaggcagaaattaaaccctagagatgaacgaggaggcaaaggaagcaattgtggcgacccaaagaaagatcaccaactagttctttcttcccctttttatatttttatgttaatttctgtttcaatttttatggatgtgaacatgagctttttgaactaaattctcaatttacggatatgatgaatgttagatgatgtttctttaattcagttaatgtgattatgaatttttctttcctatattgtgtgatttgttcttatttgatttaattacatattttagattggccatcttgaatgtgatttatgatcctgatatgaaatctgagaagtgaatattaggaatgctctaataggacaaacataagttttgatgtaaaacgagagtattacatagcttatatgatttttaaattctgaatttaatgcaagtagataatatatgatttagaaccttaatgatctgagaagagttagttatatgttaatttacttcagagatgcaagtagataatatatgatttagaaccttaatgatctgagaaaagttagggttaatttgataatctatcatcacccctaaatattcatccaaattaattatactttttattattatttttcttgcttttcaatttttagcttatttaattattcaaccttattattgattctacaaatagaaataagaattcaatttgattggtacttagctacagtcctcgtgggaatgatctcacttacttgagttattacttgttaaaacgtatacgtatacttgcgtgttggatttatctacacaagaacagcagagtaagcattcctgttcatatgtaattttcatttttaaccagtcatgttcttggttttgtagcttctggtgcactgcaagccacacagaaaactgtgctttggtgta

SEQ ID NO: 369311 - DNA, 503 bp, Cannabis indica
ataaaaaataaaattttaatgatatattttaaaaaaataaattaaatgagttgatgtaagacgttgttcgagaatgtcctcatgcgagaataatctgtttgttttccgaacaaatattttaggaagcatgaaagaaaggaccaacagtcaagagagccatgaacagaaggtttttaatttaacaatggccttcttctattagtgaaatagtgaaagaagaatccaatactacctatagcaggaaaaaaccaattggatcacttacactagctaatgtaaaatagctacctataagagcttaagaaaagtaattaaaatacccattaaatagataagctattattgctcaaaaaatttacctaaattgtagctacaacattcttaaattttagtgtataaactataattatttattatttttatagttgtattttgttgatttttgtagtgtaaaattatatatagaaatattttattatttatatgttataaatatattattt

SEQ ID NO: 369312 - DNA, 787 bp, Cannabis indica
tttataatttttttttaattttaaattaattttattttaattttttaatttttttaaataattttttacgtggaccaataaaattgtgccatgtgtacactgtgtccagtccaacatgacacttaacacctaaaatggacggaaaggataaattgctaacagaatacgagtattgagggttttaccgtccaaatttgaattttgggagttaaatgaaaccaaaatgaaaatttttagggttttgccgccgtttactttttttttttttaaaaaagaaagctttacttaaagttaagcaaaggtcgcgaccttacaagtccaatagaggaaccgcaactaggagataactaaaatagtcagccaaccatgccgataacgaaaagagcattaagctcatagctcacgcagaagaagggataaaccccaaaaaaaggcccaaaagccaacatgacaaaggacataaatgcacaacaccaacaaaactaaacaaaataaaataaacaaaccaaaccaaataaaaacagtttcataagaccctcgcccaaaggatgtcacacgaaaatccaagacaagcagaataaaggcatgggaacgacgccatcttttctatcatccaatgggtttatgaacagtaatcatgattttttttctttttaacattatggattcaaactttatgttttattactaacattatcttttctttatttttttggttaagtattgacatgttagaattttattgaaacacaaatagcaaattaggggtgttcataaaataactgat

SEQ ID NO: 369313 - DNA, 660 bp, Cannabis indica
gtatccggatatctagctccggatcacaacaatttattgtcaaatcttacaatatcaaggttttatttctaagataatgtccaagattcgtattttttgaataatgaaataaaacaattgtcaaccaagtatttatgtgtttttattattcacaaaagtaggacacagtttgacaactatcaacatgatgtagcattcacatcagcagaaaatcaatgcctcatgggctggacttcaccaaatgaactcgaagtcaatgtattatctgtatttaccccattagtgggcaaagtttacatacaagaatcctagcactataaatataaaaaaatcccttcatgcaaagagttagaatccattccttgagtgctccggcaaatcctagggttcaaacacttgtgtaaatcaataaaatttttccagtcttatcataataatattgattcatggattagaggtcattaatccttcaactatataaaaactttggtcttattatttgtctataatatattttttaaaattttattatgtttatcagtttctgaaattttaataaacagtgcaatatattgtttagatcatattgtattatataatattatatttaattattttattttaatttactattaaaatattatatatttatatacctat

SEQ ID NO: 369314 - DNA, 533 bp, Cannabis indica
gagttcttgggcgatgagggagactgttcagacagtatcgaatgggacatgatagaagcgttggcacgttagcttggtgttggcatcttgccacacatgctaccttggtcacaagtgacttggtgagcgtcaatgtgggatttgtcttaccataatgggaacctatggacagtgcgagtatcttgcctagagagccctgatgcatggatgcactcatggatgcttgcgagcatgattcggcaggagttgtttcgagagacgaaagtgtgcacgaggcacatagttatgtgaaaaatgagcccattattactcggatggttgtaaggctgaccttggcttagagaagtaaaggtgtcgcacgggtgttccgctgcctgaaaaggtgagcccatgacagttggtatcagagccaagttcatctcagtgggaggtgaacctggttggcctatcctaaagggggtgtaggcgtgtgaaaggatgctagaaagacaactaccacgtgcaattgtagagatgcgcaacaaaatgtttga

SEQ ID NO: 369315 - DNA, 307 bp, Cannabis indica
tctaagatcctagtaaaataattccaacactttccttaatagaattcttgaagaaaccatctatatggacttaagcaagctcaataggtccatttatggacttaagcaagcttctccctcttggaataaaaggtttgatgaaataatcaagacctacagctttcaccaaaatgaagatggaccttgtgtttagcaattcaaggataatcaagttgtagtattcctggtcctttatgttgatgacatttttatcattggtaacaatgtcaagaaaatgactgacatcaaggaatggcttgacactcaa

SEQ ID NO: 369316 - DNA, 562 bp, Cannabis indica
agattccaaattcccgggtgctcctgaccaagtgccggtaatcctagtcacaattccaggatacacaagtataaggttaatccctaaattcttttctacaaattataaactaggcatttaaatgctagatattcacatagagctcggaaagcgcttttcaacgatataaataacgttccaaatagagtcccgagtaaaaggttatgatcaaaataaaaacccgaaaaaacacactataatgccataaaatggtcgcggctacttggtttaaagaccgaggaaatccagtttccagccgcaaaaatgcatccaaaaacaacaattttcatgctatatcaacccacaatcataccaaactttcacgtagcataaaccaagtaattagagaggaattacacctaattcactctccaataacacgaaaaatcagcaactaaaaatcaacattcaacaatgaatttcaacccctaaactcatccatttctgcttaattcacaacaaaaacttaattccatcaaatagattttccaataattaaatcaagagcttaaaacacaattca

SEQ ID NO: 369317 - DNA, 781 bp, Cannabis indica
gtcgatagtattgtcgtatgaacgttctagactcagtactgtgtgggacacggggattagggttatgatcgggtgtatgggcgccagtttataacccgggatatttgtatgttttacgttatgcttttcttacttagtatatcgactcacagtgctattttcatgtgtaggtaagggcaaggctaaagctgaggagccgtgagaacgagcagaagaagattgtactcgtcgggatggttaggcctggagcgtacgatctttgcgacattaaggcttttactgattagtcgctaggcgacaaaacttttgtttatgtgtatagcaaacttttataaatgtattttgtaatgggatcctggaattttatatatgtattaccttaagtttgttaattaaataagaaagttttaattaatcacatttttcattaatctcgttgattagcaacgagctgcacagtttgtttaaaatcacgttaacatgcctaattagttagggtgttacagaagtgatggaagatttgttgttgtgagcaggaaataaaaagtcctgttgttgagtgtttagagacccttttagtggaaaaatatgctcataaaagataacatctcgagagtgaaaatttttgttagtggctaagtcgagaagtgtgcaagctttcatgccattagtgtaaccaatgaatatgcaggcatgggctcgaggagataatttgtgtctagtgctgactagagatgaagcatatgttggaatatattttaccaagatctaggtttactaa

SEQ ID NO: 369318 - DNA, 556 bp, Cannabis indica
tagtatgtgaatggtttgaaaagctactcgttgaaatttagtgtgatttaatgtttcacatatttatttttgaagtattgttattggatatcagtggtgctataggttgcactcacaattagttagcgatattttctaatttttttttttcaaaatcatattattattattatttatttatttatttttgagatataatatcattggaaatgtataaaaaaaacattatatcttatttatttatttttgaaaaaaaaatagtgatattaatattaatggcaataaaattatattatcttcatttctataatcttttaaggtatcttcattggataaataaactctataagaagtaagaagtagcataatccttattttaataaaatcataaaatatggagatttaaaaaaaatagagatgtcaatagtaatggcaaaaatctatataatatcttcatttgttttagaagatcttaattaaataaattttaaaaaaaaataataataataaggaataattacataaaaaatataaattgacattttatttacaaaaa

SEQ ID NO: 369319 - DNA, 760 bp, Cannabis indica
atgtttatatgattgtttagggttgagagagtttagaaacggtggtgagaggcagagacggagagggaggctcgtcgaacgaaaccgagccgtgagaaaagtgagattttgagttgagagtttttgggttgccttagattatttcattgagttttatttcatccaagaggagttttagatgcgattagaaggtctgtaatcgcaccattcgacagacaccattattacgttcaaaataccgttcttgaaacggatccgaatttgaacgtgtttaaattgtttcggagatcaaaggaggttgtgtttaagtttatgggaccccaaagatcagttttaacgtgaagaatcgaagctttaaggtctgaaacggaattcaccatttttggactccattcttaacggttaaccgccaacgaagaagataaccggattttggccattttggctctttttcttggctgttcttggttgttttgggatcctggattcattgtaaggttcttccaatcaaaaatacacgtcgaaagcacccgaagaagagttttgcattcgccgacaccgaaaccgacgagaactccggcgacactccgttcaggggtttctggaggttatttttcgattttctttcagttcttgacttgtgctaggtgttcttaggcctactatgaagtttgataattttcttgcaattatttgatttattatgaattatttggtttatttgttaaattaaatatgaaaaatacttagattactcaga

SEQ ID NO: 369320 - DNA, 613 bp, Cannabis indica
gcttgcctccaccattctcgttgtttgagaactgatagagatcgtctgcgctggtcggcatgctggacagtgtttagggcactatgaagccctgtgttcgttcgtcattgtcctgccctcttgtctgggcttgccagacagcttcttccgactttatgaaggcatccgcttgctcaaggaactcctccatgttgttcattgagatcttcctgatatctttccagaagtcactcaatgataggatgtttccaattatggccgtatatcggccttattctgttaggcatgtgaccttgatggcctcagtcatgaatcgttgaatgtagtccttaaagggttcatcttttccttgctttatttcgacaagatcctcaagtcaggcaagtatttatcttgaagcaaagaactaaatgtagaattctcgagagagctcttcccaagaattaaatcttcttggggctagcttgaaatacattgttgggttatttcagctagagttgccagaaagattcggcatcgcacatctctatatacttgtaggaaatctaattggatcgcaaagtacttcaggtgtactaaagggtcttctcttcctgtgtacatcttccaagcc

SEQ ID NO: 369321 - DNA, 537 bp, Cannabis indica
cgggaagaagagaaaactcagcatcccgtgtactacgtcagcaaacgcatgataggggcggagacgcaataccccgtcattgaaaaattggtttttttgcctcctaatggcctcgaggaagttgagaccctatttccaagctcacccaataaaggtgttgaccaaccacccactccggtaggtcctgcaaaagctagaggcgtccaggaggctcctcaaatgggcaatggagttaagtcaatttaatttgcactacattccccgtatttccattaagggacaagcgctagtagacttcatcaccgagtgtaatgaagccgaagcaaccgcaaacataccgacaccatcggtcccagcgtggaaagtgtttgtggacggagcctccaacgagaatggattcggagcgggggttgcgatgatatctccaagcggacttcgactccatgtaaccctacggttcgacttttcagcttcaaataatgaggccgaatatgaagccttgatagcggggctgagattagcaaagaccgtaggggc

SEQ ID NO: 369322 - DNA, 908 bp, Cannabis indica
gaagaatttaataattcgagataaatttctcttgaaatatatttataaactatttattgatgttgtttttctttattgtttcaacgtcctttctagtttctagtttctactttctaatatatggtcgactaagtttaaaagattagttaaatttaaaaaaaaaaagattgttaatttaaaaaaaaaacattgtttaaatttttgggtttaaaaaaatatcatattgaaaaaatatttttttactttatatataaataatattttattattttattaaataaaaattaaaagtcactcatgaatttctcataaaccaagaatatcagttatatagacacactttatatagagaatagatatataaaggagaagtataaggcggtgatgtgacactctaaaaactctctcatgagtattatatgttctctccttaattctctcttttctttaattttttattaatttcataatattaattaatataaaatatattaattcaatcatttttttatttttttattttatatgtttaaaaaatgataagtcaaaaaaaataatatattatttattagctttttaaactcaagttttggtctttttttttttaaaattattttttaaaaaagtttattaattcttttatatttgtatcaaactaagatacatttagttttttcttatttatatttgtatcaaactaagatacattagttttttcttacaagtttgcaaaattaaagaaaaacttaagagtttggttacgatttaaattttactaatgagatatacttttctttttttaaaaaaattaaaaatacttaatagttttttatgggtttatctacaatcatagattttatattattatgatattgtataatacttatatgaatttaagaattaatcaa

SEQ ID NO: 369323 - DNA, 385 bp, Cannabis indica
tgtgtgtgtattttttttatttgattgtctcatgaaactggtttcagttaactttataattaacatttatatttggtaaggattttttatagcgtcaaaactggtttcacaagtcgaaactggtttcacattttttaactattctgtaatatggttgctccatttttatgatattgttgtatattttatagtttgtataaaaccaattttattattgtatgatatttgaacaataattttatttattttaaataatcagtttctgacacacatattattttattattttttatttcaagaaactggtttttatttgtttgtttttattttggttgttttactaactggtttctcacattccactgttttttttttttgtttattc

SEQ ID NO: 369324 - DNA, 521 bp, Cannabis indica
tccgccccgcctaatttttttttggatcggagctgactcgacccgatttcaatttatttttaagaaaacttaattcaagactcagatcccttgggacctggactcggaccccgacctagacctcgaccgggacctaggacccagacccaaactcagacccggaccaagacccggaccgggacccaggacccggggacccaaacccagaccctaaccctaaccctaaccctaacccgtaccctgatgcgagacccggacccggatctcggacctggacccgaacccggacccgaacccggatccgaactcgaacccggacccacgtggacccaaaccctgacccgaactcgggacccaatacccgggacccggacccggacccaaacccagacctgggttccaaaaccgaacacagacccagacctgggactcggacccgaaccccggagccggacccggacccggaccccggacccggacccacaccccggacccaaggcctgaacccgaaactcggctcg

SEQ ID NO: 369325 - DNA, 913 bp, Cannabis indica
acatgaccctctaggtctgttcaattgctcccctgcatctctctcggtctgttcaatccctatttctctccggtgaggtttcgtggtctgcttgggtcgcacaactggctaggggtgaaaatcggtcggttatggtcggtttttaaaattttataaccgaccggtcggttacggtttttattttacgaaaaccgtaaccgacagtttagaaattataaccgtataaaaccgaccgtacggtttttggcggttttcggtttggcagttttgacggttttttggttaaactatttttttatttcaagaaccgaaaaccgaccaccatgtcaaaaaaaccgaaaccgaaaccaaccgccaaattcggtgatgacgtggaaccgaaaattcggttacggtctggtcggtttgatggtcggtttcagtttttcggtttttatgaacacccctacaaccggcattactggcgattgacggacagaggcaaacctccaagtcttatctctgatctggcatcataaaactcccattttagccttcgtcaaatctgatttggcatcatagaaccccatcttaaccttcgtcaactccgatctgctgctaagccaccttctaaaacttcaggtgacgaaaagaggtattgggttttgattttactttttcagatctattttttattatattattttagagaaatattagtggtggtggtaatggtaattaggggtggacatcatacaatccaatccaattaaactgaaccgatccaatccaattcatttacaaaaagttggatatctaattataattggattggattggatgctaaaagttggattctaattgaattggatcagttattgaatgttaatctcaaaatccaattaaaaactgatctaatccaattacatttata

SEQ ID NO: 369326 - DNA, 652 bp, Cannabis indica
atataaattagtagttactaacttcacttgttgttgttttatgcacatcatcacttatcatagtattagtaagagtgggtttaattcaagagagacaaggtcatgcaaaatatgactccttccagtggaatcatcatcatcatcaaattaaatgttaaatatttttaatcaaaccaattacaattaattaatttttaattttaattaatttaatatattatatttatttgttaatcgttagaattatttattagaccaaatttaagatatatatatattagatattaaattttacaattcgatcccattcaattaattccgatcaatctaacaaatgttagatgtattaaattggttgaaccatttctatccactaaaaatatttcatgtatatctattacattgctcccatttatttaatactttagattagtgtattttttttgaatcatccatctaatgttttagatttaatccatctaataaaaaaagataaaattttaattttaattttttatatattttaaataaaacaacataaaatctaattaatcatttaatgtattagatttttagacgctctattaatcatccaatctgatctaattggatatttaaaaataacatctaatccaattctgtcacaattaaa

SEQ ID NO: 369327 - DNA, 854 bp, Cannabis indica
gatggtaccgttgaggaagaaaattattattacttttgtcttattctacttattaaactttcaatgtaactgattttgtatttaagctgaaatggatggtttgatgacttaaattagctaagtgccaattagaaatgaagaatgatggatgctagatattatttagtattttatttaacttattaaatctatctattcggtgactacataactttgggaatattattgttcttttatattaatgagtggtcctgattatattactagtatattcttatcgatataggagttaatctattatttttaaataagtattttgtgatataaattaaaggatcatttataagtgttatcttcctacaagggtaaaagtgtgaccattgaccacccaagttatggatattacatatctgccacaacctaggtctcgagtcgtgacagaaaaatggtatcagagcactgggtttaattatctcggagtgtgccaccaaatagtttagatttattttaaataataatgttaatatgtatcttgatatttatatgtataagacatatttatattattagcatccaattctcactaaccagatagcctttggttctcagacctaagaaaatgcctccaaaaggaagacaaggagaacggttggagaagatgcccctccagttaatgtccaacctccactagctgaattctctatgaacgctcttctcgaagccttaagagaagttcttgctcaccagatggatcttaccactcgacagagttatcattttcagatctttcatcggatccaagtgcttgagtttgatggtgaacaagatcccatggtagctgaaaggtggttgag

SEQ ID NO: 369328 - DNA, 564 bp, Cannabis indica
agaaaacttagtttaagaataacatggccgtagagtagtagtactgtatctattattttttttttttaaaaaaaaaaaaagaaaactatctatactaaaatctttggtccaacgtgtttgtcacctaacacctcaaattaattttaatacaataaaaaacatgaacatgtgatagtgagatgtagggccagcgcgtggatgcactgcaatatcaaacgcgtggagagaactacatcgctggatgtcaagatcacgctttacgagtcacgatacggaatgaacggatccgaaaattgagttattaagtttatttatcgtctcgttatatcgtacctttggttcagatgacgtggtatgttgctattggctatctcgtcatcctgacgattccccaccgaatatataaaaatatttggtattatcctagttgggcttcgctagatgggtcacctttgttgggcccacttataatattgacccctacttaattacaattttgatttttatttatttatttttaagtgaaaattacatgaaatatgggatttcataacaaagttagaa

SEQ ID NO: 369329 - DNA, 518 bp, Cannabis indica
gtttgtaatataaatattaaagttcaataaatattcatctcaacccaatgaacccaacccaatccaccccctatattattgtactaagtagggttgggttgtacaataaaataaaattagtgaaaattacatcaaatatgagattttatagaaaaaaaaaaagttacaaaagtatagtattaataaatttgccattctttatggtatttttttttcacatttaagattttttatggtatttatatcatatttttgtaaacctaatatccaaactcatattttatgtttttgtttttagcttaattaattttatttttttttctttagtttattttacatttacattttaaggtttctttctatttgggaaatttacaccaaatactaactttttttcaaacattacatttataatttaacaaaaaaaaatttacatttgtacttttttttaatttttttactggtttttacttattaaagcttcaaaaaaagcatttttttttgtcttttttttatat

SEQ ID NO: 369330 - DNA, 503 bp, Cannabis indica
tttacaagtgacaattgatttaaactttaggctttttttaaagcatgaacatcgccattgtgacattaactatgtatgcttaacgatccttttgatgtgcggacatcctcttaatgatgacccttttgaattttatgacgctttgatgtatgaacgttacttttgcggtggtgtgacttattatcttaatttggtattaatattcttcatttttcattttgctgatgttttatgttattcggttgatgtaaattttgcattgatcatgtactatatcccctagtctaagtcttagtgaggatcactaaaacttagactttggaacagcttgactgagtacatcgaacttggctgaccgtaacactgttgctatgcaattctgaagacttgcataggtgggttacgattgaacgcaattctgaagacttgagtttatagatgaataggtgggttggtcgcagcccttatcgcttaatttgtgagtgaatacttgggttgagtgt

SEQ ID NO: 369331 - DNA, 590 bp, Cannabis indica
acatatatcaaatccgatccgaagaatttcagtggcatttggcgtgaatacttacgtgttcgtacaacgattgatattgctaagcctctaaagagaagaatgaagctttgtaaggagaatggagaatggatttgggcaaactttaaatatgaacatctccctactttttgctttgtgtgtggaatcattggccactcggagcgttcatgtccgaaaagattcgaacaaactgtggagcaaatggtcaagccgtatggggcagcgatgcgtgcggatatgaggaggaaaaactatcgggtgggctctcaatggcttcggactgagtttgatggtggcgtggtggctggaggccgtgccgatcgacgggatggtgagaatcttgaggttaatgcttctcctaagatcatggatgttgattgtgttgaccatagtggtgatcatgatcccatgatcttagggagacaaaagaagaaagaaatatgtatggaaagtgggcaaaagaagaaagtaataagtatggaaagtttggcttctgatgaggagagtaatgatgatgaagatttggtagttttgttggagagtaagaggcg

SEQ ID NO: 369332 - DNA, 1076 bp, Cannabis indica
tgcacgggacgtggcccaaacctccaagagacgttatggtgcaccttggccacaagtctgaacacgagatgacatggttagtcattcgtgggctagtttgcatatgcgcatgggacagatacaccatgttggaaagagacagaggtctaatgtacgcaattagtttggtggcttgtcttgagggcctaccaacatgtgtggaggcgtgctgccttaaggattggtccatggacgtatgggagttcttgggcaacgagggagactgttcggacagtctcgaatggggcatgatagaagcgttggcacgttaacttggtgttggcatcttgccacacatgctaccttggtcacgagtgacaaggtgagtgtcagtgttttgatttgccttatgatagtgagaagctatggtcagtgcgagtatcttggctatagagcctcgatgcaattatgcactcatggatgtttgcaagcataactcgacgggagttgttcgagagacagtggtgtgcacgaggcacacagtcacgcgaaaaatgtgcccattaatactcggatggttggaaggctgactttggcttagataagtcaaggtgtcatacaggtgtttcgctgcctgaagaaggtgagcccgtgatggtttgtattagagccaagttcatcttagtgggaggttaacctggttggcctatcctagaggggatgtaggtgtgtggaaggatgccagaaagacaactaccacatgcaattttagagaggcgcaatagaatgtttgaaactcgttggcataatagaaggttgattgggtagtccatactgtatgcttagtacactaggctgagtttgcctgagtgacatcgtaagtcgcaggaggcacttttgttgaaaaaagaaagcttgttggcaagggtgtggaagtattacaagggctgtcagatctttgttagtcacgacagtggtcgagagttgatgaccgagattgttcaaagtggggcaaacatggaatgctttagttgctatatggtgtgtcaagagggacgcacatggagaccaaggggggagaggccgcaattgtcaga

SEQ ID NO: 369333 - DNA, 1277 bp, Cannabis indica
agtaataacaaaaaattagagaaaatctactcaggtagtcggccaatttattttattttaatatgaaagattccttgaaaagattacaaatctgccaaaatttaaacaaaccaaccgaattaggatagtccggtaaccatgtttacagccaattaagccttaaaaagagctaaagttaatcttttcatttttgccagccttttataattagttactactagtatgttatttttgtcaggttcattaatacaaatagttgtaaattagaacataaatgtagcagctaattttgggtctatttaaaccatagattaaaattaacttcccatatatatgcttaattaaagaaatatttgccaaataattatgccataaaattagttttcatagtgtattatttttttccttattgttatccatatagggaaataacctatttagaaaaataagccaattaattataatttttaagttgctttcaaaaaaaattataatttttaagttgaccacaaaatacaatatttttttagaagtagggaaggggtaaataccaaaagacaaaatatgatgcgtagttgacccgtttgtgaccgtaggatcgtaatcgtgaaaatgaagaatctaaaggtgaagagggaagtgggacccacgaaaggacgtactaattgcacgactccacaaatatcagactgtagacacacctggccctttgggtcccacattgtgagcggaaagacaaatctatccttttcttttgaaataactaccacagttattaggccccacagtttatgattgttggatatcattgtcaaatgtaaaattagagcattctggtaaggttgaaattcagtgccccagttccacacgaagagcatctgcaccttcaatttttaaaatataatcctattcctatatttgtatttgtttgcagatccatgttattttgatttgttccctcgaattttgaatgcatttgtcatcatcatatttattgagaaaaatccaattacgaagcaaaacttttttttttttcttgttgtttgtaaaacaaaagtaaaagttcacctcctttaaaagtcttatatttacaaaatattattactattgagtaacattactatttactagtatttaatttcaaataaataaataaataacattaatagtaatgctctaaataaatatagtatacttgccataaaaaaaaatggtaatcgtgtcatgtcatgtcataaagaataatgacatgtgtcgctcaaatttgtaatgtaatc

SEQ ID NO: 369334 - DNA, 540 bp, Cannabis indica
ctttgtatatttttgattgctttatatgaatagttagaccatatattcatatattaggtttaagtattttttcaaggcatcttggtgtctcgtttaatactttcctatacaatgcgagccgttagtattcaacttcacatatagcctatgagttatatctcatttgaaacttttgatttttctttctcgtcaaaaaggttctttaatcaaaattcattcacaatttttgattttcctttctcatcagaaaggttcaatcaaaaagaactttaaaaaattttgaaaaattttaacatggtggatttgagatatatcatgtatttccagatgaatctggttaatcatacacatatgctcctcaagtaattttaaagaataacactttataatttacttgaaaaaatgattaactttattaataactaaagttcaaaatattacatcagaaatatgagttacaacatcactttactggtaatagggtcacaaatgttccacgttccagtagttctttatcagcgagccattcagccgagccaa

SEQ ID NO: 369335 - DNA, 432 bp, Cannabis indica
ttgtatcacttccaaataacatacatagaaaaaaaactagcataaatttagtatacgtgccccgcacgtagtttttggctagtaccaattaatgtatgtatagagtgtgatataaaaatttgagtatttataagtaaatattcaaattctaataatattaataatttttttatataattatctataaaatattattcaaaagttgcataaatataattaaaactttaaaatatacatgcaatttagtaattgtaaaaaaaataaaaaaaaatcaggaatttaagcccgaatatgaaaatgagctggactatttaaaaaatatgggtcgacacgaacaaagcatgacacgaatccgaacacgacacaaaaatattgaacataccctttaaaaatgttaggatgacaagatacgtgttgagttttatgccctaa

SEQ ID NO: 369336 - DNA, 628 bp, Cannabis indica
tgttcctcttcagtttgcattgaatgccatagctcccatgatgacatcttcttaaatcttaatgtttactaataatgaaaatggctttctcgcaggacagttcccataaaactcagtcacccaccgtcaacaccgaattgcatctagagatggaaagatcttttagcaaaggaagttgcccaaagggtggcaaatagaagcaatgctcacaatcatcaagactcactttagcaatgtttctaaacgatcattcccaacccaatttggaaatattttgcctagaagtaaataatctcgagctccttcaatgtcgtgttaggtgaaagcatttcaagcacatcctcaccatgttttgggttaacaacaacatcattatcactccattccaacctcaatttctcaagttgtttcttctttagtacaaaagcttgtcccgatgcttttgtaatattgaccacattttctaacttcttaatggaaagctctccctgtagatcttgaagttctgccaactcttctattttagcgccaccatccttccccacaacaaaagttgtcaaaatttggagattcgtcaatttacttatttgacttggcatctcaactagactgtatccactgataataa

SEQ ID NO: 369337 - DNA, 592 bp, Cannabis indica
tagattcaccatttctggtgttagggttactcttgtcacgtgtttgttgttatttttacaaaggaccatacgcttttcgtgtactggcctttctagggcatagaaaagactttgtttttctcgattttctgccctttctttttcttttacgcgcagtgttgtcttctgcgagtttattgcacccaacttttttccaggaaatccttctagggttttctgtttgacagatgtctgaagggggcctctttccagcggttaggggacccccattccctttttcttggtttagggtttggtatggggcctaactgctggaatcttaactcttttttcagaatcaaaacatgtctttgtctggttcaaagtcatcgaagaagagcggtaagcgtgtggctaccctcgaagatgtctcactgggtcctgttgcccaggaggggtataactcacgggctaccgaatgggaggcggctgagcttcattccaccctaacctgcccccaccagctggagaacatcatagaggtggccggaatcaaatcctcaacatccgggacgtatcatcggccaccccgagatgcggagatgcccaacca

SEQ ID NO: 369338 - DNA, 564 bp, Cannabis indica
tggtggtcggttgtaattggatcggtcggttctcattggattggatcgatttatgcacacccctaaatgcaggactcatatatagaaaactctattatggtaagtttgtttataataacaaggggagattattcattgttttcaatttgtataatagttttcttacaaaaaatgtattatattaaatattagttgatgtgcctgtattatgaacttcctgttgtatttcattttctttatagatttctaataattgactgtccataaccgaaatttcaaaacttcagaaataaaccaatttgaacaattgatcagaatgagacatttggtcaatatatattttggtgaacattacaataataagccaaagcacagtaataagaatttgaagatacaaaattgcaataccaattttttagatacaatattattaatacgattaagatatcatatttgataggtttgctacaaaattatttaatttttattctttaatcagattgcactataaccaattgtctaatcgattagaaaataatattttgtatcttatttgtgtcactt

SEQ ID NO: 369339 - DNA, 621 bp, Cannabis indica
aaccctatgttctgataaatctaggaatatatatttaatcacacaatcttgattactttccacattgctgacgacacaataaataataatatcaatgtgataagggtttggatgaatttataaatcaaataaacatataaatgataacatgaaccaaatgacagactaaataagtgatgaaaatacttatgtctctttattgataattaaatgataaagattacaatgaaatggacttatatttagggcacaaagctcaacaaactctcacttgcactaatgtgaaacaatcaatacatttcaattaatcataaatttagttggtgcttttcaaatgcagttcctgccaaaactttggtgaatggatcaactaggttgtcctcagtgtccactttctccaccagtacatcccctcaagccacatactctctaatgatgtgatatttcctttctatgtgtttgcttctcttctggcttcgaagctctttactattggctatgttccagtgttatcacaaagcaaaaccaatggtttttccattccaggaacaacaccgagtcctgtgaagaactttctaagccaaacaagttctttagaagcctccgcggcagctatgtatt

SEQ ID NO: 369340 - DNA, 552 bp, Cannabis indica
tttctgacacccaaagcgctttcattcctagacgtctcatttcagataatgttatggtggcatttgaagtgatgcattatcttaagaggaagactaaaggcaaaaaaggttttatagctctcaagctagatatgagcaaggcctatgaccgtgtggagtgggattatcttaggctcgttatggcttgtatgggttttgttgagaggtggattaatctaattatgtcatgtgtctcttcggtcagttatactgttattcatggaagtcatactatgggttcaatcattccttcgagaggtattcgacagggtgaccctctttcgacatatcttttcataatcagtgttgaaggtctttcttcacttatcaagaagtttgaatctcaacgacttttacaaggatgcaaggtggctcgtggggcaccacttatcactcatatgttctttgcagacgatagctatttgttttgtcaatcaactaccagtgcttccggcagggtctcaaacttgctcaatcaatttgaaactggatctggacaaaaggtgaactttt

SEQ ID NO: 369341 - DNA, 768 bp, Cannabis indica
aaaaaaagaactaaatagaataatctactactccaataataaatttatttacaatttcataattacactaatattatttttaatacattattaaataatatttcatatataaatatttaatttttttaaacaaaaaatttgtaatctttaaaaataaaatacattcaaaatcttaaaaagactaaaatcttaaatgaaactagcaatacgtggctcgacacgtacattcacctagtatatatatatatgaatccaatccattactcatatataatcagaaaaaaaaaacaattgtaatgatcagacaatgttatggcaatatacataatatatatatgcccaatttaattgaatcgaaacatgtatgtgattgtatcccaaaatattgtgccagtattatataaagaaattcaaaattttaatttttaaaattctcagatttcataaacataattatgagatcttcaataaatttagcaaaagatggttctggtaccacttgttaaaatttataaaacactcaaaaaatataaatatgacacatctatatatattctaaaagtgctttaatatagaaaatcctaaatcataaatttatagaacctttgctaaattaaagaagaagaagatgataaaagatgagcggaagcactaacctgaagtcattgttggagattaaaagaaggttttgatcttcctggaatatactattttctaaagcattttcaggagagaatacagaaaccctagtgtttcttggggaccact

SEQ ID NO: 369342 - DNA, 733 bp, Cannabis indica
ctttattgatattgaataatagagattacattgaaatggagttttatttaggacataaaacccaacacttacgacatgcatcattaattgttgttatatgcttcaaagtctttagtcccatgatggctttacactggcgtgataatcaacgataaactttatttacataatgatatgtggaatatctatcctgagttttagcaaagtatactagtatcatatgtattggatatacatcaaactaggccgatattgactgtggagaagatatcataaacgtactgttgtatctcttctatatgtgtttttttttaattaattttaaaataatctaataaaaaattaattatgttgctaatcaattttaattagattaaactaatataattagcataatacaattatttaaatatggtaaatgggccttcacagttagggtggttcatgtgagggagggctgtgttcagtatgttgtacccactactatggttccctaactctcacacaaggcccaaaagagaagaatttaacctttcattaaataattgtcattaattgaataagtccaatactaattgagcttaaataaaactaccaaggagatattttattttagtaacctagtccatttagatataaaaattaaatgggcttcctatatgcatctaagcctaatagcaaacatataggctcacataaagatagatgatttggatgggccctatcatgttac

SEQ ID NO: 369343 - DNA, 503 bp, Cannabis indica
gtgaaaatatttttgaaaaacatgttctataaaactgttttcactttttaattttttaattgaaaaattaaaattttgaaaaaacaaatcacttttattatttttttaaatagtttttttaatcaatgttttggactccgagcagattttgaccaaactcaaacctggtcctagccttggtgccgaacctagcaccctacccgaacccagacccgacttaaacaaaataaaaataaactttacagaatacaattttattttctgtttttaaaattgaaaaataaaagttgttatagaacgcatttttatttttcaataacaaaatttttaaaaataaaaattctactttcatttttgtgattaaaaaattagaaaacaaaagtgttaccaaatagcaccttaataatccaatattaagttaaaaaaataatttaattaattttttataaaagaaatcaaaaatattttaaaattttaattttttatgatatataaaaactata

SEQ ID NO: 369344 - DNA, 481 bp, Cannabis indica
ttttttttttgtttttcattttttttttttttttttgtatgaatcagtgaaattgtattgctctaaaccaatttgtacaaactaaaggcacctcaattgaggcccaataataatggctaattacaacaatttttacaaactttggaaccatattctatcttctttcttagttttcttaggcatgaacatagtaactcttagtttgatacattgctttatttcctcaaccaatctattaactgtacactcttcctttctccaaatcactaagttccttgctgtccagattttgtagaccaacgcagcacatgctgcagccagcacaagtttcctaaacttgctggtttttgacctgcttatccaccggattaactgtggaagactgctgctaatagcagaccagccgagccactttttgacctcctgcagacagttatgagacacagggcagcagaaaaataaatgctcatttgtctccata

SEQ ID NO: 369345 - DNA, 823 bp, Cannabis indica
aaaataatttccaacagaggatgggcgaagctctagcgcctccccttcgtccaagaagcttaacggcagagaggggtcctcggagaagagaccttctggagaggttattgacctttctgaagagctgactgctgcaaatccttctattcccaaatctgccaagtctaaggagtctgaaccaccaacgactgtgtgaactggtcaggagggtccctgagcgggtgcaagcaccaactccacctttgcccgtgctgccagaggccaaaaagggcaaggagatgctggcccactacatgaaccggctagttcctgaggtcagtgagcaactggctggtgctgatagcgactcatctctggatgtgtttgtgggcagagtcttgaaggagctcaccggggttagtcttttttgatacttcccttttaacttttcacacttagctccatatgctgactttttcctttgcgcaggccggtttgaagttggcttacacttactcccgggctaaatctgctacttccaagagtgcggctctgtccgacaccttgagggtggaagcggacttggccaagaaggaagctgaggaggccagggcagaaactagagttgttcggcatgagctgggtgaagccaacagaagcagtttgctgccgagaagaagatctctgggctaacaaaggacctcgaggagaccatcgagatcttatctgctgaagttaacagtcttcaggatgagaggagttctctgtggcaagttcttcttcggctaaaggaggagagggacgccaaggtgaccgaggtgaaccaattgaaggagaaggtcaa

SEQ ID NO: 369346 - DNA, 601 bp, Cannabis indica
aacatttgttaaacatacaaaaaataatataacaacccaaaaacaacattagaaaaatcatgacaacctcaatattaatagttttaatgtttctgttttatctaggcagaattaatggttattttttggttgttctgatattactgtggcggttctgtttatgagtgtggaagatggaagcctcattttttcggtgtttacagtataaaataaaaaaaaccaagacagttaaaatatagttttttttttttatcgtgtgacagtataaatatgaatccttaaccaaaatttaatctataactactataaaagtgagaatatttttaggctttctctatataaattacataattaaccttcattaaatattaaattacaattttttttttatgaacaacaaacccattaatatttttttatgctttcaaaaataaaatattatattataatcatctaactcaattacatctaattaggaaatggtttatttattattttaattaaaaaaaaatagaagtttgcttatacatgtataattagtgtatataagatgttaattttttttttaaaaaaagaaaactatatatttatatcatacata

SEQ ID NO: 369347 - DNA, 662 bp, Cannabis indica
attacttttattatattaaaacaatctccataaaatattgagaatatgtttaacacaattttctatattattagtattaatgataattatttttatgaggttgataaagttatgttccttattgagttataataaattttaaattgttaatacaaatgtgttataatttaaagataattaacgtaacaaaaaaataaatttaaaattttaaaaacatattaataggtaaatatttttttcgtgatgcattatctttattatatcattcaaaataattgtcatcattctatttcattaattgttaaacattgttatttttttttccaatgattattaatattttttattgttaataagtttattaatagtatcataatataaattgtgatagtattttagtgtaaaaattgtaaaactatttaatattattatattattctttttttatggatatgagacgaacaattttaaatagatattttaatgattttttgaaaggaaaaatatatttattatattgtaaatagatattttgattttttcaaatttttaatttttagaaaaatttggtacaaataattaataaattaaggtatataggttctgttgcccctgattttgcccaatatacgtggaccaaccagacagggacacgtggacac

SEQ ID NO: 369348 - DNA, 586 bp, Cannabis indica
cctgtgaaactaaattcgacactgaaaaattataacgatatataaatgctaaacaataaagttaactgaaataagtcatcgaaattggcatagtcgctggagttgctgccggtatcgaaaaagttaccagagttgttgtcagcgtcgaaaaagtcatcgaaattggcataatcgccggaaaaaatcacaaaagaattaccaataaactgcttggtgatttttttggtaatttttccggcgacaatgctaattctgacgaattttccagagtttgttgccggtaccgaaaaagtcatcagagtagttgccagtgtcggaaaagtagtcggagttgctgccaacaccagaaaagtcgtcagaaatatcaccgaaaaaaccaccaagaaactagttttttcatcaagaaactattttcttcatcaagtaactggttttttcatcaagaaattggtttcttcattaagaagccagtttcttggtaatttttccggcgactatgccaatttcaatgatttttccgaagtttgctgtcggtgccgaaaaagttgctggagtagctgccagtgtcagaaaagtcatcagaatt

SEQ ID NO: 369349 - DNA, 532 bp, Cannabis indica
aaattcattaaaatacaaataataaagtagcaagaataaaagtaacttaattattaattctaatttaatacataacaaaatattctaatttaagttggtccaaaattaattaacaaattaattttcaacttaaatctattttctaatttaattaaatttcatgaaatagaaacaaataattaagtatcttgaataaaatcaacttaattattaattctatttttaagttctaaaaaaaaatcctaatataagatgttctaaaattaattaaattaattaataaatcaattttcaatttaaatattatttttttactttattagagattaggaaatataaattagttactagaaatcactatctagaatctattctttaaactaagtgtgtttttctaaattaatttttaaataatcagatgaaaaattaatttcatttatttcaaaatttattacaattatttaaataagacaaatgggccttcataattgggattgttcatgtgagggagggttgggttcagtatgtcgta

SEQ ID NO: 369350 - DNA, 845 bp, Cannabis indica
taaacttattatccaatcccatattttatgtttttatttttagcttaattagttttattttattttttttaatttatttttacatttaacctaagtttgttttttaccacttataattcatatatatttttttagattttttttattccatatgtttttgttacatcttttggtagtttcacttgtattgcgaccattaatatatttaatttttttaaaattaaaatattttaaaattaaataaggaatgtgcatagaggataaatattattactatattaaaagtaaattgcttatttcttctttagaagatgtgtaggcgttcaattcattaaaattgtttattttttactcagattgctggtttttatttttattttttgtcgattctcccatttttgttgtagaggtaattatattgatatggatagtctttatatttaaagtggtttgtactttagtaacatgtatattaatgatgtacatatttaatgttttttccaaagtatggataagatttaaaaattgtaacttctattttattttcttgtagtaaaatatgtatataattttagttaaatttagtaaatgaaataaaaaatattttatattttatgagtattaaaataattaatttacctttttatcaataagagttaacttttgatatttgtgtatgcttgtatctattttatataaagtgtgcctagctatataacagaattcttggtttatgagaaattcatgggtgactttttatttatattaaaaataaaatggtttatgagaaattcatggatcactttttatttatatataataaataaatcccattaaatcaaaaa

SEQ ID NO: 369351 - DNA, 595 bp, Cannabis indica
tctataaggataagaagaaaaagcagttacgaagttattttgtattatcccacatgtatttaaatgaaacgtgagaattgtccacgtttcatgaacggttacatttcaaataaattcatgtaaataatttccaacctatattcctataaatagggacagattccacagaaaaagtgaacatagaatcttagagagaaaaatgagatatgatcaattgtaactggtattcagaaaatatcttaaataagatagactcgtagaatatgcagatttaactacaaaaccacgtaaaaatatgtggtgccatttatacatttattattgcttattatttctgtgatatatttattatgtaaaggctaactatttttggttaatgaaaatctgcgttaacaatttggtgctttcattgagagcctaagtaataaaactcagaaaaatccctccttacaaatagaaatttatccatggttgatcataatcaaaacgatggaaattatcatgaggaaactacacatcgccctgggaaagagccaatgggttctcaaagaccccatacttctggaacaacatgttcaagaagaaattatggtgg

SEQ ID NO: 369352 - DNA, 543 bp, Cannabis indica
tttattttaagagttgaaaaatctaaacacaatgaaaatgtattatttaaaattatttacttatcgtattttgttttacaaatgaaggatccttctctattgcattttgatttctaaaatccattgttgtatttaaaggatttttttatcttttcaaattatgcatttaaaatggtatttttgtaaagtaaggcaaaatatcagggtgttacagagatagtttactcactcgagatcatctttctaaaattttacatattgacagcaggctttgtccaatttgtggctgctgtgatgaatctttggagcacttaatcttctcctgtatgttttctcagcaggtgttgaagagtgttaatggttggttgggaactgcttggtcggaccgtctagaggactggcagctttggacaagcagctgggaaacgaaagggtaaatttagtcactacaatggttctttcagccactgtgtattttgtgtggcaaaatagaaacacgtgtattttcaatggtttttcttatagtgttcaaaagattgtaga

SEQ ID NO: 369353 - DNA, 615 bp, Cannabis indica
ctcttcctctatttcatcaatactccctgccaccaattcaggtttcaagaattccatagatataattttaaataaataaaataaatattgtacttgagtataagtagattttatttattaaattaattatttatactatatcttaccatcttaattacatgaaaaataataaatttgtcgagcagattcaactagaatgaaaaatacaaaatacaaatattacactgttgtctcgcaaaagaaaattaaaacccaaccattaagagtatccttattttatttttttttacaactttttacacgtgttatcttcacctatcaacaatttagaaattaaattttaatatctttttttatttaactcaaatttaaattgtatgctttattttttgaacattgatttttggtttaattttggattaatttaaaacaaactgcaattagattattaacattcatatattgtatctcagtatttacttttaattattaacaacattatttacattaattgaatatacatattaataatctcaaacaataattaataatattttttctttaattatttattgtattgtttttaaataaagcaagacacacctagcataaaac

SEQ ID NO: 369354 - DNA, 867 bp, Cannabis indica
attaataggagtcccagagtgattgatttaaaaactccctatgaaaaattgcatggcactacacctaaactgaatcacttgaaaatatttggctgcactgcatatgcacaccagaaacttgacaaattggaacctagggctattaaatgtttctttcttggatatcctaagggtgttaaaggatatagactatgtcatgttgaaaatggaaaacctaagattattatatctagggatgtagtctttaatgagcatgatttcatgcacttgacagcaaaggaaggcaaggattctgatattgcaggtactaacagggatgaccttgctgagttggagatcaacaatgacaagattggagtctccattgatttaccacacacaccagatgcaaggacatcttctgaggtggaaacacagggtgcagacacaactgaggttggtacagatacagctgaagtggaaaccagtcaagatgatcaaccagatttgaccaactatcaattggctagagataggtcaaggagagaaattagacctcctagtaggtatgctgaagctgatttgatagcctatgccctggctgtgatacaatctgagagtgaacctgaaccaactacctatgaagaagcaattgcatgcaaatcaaagaagaaatggcttgctgcaatgagagaggagatgcattccttgaagaagaaaagaacttggattctggtgccaagaccaaaagacaaggaagttgtctcctgcagatggttgttcaaagaaaaagagggaatgtcagagggtgaacaacctagatataaagagagattggtagctaagggattcacacaggttgagggagttgattacacagatatcttc

SEQ ID NO: 369355 - DNA, 761 bp, Cannabis indica
tatccataatccacatttaaagaatattatgtatatatatatttatagtaagtttagtaaatatgatttaaatattagtaaatatgttattaaaatgtatgagtttttataattaaatttttttgcacattttttgtaatatattaatttttgttgtacattaatgaaaaaaccccttaaagaattttaggggcgtaacttttgcccctactattgggatgttttttattttcggcatctaaaaaaattttatttagttattgtcatatgatgatgcaaattatatagttatagtaggtttttatattcgttttttaaaaaattctaaataatttacgataatatttgaataaaacaaatacgcgtgcaactaattatttaaattgtatttttagtatcttaaattatttaaaatttctcgaaaaaatagacaaaatacttactataactataatatataatatatttcatcatataaaatataattcataatttccctaaaaaatttccaatttattattccaataataaatgcataggagtcttacatattattaagtaattaatttgtttatatatattttaagtgtagattatgtcaaacaagtgtgttagaattagataagcatgtgatgtggaatgaatatcctcctcatcatatcatacatataaatataaatatattcatgcatattccactttgattcattcaacaaattttaacattaatcatcactatacacacatacttaactcaaaat

SEQ ID NO: 369356 - DNA, 401 bp, Cannabis indica
gtgtttgtctctacaaatgctaccttccttgaagatgactatattaaagacttcatgtcgaaaactaaagtagtgttagaagaaatgctttcagatataactctttctaatgttccatcatcttctacacaagtagacgataatcccactccctcagttgaaccgacacaagttgttacatctgagaagtctaccacaaatgtccttgttcagaaggtcacgactcctcatcgtagtgggagggtttctaataaaccatctcgttatggcttggatggtgaaatcaatagggtcgttggtgacggtattgatgacaatccattaacctataaacaggtaatggcaagtccccaatagaaacaatggtcaaccgacatggattcagaaatggattccatgaa

SEQ ID NO: 369357 - DNA, 515 bp, Cannabis indica
acccggtgtttccccttacggatcacgggactactgactgtcacagtcatatgcttgaaacattttcctctgctcacattcccatgttctcatcttctcttgtaccaataaatccaactacatatgatccaaatgaaccacaagcagatcccacatgttcaacttctcatgctaacagaactgttgagttgcagcataatctctctgaacaagttgttggcagtatgcagcctgttaatacaacatttgtaactactgatgggcaaacggagatattcaggttcttactgttaacatagcacttgcaccaacattttgtagattttattttgaagattgtcattctaatataactgtattttttggttcagtgttgtgatgtttttttcaatctcgctagctctggcgataactattattaaagggaaggtgttttttaaggtggtggggtattgttcaaatacattataactttattgtctatatttccgggggtagttttgtcctatgtggct

SEQ ID NO: 369358 - DNA, 494 bp, Cannabis indica
aaaacttaccgtaaatcgtcattttctattatttttcaatttttcttgtttgagcaattttgttttatcatattaaaggtattagaattggtttggggtcatttgggttaaaattggaattttttaggacgatttaggggacatttttctggtctgctgcaccgaccggaattccagttgtaccatccggaattccggatggcgcaggaacaagaaaatcagccccttttcgtcttttccctgtgatttttcccctttaaaaccctaccaccgaaatttttacttcccattcagattttctaacctaaaacagcagccactcctccttttctctcaaattcttactctcaaaccctaacactcatcctccaacaatcaaacaaaaaggtgtgttcttcatggcttcttcatccaatccctcctcaagagcaaacaagagaatggctagtgcaattcaacaaagggagataagggcaaaagcaaggcaagagccc

SEQ ID NO: 369359 - DNA, 513 bp, Cannabis indica
attaaacatacagaatcaaaatcacattaaaattctaaaacaaatacagatacaaaaatatactccaacaattttttttttcaaaaaatactaaaaaataaaaatatatcttaatcatatgaaaaatgcacatatataagagtcctatgtaatatacaaacacattttttttaaaaaaataaaaaattaaaaaccctaaagtatactgtatcaaaataacaaccgctcaaataaaattttcaaaaataaaaaaataaagaaaaaactacatctgacaaccaaaatttgaaattaattgccacaatattgttattcaattaattggcacatattccgtttcttactttaattttattgtaataggtatacctataaaaaatgcatatgttttctttaatattacactgactcacattctttaccttttttttctttttttttggtacactaattttctccttctcaatgcatgtgtattgaccatttttttttcttctctctctctcaatatat

SEQ ID NO: 369360 - DNA, 531 bp, Cannabis indica
taatgaagggagtgatagaaaatatatttaattaacgaaagaatgaaaagcaagaaatacaattaggaacaacaaagaagcatctactttctgataacctactatgagcttaccatggagttaagcatacttaacttggggtaatctcaagaagggaaatcttccgaggagtcatcttgaaaagcgtacgagtaaggacaaagtacgctagaaagatttatattaggatgtagaattagcaattgttccaaaaattatcaagaggaagggatgtgttaataagtagatatttataaggcattgagatgagtatataatagtgggtggaaataagaaatgctataattaaatatctatccgaaacaaatatttagcttattaataagctaaattaataaatcaacttaggagatctcataggaggaacaaaaacacaaaattatgaattatgtactgtgggatcttatgattttgatcgaatagtaacagttggacataccagttaatatgttgtctatcagtgtagatgaa

SEQ ID NO: 369361 - DNA, 863 bp, Cannabis indica
cagacaagtgtgttccattcttctacatcctgcgaggaaataagcaatttgagtggatagaggaatgtgaaaattgtttttaggagctaataatgcaactcattacgcctcctgtactctcgaaacctctggacagagaagaacttgggatatacttagctatcacggagcatgttgtgagtgtcgtactgattagagaggaaaacaacatacaataccttgtctattacattagtaaaagactcgttgaggccgaaagccggtacccattgatagagaaactcacctactgcctgattctagcaacaagaaagttaaggccctattttcaagctcatcctgttcgggtgtacactgaccaaccattgagccaaatatttcaaaacgcttctggacgattactcaagttggcagtggagttgggtcagtatgaaattactttccaaccataaacaacaatcaaaggccaagcccgagcagactttgtggttgaatgaataggcaaagaagaaagcatatcggaaggcaaccccaatccagtataaatacctcagccaagtaacagtaaagacaagtcgacttggaaactacatgtggacgggtcggcgtacagatcagctaccggtgcaggaatcgcccttgtcatacctagggggcaacacctacacactgctatcaagtttggattcaaggcatctaataacgaagccgaatatgaagctttgatcgctagccgaaaactagcccgagaaatgaaagccaaacacatcgaaatctgcagtgattcacagctagtggtaaatcacgtatctggagaatacgcggcttggggaggaaagatgatatcatatctaaagaaaaat

SEQ ID NO: 369362 - DNA, 1193 bp, Cannabis indica
acttttttattttttttaaaatgtaaattatgttttttaactttgaaatttttacattatatacataacaaaaaaaaattatactttttactctttttatattatactaaatattaataaaaaaataaaaaaaataaaaaaacaaaataaatgtttaaagaaattaataaatacaaataaaaaaatgaataaaaagaagaaataaaaaaaataaaaaaaaaaaattagaatagagaaaaaaaaatataaaatataaaaaatgtaaggatagtcaaagtttacaaatttaaatataaatttttagattattttaaaaaatatataaatgacaaaacaaataccataaaaaaagaatagaaagtaaataaccataaaaaaaataaaaatagtcataaaatatgcacaaacaaaattatgctatatttattaaataattatttaatatcacattgagttattttctctcaaacaatatatatattttaaaattattatatgagctggttttgttttctagtttatatatagaggtgtttattaaagtgtctaagggccagtttggcacagctgtgctgtggggaaaagcagctgtagctgtgctgtgggaaaaagcagctgtagcagaactgtggaaaaaagctgagctgagtgtttggtaaattataatttttaaagtgctgtgagttgttaagattctattacaataatgataatattttaatctagttcattataattacaaatatatataaaaaaatatgttatataaattttttatttttttatatatttttaattatttttttctatagtataaatttatatgcatttgataaaaataatttttaatatttttaaattatatttttatcacttgcaaaagataaaattgtagtttataagaaacataaattgatattatttgttaataataaaaatataaatataaaatattttttaaaataaaataaaaaattagaaatttaaatattatttatttttaaatattttttcatttaaaaaatattttattttttataatatataataaataattaaataaatttttagtaaaaataatttattataaagtcttttaatcaaaacagctttttctaaaagttgggttgtaccagctttagcttttagctgtagcttttccataatttcttcaataagctgttttttaactg

SEQ ID NO: 369363 - DNA, 561 bp, Cannabis indica
ttattttcttataattatttattttaatttttatttaaataattaaaattatatcaatttattaatacatgatattttattagaataataagactctttaaatatatatttttatatgtgcttatgcgactattgtaaatgttaaattttataggttatatatattttatttgttctaaaaattaatattatttattttcacatatttttgtggcatcttatgtgagttttctttgctttttattttttttcttattttttcacattttttaaatattttttatacttttggtaatatgagtgtcatgttaaaaaagtaccacatagtttaaaaatcattgtgggggatatacttttacattatatagatcactattattctgctttggtttgttccaaaattaatattattaattttttatgtgggtgattgataaacttaattttgcccaattagctgtaatttttttaaaagtaaatgcaaaaatacatttttgtattttttcaatccttgccgagttttaaaaataattattaataaaaattttttatttatttttt

SEQ ID NO: 369364 - DNA, 670 bp, Cannabis indica
gtgtttgttttaaaagtgtcatgtgtaaaacagaactctattacattgatgatgatacatgataactctaattttacaccaacgtaatctaacacttcccataattgcatacaccaataaaaggtaattttgtttttgagagacctataaaaaatattgggtagttttacagtgcactatttcgacatccaaaaaaaaaattttagtctaaattttttcatattcatttacgttatagttatttaagatattttataaaactttgagaaattcagaataatatacaatatagaaattagtgttcaaataatctatttcacacgcgtataaaataaaatagtcatgcttgcaacaagtagtaatctagctttaagtgtgactctaattaaattatgcacatgagaaactaagaaaaccttttgctcaaagatacaagtattaggattccaccaaataaaataaattgctgccgcacaagtagccgcaacaggcctatgaagcagattgtgatcatgattagcattcaaccacaaaagccaattcaagtaagactcaggtcaaatagcattgccaaaccaagaatggatagcacgcatgaaatgcttggaaaagaacaatcaaagaaaagatgattatgacagtcaacaccaacttcacaatctggacaact

SEQ ID NO: 369365 - DNA, 726 bp, Cannabis indica
tttataactttttgctgagtaaagtgtgtttttataatttgaaaactttacgaaagtacttttataattaaaaattttaaactgttaaattataaataaaatataaaaaaaataaaaaattcccctcatgtaaaataattttttttaattaatttttttaaagaatgtacgacttcaataatatactttacaatatagagattatcttataaatataaaaaaataataaaaaaaataacaaaaatatagttgtacgatattttaaatattttcataatttttatgattttatttacagaaaatacggtcttttaatatattttttattatacttttattaatttattatttgttgttgttttattgttgttttttgttattacttctatgtaatttttttattgtttttatagaatactgtaaaaacgtaagaaaaaaatactttaaacgtaaaaatataaaaaatttataaaaattaatgtattatgtaattatctcataccatatacaatagaaaagttgataatattatggtgacaagggtagatcttgccacactttagctaaatttgcttttagacgagagtcgagactagcaaaatttattgataccatatgctatttttaaatgaattatcactcacatttggttgtttgtttactaataaataatttttgtaagaaatgtgtaattgttttttattttgtgttatatttttaatatta

SEQ ID NO: 369366 - DNA, 593 bp, Cannabis indica
gatctaaaagtgctatgacaaaactatttatattttctgtatctattcgtattaggaattatctttaagttggttatattaaaaaaacttgtcaaaaattaagctcatattttggaaaatacaaacaaaatagagagtttaatcggtaacttttgtaaaacacaggatctaaaatagtatttaccctaataaataactaaattaaagaaaaaacccttaagtgggatagatcagatcagatcgatctttttttttctgtgatgaaaacgattagatcggttctccgattctttttcgcttctcactcactttattttagggtttttacaccacacactaaaatttctaatctttttatttttttttattgtggggcagaatttagtgtaagttttatattgtgtactgtgttaagttttcattgttgtttcacagttgtttcattattgttttaattgttctatttataagaatatttttatattttaggaaatatatttctatttaagcaaataaatttctatttaaggaaataaaataaataattgattttttgataaatgaatattacaaaatcaattatgtaatattct

SEQ ID NO: 369367 - DNA, 563 bp, Cannabis indica
agtgcccatatctggttctaaaagcagtcttcgatatgtccttctctcgaattctaatttgttgataaccagatcgtaaatcaatcctcgaaaactctgtctttccctgaagctgatcaaacagatcgtcgattcagggcaacgggtacttgttcttaatcattaatttgtttagttcctgataattaatacatattctgagggaaccatctttcttcttcacaaacagaaccggagctccccagggcgatgcactgggtcggataaacccaatgtcaaagcatcccctgaagttgcaacttaaactccttgagttcggctggagccattctatatggaaactttagaaacaggttcgactccagatgccagatcaattacaaaatcaatctctcactgtggcggcaatcccggtaactcctcgggaaacacgccgagaaaatcttttaccactctaactgcctcaggcccaaatgtttcaggtctgcaggagttaattaccactgctagaaatcctacacagccactgcatagtaaatctctagcccttaatacagaaataa

SEQ ID NO: 369368 - DNA, 569 bp, Cannabis indica
gaagattacaatcaaaatactcaaaataaaaatagaagtatttcatcaagattacaagaaagctaaagaagaagaagaagaagaagaagaataataataataacacacacaaagcttgaccaaggctcaaggacctttgtcctaaaagtcatttcctccctcatatggacacttagggaaactctaaatatgctcttaaggatttatcaagcctcatatgctcagcctagtgtctaaggatgagcatatcctcacaaggttctagccacaataaaatggtttaaactacttatcccaagtgaacaatatgacctctatttatagagtttttcactcccatatgaacatgaatgaccaccataaagcccttgaatgttaccaattataaattaggcatttatagtactaaatgagtgattttgaggaattttggaatgttagaaagactcacaaacgttcaaaaacgtgtgcaagtatatgctgaaaaaaaaaaaccagtaactagttactagttactattttttcagctttggcccattcttctccaaagtgttccaaatcattcccac

SEQ ID NO: 369369 - DNA, 502 bp, Cannabis indica
aaaaaattgtcaaataatctctttatttttaaataataataaagagatttcaagactcaatttgtcactagaagtggtaaaattcttaagccatacaaaatggtacaaaatttcaaatgagctcatcaaaattaattttagaatattaaagaggtcattcacctcacaaaatttcaaagaggtcactaacctcacaaaaatttaaaaaaaatggtaattttacctaaaaaaattcaaaagtgcactaaaatttaaagccataataaattaaatgacattccaaaaagagatcattcacctcttaattaacaaagcatcacaaaaatatcaaattgaattacgtttgatttggtttctaaaaaaagaaacgtaggcaactaagtcgctaagattaagtgcagtcatcaataccacaaaatggtataaaacgcaaatcttaaaattccataaaaggtcatctacctaggaattttttctaaattgtcaaatagaaaagaatgtc

SEQ ID NO: 369370 - DNA, 569 bp, Cannabis indica
tcatttccatattatttaagatacatctatttttatagatgatgtcctcattatacctctttaagttaatgtaaatcgtgtgctacacttaagacaatctacttaaaagtgggtatattttaataaaatataatatgaaagtattttttagtaatggaaaaaaaaaagatatatttctcaacttatcctaatattgatctcttgtccattgggctagtccaaatggctaaagttaaaggtacaatcttgtcacttttcttgttaagacaaaccgttataatttaccttgatcacttgggactgtgagaaagaaaatgccagagcagtagaaccatgatccatgtttattctaattaacatggaaaactcgtctgacaattataagaagggaacaaatcgtgccccttgtgtcaaatgcttgctatcgtgttcgtgaattgtgagacttattaccatttggagtgtttggacttgagcctgttttaaaatctttagccacttaataaaacctgaaagtatttattcattacttttcttctcgttgcactttaaattatgccataagctta

SEQ ID NO: 369371 - DNA, 390 bp, Cannabis indica
gtgcgcgcatggagcaccatgcttgacactcaatgcatcgaattttcaaaaccccatagctatctcgtttttaattgaaattgagttccgtaaaaaataaacttgcttaatttttctcaaggattaatctagataaattatttccataacgaaaataaattatttttcaaagaaaattcgtaatttacaaacattcatcaattaagcacataaaccaacatgaacacattcaaatcatacaaacgtcattttaaatgaaagtaaattattatcatgactctgaggccaattgttggaacttattttactaggatctagatttactcacatatatgtttgattataatctataatctaacatcctaaatataaattttctaaaacaatgaa

SEQ ID NO: 369372 - DNA, 357 bp, Cannabis indica
aaacactataaaatgcgatatattgttgttgttggtgtaatttattatcaggttccacacaatttaattaaataaataatattagaaatcgttagtcacttataacacactacatcgatattttaaggtgcataatagcaattctcttaaatatattataaataataaagcttttatgggtgcttgtatagttcaaatcccggttttttttttttttttatttttatattattttaataaaatttatataaccaacccatctagcaactaacatatacaaacttaatcacataacaatactaaaataaaaataacaagaaacaactacaaatcaataaaaataaacaaattattttt

SEQ ID NO: 369373 - DNA, 431 bp, Cannabis indica
ctaaaaaaaactaaaaaaaactaaaaaaaaacaaacaattttttatctatttggttggtgtaaaaagttttagcatgcaatttaaaacaaatataatacttagttacatacagatactcaatttacaatcatttgaaaagaaaataaaaatggatttactccattaaaaaaaagatttactattaaaaattaaattatatctaataacaatttaattatgttcaaatttacttatcaaattagtccaagttttaaaacacaaaagctgaaagcatgcttacaatgaagtcatgcactgactttaaaataataataataataataataataataatgaagtaaaaagtagtataaaagtgcctattaattcttaggtaatgtggcatgtagcatatgatacaaattttaataaatttaaattaagcaatgtt

SEQ ID NO: 369374 - DNA, 648 bp, Cannabis indica
attcaatcttgctggtgacgaggatgattgggttctcccagaacacatcaagaatatgaaagttggggtacctgtggaaaagaagcctgtaggtcgtccaagaaaaagcaacgctggaagaagacgggagaaccgtttcccgtctggtgataaaaaaggttctgtacctcgaaactgcagccgctgtggcagttcaggccacaacagagcaacatgcaaagcccgcatttgaggcgtagtgtacttattcgttgtaataacatgttttctatttcaggttcgaaactgctttaaaataatgtcgaggttgaatattttttgaatattttaattatttttaggtttaatagttatttttgttgaataatatcgatattttatatttgaaaccacgaataattatcaaaatttgaacgaagagaaagtctatatatacataactgtaatgttaattacacaaaatatacaatgtcccaataattacacatataatcagccgacattttggtaaaataaatcaacacaccaccgttcacgaaacaacttgatccggcctggcgtgacatcggtcaatccacgttgcatcatgagatgctccacatactcaatgcaatagacgccacaatcaccactaaatgcaaaataaaa

SEQ ID NO: 369375 - DNA, 573 bp, Cannabis indica
atctctaaattgttgataattgaagataacatctgtctaaaaattgtagataagaaaaataatcatactcatgggtggattctaatcttcctttgtttcgacagagataatagagtaatttttgtttaatagccacaagtatatatatcaactcttctaatgtctctctctcaaattgtttaatagccacaagtatatatatatataaactatgctacattaataagaaacaaagaaaaagaaccaagggggattcaaacaacatagtagatcaacttgacggaggtggtggcgggaggttattatgagggggaggattaatccctgaggcatatgaggagggctttgttggggcggtggtggtagccgccaattcggctgttggcctcccatgggatggggctgttgttggacccagacttccctgagtgaatatatgccaatatatttttttgtaaggtcgaatcgatcgaataattacattgcactgccgaaccacgctagtatatatataaatatacacacatcctccagaacaagattgctcactaatcaaaaactcaaaactgatta

SEQ ID NO: 369376 - DNA, 508 bp, Cannabis indica
caggatctgcgaaaggtccatttcccaaaagggaaaggtccgcagagcggcaagctccctcgagcgagtcttggccctcaggattgagaggaccgaaagagcgtattcgtgcaccaagaacccggggaaaggggaggaaaagtcgaaggtatcccccggctgatctaagatagaaagtcaacgagaaacatggtgacttaagaaaccatcttgaaaagaaaaagcactcattatcgttctccggaggtgccttgaacgaaggaatcttggctgaattagtaatactccacaaagacattgctagggtctcccggagactgaaaggggatgactacgactttgattgagaggaccgggaaccatgcgcccgacacatattggaagcggagctccccaaaaatttaagatgccctaaatggcaacttacactggagattcggaccctagggaccatctttcccgatttaacagtgcgatgaccatcatgagggccagcaatgacataaaa

SEQ ID NO: 369377 - DNA, 502 bp, Cannabis indica
gtttatttgtatattgcattagatttaatatcttattttttagttgtttttcaatatttttttattgctattatatagtttatttataattgatctctggttgatttggatgttacagtgcgtttgatgtcatattatttattggtgtttttctacaatattattttaaaatgagatctttgtaattttacaacattaaaattatatttagaaaaattaaatttacaaataaaaaaatatggattgttaaaatgtaaataaaatattttaaaaaaatatttatgtgaaaaccctcattgttacacaagtattttgtagtttctttaaaacttttaatttaattgtgtgttatttttgagtttatcttgaattgatgtaatgtgttgataactaattattgttattttatattagagttgttgtctaattgattgctcattgttatttaaattattagttgttattaaattactcaacttagataaaaaaaaataatatatat

SEQ ID NO: 369378 - DNA, 1086 bp, Cannabis indica
tcaatccaaccgttgatctttgggaattcgaatcgtgcgtctccccaaccgttcgattggtaggtgatagtgcctgttcctcatgcatttttgcctataaaagccaccacctttccttcatttcggttacttcccatttcttgccaactttgctcgagtttcctagagagaaaaaatcctcagaccaagagaacaccttcgaacactttacaaatttcccagttaaccttcattcaccactgtcaatctaccttttctttgtttgatctacaacagaacccccagtctcaacacttcactgtaagtttctcgcatcccttgctttactgttagtgtacatggcatgctttacttatctgttcgttttttctgggtttggtatttgaagtttctgggaatgcattcttttggatttttcacgtaacaggtctagattcaccatttctggtgttagggttactcttgtcacgtatttgttgttattttttgcaaaggaccatacgctcttcgtgtactggtcttctagggcatagaggagactttgttttttctcgattttctgccctttctttttcttttatgcgcaatgttgtcttctgcgagtttattgcacccgacttttgtccaggaaatccttctagggttttctgtttgacagacgtccggagggggcctctttccagcggttaggggacccccattccctttttcttgatttagggtttggtatggggcctaactgctggaatcttaactcttttttcagaatcaaaacatgtctgcgtccagttcaaagtcgtccaagaagagtggtaagcgtctggctacccttgaagacgtcacactggctcctgtcgcccaggaggggtataagtctcgggccacaggatgggaggcggctgagcttcattccactctaacctgcccccaccagctggagaacatcgtggaggtggctggaatcaaaccgtcaacatccgggacgtatcgccggccgccccgagatgcggagacgcctaaccataactatggcagcttcggggcttggagccagacacacctgatggccggagccatgcttcctct

SEQ ID NO: 369379 - DNA, 554 bp, Cannabis indica
gaacccccgtttacgttcacaaaagaagacgagaagcacgtgagataccctcacgtcgatccgctggtcataaccattcaactcgccaataagatgatcaagagagcattaatagacaatgagagctcggtaaatatcatttataaggagactctaaagaaaatagggctcgaaaaggccaagttaaggccttgtatggtgaatctttgcggtttcataggggatagcatcgctagccttggcgtaatcgagctcgcatcaactttaggtcaggcacctttgattgctactgttatgcaagacttcttggttgtcggcctgccctcaacttacaacatattgttgggtcgtccagcactgatcggactaggggcagtcagttcgatcaagcacctatctttaaagtttcaaacaccagatggcgtggtagtggtgcgtggcaaccagatgctggctcgcgattactatcgcatagagttgcagcatagaaaggtcggtcatcagttgatgacgatcttggcaggagaaaacgagaagaaagaggaagatcttga

SEQ ID NO: 369380 - DNA, 870 bp, Cannabis indica
tatgtaatttttatagattaacttgtagttagatttattaacttattaatatttttgactaattttacattagtgtttgtgtaatatttaattaattttatgaaatgaaattatgtattttagccaattttaaaattaatttaaataatatttaatttacattttaaaagataaatatgaaatttaaattaaataaaataatatataaattaataaatatataattaaaataaattatataattaaatttgaaaaaactgaaattctctcacttttggcgtcggttactacaccacatatggcgttggttcctcaaaaccctttagtgtcgccctgatcagcgtcggtagcaaattttgcgaaaaccgacgctgaaagggcttaaaaactgcctctaaagggggtttttgtagtagtgtttttttgccaaagtgtgctctatcctggaaaaacttttaaggaaaccatcttgattgttagtccatgtttagttcgagcctattctcttgatagcatccacttgaacctaaacttcccacgatgaagaatcggtaatatcagccatagtgatctgcttacctcctattcgatcatgaagacagaaccctacattgaaatctcctagtataagtcacggtttggcaagaaaacaaagcttcaagagatccttccacaactttctcctctcatctatggtattaaaccatagataaaagtaaacataaaaagcttccctttgacaagttagcttcacataacaatgaacaaattgaggccgctcagctataacaatcactctagcaaaattcctcctcccaaagaaccaacaatctgcctcctcggttatgactagtaaagggaatcctaatt

SEQ ID NO: 369381 - DNA, 743 bp, Cannabis indica
ccgagtcttcacattctttcccccttaaagaaatttcgtcccaaaattttaaagtacaacctcaagttaaaaattaaacaagtgaggatacttcatatacatctcggactctaactcccaagtagcctcgtcttctctgtggttcttccataagaccttgactactggaatctctctgttccttaacacttttagctctctcgccaagattttgataggttgttcttcataagtcacatcttcttgaagagggatagcctcatactcaataacatgtgacggatctggagtatacttcctcaacatagacacatggaacacattatgaacatgtcccaactgtcctggtaagtttaaccgataagcgacctccccaatcctctcgataacctcaaaaggtccaatatacctcggggctagcttacccttcactccaaatctcattacgccacgcataggagtgactttcaagaagacataatcaccaacatcaaactcaacttcctatcgatggagatcggcatagcttttctgacgactctaaataaccttaagtctttcttggatttccttaatctttttagtggtactagtgacaatctggggcccaatactaacatgctcatcttgttctgcccaacacaatgacgatctgcatggtctccccaatataaaggcctcataaaggagcccataccctaatactagctgtgtagctattgttgtatgtgaattccactagt

SEQ ID NO: 369382 - DNA, 862 bp, Cannabis indica
gccttgaacgcataacccttaaatctcaatataatcatatacttagcatggcatagcatttacttaacttatatcactagggtaataaccctaggctattaaccgttcatattagggtaataaccctaatgtcagttacaattactcacatatatcatattcaacataagcgccaccgtgcatactctacgtgcaaactactatcttacatgttgtctcgcaataacagagattccaaacccctggtgctcctgatcaggtgtcggtaatactagtcacacaatttgagatttcacaaatagggttaatccctaattccactttcacataatatcaagttggcattcaaaatatagataatcatatagagctcggaacgagctttccaacgatataaagaacgtccgaaacggaatcccgactcaaaagttatggccaaaacaaaattgagaaaagggatggctctctgctgggtgtttggccgcggcgaccataaatctggctgcggccattgggttcgagaaacccagaaaaccagattttaaagtctaaaaatgctcacttttccatatattcgaaccttaatcataccatacccaaaattaactccttacagataaaaatcatcacaacagagagttaacaacatcaattccaacattaatcaacaacatttaaccaaagctccaaagcttgagcaaaaccaacaaaattcaaactcacaccttgaatcatcaaattcaaaaacacaaactcaagaacaacactaaaatcagagctggaaactcaatcaataactcataaattctgacctaaactcacattccatgctcaataaacatatatcacaactaaattatgc

SEQ ID NO: 369383 - DNA, 713 bp, Cannabis indica
gcatgattaccacaaaatctttcgtgtactttggacaagagtcgtgcaacttcttcttttattacacatcttagcagtggcatggagaagcctcttctgtacattacaccttctactatgatgtaccgtgaagttttcctcatcatcttctgagcctccttttggttgtttagaagttctctagtgttgagataagctgctatgggagtcatcaaatttggcgtagtatctatcattttgatttcttctacacaggtgatgttgggtccttccaagaattagattgggagtaagttaggcttatctatcataatgttgctcacaagccgtgccaaggcatcaacaattgtgttttcctcccttggaatttgcttgagggtgtaactcttgaattgtgcgagcaggtcctggatcttgctgagataagctctcattttttttctccacgagccatgtactcccctaagacttgatatacaaccaactgttaatcactgcagacttcaatgtattcggcgtgtacctctcaaccaacctttaatccagctatgagtgctacatactctacttcattgttggaggctctaaacccaaatatgattgctccggaggttgcctcccaagtgtaatgatagaacacaccaaaaaacttatcagtggctgatttgtctacatgtaatttctagataggtttgtctttatttttcttctgg

SEQ ID NO: 369384 - DNA, 738 bp, Cannabis indica
ttgtacaaattaaggaagggtataaattttgatatggcttgtattattagggtcaaaaattgaaatttccctttgagaatgtaatatactatagagactgtaaatactacatgaagccttgcctaaattatatcaaacttctagtacgaatgggaaaagcaagcacattttatgattcaaagtggtatttgggtatttatatataggtacggtaaaaaaaaattaattaaaaaaagttatttttaatttttattatcatttcaattatttttattttatttttaatttatttgttttaaaaaagaataaattttatttaggattttatttcattgtataattaataacttatatttaaatcaattaaaaataatcaaataatgtataaaaatggggtaatttgggaaatgtaaaaaattaaaatacacttgaggtataaaagtgtagtttttcaaatcagagggtaccaattgatcattatatgaaatagagggtaccaagttaattgcggcaaaatctctaatactttcattttacttgcatttaatccccaaaatttaaattttagcggcaaaaccccccatactcgtgttctgttaacagtttaacacttcaattcaattttggcggttaggtgtcatgctagactgttcatgtgtacatctacgtggatataatgtacacatggcacaattttattagtccacataaaaaaatatttaaaaaattaaaataaaa

SEQ ID NO: 369385 - DNA, 366 bp, Cannabis indica
gaactgcatatccatatattctccacccatatcagttcgcaagatctttaaagttttacccatttggttttgatccaatgctagaaattcctgaaacttctcaaacatttcaaatttcttatgcataaggtaaatatgaccatatctagagtaatcttcgatgaaagtgacaaagtactcataaccacctctagctttgacatttagtggtccacaaagatctgaatgcactatgcccagttgttctttggcacgctctcccttgcaaaaaaaaaaaaattttttcattttgccttctaggcaagattcacaaactggtaattcacctaaggtgacatttttcgatggaccacctttggttaacct

SEQ ID NO: 369386 - DNA, 707 bp, Cannabis indica
tattttcacatacgtaactctatctacatgtctctttatgatctaatatgaacaaatttaccattagaaatttagaaaacaacaaaaatacaccaggataaatattttactatagtattgatgtaatttttttagattatacttgagttggattgtttaggaactccatatcaactttttgagatctcctttcatggatttaaaaattgaagtcgggacattagttttatgcaaattaaactggattttcggttgaattttagtttcgtagtagtttttctaacttttttttatgaattcgaaacaacccttattttgattgattctggtcgtcttctcaggtgaagttgcaagaattaatggtggttctttttctggttgaatgtttgtttcgattgcggttgggttgctgcgtggttgcgcgatagttgcccataaagcatgtatcctgggttgaaggtgtgtgtaattggtatttgtgtatttttttttatttgagttgcatatttatttatttggccagctggaagtatttttgtaatattgttacttttctttattaatcctctaaaggataaaaatataggaggagtgctcttaattttttttaagagagaaaaaagtgttaaagaaatgagatataaaaatatacacttattatatatatatatttatatatatacaaaagataaaaaaaaattaagttt

SEQ ID NO: 369387 - DNA, 827 bp, Cannabis indica
aacataaaataatgtgagaaaaaattttaaaaaatatcaagagtaatttttaaaaattatttaagtttatatttttttttaataatgaggtgtatttataatttggtggggtgcaaataaaagtccccatataaaataaatgaatttactttaaaaatatccttcaaaaattcaaagatatatttaatatttagtaagggtatttatccaatacaattcgtattattttactcatgttacatttgatttgcactaagttgcgaattttatattttagattcattcaattcatgtcatatctcaaatccaatctaatctaatttgtaaaagtgcgaatttgatcaattattttattttaattactttttaatattaaattatttatatctattttaaaatatatttttttacataactaacaacaaaataaaataaattaatgttgttttatgtttaaacaaaaaaattatataaaaataaatgtttaagtttgttttaaattatatttttcttatatataataatagaatatacattttatctattaagttttaaaatataattgtagggaccggatttcgtcccgttactgtacggacacggatttcaatccgtgatgtactgtaaccgttggatgggtagttaatttgatccaacggttggggttcatgtaggggttcatgtaggggtaattaggtatgaaaaaatggctaccggtactttttttgaaatttaaatttattaaaaatggaaaagtgaaaagtgacatctatccatcaatcaagtctaatcaaccgtcgtactcctccactcctccacttcttcac

SEQ ID NO: 369388 - DNA, 565 bp, Cannabis indica
ttgtctaggggtttagacaacaccagtagttgggctagttgtttttttcagctcctgaatgtgttttcacattcctctatccactcgaatttttgttgcctttgagaatgttgaagaatggtacacatttttctgtagacttggacacaaatctatttactgtagcaatgcatcctattagctttgtccttccttgacagttgtgggcgacttcatgtccaaaaggggttggatcttgtctaggtttgcttctattcctttgacattgactatgaagtcaaggaattttcccgagcttataccaaaagagcatttgagggggttgagcttcatgttatagctacaaaggattttgaagcactcgcataggtcctccatgtgcccccaacctttttggacttgacaagcatgtcatccacatacacctccgtgttgtggtccatgagatctgcgaatatcatgttcactagtcattgataagtggcccctacatttttaagctcgaagggcatgactttgtagcagtacatgcctaggtccgtcatgaagttggtgtgctcctgat

SEQ ID NO: 369389 - DNA, 564 bp, Cannabis indica
atactttaataataatcttttttcaatatgacccaacttaacatattaattaatttttttccaatatatatagttcaatagtcttgaagatattttaactattctagtgtgtatctaattattgaagcttccaaaccctaaactttttatcattatgcaggagccctacctatatatctataaaataatactataataattaggtccacaattctattattatttattgggtaaatactattttaggccatgtgttttacaaaagttatagattggaccctctattttgttaaatgacaaaatggaccttgtatttttcaaaatagtaaaaatatgaccctaagcttaattttcgattttttttaatataaccaacttgaagataattcctaacactaacagatacagaaaatgtaaacagttttgtcataacatatttagataaaataataattaaattttattttaacaaaaaatcagttcagggtcctatttgtactattttggaaaatacagagtccattttgtcatttaacaaaacagatggtccaattaataactttt

SEQ ID NO: 369390 - DNA, 915 bp, Cannabis indica
tttactacaatttaactgtcgggaatactaaatttttaccgacggctttaaatagttacttaatttttttagcgacggtccccgaaaaaattgttttaaggaccgttgcgaattctaatatttgtagtagtgacaatgggcttgagctgagcatcgactgatgggcttcaactgctagcaaagaccaaatctatctcgtcggtcacaagtttgttgccgtaagtgtccttgtctgatttgtgtaatagtattcaaaaataaaaacaatgagtaatacattgcaagtctacctcaatagttagccataacaaaattatattagttagagaaaaaattggcattaaaagcatgttaaataacgtcatagtcttacattatgccagagtactatgtaatattcgaaagaaagaagaagttaaaccattaattacattttctcatcactttgcttttacaccttttaaacaatcctcaagtatatagtttctctttcgtcattgatatatatataatataataagtgtctaatttcataggctctcataaaaggggagagagagagagagatctgaattataaaaggaaagggagtctgggttcttttgtgaaagggagagagagatcagagttgtacaaggaaagggtgtagagaaagaaagccttgaacagagcaagaagagaaaaagactgatagaatcatcttaggaaaagctattctaatcaattaaagaccatttatttatatatgagttattgatgcaaagtacaattaattattaaaaaaactcattaactaccttaactaactgttacaccatcaactaaactaaagctaacagaaaactaactagcattagttaatagtgttaacatccccctcaaacaaaaaggagtttgagccattttgaatttgga

SEQ ID NO: 369391 - DNA, 969 bp, Cannabis indica
tctcaaattaagtatttttcaaatttttacaaaaatatctaggttatttaaatatttaaaatatcatttataaatttctgattagtaaaatgatataaatatcatttttctaacttatgatttataaacaattaaatatttcacaaactaatttatttttgaatttgaaaatattatggttagaatatttataaaaaatatctaggttaaatttaaatttattaattatttaatttatcatataagatcattttaatataatatttcaaattaaaaggataatactatcatttaatttaaaatatattcaatattaaaatatctaaccttataattaaataatatttaagtattaaagaaattaacaaatttttttaaatcttacaataatttaaaaaataaaataaccaatttctaaatttaaaactcaaaatatcaaaaattaataataaacaattaaaattaaatattattaatttgtaaaattgatatttaagtttaaatatgttaaaaataatattttattttgaaattagggtatgaaaattgaaaaaatttgaaattgggtgaaaaatcccaaaaaatcggattttgggtgcaaagcacccttgctgtgcacacacaggctatgtgcaacctcattcgcacgcgcaggaggctgcttgcagcctttgtgtgccctgctgggtgctagctcaggtgggtgtttagacaacagggcaggcttcagacacgcacagacaagcaccttgtccgaatgcctacgtgcgcctgtgtgcgtgtggtatcgagcgacgacaccatatgcacctgaaacttcaaacggccatatctccttcattttttttttataggaattgagttccgtaaaaataaaaattgcttaatttttcacaaggaatcaaaatattattcttagataaaataaatatttcatggaaagatttcataaatcacatacattcatca

SEQ ID NO: 369392 - DNA, 553 bp, Cannabis indica
gtactatcttgtataatttttaaggcctaaaagagtgtttttcaccaaattcgctcaattttcaacacttttcaattccgtaagtttttgaacctcacatttaacattattgaactattagaaaaaaattctttcaatttgattgcataaaactcattttcgatagatttctaattattgacttcgcttttagccaacgacaatgagtctttttgataagcgataaacgatatgtcgtaataaatatatgtagtaaagcaataataagacacagacattttatagaggtttagccccgagcagttcggtaatagcctaatcctcgttaattgtattgacttaagaataaggaagaagattccttttcttatagctcttacaataatatctctgaatatataattcttcgatagccttagcttatagcgtttcggcgtacaatttctctgtcccttgcccagtgaacattcctcactatttatagggcaggaaacttgaggaggaagagtttcctctctcgttacatgcgcataaacagaaagatcgtgtgatc

SEQ ID NO: 369393 - DNA, 827 bp, Cannabis indica
ggtaaaataacttccaacaggaacatatagagcattctatataattaagagtgcaatattgaatctgtagtggcacaaggaggaatttatatgttagagaatttacttgataagttttagagctacttattggaagcttgattatatcggcccatgatccccacactagttgagataatactgcttgtagactcaattaattggttttaattaattaattataattctaaaattagactcaattgtgaagaaaagagatcttaggatttatttgttaattaagagactttgtaaagtctaattaatgaataagttaaatggtaattttatttgataattaattataattattaaattaataattttgacatttataggaataaaatttgaaaatatggcattagtaaaataaaagataaatagttgaaaaaattgcaaaattatagttagtggggtccattatcatgactagctattagtgtttaattttgatattattttatcttttttttaatccatataatttcaatcctaaccctcggtaaaatagtataaaaacgaatatgatgctctcattttcatccaaccaaaataacctagttttcattctgtcaaacaactagaaaacttgagagcctccttttctttactaatttcgaaatcctctctccccctcttcatatttttgagcctatagtgaaagagtagatgaccacccatagaaagtgtaagactgtgaagaatgcaacacttgaaggagaatcgagctcggatcttgtttatactctgcgacaaaaaggaacaaaggttagacatctgagtggaag

SEQ ID NO: 369394 - DNA, 1353 bp, Cannabis indica
gttttataaaaagacagtatttttttaaaaaaatccgtatgacaataaaattataaatttttacctaaaatctaatatttttataaatacctcataattatttgtccagtcaaaagacattcttaagattttattgtaatttataacacttggctattaagtatccgacttctacacaataagggaagcaagaaaacatctcctaacagcataagaggtcggcattgttataaaaaaattaaggtgcttaatattattattattaggtgatactttataattaattagcgtttttttttatacaatttttattaaaaataaaataaaatagaactaaatattaaaattgtaactgataattacgtatcataacatttctaaaaaattttttttaaaaaaaaaaaaaaaaaaaaaaaacaaaaaaaaaaaaaaacaacctaaacaattaaaggactttagttatactaacagtaacacccttgattataattatatgtaaaagccaattgggtggtaagtggtagttataattaataatgtttccaatggttgagattgagaaggtttataaaattaatcatcgttctagattaatttaaatcaagaaagaactttctagaagttatttgcaattttgcatatttaattggcaatatattattggataagaaagatataaaatgtaaaataacctctttcttttataactagctttttccatattcctaaaaaaatcttcaaacttttagctgttccagaatttgtgaatctcaattgatacacacacccatcaaactttaaacaaattaaaaactattcttcgtatcgaataagacgtttgtgcaccaaattcaatggtctataagccttattattatccttatatattttatgtgtctttttttattcatatttttgttagacatttatatatataaactgaaatgtatatgtttaagtattaagtgcggaattaatcaaacatatatacactatgaataaggatcgaaatacctccagccattgaatcttgagcttcaaacccacataagctttgatctgcaaaggaaattgactaccatgggtaatcgggcttcctcgctctctcaactctctttagatggaatttgctgttatgaacagaatgagtgaggagctcggggaccgagaccctatatttataggtgagatactccatcagtatctgcgccacattaattgtcagaataatttgacaattaattcaggaaatcaaatcaggtaatgaatatagaaatctgaccatatatagaatattacataattgattttgtccaaattcaaatgaaatataaaatattacatttatcagaa

SEQ ID NO: 369395 - DNA, 360 bp, Cannabis indica
accctatgagatgttttatgagttctaaatttacttggagtgaggtaccacctataagtcggcaagaagtaagagaattatcaaaaatagtagacaaaatatgacaaagtatgtccgccgctctagcagatggagaatgatgaggatttaaaaatgataaaaggttaagtattgttggtgaccgtacgttcttaaaggtcacttcaatatagagatattatgcatttcaagagaaaagggcatgtaaagcctgagatatttaagtccacctactatagcaaatatgcataacggatcccacattttctgtaaagcccgcttagttaatttggaaattatcagttaattatgattaattat

SEQ ID NO: 369396 - DNA, 555 bp, Cannabis indica
tttaacggagaagaaccaaaatattctgttaatttaacggagaagaaccaaaatacattttgcgattcctctttcttctttaacaaaacgctattgcgatttgagagaaagttagatcaaccgaaaatgtcaggaagaggaaaaggaggaaagggtttgggaaagggaggagccaagaggcatcgcaaggttctcagggacaacatccagggcatcaccaagcccgcgattcgccgtttggccagacgtggcggagttaagcgtatcagcggtctcatctacgaggagactcgcggtgtactcaagatctttctcgagaacgttatccgtgacgccgttacttacactgagcacgctcggcggaagaccgtcaccgccatggacgtcgtctatgctttgaagagacaaggccgtactctatacggattcggaggttgatgagtgtgagtcagtctatgctttaatctttttagggtttataattattgtttttgagatttgcaattgggattaagcttttggaaatgctcagatttcaatcttgagttcttgtac

SEQ ID NO: 369397 - DNA, 570 bp, Cannabis indica
tctgttttcttttaaaatttatgatagttgtttttcagttgttttatcattgttttttagtttagttactatatttaagttttttaaatagtttttaactttctattttgtgtttctgtattgttttgtttcagcatatgaacactatattctattaccttaggaaaaaaggtaaatattcttctgctgttacactgaattttgcaacaactggttgccttttcgatgattccattcaagcgttataccacaagttcaacaaagccaaggcaatgaaaacaaagatgtcgcacatacatgctgctcacccaatagcgcattacatacgaggtttgcgaattccgtgttctaagccttggtatgaagccaatcatgtcttattcatcataaatcttaggaaggaaagtcattcggtttttggttgtcttgacttgaatgaggggattttatttctttataattccttgaggactgccaaaatgaattctgcagctaggaatggaatgaaggcttattatgttttactgcctttgttttttgatctacttgaattttggaagaataggtccc

SEQ ID NO: 369398 - DNA, 600 bp, Cannabis indica
atacgaccgtcgtaaaacaggcagaataggcgacgattcaaaaccattgctaatgtgggtttcctgacagtttaaaagcgtcacctataactgggtatggaaagcgaaaagcaaatccaaagaaaagaaaaggtcgtcgtgagaaaagtgacgttgttgcaaatgaacctcaagggccatggaagaagaagtcaatattttttgagctcgagtattggaagcatttgttgatacgtcataatctagatgtgatgcacatcgagaaaaatgtgtcagacagcttgcttaataccttgttcaatattcctgggcgtagcaaagatggaatcaaatcccgcttagatttgaaagagttagggattcgttccaatttacacccacaagttgttggtcgacgaacgttcttaccaccagcttgtcatgctctaactaaagcagaaaaacaatctttgtgcggttctatctcccaggtgaaagtacctgaagggtactcctcaaatgtctctgattgggtagatatgaaaaaattaattttgagtggtctgaaatctcacgatcatcatatattgattcaacatattctaccagtgagtatccgtt

SEQ ID NO: 369399 - DNA, 738 bp, Cannabis indica
gtaccccttgggcccaaacccaattctcaaacacacactttttatacacttctaatgaagtgttgggataatcccatgtgggagtcgaatcattcacaaacctcacttttcaattttttatataattacacatttttttttcataaatagaatgtggtaagtaagaatcctcctcccactcttagccaaaaaaaaaagactcctcctcccacaatataaaaaagttctctttaaaaacttctaactttatcttcttttttttttaactaactttatgtttataatacattaaattacatttatattgattcattagagatgccctttttttattaatagttttgatacaaagtataataaataagcttgataaaactctttgaaaattaattgacttctttacttggtgcatttaagtaatcaattttaattaaaattcttaacaaaaagacttataacagagtttgataagaaatgacttgctaattgtgtcataaactgtatcttattgaaaattttcattatttatgtcaataatttacaattttgaaatatagcaactatgattgaatatgatatgaagttcaaaaaagtccaaatatatgatccaacagctatattacaatattgtcatttcagattaagctaatcaatattatattcattccatatatctaagtgtaaagtatatcctatttatttatacattttttattctgaaaaaagaataatatatat

SEQ ID NO: 369400 - DNA, 590 bp, Cannabis indica
gttttaatttaacacgttttttttttcaagaaaattctttgattagcaaagacaacactgtaattgaaaaagctctgtagtgtgccttagcattagggcgttataccaccttatattcacaatcaatgtttatattatactttacaagtcaatccaattcccaacattacctcaaaatcttctaagtttagctcaactaaaacaaccaaccatcccctttcccccataactcgaaaagggattaaaccacctgctggaaaataactagttctccagtaaacagtagggtaccgaaaccacctagtaacacatcattaacttatacaaactttccaatcacccttctcgaaatataggaatacgttgcaccggaatcaattaaagctatcaacaaagtataatcaatagaagttcaacttatcactgtagaaagaccagcaccagtctcagtttaggtcaagcaaacacccaaacaagaactaaaatgccatcacccctctattccggtcgctgcaatggtaggcagcttctttctaaatggcctactatgcaacattaaagcaagctcaagtttagcatttaccctaatg

SEQ ID NO: 369401 - DNA, 561 bp, Cannabis indica
taccccttttaactcacacaactagactcgctagtcaataccaaaaaaaactttgaattacacaaatttaatgtatggtaaggaaatttaataaaaataaatattacatttaaaataaaaataattattgttcacatagaaattttataattgtcaaacattgacaataaatcttgttaaataatttgtcaatctttgaactgtacatattgttcacatggaaattttataattgttacacatatatcaccagagacatgtgtacgctcgaaataaatataactttcttttggcccgcgatcaatatttacatgaaacattcacacaaatatctaacattctttatgatcaatttacacatgagaagttattttgacaacatcatgtttaagtcaacccatttagaatgagaactttattattttagtcatgttaaatttaaacaaaataaaatcatatattgggcttacctttttttaattaaaattaaaaaaaaaacttaagtgtatgtatccaaatttgtaacttaatggtaagatatgatattaaagtgttgatgat

SEQ ID NO: 369402 - DNA, 592 bp, Cannabis indica
atataaatttatataaatactttagtggtagaataaagggattatttcataaatacataaaataataaaaaatttacaaaaatacaatttttacagaatttttaatatcttttcgatctttatgaatttatttacagaaaatgcagtattttcgtgttttaatcttattaatttgttgttgactttttgttataagtatgtttttttttttttttgtaatgttgtttgaaagttattttacaaaattatccataaaacatatttctctactagataaagaacctaattgctacattagaagactagtacttttcaaaagcagggtgctcattcttcttcttatattctcaatatatttctaatatttgagttggctctttcaactcatatggatgggtatataggattattcgcggattggtttgtttcgtattttaattttttctttttcaaaccaaaccaatattactgtttttgaaaaagtgaaaattacatgaaatatgagattttataacaaagttagaaaaatatggcatttttaagtttgccactcttctatgacattttttttacatttaagattttttatggt

SEQ ID NO: 369403 - DNA, 580 bp, Cannabis indica
atataacataatatatatttctaacattattaattccttttttacaatccaaatttttaaaatactcagatttaactttatatattcctgcataacgcatattaatatatctataagatatttaacaataaaaaaaaaacaaaaaattgttacaaaagaccaaactcaagcaaacaaaataatacagataatacactattatatgaaatcatcaaaaagtaaaataaataaaacaatactatcttaacgatacaatcagatttaaatctaaaaccatagaaaattaaaataaaataatataaaacatgactaaaaagagaaaataaatataaagtgacaaaactatgaactagaaaaatcaaatcaaagaaatgaaatacctttcctatcgtgcgtgagcatgttggtggcttgtattgctcctggtggtgcggcaaacaaaggggttcgtggagagagggaactccggtgtggcggcgtaacttagaattttcaaacccaaaaaaaaattagaaaagaaataagtgagactgagattgagaatgagtctctttccaggaaaaaaaatccaaaaaaaaaa

SEQ ID NO: 369404 - DNA, 555 bp, Cannabis indica
acaaatccatttgaacaagattaggttatacatcaaatcttagaaaagggttgatcctgctttacgagagccaagacaacacggttgatatgtacactgctggaagacctctgacccatggctgaacaaaactgctaatcttcttacctgcaccatgaagtacccgtgagtcacagtgactcagcaagaaaagctactagataaagaaaatcatggaaaataatagccaattatagtaccacatgttatacataccaagagatcattctctttcaacgtacatatacaactcaacgtttatacaagcaaacttattacaaaattaagagtatttatagttatacataaccaataacctcagtgtttcataaaacaccataatcatatagtattgcaaacacttactttcaatgcttcataagacactccagttcacacattacatatccactcaatttcagtacttcataaagcactctaatcatgcatcattacaagaaaagtgattaacttcacaagcaatataacatttgttcagtcacattataacataat

SEQ ID NO: 369405 - DNA, 527 bp, Cannabis indica
tctagggtcctggttcggcgattcttcttgaggttctgatttttggtcccaagtttaggtctgggttcgggtttggttcatcgtttggattttggtcatagtatgagtcccagatctaaacactgactactggtctattccaggccccattacctgaatcccgagtaaagatctggatcaatgtcacgagtctcggtctggttctggttcatgtgccaggtcccaattctgactttttgttcgggatcgagactcaatgcggttcaaggtcccgaccctggttttgtgtcccgagtctggttccataattgggtcttagttcaggttcgggttcggctccccagtccaggtatggtttgggatacgggtcaggcacccaattcgggtccaggtctgatttgaagtccgggtcctgatccagattcggttctggatctaggtccatttcagttatgattccaagtccaagtcctacttccagtcccgctcaacttccagttttagttccaattttgggtcacaatgta

SEQ ID NO: 369406 - DNA, 863 bp, Cannabis indica
agatttagattctacatattattatagagtgtttgatgaagtttcataattttcttgcaattatttgatttataatgaattatttggtttatttgttaaattaattagaaaaatacttaggttgctctgaaaaatctaactttattttctatgattgtttatggattataaactgttacaaaattggtagattttaattttagtcaattttgtatttttcatgaattatttgtgttatttctaaacttaattatgaaaaatacctagattattcaaaaaattgaaagttaattatttagggcttattacatattataaactgtgttagaatggttatatttggttttcaatcattttttgtattttcataaatttatttatttaatacctaaaataattatgaaaaatagttaagtgatgctaaaacagtaaaatgtatttttgtaatgctatttactatctattgtatgaaataaaaaggtttttataatttattagttactgtaagtatttattacaattaattgtgactaattaactattcaattgagttttaaatagagtaaatattaaaaattgtgttcactatttgggaactctctatatgatgttataatataattctagtctatgaaataaatttaagactaggttgagatgttttgttattttatttatttaattaattggtattttatatatagtttgaagtgtaaattagtacataattgtatcaatgattaagaaatatgctagcttctgattttggtaaattattacataattgtatattttgttaataaatagtattttagtaaaatttcacgtaaaaagtatatgtatgagttcatgttttacgttaa

SEQ ID NO: 369407 - DNA, 577 bp, Cannabis indica
aagttttgtcacctagcgactgtacagcaaaaggccctggtgttccaaagatcgtacgctgcaggcctaactgccttgacatgtacaatcttcacctactcgttctcacagttcctcagctttagccttgcccttacctattggaattattttaccaggatcttaaaaatactaacaagtatgttatttaacatcctaaatatgaacttctaaaacgatatgaaataaacacatataaagtataagaaaccttaaagtggttgcagcgaaatataatgtctccttccacttagatctctaacccatgtatcctttctgtagcagagtatcaccaagatctaagcctgaacatccttctcttgaatctggattattcttagccttacacactatgattgagataccacttgatgtgtgtgggcactcactaactccctacagggttcggttttcagaagagatgaagagaaagaagttgggggctaggtataggaagaaggctttgaatttttctctgaaggaatgagatgcattatctttttcctaaagccatcactacctatttatagcaaaccac

SEQ ID NO: 369408 - DNA, 575 bp, Cannabis indica
caaatcaggtttctagacttgcgttaatgttagaaagtctactgatgagatggtgattactctaggggtggagcagtgatttttcgagaagtgtaaagacctatctaaagtctctaactctaccaatgagactgaatgttaaagttgcaggaaggatacttattcaacctatggaaagttctatacagtttttggcattgtcccaataacgaattaactactagtgttacttcttgactaacacagaagtagttgccaaaaaataaaaaatctagtatcccaagaggagtagatatatagagaagaatctcgcaatatcaaggattttatgactaaggatatgtaatcgcggagaaagtttgtattgaatacaacatgtcaaatcttattacagagagaatgctacatactacacttgatatggatatcaaggtgttgagattatttgaaatgcacttttagttttatattagtgcaagtgggagtttgttgggttttttgccctaaataaaactcatttcaatataataagatttactaatcaataaaagatcagaaatcattttatgttgcat

SEQ ID NO: 369409 - DNA, 680 bp, Cannabis indica
atcataattatagcgtttttaaagaatgttatatattaaagtatttttagaattaagagtattaaaaatgatgtaaaagaaagataatataaaatattatatttttaaatgatgtgtaaatttttaacatttttacaaagagaaatgctaaaaggcaccagtggtgcctagcaccctcgtatgtgtcaatatcgctattggtccaactaagtatcgggtcccatataatttaatataatagcttttagggagtatcgctagccaatcgctacgcgacatgtcgagaaggtgctaggcaccactggtgcctaatagcaatgctcttagatactaaaaatactgtcattggagatgctcttagatactaaaaataactttatacagtagaacctctatttaagaatactctattcaataataatctctaatttgttataaaaaaatcaagtcccgatttgggccagttataaataagaataacctctaaattgtaattagttatacattttttaagtctcgtattaacaaagtatacctctatataagaataattacatcttaataaaatatatacatgtattttgtaaatttatttatgcaaaattgataattttattttaaattataatatatgtatgaaattatatttattctaaaatatttctattatgatatagtat

SEQ ID NO: 369410 - DNA, 584 bp, Cannabis indica
tatctccataaaactcaaagctttatctaagttaaataaattgcatgtttcgtagatttactactaaggtaaaagagttaattattgagcgcttcgccttggttacatacaataaggagattgagataattgactgcttcagcgttatctgcgggattaatagtttctttggaaactgaaattacattaattaataggaattaggaatggttgttgagggaggcggataacttttaattagtttctcatgtcaaaatctaaatattaatttgtctgttttatttttatttctgctattttaatcttaatctcaaaacccccttttcctaactcttatcattaattgttgaataattgaataaacatagtcctcgtgggttcgacctgtacttacttttatactgaaataattgaaagtattagaaaaaaatagtaaatttgatagggcatacgacacacatcaattgccatttatattatttattaattagacaatgtaaaatttcttaattaacaaatagatctcaaaacctcttttctttacaataagtcattgcttagtgaaaattcataaataagacata

SEQ ID NO: 369411 - DNA, 640 bp, Cannabis indica
taatcttgggatattattaatatgattagggtaaataagagtaatattgattgtttaaaaaaagagtagacttaaattattttttctcagttatattaatgtaatagcgtgatgtgagacaaatatggaattatattaattttattattttacttcaaatgaaattattatacaaatatagctttattgcacttttctggaaaccatatttattctgccgcgagatattcacacgttcacaatgagaaggcaatgttgaaagggttacacaacatgaaggtgcatgtagtagcagaagaataaagaggaaatgggagagaatcgagcaaatactagatttacgaatggagtgacgacagaggtgcggagtgatgtgtctagaatgtccaaaacaaaatgtacgaatacaaaaattctaacattttccgattaatacaatttttatcagcgcaattaagtatatgtgcaaacaaaagtcattttgcagactaaaatgcatttttttcggttagcaaaagtgtattttttatagtaatagacgttaaataagggaaatttacaaaaatactggaatttgggttaacttttataaaaatactgtcacacggaaattttttcaaaaatactttgtttttataaa

SEQ ID NO: 369412 - DNA, 849 bp, Cannabis indica
aacaaaattggttaaaccaagaatttaatttttttttttttttaaaaaaaaaatcacccaataatttctcataaaccaagaattatgttatatggccacattttatatagaatagatatagggtaaatattattttggaccttgtgttgtgtaaaaattaccaattggaacttttgtttcttaaatgacaaaataaaccttatattttccaaaatgataaaaataggaccatgagctcaatttttaacaatttttattttttaatataaccaactttaagacaatctttaacacgaacagatatagaaaatataaccagtttatttataacatctctagatcagattattattaagttttattttgacaaaaaatcagttcagggtcctatatgtacaatttaaaaaaatacatggtctattttgtcatttaacaaaacaaagggttcaattagttataacttttgcaaaacacagggtccaaaataatatttaccttaagatatatgagagcaatctcaacaccacatacagtacaaatgtataataggagaattaccaaatttttttaaaaaaaaagtcttacacgtttgtccatcaaatcaaatctgtactattttgctcatagtgcattcaatctgcactaagtgcgaatttcagattttggatccaatccaatccacacaatagctcaaattcaatccaatctaatccgtaaaagtgcaaattggatcggttattttgaattggttactttttaatattaaattatttaatatttatgaaaaaaaaatatttattttcacataactagcaacaaaataaaacaaattatagttattttatgtct

SEQ ID NO: 369413 - DNA, 650 bp, Cannabis indica
cttagtccctataaataccaagcttgggttgaggagctaacacaacacaaaaaaccaaagttccaaactatcaataaaactttactactttctcaaacaaccatctcttctaagccaaactcatttcttatactaaatcaacaactactcatcaatatcactacttcactacattaccacaacaaaccattaaccacatatccacctattccaaatctaaaccaatacaaatttattatcaaaccatcaatattgaaaaaagtttccaacactacaataaaaaggcttattcccgtcagtttttcaaattggctttttagggaaccgttgctaataaagttaagtgactgtttaaaaccatcgagaatactccactattctcgatgtttttaaacacccgttagagtcctcgactgtataaaacatgcataattttaaaattcaaaaatgagttataacgctatcctaaggacttaaaattgtcgagtatattatagctgacggtcttaagccgtcaacaataatagtataccagacagttttaaactgtgagagatagcgtgttaaacatataaagatccaaaaatattttatttctaaaacattttaaatctcgcactgctatcgtctctctctcctctctctctctc

SEQ ID NO: 369414 - DNA, 607 bp, Cannabis indica
gggtctcccccatggaggaacacattgcccctcccaatattgtgctgactccggttcctggagatgaggcgagataggagctcctgatagctaaacccaactacgccatggacgaatactcccgggggtatgctgaggtggaggccctcaagaggatcttacgagttaagatgcaaaatactctcaacaacccagaataccagaatctgcgggatcttaatttggatcccctgtcggactggttcggccgtttcctcgggcccacattagctccctttaccgtggagatgactggcgagttcgcgtcccagcttacccggtgtgcacctaggcggttcgctgcttgtgcatccttgaactccatcttccaagtctaggatctcagccactccctcactgtggtaagtattttgtagtttacttttctccttattattattttctttttggagattcttacttatacttgtatcttttcccagattgctgctgaggccggccgcctttccaagaacataatcaaccatggcttcgtcctgtccgattttggggacatggatgaagttaggaagattcttcaggtatcttactgctgagaggcggcttt

SEQ ID NO: 369415 - DNA, 867 bp, Cannabis indica
ttcaactttaatctaatttttaagataaataaataaaattttgaaatatctacatttaaaattaaatatatttcgaaatatatgtaacaaaaattatcaaaataaaataaaaaatattttaaaaattattttaatttgagttgatttaaaattgaaaaaattctaacttaaatgtaattttctattttattaaatgtattaaaatagaaataaataattaaatatctttaataaaattaacttaattattaattctagtttaatatctaaaaaatattctaatttaatgtggtccaaaatttaaaaattaattttcaacttaaatatatttttctatttaattaaatattaaataaaatataaattaattactagaaatgtcttatctagaatttattttattaacctaagtgtattttttctaaattaattttaaaataatctaataaaaaattaatttcatttattttagaattaattatgttgctaatcaatttttaattagtttaaactaatataattagcctaaaataattatataaataagggaaatgggccttcacaattggggtagttcatgtgagggggactgagttcagtatatcgtacccactcctatggccccctaactctcacacaaggcccaaaagagagaaatttaacctttaattaaataattattattaattgaataagccaaatactaattaggcataaataaaagggtaaattgcggtataaatacctaatgtttcagattttatacactcaaatacctagtgtttatttttaaaggcaaaaatacctaatgttacaattctcttacaccgttactaccacttccgttaacttatcataatatagaca

SEQ ID NO: 369416 - DNA, 507 bp, Cannabis indica
aaactaaaataaaatattatcctgattctaccgaaattttggctacaacggctataattgaacatttccaaaaaattcaaacctattaataacaacaaaatacaattcaaaacaatataaaataattacaacaacatttagcaatcttaaaatttaccacccatttgactgcagtacatgtgttcaaagaacctacttcactacagatgaatatttaagatattcaaactctactaagcattcatacttaatttataataaaagttagtaaatgtatacctcgagctagctagaaaccgatcaacaccaaataagtcggatccctgcaaattgatctcacagccaacagcaacaaaaaaaaaaactataaaattacaaatttctttatttagctacttactagttatataatttatgagtaactagttactaactagttactaatgagtaactagttagtaataaaaatacatgaatatgaataaaaattagtaacttactaagtag

SEQ ID NO: 369417 - DNA, 1057 bp, Cannabis indica
caccattcttgggaactgctgcatctacattgagcttgagagtgccgggggctgggggaatccaagatgcagggacagtggccaaactgggtcggcctaggagagatgtggctgacgaggttgtgttataatctgccaaaaaactttgagccagactgacaattgcatgaggttgatcagatggttgacctttgagagctttattcctattaaaccaaataaaccaagcgatacacagaaaaagatctacatcttccttgggaaaagatgtataaatttggtgagctaaatcatgaaacaaaatttcaaaagagcaggaaaaaatgtaaggttgaaattgcgtacctttccagactcttcggacactctgacagtagaacagcgcatgagacaccgattcttcatggtttccacaacggctacaacccggggattggatgattttcctaaaggctaggttttttgcagtggggagggtttggtttgtggctcggaaagcaaagtgtttcaccttggcaggaatcgaaagatgccaaaggattttccaccaaggcgagggagaggaggaagagggaatgtcaagtgggctagtagaagaaaaactgaggtgatagcctgatttgactgtgtaaatcccagaagttgaaggttcccagatcagatcatcctgggttggggtaagggggagaggaatagaaaggataatttgggccacatgggggggaaaacaacgctgaatctcagctgtatcccaggataaagagggggtgatgagagaggcaactctgtcagggacaggggataatggggaaatttgtcgacaacccggaatccaataatctgtggtggtgcaagtgttctgtccattgccaattttggagatgaggcctttgcggagcagctcttttccccagcaaatgctacgccaaacgaaagacggagaatgccccgtggagctactaaggaaagaagactgagggtagtatcgggcagataaaattctggacacagtggagtttggttgctttaggatgcgccaggcttgtttggcaagcat

SEQ ID NO: 369418 - DNA, 621 bp, Cannabis indica
tcggtcttgaagctagtgcattcttgattcgcaacatgcatcttgatctggttgtagccgtcataggcgtccatgaaggacaatagcttgaattcggaggtggcgttcaccatttggtcgatccgtggtaggaggaagcaatcttttgggcaggccttgtttagatcagtaaaatctatacatacccgcaatgtcccatttagtttaggcaccaggaccggtttggccaaccattctagagaatacacatcccggatcatgccactagttagtagtttgtccacctctttctccagggcttctgccttcactgggtcgagaggacgtcgcttctgctgaactggtggtatatccgggttaacgttgaggacatgggtatgacatgcggacttatgccagtcatgtctccttggcaccacgaaaaaatatctgtggctgcccttagtgcttaaattaatttttctttttcctccggctctagtcttgttttattttcttttgcttatgtgcaaagacttcatgccttttgactttatgtgttggatgttatttttttttctttgtttgttttgttggatgttattttttttttctcttctttcttagttttgttggatttta

SEQ ID NO: 369419 - DNA, 301 bp, Cannabis indica
gtaaaataatttccaacattcccctactggggtgtgtatacgcctcctccatatcagtgcaagaatacattgacggtgtctcggtggtaatccacttgtcctaggttgagccccaggatttgtctcgttagcacgagggatcttctggtcgctatttctgggtggccttgcattctcgtttctacgagaagactctggtaagtcatttttttcattcccttgggttgtgaatccccggggtctccgaggcacttcttgatgaggtgcctgattatttggttgttcatcttctgaaacatcc

SEQ ID NO: 369420 - DNA, 784 bp, Cannabis indica
ctaggtcgaggttcgagttcaggatctgggttctggtctgggtcccagtcctaggtctgggtccgggtcttggtcccaagtctgggtttaggttcgagctctaggtttgggtcccagttcacgtcttggtccgggtcttggttctaggtctcaggtctagggtccaggtcagggtcccaggtcttgggtctcgagtccggatatgggtctgggtccaggtttttgtcttgtgttccagttcaggtccgggttcaagttcgggtctcgggtctcatccgagtcccaagttcaggttcaagtctgagtctcaggtccaggtctcgagtctcgatttgggtcctgatctgggtcgcgatccgggtcttaggtcccaagtcagggtcacgggtcccgagtctcgggtgtgggtcttgggctgggtccgggtatgggtccaagtctgggtccaagttcgggtctcgagttccgtccgagtcctgggtcctggtttgggttcgagtcccgagtctaggttcgggttccaagtttgggtttggtcttggtctaggtttgggttcgggtctgggtccgggtcccggtcccgttcctaagttcgggtacgggtctaggtcatgatccgggtcccttgtttgggtttggatccaagtccatgtttgggtcccgtgtcccgtccgagttctgggtacaagtctgggtcacgagtctgagtttgggtcccaggtctgtggtctgagtctgtttgggtcttagatcccaatctgggtcccgagtcccggtctgggtc

SEQ ID NO: 369421 - DNA, 567 bp, Cannabis indica
aaaatagtcgatccaatttaatctacacgattcaatccgccaaatacagatttcgacacttgtgggcattggattggattaaaaaatttaaaattcatacttgtgtagattgaatgttgattgacatgtaaaaataatcgatccaatccactttaatccacacgtaaagaaaatagtaatttaaaagtctaatacatataatacaattatatttcaaaacttaattaatagatcaaatgtatattctatttttatatatatttttttctacatacaatttaaaataaaattaaatatttctttatacatacaatttttttttaatttgaatttattatttgttattttatttattttaatttattgttggagacacaaaataacaataatttattttattttgttgctagttatgtgattttttttcataaataataatttaatattaaaaagtaaccaatccaatctgcacttttctagattggatttgattagatgagctattgtaaagattggatttgatccaatacattaaatccacacttagtgcggatcgtatgcactatg

SEQ ID NO: 369422 - DNA, 386 bp, Cannabis indica
cctaaactttatagtgtttatttctatcgttttagaaagttcatatttagggtgttaatcaacatacttgtgagtagatctaagatcctggtaaaattaatttccaacacatgatatatatatgtgtatgtcttaagtgaagtagtaataggttaatggtaataagttgaagaggggatagctccacattgtgctcctctccaatcttgagtttgcattgcattgttggtgattcttggattcaaatggctcacatggatgactcaatggaaggtatgtgtgtatttgtttggatgttctaaataaagtattgatattggttttatgattatgagcaatgatgattaatgttgaatgtgtgtatggatagctcataatctatgtga

SEQ ID NO: 369423 - DNA, 687 bp, Cannabis indica
catatggtctccccaccgggtcgagggcatcctaaacctataaagacgctcatcgaaccctacgggcctaagactggcatattcgccaacagaagggacgtaatgtactgctaaaaaagacttaccggagccggaagtgctggcaccaggagccccagtgttcggctcctgagccgaaagctttggtctgggagcctttctctccgccgagtccccaatatgaaggggcttcccaacgatcttctggcttctcctctcgaccgggttccctacacgaagtggcctcccagaaggtgcttgagccttggagtaagctttctcctgagccttccggtagagacaatcctggtacttcttctcggcagtggcgatgatctcgtcccggaagatcttctccacggcaggcgccctcacattggaacagataaccctggaaaggttagagtcctccacagattggtgcggcaggatgagcttggccttctggcaattctccgtcgtaaccaggccctcgacgtcgaggtccgcccggtcataagtggcgaaggcctgggcattccgaagaaagacctgagtaggcgtggtctgctcataaggggggaatcctaacctactccgttaggagctccagattttccaccgctcggaacccgaaagagaagaaaaaacgatggcgatactccttaa

SEQ ID NO: 369424 - DNA, 628 bp, Cannabis indica
gtgactctttgacgtgggataaccatcggtctgggagacaccatgtcaaatcagctctagataaaggccttgtgaatggcgcctggatgagtttatttccaaaggctattctttacactgttcaaactattaactcggaccacagacctctctgccttcactctgacggtatggagtcaaagtttaaacgaagctttaaatttgaagaaggatggacccgtgatgctagaagtaatctggtggttgcccatgcttggaattcgatcacccaccattgggctcctgctagaatattcaagaaagttggtgccacccgggtggccctcctcaattggaatagatcccagtttgggaaattggatgtgaccattaaagctcttgaacagaaactctattccctccaaagtctccctgctggctcccgggattggaaccaggagcgagaagttcgtcgagagttgaatgaatctctcgaaagaaaggccatctactggaggcaacgagccagagtttcttggctcaaggaaggtgacaaatgttcaaagtttttcttcctatcggcggctattaaaggaagaagaaacgcaattgatagtattttaaacaaagataatgtctggatctctgg

SEQ ID NO: 369425 - DNA, 518 bp, Cannabis indica
tagctctgccctgctgtgcagaccgaacctgtacttgcagtgaactagatggaatccttgtatgaaaggttctgaaagcaggcacctccagtttttctgggaggtcccgatgtcatgaaagccgagcaatggctaacagtgatcaccagaatcttgaactttataggcgtcaccggcaatgatagggtggcctgtgccactttccaatttcaagaagacactctagtttggtggcacatggtgtccttgactcaagatgtaactacaatgacctaggaaaagttgcaggaactattcaatgccaagtattataacgaggcagtcagaagtgctaaaagaaaagaattcactcagctgactcagaaagaaaacatgagggttactaaatacacgacttagtttgatcgcttggcaagattggctacaggaatcgtgccaaccgattttagcaagaaagagaaatacctggatgggttgaatgcgaagatcagatacgacttaatgatcactactaatga

SEQ ID NO: 369426 - DNA, 649 bp, Cannabis indica
accgcaccgcaaaaaatggtgtgatgcgatacagtttttgcgatttgaattattactaataattaagctatcacaaatacagcaaaacttgagcaacacttgtcaaaaataccataagacttaaaaatatatatataaaaaaaataaatttcaataattgtaaattaaaaaatgtaatatttactaatataatttattggatttaaatattaaaatatttttattattttaataaaataatagaataataaagaatataatatttggtgtaatttttagtgttggggttagaattgagaaaagatttggtgttgaaatagtcatcattatgtctttctctcctcctcttttttgattatgtctttccctctcttcatgctcttactattcagatgtcaatcggtttaattgttgcaatctttatttatattcatggaaccacacctcatataaaacattaataatggaaaaaaaatgagaaaattatcttgggttttgaaattgtggtattattctttaagttcccaagtaagattcggttagttagttagtctttaactaatttaattgtcaaaaaagaccgtaagtattattggctcctttaccctatataaagagaactacttatctcattcacaagatatgaaac

SEQ ID NO: 369427 - DNA, 540 bp, Cannabis indica
atttaaatagttttactacctggccataattatagctgaatttattgtgtgaatgcactatttattgtatctttatgactgaaatattcttggtttcagctttgattttagccatttacgcatcttgtttattgattttttgcatggcctttaactatttccttttgtatcctttatataatcttttgattaataattttattatacaccgtatattaattttatttaataattatataaataccatttatatatatatttttgttaaaataatttacattaattttttagtaaaatattttatttatatgtaattataattatatacactaatagttattttgagattttaattttttaattttaatagtgtatctaattttaattaatagtttttattatattatattatagagtttaatagtgatatttaggattgatgacgagtgattttttgcaccatttttttgatggttctcatgctttttatggatgtttgtgtcatttttatggtttgcccctaattatttaaggtatatt

SEQ ID NO: 369428 - DNA, 590 bp, Cannabis indica
gagaagaagatggcgtgcagcatccagtctactacatcagtaaaagactcgtcgaggccgaaggccgatatccgttgatagaaaagctcccctactgcctcatcttagcaacaagaaatctaacgccttattttcaaactcatcctgttcgggtgtacaccgaccaaccactacggcaaatactgcaaaagtcggatgcctctgggcgattactcaaatgggcggtggaattggggcagtacgaaatcaatttccaaccctgaacagctatcaaaggccaagctttggctgactttatggtggaatgcacaggaaaaactgaaagtatcccagaaggcgatcccaaggcaacaacacagccgaccagcactgaaagcaagccaacctggaagcttcacgtggatggatcgcccacagatcagctatccgatgcaggaattgcccttgtcacacctggggggcaacacctgcatgcagcggtcaaattcagattcaaagcctccaacaatgaggccgaatatgaagccctaatcgctggactcaaaatagcgaaggaaatgaaagccgagcacatcgagatctgcaatgac

SEQ ID NO: 369429 - DNA, 761 bp, Cannabis indica
actgaatacacaccacaaaaagtgaacatcatcacatcttctaaggttccataataattgaatccttctgttcccgccacggagacaccgctattttgagtagtacgcttcttatcacgttcagctaccatgtaacgaacaccattcactacaaccccttcataatatgttactaagtgatctgacccacatgctaaagctagcaactcttcaccattctccaatgatccaagcttgtgtaaatcatatatctaaatgaacaaaattatcttagaatgactcataattaatcatgatcattttcaaatcataattgaatcactcatatcaccttcttatgaaaccatcgctggaaattttttttgtgtaaaatgttatgatctccatctgggtactgaagttttatctcttctaagtgttcactgtaagtcatataacatcactatgttaaatgttaaataagactatgtagaataagaccaaatatagattaataaaggaaaaaacttactctaaatatggtctgatttcaggtgaattgtcaaagatgaaccactcagccttttcacgagtctttctgtctagaggcatgatatttgctcttgttaagggacgacattgtgattggaagacggtaagaattctaggaatcacttcatcttcgttgcgatcaagtcggttaaatttggtttctacccccttaaaatacatagagcaaaatgtcaatgcctcatctgcaacatagctttcagctattgacc

SEQ ID NO: 369430 - DNA, 1236 bp, Cannabis indica
aaacgcataagtccacacacatgatcaccgatacccgaagtacatttttgctaaagaaaacagaggacttagcaaaatttacctgctgacccgaagcaagctcataattatgtaaaagccgcaacacactctgagcttcattctcattggccttacagaacacatagttgtcatccgcaagtagcatatgagccaccataggagtgccccgtgcaactcgacaaccagtcaaccaatgatgcctctcataatgctttaacaacaatgagagaccctccacacaaataaaaaacaaataaggagacagtggatctccttgacgcaaccctctgcttggattaataggccccatagaatgacctccatgagttacattatacgaaaccgtagtcacacagaacataatcaaatgaacccaatgttagtcaaaacccatacggatcaacatgttctcgataaaaatccactcaactcggtcgtatgctttactcatgtcaagtttaatcgccataaacccctccttccctactcgcttctgcttcagataatgcataatctcaaaagcaacaataatgttatccgaaattaatcggcccagtagaaaagcactttgatgatttgagatcaccacaggcaggacctctttaaaccgatttgccaacactttcgaaatgatcttataaagcacattacatagagatatagggcgcagatcagtcatagactccggatgttttttcttaggaataagcacaatgttggtatgatttaactctcttggaaaagaaccaaccacgaaaaaaattcttaacaagattgataatatcattacctacagtgctccaacatttttgataaaaacccggtgtcatcccatcaggacccggcaattttttcggatgcatttggaaaagagcacgacgaacctcatcatctgaaaccggctccaacaactgattgttgtgttctctggtgacagccgtaggaacacactgaataacctcttgatcagacacggctgaagctgtaaacaaagctgaaaaatactccaccatgaccgaaggaagccagcctttccaatcaacccaaacaccaacagaatcttttagcttttggatcgaatttcagcgtctcctagtagtagccgaagcatgaaaatatttagaattactatccccttcacccaaccaaagttgcttgcttcgctgcttctaaaaaatctcacgctgtagcaac

SEQ ID NO: 369431 - DNA, 681 bp, Cannabis indica
ttataagcgagttataacttttgattttcctttcccgtcagaaaggttttaaatcaaaaattatagttgtttgatcccttcttcgtcaaaaaagtttgatcaagatgttataacaattcgacccctctttcgtcaaaaaggtttggtcagggagttataagagttcaactctactttcgtcaaagaggtttagtcgagaacctttgaatttcaaaaagatttttgaaatggcaggtttacattgaaccatgtatttcgagatgaattctggttaaacatacataaatgcaccttaagtaattttttaaagaataattctttgtaattacttaatataaatgattctctttattcataactgaagtttaaagtctacatcagtaatgcgagttacataatttatttattggtagtagggtcacaaatgttccaacttccagtggttctttatttgcgagccatcgagtcgagccaatttataaactctaactccaactactgcttcgatgacatatggaccctcccaattcgtgttgaacactcgtgcagatgcatctctcgtatttgcaaagactcgtaatagcaccaagtctccaatgttgaatattcttttcttgactttttagttgaagtatcttgtaactcggtgttgatatgctgcattggtgatttgcgactcag

SEQ ID NO: 369432 - DNA, 565 bp, Cannabis indica
attcatacatagaagtacatttttaacctcttactattgttttgagggatatcttgttgtgacatattatcttatagattaagtcatcaacatagcaatctgatactaatgtaaaaatacttgcttaagattaagtaatcattagagataccataaaacttttcatgaggattaggaatttttgcctaagtcattcgaatagactatgcaaaaattctactatcttattctcaaagttttgacaagttatttctatccatatgaatggttagatttactttctcagttgaaatctaaagttctatcacaagtgtcatccaaatgaagatgggcttagaattttaaaattctcccacacaaataaggtactatgattatgtgtacaagaacttttattggtatcaatttctattactacagtaatatattaattggaacataaactaagaccaagaaaatgttctaaataatttgctaatttattatattacatccatgtttaattaaaatatgtgtgccatagagatactgaggataatctagagttcaaaatgaactacatttg

SEQ ID NO: 369433 - DNA, 619 bp, Cannabis indica
ggggcctattttttaaaattagaacagggcctccaaaatatttgagacggccctggttttaaataaagtatgtattattgtaagttatttatttaaattaagtttattattaattttaaatcacttggcttatggaccccgattaacaaaattagtatattgtaatcacgacacgtagcgttcctttgagtaggacgttacattaatgatgactacaagtgagatacgatgataacatcaactttaaatgtagtagtgactacaaataaaaaatggtgatgacaattattttgaaggtatttttttacgtgctctcttttttatatacgaaattatataataattttttagaattctctatatagatttcttatttttttagtaaatatttttttaaaaaaaattatacataaaaatatgtttgaaattatttgatataattttattactcaattaatatttatatatttaatctaatttttctataaaccactacaaaaaaatcttacttttagtcacaacaaaatttgtgactaaagataaaaaaagttatggctaattataaattatcattattgtgttgtgattaaaaggtctgtagctaaaagtattagtcaca

SEQ ID NO: 369434 - DNA, 695 bp, Cannabis indica
gtatacattgaccaaccattacgccaagtattgcaaaaaccagacgcctctagacggttgctcaaatgggtagtggagttgggccagtacgaaattatctttcaacccaaacagcaattaaaggtcaaggtcagattttgagttgaatgtacgggtaaagaagaaagaatttcagaaaacaaccaagagccaatagaagtacctcagccgagcaatagtgaagacaagccgacttggaagctacatgtggacgggtcggctacatatcaactgtccggtgcaagaatcgcccttgtcacacctgggggaaacacctacacgctgcggtcaaatttggatttaaagcatccaataatgaagctgaatatgaagctctaatcggcgacctaaagctagctcgagaaattaaagctgaacacattgagatctgcagtgactcacagttggtggtaaatcatgtatccggagagtacgaggctcgaagggaaaagatgatagcatatctgagcaaaatacatgatctgctggcacaattcaaaagctatgctctcaggcaaattctaagggaagaaaacacaactgttgatgtattagctcgactggcaagctgcaacgtcaataataaatctaatttgattcctatcaagtttctcgaaaaacctagtatcacctgcacagaagaggttgaaatgatt

SEQ ID NO: 369435 - DNA, 503 bp, Cannabis indica
acctatgactggtacttatcataagtaactaatgcccgtacttatgcccagtacgtttttaggaaaatcgcatcacctaatcaggtgagcctgtacctacgctcggtactcattaaatatcactaatgctcgtacttacgcccactacgtcactaggaaaatcgcatcacctaatgaggtgagctcgtacctacgctcagtactcatcatatatgattgacgctcgtacttacgcctagtacgtcaccaggaaattgcatcagctaatcaagtgagctcgtacttacgcccagtacgttgccaggaaatgacatcacctaatcatgtgagcctatatatcacatgcataatatcatcacattattgatattcaaccaatcaatcttttcattatataacaatattagctatatctcaacattaatcaattcattgcaatactaattgtattacatataacgtactatgaagtacaatatacttttcttacctttaatccaggt

SEQ ID NO: 369436 - DNA, 533 bp, Cannabis indica
tgattttttaattttttttaatatttataattattttttaaaattaatattacgtgtaccactaaaaaaattgccacgtgtacaagtgtgtacacgtggacaatccaccgtggtacttaactgtgatttttggacggaggtgtgcagatcaaaatggaaccagggtttaggtagtttagctgccaaaatttcagtttttgtggttaagagttacaaaccgtaaaattcaggtagtttagccgccaatatcccaagcttttattactctctaaatgactttgttacaaagatttttcaaccctcattcaaatctaaaatatagggtatttataagctctaattacttgagatatattccaagggaacaagtagaacattgtactcttgcatgtcacaaattgtaggaggtagtagttgcaatatgccccttgtaggaggtagtagttgcaaagtttaccagtatcggatgtatggagtatagattagaagggaccgatattgaactttgattagatatgttaaaatttaccgta

SEQ ID NO: 369437 - DNA, 524 bp, Cannabis indica
gacatcactagaaattcataaatgcccgtaccgtgttcgtaaatatcgtctttgctatatcttcctctcgcacattggtggtaaccagatctcaagtcgatctttgagaagacgatcaccccttgtaactgatcaaacaagtcatcgatgtgaggcaagagatatttgttctttatagtcactttgtttagctctcagtagtctatagacatccgcatactattgtccttcttgacaaacaacactggcgcaccccaagttgagttatttagtctgataaacactttgtttaaaagatcttgtagttgagccttcaattccttcaattcattaggagccatacagtatggagccctcgagattggtgcagtgcctggtgccaacttaatcacaaaatctatctctctatctgggggtagccctggtaggtcttcaagaaaaacttcttgaaattcacatactatgtggacattctctgtgagggggatttctcttgacttgtctactatgctggtcaagtatgc

SEQ ID NO: 369438 - DNA, 562 bp, Cannabis indica
aaattgagtcattagctgctgtggttattgttggtgtatgaattgtgtttctggagttagagtatagttttatatgttgaatcaagcatgatttaatgattgttattaggtttaatcaagttttgagttttaaaactcaaacttggagctttaatggtgtttttcaattctgagcttaggtagtcgttttactgcttggaaaatatttattggggtataatatgcaggtctggaaagtttgataaggtttagaaatgatttggttagggtttgaatttgtttagtttttctggggaaaaccagctaaccggttttacaggtgcctgtaaaactgggtaaccgatttttgcagcaggattcccgaaaattcaacttgtcgtttcgtgttagtttcaggtttctagctggttaattccctgctagtttagggtattgccatattgagttacagtagacaggtttttggtttaaaacctaagtcccagttgtgatttagcgagtcacttatccatgttgttatcgatgtgatttaggagcctataattcgccgagcagttgttcc

SEQ ID NO: 369439 - DNA, 505 bp, Cannabis indica
ggattaggattccataagcattttggttagcgtgcctaattattttgggcgttacactaaatctctcaaaaaatgggaaaaactagggttccaaaaactcccccaaccgccagaccggttcccaactggaattccggttctgggtcaccaaccggtcgaccggttgccacaggtcccccagaaccggaattccggttctgtgctgggaaccaaaaaaattctccccttgacctcaaaatccaaccaaactctaccaaactttccagtatacctgtacaatgtatttacaacataattcaaccagaaaatcacaatacaaaccactaaatcaaaggatgccattaaagcccaaaccttgagcttcaaagctcaagcttgctcaataccctcacacagctcaaatctaataaccagagctcaaaatcaactcaaaataaacttagaattcaaaccctaagcaaacctaaacctaacagccactatttcacaacttcataacctcaaa

SEQ ID NO: 369440 - DNA, 801 bp, Cannabis indica
gcttttttaacgaaatttttttattattattattagtttaattcaaaacacatatatcacttatgttttagtttacaagtaaaaaaaaaaaagttaatataactatatattggacactaaataaattaagaaaataaaaaaaaaacaaaatagaagaatatgaatggtttgtatttaaatttataataattagtttgaaacgaaaaaattgtttaattaaataaagtaaatagatataaatagaaaaatataattataaaaaaactaaaaaaaattgacgaactaaacggataaaaataaaaaatatatatataataataatattatgataattgtagaggtcaaaattgggcccatgttcaatatcacatgcgatgtttccaaataatgctcaaataaaattgggttggactatttgactaattatgatggtacggtcacaacactaaacccaacaggcccaaaacaaaacagtcaagtcagacattaacattaccatgacccgtcattgagctcacaatgatccgacccaaatacgagaccgagtcttatcactcatctaacagccttcgaagtggtcagtcaaactaaccccgcaaataacgatctccctaatcaagtggggaagagcgcttctaaaggagggtgggcggtcatgagtaacgtccttccaaggacgcctataagagtcactctcagttactgagagaggcacatcaaatttcagtcatctcaatacttcttacttatcgttcaatctcattctctctaaaaaaaatacatacttatttctacagtcaa

SEQ ID NO: 369441 - DNA, 800 bp, Cannabis indica
taatgcgaggcgttgtgtgttgctacatgtaatctgctcgtgtaggagagtatcctcttcttgtgtatgtaaatgagtttatcccaagacagatatatgtctcgtcaataccagtttaatagttattattgttgtctcgtataagactaagcagccaacgagtttgaatattatctatcaaacttatatttaattgggacgaattatttaaattgcatttaatgatacatcattattatattatcagagttgattcacattcattctgtaggacacgtgtcagcttctggtgcatagacgaattttgggtataacagtactatacatgtgttattaattgtttgaaatatgttaaattattttaaatattttcaaattttacataatcttttaaataattataatgttaaatatcatgtaaagaaaaattaaaatttaaaactatctggatgatattaaaatacaaaagataaaaatgaatatgcaacccaaatattttaatcaatagtattactatgtatataaatataaatcatcatgaatgtacatctattctcaccaactactataccaatccttttcatttgtaaaagttcaaattcaatcactagtaaattaacaatttaacactataggtatatatatatgggtattaccatgtatgggtattttattcttcaccattggatcaaatatataatggttgatatttataatcattaattaaatattaaaaaattaatatttcctattttgttattttctatattcttaaaatagataaaactattaatagaaat

SEQ ID NO: 369442 - DNA, 620 bp, Cannabis indica
attaaaactaagcagtctttacagtgatggtcgactcttgatggtttagagaagaagaaagaagaagaaataagaagaaaaaaaagaaaaatgatgtgactaattaaaatatgtgatgtgtatacttgtgtacactaacagtacatgttggtatttaacattactattttaatggaagtgtaaatatcataacatatgtgaggtttggtaggtttttaccaccataaaaatcagtttgtggggttgagtgttacaaattgtattttttagagagttttttttgcaaatattttttaagtaaaaatactaacgttttaaaatattgtatattcactacctaaataatttaaaaatagttaattaaaatatatattttatgttaaaaaatcctataaattattgaaaaatataaaagtaatatctaaactaaataataaaattaaagaaatatttatttgatagaaatatattatttttaatttaaaaaaatgaataaataaaacaaattcatttactatttttttgtattttaagactaatttaattttatatattttttcaataattttaatgatttatataagttaaaatatttcttttttattattttttaaaaatta

SEQ ID NO: 369443 - DNA, 554 bp, Cannabis indica
ctctttgtaatgagaacttttctaacaatctaaaagtcatttcgatggcatattcttctttctaaaagacttgccattgaggtcatacaatcaaaagaaattatccatgggggagagcatcaatcaagatcaggagaagaaaaacaagtggtaagagattcaagccatccatgagtaaacatggtgaatttattttgtgatatactatttatttaatagtaatatattaacatatacatatgatgagataagatgttttggtataaatattttaaatgttaatattttacataaattacataagttctttttaaatatttttataacttactaccattaaaaaaatgctaattttaatttttgttctctgaactttaacatgtactaaattatgtcttctaaatttttcttgaactattgagattgtcggatttaaggacttttatccaatttcattcaattttactaagtatgtgattgtccatacactaattaaataatactccacaaactttaatatctactaaatcacgtgcctcgaattttgacatgta

SEQ ID NO: 369444 - DNA, 686 bp, Cannabis indica
ccgttggttttgtggtactaaatcaggtacatagtggaaatataatttctgattatcatcgtatcacatcctaaatatcagcatatgcatgtatattaaatttgaaataaatagataaaaataaaatttacttattaaagtttattagagtatcctggatttttttttcgtaagttgtatcctcggatgatgatgaagaactcacactgtagtctttccaaatcttcctccacacacaaagattagtgtgactaataggatatactgtatgttcttggtttatcctaacacatgagcaagaactatgagagtgatgatgatagaaaaaagttttaatcagaataatcttttttaggcttcccaaaattatatgtatatgtttttaagtttatatggtatatataaattaaaaccaataaatatttgaattcaaaataataaattaaattatatttaattatttaaaaataccttaattctaaaataatatacctgaaacgaaattaatcccgaattcctgtattatttttgtgggtttttaaaagtaacattttggttacttattacttatgatgccggtaagaaattaattagctacttttacgtaaaaaaagttatttttaaattatataatttaatatacaatttggttacctctaaaaccttatttgtaaacatcttaataa

SEQ ID NO: 369445 - DNA, 538 bp, Cannabis indica
tttttcttttaattaaatagtactttatgtcaatatgctttgagcgagaagtacttctagtgttcttagagaaagctactgctgcagaattatcacaatataatttcagcggtctcgcgataaaggctacaacatctagtgctgaaatgaaattctgcaaattgcttaataagtagcctcataacacgccatatactctgcctccattgtggatgaagttgtgagtgtttgcttgatactttcccacgatacaactcctccaaccatcatataaatgtagcctgaagtggacccttttatcgtccacgcatcccacataatcgtcgtcattgaatccaactatatccagagtttcagctcgccgataggtcaacatatgatccttggtaccctgaagatactacatgaccttcttagccgctttccaatggctaagtccgggatcactcaagtacctacccaacacgccaacaacaacaacaatatcagggcgtgtgcatacttgagcatacataaggctaccaaacagtgacgcata

SEQ ID NO: 369446 - DNA, 587 bp, Cannabis indica
gagacttaggatccaggactcgatgctggactcgacccgtacccatgactgaaagtagaaccaaacaagaagcgggtcgagacccatgaacaggaccaggacctggacccaaacccataactataactggaccagggcgcggactcagacatagacccacactcggattctgtgtctgggttcgggttttggtctgggtctaggtcggggtttgagtccttgttcgagtctaggtctaggtctgggtcaaggtgtggatcccgatttgggtttgagttcggtccaggttcgagttctggtccctggtacgggtccaggtttgggtttgggtctggatctaggtcctgatctaggtcccaagttttgatcttggtctgggtctgggtgtgagtcaaggttcataccttgatccctacttaggtccgagtctttgtttgggattaggtcccatatttaggtctaatccaattctcggttccgatctgggtacacgaccatgtctaagcctgagtttcggtctcggtttgggtcttgggcttggtccgagttcggttctaggtatgggtctgggtcctggtcagggtcct

SEQ ID NO: 369447 - DNA, 775 bp, Cannabis indica
acaaaacacaaggtccaatctataacttttgcaaaacacagggtacaaaatggtatttacccaaataaaaatgactttgaccaatcagagactgtcatgtagtcataaactgaacacttaacgactaagtatttatagaagtttcagaaatataacttatgtattattaccgtcaaaaattaaatttaaatatttatgtcgtaaattactctaataataatatatttggaccattgctaaatatattgggcaagaagatagtctttagatgcggtaggtgaatacaatctattcgatggggagagacttttggcaaatctcctctagtaatgatttcagcttgtatttcgaaaagtttctcaatttgaggaacaaaattgatttgcagactctgttagtgactgaaaactctgataatttcaaggtgaaaaggttctatctgaatcatatatcacatgcagtaacttaccataaattactatggtatagactcactgttcctaaacatcgatttatcttatggcaagctattaacaattttcttctcactcgtgttaattttgctgagctcttgagtttggatgcctatctttgcctgatttgtgctttgaattattaggttactactgtgcagtgtgtattgttcaatggtgttttgtaatgaaaagttttcttttgtcttcaaataataataataataataataataataataataataataataataataagagatattggcggctaaaccacttgaactttacggtttgta

SEQ ID NO: 369448 - DNA, 627 bp, Cannabis indica
aacaagaacaagctgaaagaaagtctaaaagagaaaacagaaagataacaaaagaggattgatgaagaaagagcaatctcattttaatcagtgttaaagatacaaggttatatagtgaacagattagagaagagtcaacagttggttacaacagaaaacaatctaacagaatggattgtaacaaactaactgaaacaacctgtcactaactgatataactgaataccattaacactctcttactatagaacacttattttaaggtaatttttgcctattctttctctatgatgacttgggttgattctccaaaaattctgcatcccctcaaatcaaggatcacgtactcgtgacctccctagtaagtaatcttgtattgccgctatcactaacagaattctatctaaccattaacatagtgaagtcacactgagtgattctcccacaccgcacatagcctattattttagcttctgaacctttgattctgatattattggccccgttcacccgacttgttgggctgctgtgacagtcagtagtcccgtgatccgtaaggggaaatatcgggtaagctgtgcaatcctacaccgcctggggaaggtcaagtgggatgattctgaggct

SEQ ID NO: 369449 - DNA, 562 bp, Cannabis indica
tgcatagtctgagtcaacatagcctgagacatcaacttttgttttgtagcttttactgtaggtgaggcctagattaagtgtgcctttgatgtatctcataatccacttaagagcatctcagtgcttctctccagggtctgcaatggacctactaacaatgctcattgcatatgctatgtctggccttgtacagaccataacatgcatcaaacttccaacctcactagcataggaaactgagtccatgagctctctaccctgttctatcttgggtgcttgatctttagacagtttgaaatgtgttgctatgggagttgacacaggttttgagctattcattttgcacttatgcagtacctttctaaggtagtttccttgtgtcaaggttagagacttaggtctatttctacttactttaatgcctaggattttcttagcttcacctaagtctttcatctcaaattctgtgttcaagagtgacttcatttctccaatttcactgttgctttttgttgggttttatgccctaaataaaactccatttcaatgtaatctattttat

SEQ ID NO: 369450 - DNA, 881 bp, Cannabis indica
agggattttagtcatattttggttggaaaataagtagaagccggcaagctcagttttacaaggcagaacttaattacaaatttagacaatcttagaagtagacctggacttagagctcaacataaaagctttagatctcgttcttagctttccaaaaaatcttgaatcgtctaattccgagtaacatatcaatagttatggcaaaaatactattggtcgtcgtagtagaaaatttctgaaaaacaaaaaagcaaaaagatagcaaaaaaaaaaaaaaaacgaataacaaattaaagaaaaaggggtagaaaagaaataaaaaaatactactaacttcctaaagataattccaaaaagaaagaaaaaaagaaaaagactacaatccaaatgaaccttgctatattaatataagagaaaataaaaaaaaagactaccacaaactagctcaagagagacaagagtagtaaagtgtagtatatattatttttatgattcactactctttcttcttcttgttttatttgttgttgttattgttattatcagcaccaatatcattatgatcatcaccaccgccaccagtactacctgctgaccagtcaaacaggttaaaagggtccaaacccttgcttattaacatgcccttatgtgtatgatcatgatgatcagccgagttaaagctttgactaaacaaaaggtttaaagggtcagcttcaatctctcctaaatcagcaaagaaatcctgatcaacagccgacgatgtaaggtttggtccaggcatggttggcctataaggaaatagccctcccacagcttctacaccgttatcatgatcatgatcacatgaactatcatccacttgatcatgatcattattcttc

SEQ ID NO: 369451 - DNA, 604 bp, Cannabis indica
gtatgattaaccgaaattgatctagaaatacataatacaatgcaaacccatagtttacaaaaaaacaataaaattttttgaaaacttttttttagggttctcgaccaaacctttttgacggaagaggagtcgaactgttataactccctgaccaaacctttcgacaaaaaaggggttgaatcattataacaccttgatcaaacctttctgacgagaaagggatcaaacaattgtaatttttgatttataacctatctgacgagaaaggaaaatcaaaagttacgactagcgcataaaactgaatactaacggttcgcgctaagggaaagtattaaacgagacatccaaatgtcttgaaaaaatacttaaacccaacacgtgggtagaaattttaattactcatgtaagcaatgacaatatatataaaatgacaagttcattaacaatatattggaatatgcttaaaataagatcatttctaatgatcgcgagattgaattgatgacgcttcgcagaatgaggaacgagcagataagctgctcgcacgtaaagtaagaaattaactacttagcgtcggaaaaaaaggacaatcaatggaaacccc

SEQ ID NO: 369452 - DNA, 459 bp, Cannabis indica
gacaccttacccatgcaaagcaagcgtaaggcggagtggtacattttgaacaattgcacagaggttgagccgtatatcaagtaagtataaattctataaacagttactcacaatagtcgacttcacctaaaaaattcttaacttactaagtgcattatattatatagtgagcacaaggagttgcttcaagcaaggggtgtaggcaatattgaaaaagtgcaggagactgagttccctgaatggttcaaaactcgaataagcattgttgcccctcaatactcataatcttgttctcaataactgttaaacttttcttaatttaatatttttcctgaaatgtagattaatgaactacggttgagcaaccagggtgcagtgtcagatgagttgtatggtcattgctaacctaacgaatgcatcaatttattttatccagggtgcatagtgaacggtattaaa

SEQ ID NO: 369453 - DNA, 517 bp, Cannabis indica
ccttttatccttataattttttgccaagttattttcgaaaagagttgctaaaggggttgtacatatatctgtctttttgaggcggtttacgaactaagattgcaatgtgaacttgataaattcaaccaaagtggttattagatattttttgaactcttctgtcacactattgaagctttcgacagtgttgttggtcattatgttgtaccgattgcctagaaaataaggggtgcccacttctcaaaatctatactctccacatatgcaggaatggcatgatccatctgtctaagcttctcaaactgtctatcacaatcagcttttgaccacgagtaagctacattccatatttgcttgtgaaaagcatcagtcttgaacttgaaattcacgttcataaaaatgtggtgattgcacagtggactacttcagaaaaaataagttctacaacatagtcaatgctttgatgtctatccgacacaaacactaagttctcaaccaccccaattgcttccctcaa

SEQ ID NO: 369454 - DNA, 810 bp, Cannabis indica
gcgctagttgcaatagcggtttccgtacgattttttgttacaccattaatattttctatgtagaatgtcgtacaattgcaaaaaaaaaaaaaaaaacttattttaaagagtaaaaatgaaaaaattccttaaaaatattttaaattttttatatatatttgatagggattttatctatattcaatcaaattttaaatttagttgacttctaaattaattttacatgcattgaagtacaattgtaaaaaaaatttgtcaaatataattagtttgtttttttagctaaatttatagtacaaattttacataatccatatttgagtgatcaaatatgtatattgtttgtcaaattaaggaaaaaaatagtaaaaaccatgcaactatatatattatttctatttctatttatatttatatgtttattttaagtaataaaattttaatttaaaaattgattaccgtataataatattaagaatttttaattttgaaccacaacaaaaataaataaaataaaagggcaaaggtacattacaatattttatttagtcgaaacactatatatgtataaatggggacatatggtcttttatttttgttggattaattaaccaaactacatattattgatgaaattatatatgtatagttgtatatatctagccaatctttggaatttgagtgactatggcacattgattaacccaaatccaaaccctatcacatctgaaattctcaggcacagaagttccttccaatacaacaattgcatccacaatattctcattctctttctctattacttttgat

SEQ ID NO: 369455 - DNA, 520 bp, Cannabis indica
agggcataaaacccaacactacaaactggtaggatgtaaatggcttttcaagcataaagaaggttcagggaatgagcctaccaaatttaaggcaaggttagttaccaaggggttcactcataaagaagacatcaattacaatgagattttctctccggtggttaagcatgcttcaattagagacatgatggaaaaggcagcaagcatggacctagagattacaaatggatgtaagaacaactttcttacatggggagttagaagaggaaacttatatgccatagcctgagggctttgacaatgggaacccagatgaggtatgcctactcaagaagtctctttatggcctcaagcaggcacctaggcaatggaacttaaggtttgacacttatatgctgaatattggatacactaaaagcaagtatgactcatgtgtgtatttcaataatcaaacctattttctactctatgttgataatgatctttagcaagtaaagtcagagattgagaagctgaaaag

SEQ ID NO: 369456 - DNA, 603 bp, Cannabis indica
taaataaaaaatataaaaatatgatattattttctaattaaaaaattatattattttttaaaaaaatatttaatatagtgcactttttgtgtgtcactatacctctaaaaataataataaagaataaaaaaaaaaagaaaaaaaaagaatatagtgacactttttgtgtgtagctgttactttttcagtctgacaaaacttgactttaaacgcctatagtgacgcgcagtgagtgaatgtaaaagggttacgtgacacgcgtgaagtgtcactaaaaatggtctttctagtcaccttcattagtgacgcgcagtgaagtgtcactaaataattttagagtcactcaatgtgtgtcactaaaacccatttttctagtagtgtaagcaggtccgcggaagagtggttcaagaaactggaaccaggatccgtggattgctggaataagttgcaaaccagtttccggagaaagtttgtggccgcaaggaaagttaatctggaggtcagcgccttgactaacatcaagcagctgcccacggagacattgaagaatttcataaagaggttcaaggaagaagcctcaaaaactaagaaagtcgatgacgg

SEQ ID NO: 369457 - DNA, 802 bp, Cannabis indica
tatttatgtttatggtaaatttaaagaaaaaaaaaaattaaaaaaaaaaactaccaacaaaaatatacctataaaataaaaataaaatgtatttaaaatattaaaataaaaaatatatcaaattctattagaaaaattacacatgattttgaaaaaaaaaaaatatgaaaaataaaatcaaaatgattattgatattaagagaaaataaaatcaaaatgaaattttttaaaaaaaatatcaaaattaattttcaataattaatttaagttaattttttctttttaatagtgaggtatatttataactttatatattaaaagaaaattttatatatgatgcaaataaattttatagggtgtaagtagaataaatgctaaaaggattctctacgtaggggagtttattagatcacatcaatgtttttaagtctatctgtatccgatccaattatatattagatgttagattttatcatccgatccgatccgatccaattaatttcagtcattcaattgatccaacattaagatcgattctatccgttagatgtatttcaaccaatatttattgatttaaattagtatttattcaattattttagacctagttatttttggatcggatccatccagttattttaagtttagtatgtattggattggattggatccatcgattccaaagaaaaaaagagtagtaaattttaatgtttaattttatatatacatatatgttttacgtgtaataacataaatttaattactcatccaaactagcacgtttactatacagtattcagaa

SEQ ID NO: 369458 - DNA, 708 bp, Cannabis indica
cgggtccttgtccgagtcccaaatcaagacatctaccatgggtcttgtccaagccccggttcttggattttgggacaagatctagatcccaaccacgggtccgagtctggtttcgattcatgtcctaggtcccggtttgggtttgggtctagatataggaccaagactagggtccagttctgggtcacgattccagttctaggtcccgagtcatgttcaatgtttgggtctgagttcaggtttgggttcgggtcccaagtcctggtctgggtttggattcaggttttggacccaatcctagggtgtgtctgtgttcgagttcgggtcctggtccggttacagttttgggtctgggtccagttcttagtcttggtcttgttcttgggtccccatccgattctagttttggttccaatttcaagtcacggggtacaggttggggttgagttttggtccgagtctgggtttgggtcctgatttgggtctggtttgagttcaggtttgaggttcgggtttcggtctcggttaagatccgaatgtgggtcctcaggtctaggtccaggtcccggtcccgttcctagatcccggtccaattccagttcaagattttgttttggttcctgagtgtgggtctgggtctgggtcttggtatgtgtccaagtcctggtttgagttcgagtttgggttcgggttctggtctaagtccta

SEQ ID NO: 369459 - DNA, 833 bp, Cannabis indica
caaatggagactttaatatttttctgcaacagaaaacaacagactgtttctgaggaaacggtctacccactttacttgtgggaacctaaaaaaacggtctgtcgtttttacagaaacaacccttttttaagcagttttttcacaatctcgttttttcgtgttttctcgatatatgcggtattttcatgcctatttatcgatagataaacttttaattttgagtttaggtccccgtaaaagttttagcaagttatttatccattttagatattatgacataagcctccattcaacgagcgacatttctattcaggttgactgacacacttgaatcgggaaatgaggtaagattagtataaaatgtgtatgtgtattatatgcatattgtattatgtgatttgtatactaccaactctagtacggttgcggtacggtgtgcattggtatagtatacaatgttcaaagggtatgatacaatgttaccaataccagtacagaatgagtacatagtgcatgtggtacaacactcaatggcactggaggtgcagttcagtctaccaacactagtacgggacgagtacttagtgcatgtggtacaggggtcgtacttctactaagaacattcttgatgcatctaaagccttgtaaatagatgtatggacgcttagatacaagtcggtaggggtgttcgcggtgcgggtggtgcggtttttaactattttttcaaaccaacccgcacatgcggtttttccaattttccaaaccgcacccgcaccgcgatactaaaaaaccgcaaaaaccgcaccgcaaaaaaagatgcggtgcggtgcggt

SEQ ID NO: 369460 - DNA, 632 bp, Cannabis indica
aatacaatataatacaatacgacctaatacggcgattcaaacgagcccttaaaaattggaatatatcgctcaccaccataattgaattcgattacgaaatctatcaaagctagagggttcacaaaaatataggtcatcttattatttcatatcttatattattagattttttttttttgaataaattatatgttattagattgatcatctcatcattcttctaattagatattatacatacatatatatactataggttaatgttatgtgtaatacatgtataattagttttctttttaattaagtttaattaagtgatgttaagtaaaatacatgtatgtttaatttttttaataatgtattttaattttttaaatttttgaaatatatagggtttgaaattttgatttttgagaattttttttagctatattgcggctacattgacatgctctttaaatgtaattatatacatacgcattttatatatacactaaaaaaagaattatattagaaaatattttgacaaaatttgagtttgattagagattaatactttcaaacatatatttaaaaaaaaaacaaaaaaaaattgtgaaattaagatttaaatatatatattatatatagat

SEQ ID NO: 369461 - DNA, 682 bp, Cannabis indica
ccaacacttgtacagttatggtatagaatgcattggtatagtgacatattgtttaagagtacattacggtgatacaagcacctgtacgggaaagtacagggtgtcgtggtatatcactcagtggtgcttagggtatgaaataaaccctaccaacactcgtacagtgaggtacgtagtgtatgtggtatagtggctataccctagtatggaacattcttactcatctgttaagccttgtaggtaagtgtatgggcgcctaaatacaagtcgaaaattatgtgatatgttatatgcttttcttactgagtctgtcgactcacagttcagcttcaatgtgtaggtaaaggaaaggcgaaagctgaataggagtgtgcctgagctgggatgaagttgtacatgtcaaagcagcgcgacctggagtgatcggtgtcacgacatctggggatattattttgtagtcgttgtgcgaccagttatgtacttttgtatattgtgtataaaagcttttaaacgggatcccggtacttgtaaatagttttgtaaattataaagtttattaattaatataaaagttttaatttgacacgttttttaggaaaattatttgattagcaaacacaacactgtaattgaaaaagcactgtagcatgccttagtattagggcgttacaattttggtatc

SEQ ID NO: 369462 - DNA, 683 bp, Cannabis indica
aaaaacctaaaatctactataactaattaatggtgatcaagcattaagaagatgataaatagcaaaaaattgacataaacaaataacaagaacaaatatgggaataatctaaaaacttaaattcataatctaaaatagttccatcaacactctagaatgagtgtttagttcataatcacaaacataataaccacaataatcatgttcataattaaataactaagcaaaagaataaagaagaagaagaagaaaagaactctaatgatgatagttgatgatgattgcttgaagtctcttctctcttgatcttcaatgtgttttttaatctcaaagtttcttgtttctatctctctctagtcgttccccctttaatcagatttacatccttcttccttctttatataggccaatgaagatagatcaatcctcttagaattaggaatttttttaaaaaatgatacgtgcagcgctatagtgcctataccctgcgctatagcgcctaagaggaaaaatcccaaacctgtgctgaaattatattctttttttcagcctggcgctatagcgcacagtacaaaaattttctgcttcgaccttgctcagtaaatcatgcataccttttgcgtccggaatccaaatgagatgatttagcatgttttggaaagctgagaacgagctctatcatt

SEQ ID NO: 369463 - DNA, 787 bp, Cannabis indica
actaaaaaattaaatagtgtttacctgatattctagggaataaagaacatttagtagttgttattcatcgatgataaccaaagggccaattgttttgacgcattctcaaaagactgactcttctcttcattgttgataacattcattgtgagaagctctgggtcgtaatacttgaaaatttttctcaaattgtttatgctctcccagatgtgcatgcattaaattgttaaatattagtgttttataataattttactagaatttaatatataaggttaattagattaaagaagagtatacatcattccaaacatcattctctggttgccgatgaagtcacacaatgccacctgctataaatcctcttcagataacgtgatctgagtatgaggtgctatgaatcctcggggtacccgaattgtgattatatcacatttatctttgacccttagaaattcatcaacaatcaattttagggacttagggattaaagccatgatctctggtgtgaataattcatcttcttgatcagcaccgccttttcgagaaggcatgggatctttcccctttgacacatcatgtcttgttggcggttgagctagtggaccctatacaaaacaccatataatatatcaaatttgatcctaattctatcgaatttcggcagcataacgactgtaattgaatgccccaaaaaatttaaaacatacctaataacaaacaaaatagataaaaaaattgttcattcatccatccgaccataacacatgtattcgcagaacctact

SEQ ID NO: 369464 - DNA, 633 bp, Cannabis indica
taaaaattatatacatgaccatatttagagaaaataagccagagcataaattcgatccgttctactttactagtcaaagtttttctggtttaatcatgcctggttagtactgcgttaatggttgcaaggtccttcattttgaatgccatgcccatccaattttggctatgaacctagttagttagggatgagcttttcaatccccacaccatggtggtgtggagtttccgaacttgttccgtaacccgaacccgatccggtttgacttgaaccgtaatccacttctgtattaatatggcacctcacacataatattaattagcaaagagttcttttcttttgtatcacactgaatttttgaaaagtcttaagtttggtttttttttttaaatttttgattgagaaattagttgacctctgaatatgaaattatatcttatttgatacatatttatcggaacatgcatactgatttttttataggacatataatattttagtatatataaaaatttcaaattcaaattaagtgagattttttagtatttagataacattatttgctataaatatataatattatcagttcccatatcaaaccaacaagtgtaatcatatcatatgttcatggct

SEQ ID NO: 369465 - DNA, 965 bp, Cannabis indica
aaaagaaagaaggcaagtgttagaacataccgtgggaaacaacaaacactcaaatatagcaaacaagctagtcctaccctgactctctaattcggcctagcgaagttccgaatcttaatgctggcagcatcgtctccgagatagctgtccgaaggccggaaccagctggatgaaatataagctgaagggtctaaggggacgggctccggaggaccagaacccatccgggaccgacctaggaaatctcctaagttggaaaaataaaactccttcatatggtctccccaccgggtcgagggcatcctaaacctataaagacgctcatcgaatcctacaggcctaagactggcatattcgccaacagaagggacgtaatgaactcctaaaggagacttaccaccggagccggaagtgctggcgcccggagccccagtgttcggctcttgagccgaaagctttggcctggagcccttctctccgccgagtccccaatatgaaggggctttctagcgatcgcctggcttctcctctcgaccgggtccccacacgaagtggcctctcggaagctgcctgagccttagagtaggttttctcatgagccttccggtagagatagtcctggtacttcttctcggcagtggcgataatctcatcccggacgatcttctgcgcagtaggcgccctcacgttgggacagataaccctggaaaggttagaatcctccacggattgatgcggcaggatgacttttgccttccggaaattctccgtcgtaactaggcccccgacgtcgaggtccgcccggtcataagaggcgaaggcctgggctctccggattgatgcggcaggatgagtaggcgcggtccgctcataaggaggaatcctaacccactccgtgaggagctccggatgttccactgcccagaacccggaagagaagaaaaaacgatggcgatactccttaa

SEQ ID NO: 369466 - DNA, 225 bp, Cannabis indica
cttttttgagaaagagaggaaatgagtatttatatctaatgtaaatttctccttaatttattgatatatatatatatataggcagacttgtaatttcacttcatgtattctatgtacgttagatgggtctcgttactaattttttaaccctaattattcttagatcaacttcaaataactctcctatttaatgaaattggacaaaatcgtatccctatatatatc

SEQ ID NO: 369467 - DNA, 666 bp, Cannabis indica
tactctctgtttactaaattagtatcagagtcaagaagatcttgagctcttcgttttccttttcctgctcttcgttttctttctctgttctccttgttcttctggctatggcgaagggaggagtagctcagactcgaagcaattccaattgagacgacatttttgaaaataaaaatcgttcatttgctactgatccgaatccaagattggatgatccaagaagtccttactatctctctcatggagatcatccaagtgcaatgcttgtagctaaaattctcactggatctgaaaattatagcttgtggaagagatcgatgcttgttgctttagttgcaagaaacaagttcgtggatggaagattgcctcaacttgatgaagatgatgaagactaacactcctggtgctgatgcaatagtctaatcatttcttgaattctgcgtgatgtctcgattgagatcagagatagtataattaatgtatctttaaaatgcttcatcgatttggacagagttacaagaaaggttagtcaaaaaaataactccacaaacttttggaagctaaacgtgctatgcaactccttcagcagggatcgaacaatgttacttcatactataccagactcaagtctctctgagatatgatccaggaatatagtgttgaaaa

SEQ ID NO: 369468 - DNA, 628 bp, Cannabis indica
atctcagcagatgccccctattgaccttggcggttgacagggatcacgatcggtggcctaatcggggtgcctcctactaattccctcgtttcaagagggtttggtgaaggtgaagctttcgtcctcctcttgccttttgttgcttcctacctctccgagtttgagaagtcggtgttgcctcagtttcctccacagaggtaaccatcactgaagcgacagtaggcaagaaaataggaatggaaccaatcaagatacgctcatggccccattccttttggatcattacgggggagccaatctttgttggcctcccttctgtcttgacaacctttgccgcgaaccttttcattgcccgggcttgcttctttttgaagccctttgctgccttgcctctcaaggcctgtgcagtcttagggatgttcttcacacctctccctctcccagcctttctaactagtataggtgtcttcacattctccactggttcgggtaccctgcatgaaatgggtgctcgatcgatagagaatgccgccaagaagcagttctttttccctccttgggcagaagaggttgttagtagttgttggaaattattttaccaggatcttaaatctactcacaagtatgt

SEQ ID NO: 369469 - DNA, 552 bp, Cannabis indica
acatccattggatcgaatcagatcgaatgactcaatccaatactccgctcaaccttgttgaagttaagcaacaaccaggcgagccactccaggcatacatcaacagattcatgacggaggcgaccaaagtttcacaggtaattgaggatggaaacttatccgcaatactggggggcattgaagtccttagtgaactctgaaaggatataaggaagaacgggccagtagattcaatgagtgatttccttgaccgagccgaaggcttcatcaagctcgaagaagctattcaacgagtgaaaggtgaacaaaatcctgacaagtcaaaggctccttctactggaacatccacccaacttccccaatacccaaacaattcaagctcgggtggtaagcgctccagtaacaaccaaaagcaagggaatgggaagaaggaaagttacggcaaaaccgaacaagctcctcgagagaatcatgcgaaatacactgtattcactattctggctgaagataaagaaagtgtatacatggcaactcagtcgctggccccctata

SEQ ID NO: 369470 - DNA, 839 bp, Cannabis indica
aaaagttctttgtttggtgtcatatgaaatgaacaccttgaatctagaagccaatctccacctgaatttgatctagacatcacaagtgcatcagatgacactataagtgcatcagatgactcatagccatctgcaacatcagcaagtacataccttttggacttgggatgattttatctcttcaattttgcttttaaagccaaacaatcatctctaaagtggtcctccttcttgcagtaatagcattgctttcctgcaactccattagagcttggtcctcttatggaatttctagatctggatcttgaatggttacatttgtaaccatttgatttctcatttcccttgtattctctcttagggaaatttcccttaacagtgagtaatccttccccattgttctcttcttcctcatcttctttccttaacctctgccatggtcagagtttatttgccatacaagattgtatcaacaaagtactcatacatctttagaagtgaactcaccaggattatagcttcgtcttcatcatcaatcttcaccgcaaggttattcagatcaagaatgattctgttataattatctagatgctagcttgctcaattcctttgactcatacattcgaagtgtatacaacttattcttgagatacaacctttgtcatctgaaacttctctcgaaacctcatcaccaaaactgaagaggatggcactatgtggctcggctttaatttccagtttcctcttcttgtcttcaatcaattctgttgaacgaaaaaaaaattattatttcattatttctttaaaaaaaaaggaataattggttttaaaataataat

SEQ ID NO: 369471 - DNA, 225 bp, Cannabis indica
tctgtagcagagtatcactaagatctgagcctgattctcctttagttgattggattattcacattctttacacactatgattgagtaccaacttgctatgtggtgagcatgtactctatcactataagggtttgtaaaatattgaagagaaagagagagagaagaattcgaaaatagagagagaaagagaagactcaattttgactgaaaggctagtagaactta

SEQ ID NO: 369472 - DNA, 758 bp, Cannabis indica
ttagctggttttttgatttgaagtccatccctaagcaaggtttgtcggggtacttctatttctctcaaccagacttcaagtggttgacgggcaccggggattcgaccattagcaaaattgggtgttttgttgacgagtactttatggtggatggcatgggcaccacccatactcaatttcagcagatccctacatatcaccgccctcccctcactcttaatcttagggatagagctcaagagcttgctcagctgctgggggatgaccagattatcatccagttgacctccgaggacaactttgtgaagtacaggctctatccgaaggatttcattcctaagccaatgaaggggaggaagaggaaatctagtgttgaacgcgctgagagagctcatcaggaggatgagcttattcaacttaagcgtgacgctaagttgaaaggaggtgtaagggccaagcaatatgatcacgagcccttgaatcctgaagatgaggatgaggaagatcaggtgactccgctcaaaaggaggaagaaactttccggtccagcccaggcctatgtaacatgcaatacacattaggcagcccagtttgcctgctcgaccgccttcgcccgtgctcggaaaagggaaagctgttatgtctgagataagaggcttgtcaggtgatgatggactttcgagtcttgctcgggcaatcgttttgcagactattccgtcttgtttttaagcttcttgactattatgctttatgcttct

SEQ ID NO: 369473 - DNA, 652 bp, Cannabis indica
acttctgggtggcatagagaacgaacagggaagatcaaaaaaccagctaacctcatgaggagaaagcatatcccacttctgggttgcatagagaacgaacagggcagacagatacttgatgcccttgggagtgaattgggtcagacaaagacagaaaaagtctgccaccttcctaaagtatagatgcaaaggtagtagtgcctcttgtttgggatgagcacccaatcaggcacacatcccctttttcagattggaggctcggttgttcgaggtaggagcataacattccagctcgccacgatagccgccctggtcgagatcccgtaagcgtgccttattgaccttggacggaggactcacctacctggcaccgaaggcactttgtctcctttggggaactgcagtagtaagctcttaagtgacgtagtccactccttcgacaaggacatcgccatccgcgtctactggctccctagcctcgttgtatcctccaaagtttgggggtgcaacctcctcctcttcatccgcctcggtagaactcccaggacggacatttccctgttcctctatctcctggacttcagcgtccccttcgtgatccccctcctcctgcatgagtgggtctgttgagttttgtgcccaaaataaaacc

SEQ ID NO: 369474 - DNA, 687 bp, Cannabis indica
aaaaatcagacatgacctaatgattaccaccgatgacaacaccacctatgctgatatggtggataaggcattgcgagctgagggtgcagtgaagtgcaccttagaatctcgagagactccggttgttggcgaggctcctacccttcctacatcaggctttagtaggggaggtagtggcttagccactgatcagaaaagaaaggcacctactgcatctagtggctcaaggttagaacaagaggttttgagggaaccaggattgaggcaattggcaaggtagctctgagacctgatgcacttacccgaagtgccctagttgtaaaaagcaccatctgggggagtgtagagggcagggatgttttcagtgcggtatgccagggcattataaaagggattgtccccaactcaagattgaaacaccaaagactgcagcgaaacccactccagcaagggtgttcgcgataactcaggctgatgcagaagctagcccttcaatagtaacaggtcagctctcggtcaaaaactcttatttctctatgctatttgactctagggcaactcattcctatgtgggagccagaatttttagtaaattggatagaccacatgatagttatgaatcagggtttggaaccttactacctggcaaagagttagttatctccaaaaggtggattaggtctatgc

SEQ ID NO: 369475 - DNA, 1218 bp, Cannabis indica
aaaaagtcaaggattcactatgactttccagtaccttcccagtggatttcaaagcctgaggaaagggcacctttactggaaggttctgtggcacatcagcatctggagcgggcattggtacactagtggtcttaggtaatggtgataccgtactttgaccacttcgggtagtaatagcattaacccctttgagattagactctgaaggagcggaggtttgtgccatatgttgccctttgggagtgattagaggctgagcgggaagcttaccacgctcttgaatgactgaagaatcatttaactttgttatttgaatctttatgtccttcaattcctctatcacctgagtgaaataagtcctgaactctagttgggattctgcgagaattttcatggaactctcaagagaattcttttgttgatcaggcctccattggctcccagatgcttgattttgacttgtatccttccaactgaaattgggatggttacgccaaccaggattgtatgtgttggagtaggcattataaggcttcttgtaatcccctaaggcattacactgttcctcatctcctccccttaacatactaagactagggcactcttgtggttgatgatcagtccctccacaaatgaagcatggttcttgcttttccacttttgcagccatctggagtgctttaccttcttgagttttgaaagcctcaaattgttttttcaaagcttcaagttgagctttcacactgtcctcctccttcaattggtagactccggctgttcgtggcttgtccgtaggacttggcgcactccatgtgtaggaaaggaaagaacttcaatctcaccaaattaattatgtcagcttggttgttgaatgtggccaccacctcttcgaaggcctgaatatgcacatatggactctcattttccataccatgaaaggttggtaaaagttgaatcatgccaggtttgaaatcgaagttgagcatattcatgggatacattatgcatgaaggtgtggtcgtacgcgtaggatgtagataatcctgtagtgttcttggttggatttcctgttcttgagccatcattggcagtgtaggaagtatgggtgatggtggtgaatgagaacgagtggaagaagacgatttaggagagttttctaaaatttcaatttgttgttttacaaatctccctaatttgtctctattttgtgacattcac

SEQ ID NO: 369476 - DNA, 444 bp, Cannabis indica
aaattagtgacaacttgtaactacagactatattttagtcacaagtaatatgttgttgtgactaaaattcacatttagtcataaaaaatttatattgtgactaaaaagtcatcactaaaagtagcacctttttgtagtgcaagtcaatatgttatttgtatttaccccgttagtgagaaaagtgaaacgaataaaaaccctagcgctataaatataagaatacacattcaagaaaaggtttagaatctcatttcttaattgctcatgaaaaatccaaggtttaaacacttgtgtaaatcataaggcttttctagtcttatcgtaataatattgactcgtggactaagacttattaacgcctcaaccacataaaaactccagtgttatttctttattactcatctacttttttaactttcacatatattttattggtttccaaaa

SEQ ID NO: 369477 - DNA, 1017 bp, Cannabis indica
ccgggatcccctccgaggcggagcaatacgcagtgcctttcgccattgtgttgactccgattcctggagacgaggagaggtagaatcctcggataaccaagcacaactatgcccttgatgaatacacccgggggcatgccgaagtggaggccttgaagagggtcctacgggaggagcagcaaaatgtcctaaatgcggacgactttcgaaatccgtgggagctgaatatggatccgctgacgaactggtttaatcgcttccaagggcccaccttggctccttttgccgcggagatgaccagcgagtatgtctcccatatgactcaattcccgcccaaacggtacgttgcttgtgcatccttgaactccgtctaccaagttcaaggcatcagcaacgccatggccgcggtaagcacttgattcatttctttcctcaatattttgtctaaggcatttgatctcactcttttcgccttttttagatttctgcggagaccagccacctttccaagaccatagttaatcatggcttcaacctgtccgaattcgggtactagccgaggtcgtgaggatcctgcgggacctgttcgctgagaggcgggcgatccaagaggaggctgagcgaagggagacccttgctaaggcgaatcttgaggaggaggccaagcagagggaagcccacgcggaggcgatgttccgagaggaggtcctgtggagggataggctggaagcgaggcaccaagaggcgttgagggcggagggcgaggccactgccaaggccaagcgcgagcttcgggaggctaaggaggccgtagacgagatggccaccaaggtgaggtccttagaggagttgcaccaggcggacttgtagtctagggctaaccttgccgtggagatgaaggagctaaaggacttcagagatcaagccttaaagaaggctaaaagagatgagctcctgtctcccgtctcctgtagccgctgtgtcaagcgtttcgacgacggcgtctatatggcctgg

SEQ ID NO: 369478 - DNA, 570 bp, Cannabis indica
cttcttgatacaaaaaaaaaaataacaccaaattaataagagtacaacataaaaataaattaaaatattgtattttctacaaataaaattataaaaatatttaatattctatacaattatatttttgtaattgtttttttttttgggtcgtgtattaccaaattatcccttataaattttgatttggagagtttaatctttgaaagttgggaattttaacccatttatcccttgtccacatttaggtgggctacattaaacagttccggaaagttgggctggcccaataaaactatattaatttagggaaatttacatggtatactaacttttgctatttttttacaaaaatactgccagacggtatttattacttttttactgtgtttttttataagtttcatactgcagtatactgtgttaagtttcactggtgttctactagtgttttcctagtgttctactgttgttttgagttaaactgctttgtgttttactggtgttttataaaaacacagtatttttgaaaaaaaaattcgtgtgacagtatttttgtaaaagttaacccaa

SEQ ID NO: 369479 - DNA, 577 bp, Cannabis indica
taatgccttaccctttcctgcacagtagaacacccgtgagctaagcctagcaagacagtataaatcacaagaaatataatatgcttatcatactatttaatagatatgccattcacatatgtctgtatagcacagacctgattactatacaaacatgcccatttatgtctatgtggcgtagacctatgtgttgcgctcacacatctatttaaatctacatgacgcagacccacgtgttgctctcacacgtccaaatacattaaggccttagaattggttcatctcggttatggttaccgactccagcccgattatgccttgagcgcataatccctaaatcacatttcaaataacatggcatggcatttaacatatatactactagggtaataaccctaggctattagagcgttcctattagggtaataaccctaatctcagttaataaacattcatgcatatcatttccaatataagcgccactgcgcatactctacgtgctaatcactatcttacatgttgtccagcaatagaaagagattctgaatccccgggtgctcctgatcaggtgccgata

SEQ ID NO: 369480 - DNA, 823 bp, Cannabis indica
gctggggccgtgaagcacaatgaggtttgggaggttactcaactcccagctcaaaggccccggctgatggatcaacccatcacactcacggaagaagacgccaagacggtgcgttttccccaccatgattcgttggtcatagagacccccatcaccaataaagtagtggtcagggtcttgatcgacaacagaagctccgtgaatctacttttcaaagaggccttcactgcaataggcatgacggactgagacctctcacccagtggttcccaactaacgggctttaacggaatgacgcttatcccaatggggaaagtgagacttcccgtcatcttgtgcccggataacccccaaagcacgttcaagtactggacttttgtggtggtagactgcccaaccgcttacaacgggatcctcggccggccgcccctggtagatttcagcgcagtcacatccatacgacacttgtgcttaaagttcccaacccaggaagctggaatagggacgatgagaggaaatcaaggggaggcgaggcaatgttacaacgttgcaacccacctgcccgtactgatggtccgggaaaccattgagccagaaatggctgaagaagatgagttggatccccgcgtggggtccgaaaaaattgtagaaccgatggaggatgtcgaggagatatcagtgtgcgacctcgactccaccaaggtactccagctaggaaagagcctagacccggaggaaaaagaaaaaataataaaaacactgaaggcgccatcgacattttgcatggcgccaagaggacatgactggcataagtccccatgtc

SEQ ID NO: 369481 - DNA, 750 bp, Cannabis indica
agatgagtctcagggtacattagatgattgtcagggtacgttacaattttttaatcctaattactcctagatcaatcacagccctcagatctaataacttcctcatctaactgctgtcgtacatcacggaatacattccgtgaaagtacaatcacgagacaaaatcatgtccttataaatgtacaactaacatactttcagcaatagattaaaaataaaacaaacacaaacttccaactccaaatttcaatacacgtgtatgggcttggatttgttgctgccttgctgagaagaagagagggtttgtgaagagttatgaattttgccctaagatctatgggcttaggttgggctcatatgtatgggcttaattaaataaatataaaaaataaaattttaaaacatgcggtgcggtgcggtttgaatcgcgatttaataattcataaccgcaaaccgcaccgcaccgcgcggtttggaaaaaattcaaactgcaactacaccgcgaagaatttcaaaccgcgtttttttgcggtgcgggcggtttgagcggtttgatgtacacccctaccttggatatatccttgaatggttgtatttttcggtaaaaaatgataggaaaattctctaatcacttcccccaacaatgcacctttatctatttagagttttgttttggttcaatattttttaggggaactaccctatatactgttttttttaattttattttttaaaatttacagtttgagt

SEQ ID NO: 369482 - DNA, 1054 bp, Cannabis indica
aatgctaagctatgtgctcatgctgggaaggacttgcaagatggagcaatgtatcgacaactggtgggaagtctaatctaccttacattgactcgaccagatatttcttatgcagttggagtagtaagtcgatatatgcagcaaccaaagaagccacatttggaagtagtacgacgaatactgaggtatgtcaaagataccattaactatggtctcttctataagaaaggggatgaggttaagatcattggctactgcgatgctgattatgctggagatcatgatacccgacgatcaactactgggtatgtattcaagattggatctggagtagtgtcttggtgtagcaaaaggcaaccaacagtgtctttgtcaaccacagaagcagagtatagagcagcagcaatggcagctcaagagagtacgtggttgatgcaactaatgaaggatctacaccaatctacagattctgcagtgccactatattgtgacaatcagtctgctattcgtctagcagagaatccagtatttcatgctcgaacaaagcatgtggaggtgcattaccattttctcagagagaaagtacttcaggaagaattagagatgcaccaagtgaagagcgaagatcaagtagcagacttattcactaaaggacttagcacaacgagatttcagaagctgagagaccaactcagtatgaagagtcggtgttgagggggagtgttaaagatcaacacctactctacaagtatctagaactttctatcattttggtaatattatagaattttctagaatcatagagagtaatagtcattagaagtttcaagaatattttagtaacacaattagttagaattatctagaatattatagttggtttcttttgagtagtataaataggggtcatgggtcttcaagttgtgcatccaacaagagtgtcttcaaagtgtgttcaaaagagtgagagtgtgttctaaagtgtccctaaagtctttcaaaagtgtgagttatacacaagtgtgtagtaaaggtgtctagtgataaaataaga

SEQ ID NO: 369483 - DNA, 864 bp, Cannabis indica
tttttaaaaaaaaaaataagtagcatttagtttctagtattagaatattaataagttttaaaataaaataaataaatgtaatgcatctggaccctccatgtgttcctatttatgagttaacggaagtggtagtaataggtataagagaattgtaacattgagtatttttgcctctaaaaataaagataaggtattgaagtgtattaaatctgaaacattaaatatttatgccgcaatttacccaataaaaatttaagactttccaccacaataattataaacttttaaaattttataatataaaaattgtttcatattagtaaatcttaaagaaatttaaattattgtttagaaaaaaaagaaatttaaattattaaattaatttaaaagcttaaattaaaaaataaataaaataaaaaaatcatgcattttcaaataattgaactcatgtcattgtacttgatgtaagataattttaccacttaggcaagtttgatgggagtgttaatggttgcttgtcaggtttgggcttagggttaagatgaggtggaggagagagagttaaaattttagtgagttaatattagatcgtagctactgtttatctatggtgcccaacaatttttgttttttctaataaaagaaatgtattgattgattactttttttacgtgggtcccccatcgcaatttatgttgcttttgttgatgatggtcttacaccatgattatattattggctgtattatttattatagtattaaataacttgaatatttaatacttttctcgctacaattattgttgagtggaaaataaaattaattaaaagttaatatatgaattcaaaattaaaaaaaaatta

SEQ ID NO: 369484 - DNA, 447 bp, Cannabis indica
tattttatttacatttttatgacctatatatttttttacaataatacaaatttaatttttttaaaatttaaaaattttaaaagtatatatttctacaaaaaatacaaaatgtaagaaaataattaaaaataatgagaaatcaacttcacaagtcacaaaaactataaaataataagaaataacagaaaaataatctcataataactataaatcaactataagataaccaaaaaataatatcgaacaatttattattttaattgaagaactgttaggctaattttagcctacttttgagtgttttaatctccattttttgtgaatacatgtttttggaactgaattatatgcttatttttcttatttcaggtttaaatgataaaattcataatatgaaataaaaatgagaagaaacatgttaaataagatgaatatgattaatttatt

SEQ ID NO: 369485 - DNA, 958 bp, Cannabis indica
taaatttattatcttatttcatattattattaataattttatttattaaaaactaaatgcacaattttattaattattatttagaattatttattaagaagtttaaaatttattatatgtagtattttaaattggtttgttaaaagaaattatttttataaaataaaataaatagggtggtgcaagaaaaaaaaattagggtattcccataatgcattattttcatacttcgattattcaaaactattgttattattatatctcacttgttgcctcattgtatctcacttattttcatcactgtatctcacccgctgtcatcattgtatctcatccattattattatcgtagttcacttgtagtcgtcactattgtattttctaaatctatatcttaatcttagatttcaactcgaattttaaatatttttttttaatatttttaagaaattggagaaaattcattattagtttgttctgttattattaattaatatgttttaaaaaagtgattattattttttaaatatcttaattaaaaataagaaaagaatataaaaaatgtgatattttagttatgagaaatgctaaaaggcaatcatctttggtagttaagtaacatgtcccatataacttaagataaaataagatttagggaatatcgctaaccaatcatagattaccacttatgaaaggtgttgggcactagtgcccaataacaatgctccttagttataattgtgtgatacttgacattaaaattatcatttaaaaaatgtaaagtagccttttgttaaaaattaattaatatttttaataaaaatttaaacgtggtaaaaaataattaaaatattatttcaagtatcacgtacaaccgattcttttattgttattattattatttatatctaattttttttgtaaaaaaaaataaaaaaatagtacacattagagttat

SEQ ID NO: 369486 - DNA, 595 bp, Cannabis indica
cttgttcggcgtcgggcaaagtgacaagccgagccactcgaggattagaagcgtcaactagactcgtggtcttcttcgtatgagccatcatgctatggctgagtatggggttataagaatttccttcgctagaaggagggctagcacgaagacgaggctgaacttcgtgcagaagttgaagcaaatcctggtcgatctgatgctcaagctcccaagactcacctgggttcatctgaaaaagacaacacacaagatgagtgttggacggagtatcaaacgaaaaacaagcaaatatgccgaccaggagtactcaacagattaaagaacgaccatgttcgaagaaaagtcaaaactcaagaagtcagaaagttttcttgagttagggcaaaaaagttcatgaagcttggaataagcaagatggaaaacagacgcaatgcagttcaaaataagccctacggctgaaagccaacataaggacatggaaaagaagagtcacagaagtttctaaccctagggtttcctaagcgttctttctacaacatagttacattcaaagcgtaaacatgcaatataaagcataaagggaatcagaaac

SEQ ID NO: 369487 - DNA, 692 bp, Cannabis indica
gagttggggccattcttccttccgaggtcaacaatgtatgtcttgtgtcgatcgcggttatttataaggaagtcttctgactcgccagggttgtaagcctcgctcttgttagttggatgaagttataggaagtcttcccatagcgagatggtcatctcgcttacttgttctttgagtcaatccgacttttacacttagtttgttcattgcaagctaaggacttttatagttggtatatgtcactttctatggtgcctcgctattcatatttagcgacatatggtttctcgctaatacattaagtgacagtttgtacattgattccttgcctaagaccttacaagtaacgggttacaaatatactctgatacttacataattaatgagttattccataaaaagttattccaccgattcaccttacctttatcttgacacgtgtcctccaaccaaattttgggtataacagatgggctgcgaattgggccccaaaagctcaacagaatggcagaataatatcataatcaagggagctttggtattttgtaaatatctaacaaactatacgaatgttgagggatttgaattgtaaacttagggttttaggcctcctatataaaggccttaacctttggctgattaagaaacctacttctaaactctaaatgtctaataaactctctctctctctc

SEQ ID NO: 369488 - DNA, 581 bp, Cannabis indica
catacatgatagtaaatagatcctggtaaaataatttccaacaataaccctcactcgggacgtcacagtgatgacctgggaagaattcaaggagttgtttaactctaaatattacaatgaagctgtccgcagtgctaagcggaaaagagtttactaagttggtacaaaccgatgggatgtcggttacggagtatactactaagtttgaccgtctggccaagcttgctgtgggaatcgtgccaactgacttcccgtcaacaactccttctttacagtattatttgattcgggagctacaagctcatatgtagctacaagaataattgatcttttgggtaggccttatgatattttagaaagagggttcggaaccctaatgcctagaggggaattggtcatctctaataggcacattaggtccatgccggttaagatcgagggaagggagttgagtgctgaccttatagaattggaattaatggagtttgacattatactggatatggattttctgtctaagtattcggccagtatagattgtaagcgaaaaatggtgactttttagctagaaggtgaagatc

SEQ ID NO: 369489 - DNA, 621 bp, Cannabis indica
aagaccaagaaagttgatgacggacaacagcttgctcttcttcaagcagggatccgtacagggactccgttctggaacgagttacagtaagaaggagcctccaaacttcaagatttctagaaaagagtccaaaaatacatcaacctagaagaggcccaaatagtggcctatgggggatactaccctactgggatagcgggatatgtacccggagctcagctcccgggaactttacaaacagctgctccaccgatgagcggcatataattttccgctaccccaggatatagctagggtcaggccttggcccctccatcttctcatttccggaatccttcagggatgagtggacaagtcacgtctcactccgcttcgaccgcaagcttagcaggtccctcccaaggctctcggagcaagaggtcctcaaaaggtagcaatcggacggaggataagcggcagaaacgggggtacactcctcagtacacccagtacacagagctaacggactcccaagagcatgtgtattttgttactaggcaaaatacgcactaccggagaccgcctcctctgtacagggatagctcccggagggatcccaacaaaagatgcgagtatcacaac

SEQ ID NO: 369490 - DNA, 497 bp, Cannabis indica
tcagctgagtgaattcttttcttttagaaattccgactgccccgttgtaatacttggcattgaacagttcctggaaattttcctaggtcattgtcgtaacatcgtgattcatggacaccatgttccaccaaaccagagcatttcttgaaattggaaagtggcacaagccaccctatcattaccggtaacacccataaaattcaagattctagtgatcacagttagccattgctcggctttcatgacatcaggaacttgaggtgcctgcttacggaacctctcatacaggggttccatccagttcactgcaactaccggttcggcctgcacagcaggggcaggagctactggtatttatggagcagggattgcaggagcagcccgctgtctcaagcgctggatctcttcgtcttgttcattaattctggcttgcatttctgcaaaccggttttcccactcttgggcaacttgggcacctgtggcgggttagcatcacc

SEQ ID NO: 369491 - DNA, 602 bp, Cannabis indica
cctcctggatcgcccgcctttcagcggataggtcccgcaggatcctcacggcctcatctatgcccccgaattcggacatgacgtagccatgattaactatggtcttggaaaagcggctggtctccgcagtaatttgaaaaaggagataagagtgaggtcaaatgccttagacaaaacatcgaggaaagaaataaaccataagtacttaccgcagccatggcattgctgatgtcttgaacctggtagacggagttcaaggaggcacaagcggcgtaccgtttgggtgggaactgagttagatgggagacatactcgctggtcatctccgaggcaaaaggagccaaggtgggcccaaggaaacggttgaaccagtccgtcagtgggtccatgttcaggtctcacgggttccggaaggcctcctcattgagagtattttgttgctcctcccgtaagaccctcttcaaggcctccacctcagcatgcccccggctgtactcgtcgagggcgtaattgtatttggctatccggagattctgcctctccttgtcccccgggatcggagtcaacactatgccgtggggcacagtgtattccttcgcctc

SEQ ID NO: 369492 - DNA, 704 bp, Cannabis indica
ttgtgaacaatggcccaatcttgttcaaattcatcatcttcatccgaatagtatgaaaattttgtgtttggtggtaatttagctttattttccctaataacaagaagcatattattatacatacaaagagaaaagagaaaagcaatcaaacataataataataatagtaatagtaataataataataataataataccttgatttggttatcctttcatcttcaacaagaatataatcgttgtcatcttgagagtcataatcatcatcatcttcttcttcttcttcaccggttgatgatgatgagtatgataaatctgtttcttttttgtctgtgtctgccgctaacaaacatttaccatctctaatttcatcaaccacctctgccatctctgccattagattatcagattagactaacaaattaattaagcctaaaaatagaatattattttcaattaaacaaacaaaattcctaaaacattcaaactaattactaattaggatcgaccagatatagattagagaaatcatattaatttcaatcaaacaaaaacaaaccgatggtgtgtaattatataatcagagccctaaaacacccaaaataatactaattaggatagatgctattgattattcctacaaattaagtattacaatatatttttcaattatcggatcaaaacaacgtaggttattagggcta

SEQ ID NO: 369493 - DNA, 934 bp, Cannabis indica
attacctgattaattcataatatcaaacctaattatttaccatttaacttatcgggatattacaggtattttggaacgatcgtacggtccgatcaggtagccgaaactagctactcggtagatcactcaaataactgtaagtgtatatgatgatatgctttcaaacttactcgatcgttgtggactaagacttagcggcacactatggagtaaatcttacatgcttaccctaataagggggtgtctcaaaatgatggtacggtctgatcaggtagcagaaactagctactcggtggattgctcgaataactataaatgtctatgacgatatgttctcaaacttactcaatcattgtagatcaagacttagcggcacacaatatacatccataaattatatcatgatcatttaattttttttagaatttttacttacatgcatggtttatgcatgtttatatgttcaattttatctttttatatgttgctaatttttgttttgttttgttatgcatgtcttattttttggtttaattttgtttgtttttgtttaattttagaaatagtacattttttttcttgtttagtttttgtttttctttgcatgagtgttttgtgttttattttatttacaagtggaagccattccctaaaagtacatgggggatggaattcttggcctaaaaagtaatatttataaacataatattagctttagtgtaatagttaaactagattacatatagtgttgtttttttctttttaatgttttttttgcccctgccttaaaagaaaaaaaattacgtcccctcactttaaattctgggttcaccactagtaagaacaaactaaaaaaaataataaatagaaaaatctatagcgcaaccctaataaacatatatttgtaatagggaaatttcaatttttgacccta

SEQ ID NO: 369494 - DNA, 753 bp, Cannabis indica
taaataatttaaaaaattatttaatgtattgaaatgatattttctcttatttttttaggaattaaaatgccattatataacattgtatctgtaaaatgaaaaagaatggaattaactttttctgttatcatttcaaaatatcttaatcttaagaattaagaaagttattattttaatttatactatgcctaatattagtttattttatttttcaatgataacttcaccccacatttattattttaaaatagataaatactattttagatcctgtgttctgtaaaaattattaattagactatctgttttgttaaatgataaaatgaaccctgtattttttaaaatagtataaataaaatcttgaactgaatttttttttatcaaaataaaacttaataataatctaatttaaagatgttatcacaaaactaattatattttatgtatctgtttgtattagacattatcttcaaattaattatatttaaaaaataaaaattatcaaaaattgagttcaggattttatttttatcattttaaaaaataaagagttcattttattatttaacaaaacagaaagtacaataaataattttctaaaaacacaaaacctaaaatagtatttaacaatttaaaattaatctaaccttgtacattaagatatattgaactacaataaagaacaaaaaacttaaattgctacgaatgtaataaattattattttttttaaaaaaacttaaatttttcctaaa

SEQ ID NO: 369495 - DNA, 863 bp, Cannabis indica
atacttttcaagctaagccaaatattgaggaggcctactaatcaacatatcttaattggccatacagagccacacattatgctaatctcttatttatttatttattttagggcagaacacaacccatataaatatgtaaaaaggagccttccgataaagtactgagagtaataatgaatatattttatttaatacagctgtaccagacccttatatatatatatatatatatatatataatgaagttgagagagattttatgatatatgcatacaatacaattaatccttaattttaataattaagatatgagaggaataatgaatagagaattaaagggactactgtcgcaagagagatggcgcctaattaattataattaattaatatatttaataattaataggattcatctccccgcgactgatgccccttctacctttcttaattaattattcaccattatatatattttccacctacatattatgtacaggtacgtatactactgtctctttatattatatacatgaatctttctttagcttccattattatgataatactaatatatatatccttataatgcatatgtatatatatatatatattctgccatatattttaattaattattttttcagctgtattattgtattattcttcataagaaaaggatccattcaagggatgaagtactttgttttatgatcatcatcatacgtttccagatcagaacttcaagagttgaaaggcatgatcagatgagttttttcttaagtacatacccctaatatatataatatatagttaagtgttgctgaaaattattaattactacgcaagtgcacgcaatcaagtag

SEQ ID NO: 369496 - DNA, 780 bp, Cannabis indica
cgttaatctgatgtcttagatcaacaggatggtatctttggcttcttcttcctctctattcgggttcctggtgcacagaaatgctttttcgatcctctcgatcctgagggccaagactccctttttggagtttgcccctctgcggacctttccctttcaggaaatctgagcggacctttcgcggatcctgcaccttcttctaattcccgggggtggaagtaggatttttctgttggttcccttcaaagggataccgtatagggctacgctccctggacttatacttttgggtgattggtgaggactcatctggtgtttctccaagttctgcatggatggctttaggatatacatggatccctgccgcctccatggctttctgggcaagcataacctcttgcatcttattgttttgctctttttgggctgtgatttcagcttcatgatcagcagccttttgtctcaagaggactagttttgtgtaactaccttcatcataagcgtcgtactcgtcgaagttcccttcttattcatcatcgttggttcctcctcctacctcagagccaacgttacctcttgaggccacttcctcatcttcaggatcttgtgtgtctagagggggacggggctgacgtgtgttgcgattctccaccattgttgttttggcttataaggttgttgtctatatgtagatgcatccttcagctctcaatgaaagcaccaaaatgtcgaccgaggttttcgacaaccgatttaataatatataagaaagctgtagga

SEQ ID NO: 369497 - DNA, 441 bp, Cannabis indica
ggaaagagctaagtgctaacagaacttgagtttagggagttttgcggcaaaaattttagaattgggggttagttgtaaaaacctccctactttagggggttttaccgcaaataaccctttttaatattaattaactttgtaatcattttaatatatttatatacactaattaacaagtttatatacatagaatccaattctttaatatttctttcataatgataaaattttcttacatttccttcataatgataattatacattaaatttgattgagctaaaaataacatgattgagataaaagttttatatatatgttattcaattgtcatatattctttcgtttacaatgatgattaaaatctctatattattgtggtgttcatatttaaatatttttctatttaaattgttaccatgtttgtttaatattttacattc

SEQ ID NO: 369498 - DNA, 408 bp, Cannabis indica
gaagagcacaatcgtggaggtgctcaatctctgggagaaagagcctatgaaacagaaacccactgcctgaggcgccatctagaaaaggcacaacgacaaatcacagagttaaaacgcgatgcagcatcggctagggtggcacaggggaagaatgctcaaatcaacctaaacatggagtgagaagaccaggaagcagacctcgtggctcacgaaccaggagacaggaaaaggcccgagaagaacaatgcggggaaaatgagataccccctgaaaatcaggatgaacgaccagatgggagacaatcgaaaactaatgaatgagaaatccctcatcaaaaggaggattatcttgggactcaaccgggagaacaaagatcacctacaagaaatcaccaacgttcttcccaaa

SEQ ID NO: 369499 - DNA, 461 bp, Cannabis indica
cataaaaagacctaaaaacaaaaaattaccatataaattggtcaaacttaaatgtgctatatttatcataagaacttttaaaatctcatagtaagtgtaatttattataaaaataaatagtatttttaaaaattattaaaaaatatatgtatattttttaaaagattttttttacttagcccctaagatgctaaactcccgtatattttaattgttatacacttaattccattatttttactgtgataaaaccccttaacttcaattatattgaggaaatttaatgcatttgtcaaatttagttattaagtgctaactgaatctgccactgtgcacacatgtgtacacgtgacatattttcgttggcccaaataattttaataatgtaaacgttataaaaatgaaaaatttacacctcatactattttttttttctattttctttcaattttactgttgta

SEQ ID NO: 369500 - DNA, 1274 bp, Cannabis indica
tatctttatatatacatatatattcacatttatatttatcttcatatatataatatatatttatatttatatatacgatatatatatatgtatatatttcctctatatatatttatatataatactcaactatttcttgattttattaacattaattagaatatcttattctatctatttatcatgttttttaagcaatatataatcactatatttgagtatacatatatgcataaaattttggttcttcgtcgtgattaagaaaatttttcattttcatttttggtgtttattttgaatcgtttttgcattatcatatacatatcatggtttatagtgatttcgttcatgaatataatttgaataaacatcaaaatctggaaaaaaattttgaagaacacgttcggacccgaaaacaccttttgaaattaaagtctatattttttttttattttcgtgcataaaatctatgtggatctctttattattcgatttagaaccttttagatatgaaaacacgtaattttatcgtcgaaattgtctttttcgatcgggtttgggtcgggtccgttaaacccacgtggctggaaacgggtttgacccagttggaggttgaagatacagccaaacgacatgtcgtttgtcccttgtggaaaacgacgtgtcatttttcagattttgtggctgctgtcgtttgttcaaacgacatgtcgtgttttccctgtggaaaacgacatgtcgtttttcgtcttctgaagcagccttcaaattcataaaacgacgtgtcaattttcctcttgcagaaaacgacgtgtgattttccttgtgagtagccaaccttcattgaaaacgacgtgtcattttatgtcattgtgggcagccttctttgtagaaaaaatgacgtgtcgtcttgcatatagctaaaaacgacatgtcattttcggggcagtaattttcaaaaaaaaagggaaatttcaaatttttatttggaaatataaattattctcctattgttaatttagtcaataaattacattcattaatttccatttttaatttaatacatatatttagaattaatatgttatttagtataaactgaaaatggaaatttgttttaatatggtaattaattacatgatttatttaggcatgtaataattgtgcaatttgtataattgtgcatttaattatttattaccaaatttatgtaatttattgtttaaattaataaaatttgaaaaatctgccattaagtatagtctttaattttt

SEQ ID NO: 369501 - DNA, 647 bp, Cannabis indica
aaagaagttaacaaatttttaaatcttaccataatagaaaatatttaaaattggaaatattccaaaatagaaatatataaaaaaggaaatattcaaaattggacaaatctaaaattggaaaaattgaattttgggaaacaatcccatgaaaaaattaaatttttggggaaaaaacccaggaaatcgcaatttgtgggggacaacattgaaccccaattttcaaaaaatcataactctttcaatttttatcgggatcgagttccgtaaaaatgaaaattgcctaatttttccgtaaaaatagaaaaattattttttatggaaaaaattcgtacaacatatacattcatcacataagcacataaaccaacatgaaaccatccaaatcaacacaaaacatataaaacatcgttttaattcatattaaaggaaagtaaatcattacaatagctctggtgccagttgttggaaatatattttaccaggatctagatttactaccaagtatgttttattaacatcctaatatgaattctaaaacaatgaaaataaacgcataagagtttaagaaaaccttaggcttttctctgaaggaaacaatgtgcaaagttataattttcctgaagccaacactttctatttatagaatg

SEQ ID NO: 369502 - DNA, 918 bp, Cannabis indica
atgaaaatattaaattaattaatattaagtttacttaaaaatttaaattattcttaaaaaaaatattttcaaactttattttatttataaaccggaaatagtagtaaatggccctttattcctttttactaagcttaatgtcccattttaaaaataatatagcaaatggcctttattattttttagtacctaaaataccctgttgctcctgattttgtccaaagtacgtggaccaaccggatgatgacacgtagactgagagggtttaacgtttagataattcagctaagtctctttaaccacagggatcagccttagacatgcctcccggagaaggcacgtgagtctcacatactcccagagagcaaagctacaacaaagcatctccgggaggtgtcagatcctatctgaacagtcacctcgcatttaatgccgcatgggagaaggcgtattgaaactgccatatgtcttaaagtctgacggcgtaaccccctctctgcagctactatgctatgattaatgagcctagtgacggctactttgtgaggaatcacatcagtcaaaaaggataaaggactacgtccataaaacccctacagagcctagggattagaccatgcatctcctatgatgtatccattgggaatgtgtgcctttactgagaattactaaaagccatgtacctcaattctagggatcaccccacaaaaacactataaataccccccaaactcattaaggcaggggtcgagaattctgggtttcataagaactagagaggaaaaatccaccaagaacattctctgtaataaatactatcataaatacacagactcgtggactaaggctcattaatgccccaagtaaaaatctctctcattaattccttatagctttcttaattattattattatatt

SEQ ID NO: 369503 - DNA, 997 bp, Cannabis indica
tgaaccaaaacatacaaatgaatgaaaaatacttctgtttctttattgatactgaataaaatggattacattgaaatggagttttatttagggcataaaacccaacagtaaatgcagtgtacttggcttgattctcccaaggagcctgctcagttttttcgatgaactttccgttcttcccattcccttgtctgttgttgttgttggaacaattaccatttgagctagaattacttgggtaatggggtagttgggcggacattccagaggaaggagctttcgacttgccaggcttttgctcaccttctgctcgctgaatagcctcttcaagtttgaagaagccttcagcacggtcgagaaaattactcatcaagtctaccgagccattcttccttatgtccttccaaagttcaccgaggacttcaatgccccccagtatcgcggacaagtttccatcttcagttacacgtgaaaccttagtcgcctccgtcacgaatctgcttatgtaggctcaaagatgctcgcccggtctatgcttgacttcgaccaggtctcccatgtgcaacgaaagttggcgagaggaggagaattgtgttggattttgtgccctaaataaaatctatttcaatataatcagatttacttattaataaagattagaaataacattttatgttgcatggttcacatgatttatttcatgattatatatataatgtatgaattccatttaagtccagaacatatgaatttgttaatgattatagtgttgtcagcacagtggaatataatcttaattatatgttcgaaagtttattccctaatttgtcagaacactggatttagactgacatggtataatcagcgataggtattcttaaccttggaaaagtgttatgtccgtttccaggcattggaaaagtttacaagtatcggatgtatggagtatatagtcgaaggggaccggatattgaactttgtaattgatatattaaaa

SEQ ID NO: 369504 - DNA, 588 bp, Cannabis indica
ttttgacagtaataatacctaaactaaaattttggaacttccctaggtacttggtcattaagtgttaagttaatagccacatggtagaccctaatttgtctagatcattaaattttattttttatttaaaattaatttaaatataccaataaaaaataacacgtgaataataagttggcatttaatggccaagtaactaggatagttctagaaatataacttatggaataccgtaaaaagaataaaacttaggtatttatctgcaataaagaattaaacttaagtatttatgtcgcaaattactcaaaaataaattaataaacattttttaattcatattaaaataaattaatattttacacaagattgtgtaattggtttgaatttattgaaccaaaaccttacttctgttttattgaaatgttgtagtgccaattagtgcattgtaaacaatgttatattacatgtgatatttggattgggattgaattttcttgtgctcgtcatgctttacagttggagtggcaattagtgttcgtgttgtgctgaggtcttaaatttactaaaaagttgctgacacgaacacga

SEQ ID NO: 369505 - DNA, 695 bp, Cannabis indica
ataagatctctcacaaaatttaaaacctaaataaatcatttttattttaaaagtataatgtatgtatttatatttttatgtagaataaacaaaactctcctttaaacttagcttattagtttgtttaattttttttttttttttagtaagatattttatgtaatacaatatattattttgtgaaatatttaaatatatttattttgaaagtaaaaattaaaatattattagtaaacctatgtgttatattttttttcttttttactattgtttatagtagtattttttaatattaaaaataaaattttattcatttttttttttttgttaaattatttatgttgctaagttattttaaagtgtatatatatatattttctagaagggtatatatgtaattaatttcaacaacaaaaagcctaaaatattgtgacttttaattaagttatagatattgtttacctaaatttttacaacgatggcgtgtcaagagtagcaacacgtggcacgaaaataccgagactaaattaatgaagaatatgtaaagtcatgaccgttgggatgaccgtcaaccatgaggggttagtctagggggtatacccctactccctacaccctcatggcacaagtcatgcattttatcatagatataataacattctcaaaggtatatggggacatccacattaaaccat

SEQ ID NO: 369506 - DNA, 595 bp, Cannabis indica
gcttatcgggatattacaaccttcccttccttgtagaagtttcgtcctcaaaatttatttaaacaattcgggatattatccctgtatttatgattctaactctcaaattgttgtttctattttgctgttttttttttctacaacactttcttaactagtggaattgtctcatttcatagtacttcctttttctggataagatgttttcccatataataaatttgtttgaagtttaacatcgtcacaactcagaagatgggtcaagtttgatacatattttcttagcatggagacatgaaacacattatatactccagacaacgcaggagttaaggctagctaataggctacctagcatatttaatccagtgaacaagtatctaatatttctctcataccacacttattaaggtacctaactagtagtacatttaattatcacttttaaataaacatctcgtcagggaaaagagtattctaagataatctaacctttatcaaatacgctcagaacatgtttttaatattccattgatcttcttaggttacccacctttccaagagtaaaacatcatactatttttgctttaatctc

SEQ ID NO: 369507 - DNA, 737 bp, Cannabis indica
taataatacttaaaaaaatatatatcattaaatacaataccccaattattatcacgaacaagttgactattattttgattagaaataacattataattgattgaggttctttttataagagtaaaacatttattattattatggttattagtttaaatttattaatagattagatatatattcatttatatcttcatccataaagtagtagtagtgtgtatgtgtgtatatgcaaaaatgtcagttggtggctgccggcaaaattagtaatagcttgtggcttttccactaatcacattttgggccgtccattaatattattacaacaaccattgacatgacttgccgactttgtttttttgcaaattattcttttattttaacatatataattataagaatttttttcataggagaatatatatattggtatttagagaaagtgaaatgttaaaaagtattattggtgtctagcacacttttttcagtgttgtttaagcagggccggtcctaaggtatatggggcctaaggcgaaatcatattttgggtccctatatatataatttaactattataaaaatgataattctagtgcttaatgtaatggtaaaattttaaaaaactcttaagaggtcaaaggttaaatccctcataactacacattaaatattttttaaaaaaattaaaaagtagaggttgggaattgatccataacctcttactttaaggtaagacc

SEQ ID NO: 369508 - DNA, 523 bp, Cannabis indica
tataaaaatacagtttcttaaaaaaagaaaaaataacataccataaaataatttttaacgataacttataaactaaataacaaaaatctgttacaataaacaacttagcaaaaatccaatatagagaaaccagttacgtaaaataattaaattaaaattaattcacatcaaccaattacctaaataactaaaatcaaaattaaatatagaaaccagttacttaaaagtacgctaataaaaaaaaaataaaacaatacaaaatacaaaagctccaaatgattacacaaaacaaaaataacttacgaacgataaaactataaacagaaaacctaaaaacaagaaaaatcataaaggaagaaacccgtttcttttgataagaaaaattactaagggagcagcatcaacatgagtctcactcttcttcttgcaatgggatttagaactagtttctttttatctttcttaatgacattaaccaatttcttatcatcaacacattagattcgtacactttttccttaac

SEQ ID NO: 369509 - DNA, 595 bp, Cannabis indica
aggcttgggtctggggtcaggtctcgaatctcgggtctgagtttagttctttgttcctaggtccagccccagttcttgggtctaggtctaggtccgggtcccggtcttagtttaggtcccatgtcacaggtcccagtttaggtccaagtctcagtatgggttcaggttgagtttgggtcctgttacagtcccaggtctgggttctcatcccagtcctgattcgattccgattctgggtccaagattgggtctggatcccggttcgggtatgggtttgggtcctggattcaaacattgattatgggtcatgttgaagcctcaagttcagattcagatctccgtcttggatctcagtcttgttctagttcgggtcccgggtcctaggccagtcctaagttttagtttgggtccgagtttggggttgtgtcctggtagtgaggtcctgggttccaagtctaaggtcgggtcctgtgtcttgtgtctagggtcaaattttgtgtctcagaccccacttctgaaccccagtattgggtccaagtcccccatctggttcggatcctttgtccaagtcatggtccaggttcgggtttggggc

SEQ ID NO: 369510 - DNA, 722 bp, Cannabis indica
aaatgaaatgagaagggtggctttttataggccagaagcacatgtgaaacatctgtgatcagctaccatcgaacgactgggaaggcacacgattcgaattccctggatccaacggttggattgaatcgtcatcaaggtggtggaaacgtttgagtacccgtctgacacccattaatgcgtcgtatcaataaatggacaagaaacgaatcgccgcctgcaaaaagtgaatcgctgcagtaatgatggtcattaaatacatccttacacgcccaaagcacgtgccaggaaactgaggaggcagccgcaggcatctaaacaagctttgttcacttcacaattaaacaaggctttgggggtaaatgttgcccctgattttgcccaaaatacgtggaccaaccggatgatgacacgtggatgggaagggtttagcagttaaataaaacagctaagtcttcttgaaagcaaaggattatctcgaacatgcctcccggagaaggcatgtaagtctcatgtgctcccggagagcaagatggccacaaagcaccttcgggtggtgtcagattaaatctgaacagtcatctcgcatttaatgccgcatgggaggaaacgtattggaactgccacacgcaataaagtctgacgacacaacccccaatttgcacctactaggctatgatcaataaagtctagtgacggctactctgtgaggaatcacatcagtc

SEQ ID NO: 369511 - DNA, 678 bp, Cannabis indica
acttgagtttgattgtttgggaactccagtttaattttttgatatatggagttcatggatctaaaaatatcataattaatgctaattgcctcaactaatccataatctaatcatgcggtcattacaatatatttcctcaatattaaaatataaaatacattatgtacaaccgataatgctggtggtaaggctagccaatacgctaccaacccgaccttctcgagtatctgagtatctcgaatggccctataaacctagggcttaacttgcccctcttcctaaagtgctttacacccttcattggtgagacttgtaggaaaatatgttctcccacctaaatctctatgtctttacgcttaggatcaacataacttttttacctgctttatgtagtaagcattcaagccttaatcttttatattgcttcattggtccgttgaactaactcaggacccaaatatttcctttctccagtgttgtcctaataaattggggaacaaaatttcttaccatacaacatctcgtaaaacttggagagaaaaccacaatctcgagtccttggaaacaaggcccagtgcccaggttgacctagggttaggcccaacgcccaactgttgaccatcaacttgggacattgcgttcaattgctcaaatgccaaatccaatgtgaacgttgaa

SEQ ID NO: 369512 - DNA, 544 bp, Cannabis indica
atcaaaatttatcttaaattaaagaggtcattcaccccccacaaaatttcaaagaggttattaacctcacaaaaatctttaaaaaaattataataatattacctcaaaattcaaaagtggactaaaattcaagtccataaaaaatggcatcccaaaatagaggtcattcacctcttaattatcaaagcatcacaaaatatgctatgaactacgtttgatttgatcccatcttgagtacgtaggcaacctaattgctaagattaggtacaatcacaaatcctcaaaatcttaaatgattcagtcacctcatcaaatccgaaatgaggtcattcacctcaaaaattctaaatgaggtcatttacctcaaaatctcaaagtgatttaattcacctcataattatcaaaacacctcattggaactacgtttgacttgattcccataaaaggatacgtaggcaacttaattgctaagactaagtgaagtaactgataccgcgaaatggtataaaatacaaatcttaaaattccataaaaggtcatctac

SEQ ID NO: 369513 - DNA, 514 bp, Cannabis indica
atgccttggagacagccggtcttgagctcttctttgatttttggaaggcttatccccggcccaacttcgactacttgggcgatgctaaggacatgtaccttgagtactgcgaggtccaagtggcttatggtggaactgaggcggctacttcaacctccggacagactgctgatgctcttcccgttcaaacaacagatcctcctgctccagttggcccagaagaaccgaaccaagagcctgggactccagctgtttaaacacttcattttatctctttttatatatatatatatcttatttggcttcagggccttttctaagacatcacgaccggccaagctgtctttaaacttggaattatttttcatttgtcgatagcgggctgaccgggcaacttttaatcctggtattacgtgctttttttcatacttaatgaatttcattatctgtttataattgtcgtgcaattgtgattgttttattattaccaaatgctttgtacaggtataggtgc

SEQ ID NO: 369514 - DNA, 781 bp, Cannabis indica
tgtggtacgcatcttttgttggggtccctccgggagctgtctttgtacaagggaggtggtctccggtagtgcgtattttgcctagtagcaaagtacacacgctcttgggagtccgtcagctccgtgtactgggtgtactgtggagtgtaccccctcttttggcgtttctcctccgtccgggtgctgcctttggaggatcgtttactccttgagccctgggaaggacctgccaggctagcggttggagcggagtgcgagggagcttgtccatttatccctgagggatttccaaaatgagacgatgcgggggccaaggcctggccctgactatatccgggagtggcagagaattgtatgccgctcattggtggagccgcggtcgggacagtacccgacggcggggctccgggcatataccctgctatcccggtgggatagtatcctccataggccactatttgggcctcttcaaggttgatgtacttttggactcttttctggaagtcctgaaggctggcagctccttcctgttgtagttcattccagaatggagtccctgtacggatgcctgcctggagaagggcgagctgttgtccgtcatcaactttcttggtcttcgaggcttcctctcggaacctctttatatagtttttcaaggtctctgtgggcagctgcttgatgttagtcaaggcgctgacctccaggttgaccttccttgcggcgacaaactgtctccggaagttggtctgtaacttgttccaacagcccacggatcctggtt

SEQ ID NO: 369515 - DNA, 553 bp, Cannabis indica
cccttaagtcataaacttaattctaaaatagactacataaatttaacttatttatttgatgacccaacgcacattttatttatacaattgtgactctaataaatttctaacaacttatatatagtattatttttccacacattaacatgtgagactaatgtacatttcatcttaaaagggagatagttgaattaataattacttttaatcatattaattttagcttaatcattattttttctcttgtttgacatgtaccaaatcgtacattataaattttttaaaccgttaaaaattcctccaaaactattaatattgttgaattcaaagactttcatctaattcagttcaatttcaacttatctttcttttaaaaaattgcagtataaataccatgtgttttcagttttatacacctaaatatcatattttttttcgacagattaaatattaaacattgtatttcacttctttacggcattactataatgttagttataacaaaaaaggttttacaccactactgaaatttctaacttttttatttttttat

SEQ ID NO: 369516 - DNA, 556 bp, Cannabis indica
ctttttggcaactacttttgcgttagtcaggaagtaacactaatagttaagaaattgttggtacgatgccaagaactgtatagaactttccttagactgaattagtatctttcctgcaactttaacattcagtctctctggtagacttagagacttcagataggtttttacacttctccaaaatcactactccacccctagagtaatcactatctcatcagcagactttctagcactaaggaaaatctaaaaacctgagttggtgtagtctaagagtattgaataccactcttgtcgactaacatatagttcctcttcttgatcttaagatttattctattgtcttccaatgttcctttcctggattaattgataccaactcattactcccagtcaatagtaggtgtctggtctaatgcattgcaaaggatatctgagacctctcactgttgattctaaggaattctttctttggcctttatcttttctgaaatagttgaaacttttccttagataaacaaaatctatgtcgagaagtcgagaagcttctatagat

SEQ ID NO: 369517 - DNA, 820 bp, Cannabis indica
gagttaactaagaaaaattagcgattcgtgtggtcagacaaatgtgaatcaagttttcaagagttgaagcaacggttgataacagctcctgtgttagcttttccatcagatcaagaaaaatttattgtttactgtgatgcgtccagatagagtctgggatgtgttctgacgcaagctgacaaagttatagcttacgcctcccgtcaactgaaggactatgaaaatctctacccaacacatgacctagagcttgttgctatggtttttactctaaagatatggcggcattatctttatggtgaaaatgtgagatttataatgatcataaaagtctcaagtactttttcactcagaaagatttaaacatgaggcagagaaggtggctagaattggttaaagactatgactgtgagattctgtatcaccctgggaaagccaatgttgtggccgatgcactgagtagaagaggtctcgggcaggttttcaccactattttgatagctcctcaactggtttcagagatggtcaatgcgggaattgagttggtagttggaaagttgcacaacttgacactccagtctgatttactagaaagaattagaaaggcacaattagaagatcccaagctagtcaagattcaagatgaggtgatggctggtcggcctaaagacttttcaatctcgaataatggaatgttattgtataaagctcgaaacttgagaaaggcagtacttaggtccgaaattagttcagaggaccaatgaagctatagacaagatcaaggctcgaatgcttgcttctcaaagcaggcagaaaagtt

SEQ ID NO: 369518 - DNA, 845 bp, Cannabis indica
aatttcaaattttattaattatttaatttatcatataaggtgattttaatataatatttcaaaattaaaaagataatgctatctttaatttaaaatatattcaatattaaaatatctaaccttaaaaataaataatatataaatattaaagaaattaatttttttaaatatgaccataatttaaaaaataaaataatcaatttttaaattgaaacctcaaaatatcaaagattaataataatatattaaaaaaataaatattattaatttaaaattgatatttaattttaaatatatataaaaaatattttattttgaaattagggtttaaaaattggaaaattttgaaatttggagaaaatcccacaaaaattggatttttggtgcaaatctcccaactgcccccgaaacaggctacaagcagcccattccgcgcgcgggagacgtgtctggcagggtgctgcgccaagaattctcggttgttgcagcctcaggagatgcaggatgcaggatcatcacgtgggcgagcacggggggacaaccgggctttagacaggaaattgtcccctgtccgcgcgtgcagatgcaccttgtccgagtgctctgtgcatgcgattgctcgaccgtgtgcattaatggacccaattttcaaaacaccataactttgtcaatttttatcggaactgagttccataaaaaacaaattgcttaattttcacaaggaatccaaataaaatattttcagaaacaaaataaaaatattttcatggaaaatttcgtaaaacacatacatttatcatataagcacataaaccatcatgaaatcatccaaatcaacacaaaaa

SEQ ID NO: 369519 - DNA, 550 bp, Cannabis indica
gcaaatcatgggaagttcatagattatcacgttgagtctcttgattttttctgtttctaggattttaagggttttctccttccattcggatatctcacatttctaggttgttcttcatgagtgttcgagggatttttttgattattcccttgctgtcgtcacttcgcactctaactcgacattcctccagtttgatttagctaggcattgctaaagttacctattttccagtggaacgtatctagttggatcataagcatcgttgcttcacttttctggaatctattcaccagtttgattaaaatctcaaatgtttcttctaggatgaggggtttcaacagtgttagttctttgtgaagcttaaggctcctttctcggacgttgggttgtcttttctagttgattctcttcattgcgccaaatattgtctgccatgagtacaaatttagagttgtatttttgaggagggtatttttctaagctttattacaaaggctctcaatgaaagaactaaattgttaacgcatatttttgttaactaaaatattag

SEQ ID NO: 369520 - DNA, 546 bp, Cannabis indica
taaacaactgctaatttccaaattaactaagcgggctttacatctttattgtaactagacctatatcatcaaaagaccataaccacataatatatctacgacatttgcatcttgttcatagtaattttgacaagatcattccctgcaaagagataatatgctaatatcaacttgaaagtaggatcatctatatggatatacatccaggggtggatatgagttttcattatatttttcagacgataactctagattttactttatgcaatgaaatttaaaatgtttgagaaatttcatgaatttctaccaatgttgaaaaacattaaggtaagtggttaacgatcttgtgaactgataggggtggagaagtatttggtagatatgtagttcaaagatcattaagttgaacttcaaattgtatccaaaattacctccctagaaatttgtattgcatattgatgaaagtaaaaggtcgatgcttagttattagcatctgcctgagcccttccagggaataccctagtgataggaaaattttagaatgat

SEQ ID NO: 369521 - DNA, 576 bp, Cannabis indica
atcccaatggtctcagcaatctcgggcttaacaaccccaaaccgagactcaaaaatagcttcaaggaaaatagcccttgttttgttcttgaaaaatagccccgtcgacattaatcttgaccatattagcatttggtttcttccaccactcatcaacattattaatatcattaattaacaatgcccccgtcttttgagattgagcaatacaatattggtcaagcactatcctagccgatcggaccacatcaatagcagaacaacttttgttattccagagtagttcattgcggacagcccagattttccaactaacacacgctgcttctttgacaacaacaactgaatggtgcacaacgagatcggacagccatctgttgaagccaccactgtccgcaccagcaggaacaatagagatacaccagcagctattcgcaaatctgcactcgagcaagacatggctaatagtttccactgccgaattgcaaaaaggacaatacaaatcaacattaatcttcttggtgcttagttgaacctttgttggtaagcatccaactaaaacacgccacaaaaaatg

SEQ ID NO: 369522 - DNA, 638 bp, Cannabis indica
agttttaggagcagaaaattcatgcaaaatatcgttagatttacaaaactcatcatatatagtatttttaaattcttttccatgataactcttaatccgaacaattttaccaatgttacaatctttttcaactcttaatttcaaacacaaggattgaaaagctagaaaagtatcaaaattttctctcaaaaaatcctcacatgaaaatcgagaaaaatcatcaacacacacaaaaatatacctcttaccattcaagctttcaacctagattggacccaataagtccatatgtaggagttcgagaactctagaagtattcacatcaggaaaactcttgtgagaaattttcagtttcttaccaagttgacatagtccacattttccctaagactccttacctaatttaggtaatccttgaacaattcccgcattatacagtctcttaagatctttcaaatgaatatgaccaagtttttcatgccataaatcagtaatattatcaatgacagaatgacaagtagcatacgtagtgagagtataacaattgtcactagatttgagctcttgcaagacaattttatcaagaatattatacacacaataatgattactatcaaagctcacagtataaccctgat

SEQ ID NO: 369523 - DNA, 738 bp, Cannabis indica
atggagtatacattggaagagaaggatattgatcttagataaaatatcattaacttaccataatatctttctaagtcaatatcaatggttgatcttagttctatggatcttaattctgatacgattaggttcaacatagttgtattatttatgttcttcaatttgtttgttaaagtcgacaaattagatcttctcgtgacatacagattaaggacatggtagttcaattgagtgggagcgctgatcatagatatggaatctatagcttttataagtttttagaagtgaaacaatgattttcttcgagcttgacagaatagagataaatgattgagatctcatttcactaattatattaatttactgaaatatcatttataggtagctaagtgttttaaggataaaatacattgaagggtagaacggtaaatttgtccctattcattgtagatcatctatagaggatctttgactattaggattttaacaatggataatcatcacgtatacaaatcgtggtacatgtagagcgttctatataattgagagtgctattcaattccaaatctatattggtgcaaggtagaattaataagttgagaatttacttagtgaattctaaatctgcttattgaaagcttagttatataggcttaaggtcccttcactagttgagataatattgcttaatcaattataattctaaaattagactatgtcttatttaagaattttcac

SEQ ID NO: 369524 - DNA, 527 bp, Cannabis indica
ttccttgcgacgacaaactatctccagaagctggtttggaacttattcaagcaatccacggatccaggctctagtttcttgaaccactcttcctcttgcgcggatccgctcagagtaagtgggaagcataaacactaggcgtcgttgctgactctcatgactgtcatgactcggttgaaccgtgacaggtgatcgctagggtccgagttcccggtataagctgccatttcaggaatcttaaaatttttggggagctccgcttctaggatgtgcttggcacatggctcccggtcttcacagtcagagtcggagtcatcacctttttgtcttcgggagactcgggcgatgtcttttcggagtatggcaagctctgccatgattccttcgtttaacgttcccgtggagactacgggtctgtatttctttgggtccaggtgatcccggaggtcaccgtggttcccgttaatctggtttctcagatcaatgggaggacattgttgggttttatgccctaaataaaactcttt

SEQ ID NO: 369525 - DNA, 525 bp, Cannabis indica
aatgaggctgagcaaccagttgacgctgacagggacgtcctggttgcaggcgtcgcctacgtcaccgaggagcttgctgaggcggttcctcataggaggcagggttccgttggcgccagatgggtgagtcctccgtccaagatttcggaggcacgcctgggcgagctggactgacggatacctgggcgagctggactgcttcattcctgcccacgataatcgcgcttcataccctagtgaggggatgtgcgcctggtcgggggctcacggccagcaaggggcgctgatgcccttgcacaaatacttccgggatgtggcggacttcttcggcctctgcccggcccagatcactcccaagggcattaagtatatgtctgccctcttcgtcctctatgcttcccaggagtggggtgttccttctcctcacgaggtcgcttggttcttcgacctgaagtctacccgcaagcaaggtaggtcgaggtatttttacttctctcagccaggcttcaagtggttgagcgggac

SEQ ID NO: 369526 - DNA, 728 bp, Cannabis indica
agaagagggtactcaatgcctctgcttcggtgtgttctccctattgaaccaaacaaaatcattacagaaattcgtgaacacttttgtggggatcatgcaagtttgaagaagtctatcaaaaaagatcattagacaaggatattactggcaaacgatcaataaggacattgatgagtttgtcaggaaatgtgataaatgtcaaaggttttcacctatacctcccgtgccacaaacagaagtaacaatgatgacctcgccctacccatttgctatatggggaaatgacttaattgggacattacccactgggcgaggacgagctaagtaagtggtagtagtggtcgacttcttcactaaatggacggaggtcgagccccttgtttccataatgcaagaaagtcctcgactttgtctttaagaacattgtctgtaggttttgaattcccatgaagatagtatccgataatggaacccaatttgatggcaacttgttcactaaattctaagagaagaacaaaattatcaagagcttctcgtcagtatccaggcctcaagaaatggacaattggaagctattaataaaaccttataagatactatgaagaagaagttagacgctgccaaaggcaggtgggtcgacgagctaccacaagtactctgggctcacagaactatcgagaagacaacaacgggacacactcctttctcgctagcatttggctcggaag

SEQ ID NO: 369527 - DNA, 659 bp, Cannabis indica
gtgctaatcataaatatagaatcaatagcttctataacttctagaagtgagacaataattttttttaagcttagcttaacgcgataattgattgaggcctcatttcagtagttatattagtttactgaaatatcatttacaaaaagctaagtgttttaaggataaaatacattgaaaggtagaatggtaaatttgtccctactcgatgtagatcatctatagaaaatttttgactatttagattgaaacaataggtaattcaatttgcatatattttttttttagtaatagagcgttctatgtaattaagagttcaactccaaatttatagtggagttaggaaaaattaataagctaaaaaatttacttggtaaattttagatctacttattggaagcttgattacatagagtcatggtccccacactaagtgggataatattattttataatctcaattaattggttttaattaatcaattagaattctaaataagactatgtcttgtttgtaaatttttcactaaataatgacttatttaagaagaaaagaggatttaaggtttatttattaattaaatagactttgtaaggtataattaataaataagttaaataataattttatttgataattatgtataattattaaatagata

SEQ ID NO: 369528 - DNA, 679 bp, Cannabis indica
tgccatttgctcacttatttttgtttgttttgtggctgggagttccatttgctcacttattcttgttcgtagctgggagtaccattttgctcgcttgcggctagctaacactttgataggtgtggatcaaaagcccgctagggatatgactctgataccatattgagaatcatggggttccatctcaaaaccaattggtgatgagtgaagtagcccatgttcttatatatggctcaatatatttacatttaatccatgtgggacaatattgtcccatacaatgccacaatatagcatccatacaaatttttagaataatattattttctctccaatggtataacatctcaatattttgccatataatatatctacctcaccagtatcctttaaaattttaccattggagatgctcttagtgttggaaatattttaccaggatctagatttactaacaagtatatttcaataacatcgtaatatgaatttctaaaacaatgaaataaacaaatataaagtttagggaaccttatattggttgcagcggaatataatgactctttccgttcagatctctagcccttgattcctttctgtagcagagcattattaatatctgaacctagatctctttccctccttcttgttgattagattcttcacagtcttacacactatg

SEQ ID NO: 369529 - DNA, 555 bp, Cannabis indica
atataacatcaagtaggaggctagaaagggatcttctttttggctttttctttttggacaaattttctctctttggatctttctcttcatgaccttccccttgaacttcacttgacagcaggcaagaacactatattatttccatcacattatttgtttgagtccaccatactcagtcgacaccagtcctcaaaacaccattgatacacaccttttttaacaaattattggtttattattcccaagaactttacaacctttaatttagatcagatttatgaatatcaagtctcacattagccttatattcataaatctcgattaagatttcacctagaaattctttgctgtacttttatctacacactcttaagaaaataattctggtgtgtcggatctaatcaataaaactacaagtagacgtagccccaatattgtcacgacatggggggtgaactactataaatccctggtgtccatttaattttttgcgattttattagtcagattaattcaccgtggtcctcttttattttacgatcttcttagattagt

SEQ ID NO: 369530 - DNA, 757 bp, Cannabis indica
cgcaaatccatcagagtattagcgctaaaaaagatagaagatttagcatagttaccctttgacccgaagcagcttcaaacagattaagcaatctaaggacattgtgagcttcttcctcagtagcacgacagtaaatgtagctatcatcagcgaatagcatatgtgagatagttggagctccattggctactttacagcccttcaactcgccatttctttcgaactgcttgatcaaagaagaaaaaccttcagcacaaagaaggaatagataaggtgacaatggatcaccttgtctaatgccacgagtaggaataataggacccatactcctaccaccatggactactttatactccacatgcatcactgtggccatcataagctcaacccaccgcggatggaaacccatacgaagcatcatagctttcaagaaaccccattcaatgcgatcataagctttgctaagatccaactttagtgccataaatcccgttttccctttacgcttacgcttaaggtaatgcataacctcaaaagcaaccatgatgttatcagaaataagacgccccgagatgaaagcagattgattttcagagataacactcggcaaaactatcttgagccgattcgcaagcactttagagacaactttgtaagccacattgcacaaagagataggccttagatcactcatagtggtaacatgtttcttcttaggaatgaggacaatattggtttgattcaaagcagcaggaaa

SEQ ID NO: 369531 - DNA, 525 bp, Cannabis indica
tggattatcaactcgatatcccttgcctcaaacaaatcatgcaagacctcaagatcccattgcttacgatcgatgtgcatcaaatgcgagaccgtgctatgagccaacacaagatgtctagaaatgacacaagggttcacatcagaaaccagccaagggacattaagcacgtgggtagacacaccagacccaattctccttctagcaccatcacgaaccagtcgttgtgactcaaacacacttcgccaaataaaacttcggttcgaacctatctcagccgtaagaaaattaccatttggaaagtatcgggccttgtaaatatgtcccacaagagaatcttcatacagaagaagacgccatccctgctttcctaacaaggaaagattgtaatcccgcaaattacgaaagccaatcccacctgaattcttgcttctacaaagccgacgccaactaaaccaactgacaccttttgttctattattagaggacccccactagtactttgacattaagctctcaaggtgt

SEQ ID NO: 369532 - DNA, 938 bp, Cannabis indica
catagtacgttgtatgtaatacaattagtattgttacgaattgattaatattgagatatagttaatattgttatataatgaaaagattgattggttgagtatcgataatgtgatcatattatgcatgtgatatatgagcctacctgattaggtgatgtgattttcctagcgacgtacttggcgtaagtaggggcgttagtgatatacaatgcgtaccgagcgtaggtacgggctcacctgattaggtgatgcgattactcctgcgacgtgtagatacggcatcagtgatatgaaaaattgccaggttatggcataaaatgaaactgttgtaggtttcgtcttggcgacgtttagatacgggtgtcaatgacatatgataagtaccaggcagtaggtacgagtttgtctgattaggcgattactcctggcgacgtgtagatacgacattagtgatatgaaaattgccagattatggcataaaatgaaaccgttgtagggtttcctcctagtgacgtgtagatacgggtgtcaatgacatatgataagtactgggcgtaggtacgagttcatctgattaggcgattactcctagcaacgtgtagatacggcatcagtgatacgaaaattgccaggttatggcataaaataaaaccgttgcagggtttcctcctggcgatgtgcagatacgggtgtcagtgacatataataagtaccggacgtaggtacgagtttatttgattaagcgatgcaatatattggtgccaagttatggcacgtgttcacctgattaggtgatgtagttgtatgatatatgggtgccaggctatggcacggccttgcctaattaggcaatgcaatataggattattctatttaagcatcgacttgcctgattaggcaacgtgatgttatgaagatggtactttatgaggtacata

SEQ ID NO: 369533 - DNA, 779 bp, Cannabis indica
aaactagaaactaaaagtttccctatcgataaaaagcatgacaataccctaaacaacataaaaacgagaaaaactagggttcctaaaaatcccccaaccggcagaccggttctgcaaccgaaattccggttctgggaattcctgaaccccatccggaattccggttgcacttccggaattccggttcctcgcaggaaacgatcaaaaattcataactcaatccaaacaaccccaaatcataccaaatttctagacctgttcaatatacaccaaagaacatttctaaagcaaaagaaccaagcttcaagcacagaaacacaattcaccattggaggttcaagattgagttcaaaaactcaaaacttgactaaaccttcaaacagccactaaatcaagcatgcttcaacctatttcaacataatttaacaccagaaaacactactcaacaatagcagcaaccacaacaatgaaaatcaacaatttactttgaaaaccatagcttttgaaccaaaaattctcaaacttaaataagggtaacaagcatgcattacaacctatctagtctcacttaatttagcattttaatcacaaaaacaacaacaacaacaactaacagcagcaataacatcaaaaaccaacatgcaacaatcatctttttcattaaaacttcctaaaacttaaaagaaagttaaaggaaacataacaacaacttgtgatcacaaaaattgattaaaatgagcttgaaatccaagaaaaatggccagcttcttgctgctcca

SEQ ID NO: 369534 - DNA, 690 bp, Cannabis indica
tattaatgagagtatttattacagagaatgttcttgatgaattcctctcctattttctctttttgattccttttaacccagaatcccttgacccctttctcagtatgtttgtgggggtatttatagtatttttctggggtgatccctaggaatggatcatttgtctttctgtgtaggcttcataggggcacatattcccagcagatacaaaataggaaatacataacctataccgtaggtatcttaggagttaggtggatataatcatttatcccctcttgattgatgtgattcctcataaagtagctgtcactagccttattgatcatagcgtaatagctgaaaagggggttacgccatctatcatgtcgtttatggtgatttcaatacgtcttcccccatacggcattaaatgcgaggtgatcgttcaattccagtacctcccagaactgccttattacgtccctggcctccaggagcataaagatccttcttatgtctcctctgggagacaccttcccaaagacgctcctcttttgtctaagacttagttgatttctataagagctagtcctcttagctccacatgtcatccttatccaggtccacgtattttgagcaaaattaaggccaacatttacccccaagcctcgtttggtggagaataaacgaggcttgtttggtgcctcc

SEQ ID NO: 369535 - DNA, 854 bp, Cannabis indica
aattactataaaaaaatattaaagattcatttcacatatatattttttaagaaaataaaacaaatgaaactacagtgattgccggagttgtcactcgtaccgaaaaagtaaccggaggttgctgccgacaccagaaaagtcgtcggagtagctgccactactagaaaatttgcgggagtttctgccggcgccgagaaagtcgtcagaattagcattgtcgctggaaaaatctccaagaaacaagaaaccggtttcttgatgaaaaaaccaagttcttgatgatttttccgatgattataccagtgacaatgctaatttcgacgactattccagagcttgctgtcggtatcagaaaagttgccggagtagctaccagtgttggaaaagtcaccggagttcctgcctgcgtcgaaaaagttatcagaattggcattgtcgccagccaaatcaccaaaaaaaaaatcaccaagaaagtggtttcttcatcaagaaatcggttcttcaccaagaaagtgatttcttcatcaaggaactagtttcgtcacacaacaataataaagattatgaaaacaaaacaaaaataatatacaatgaaaataattgaaaccaatttcatcaatcaaccaaatggaaaaaaaaaacagacaaaaaaatactcataaatataaacaaaacaacacacaatgcacaacaataatctaaaacaaaatataagtatgaaaaccagtttcaaacctagaaacaaaataataaaaagaaacttaaaataaaaaatatacaataacatcataaaatagagcaacctcattacagaacccttaaaacctgtaaaaccagttttgaacttatgaacc

SEQ ID NO: 369536 - DNA, 531 bp, Cannabis indica
atagtaaatttcctgtctttgaccttagagttgaaatgtttagccaacttcttttgataagctgccatctgtacttgagactcatcccaaagttcgtcaatttgatccagctcttcttgtaataaagccttgtttgttaccggatcataaatcgtcctcttgtgggatgggaacacagtttctaccgggaccatagcctcacaaccatatgccattgagaacgacgagtggccggttgtggttcttggggtggtccggtaggcccataacactcttggcaattcttcaggcaaattattttacaagccagcagctttttcttcagggtgacctttaggattttattgacggcttctgcttgtccatttgtctgtggccttgccaccgcggagaaacttttaatgactccgtgttggttgtagaagtcggtcgattcttcgtagtcgaactgctttccgttgtctgagactatcttatgaggcaggccatatcgacacactatgtttttaataacaaagtctagttcttttt

SEQ ID NO: 369537 - DNA, 797 bp, Cannabis indica
cactttcttctttttatcctttttatttttatatatcttattcacccataaggaccttttctaagacatcatgaccggcaagaggtctttaaacttggaattatttttcattttacagacaacgggctgaccgagaagcttttaatcccggtattacgtgcttttgttatctttaatgaatttcattctctatttataatcatcgtgcaattgtgactgttttatctttaccaaatgctttgtacaggtataggtgcccccccagtgaccgagcagacttatgactcttggtcacttgtttcttacaagtatgctttttatctgtttggtgctttgggtttgaccaaaccttttgtacgcactggatggtaaattagaaacatgctgataattttgactcaatttgaattttgaaatagctatctttattcatttattgattgaaaaatgtgtttgttaccgtggtaacttacatcagagctatttgatctaatctgatcttttagcttaacatgaaataaaacaaattgcagaaataaaaattgtactttaaatggtggtcacctgacctgagtacttttttgttttctcgaaacctttgagcgtagtcctccaagcaggccatttacttaagagtaaatgttcgttcagtacttagcgtggtcatccgacctggtacttgattggtagtattttcttaaatattcaccattccaataccgtggtactagaacgagttgcattctttcgtcatacttacctaatttgtatgctcaggattcgagaacttcgaccac

SEQ ID NO: 369538 - DNA, 823 bp, Cannabis indica
ttgatgtgtgatttactgcttaaagtttaattcttgttcataactcatatcttgaaatcgatcaatctaaagatgtacaacttggtaacttgaatcattaaaatctactagttgcactttcagtaccgaacagttggaactttgaggagggaattacttaaagaaacccacaatcctaagtgggctggtcacccgggtgtggctagtatggtagctttactgtcaaggtcttaatactggccgaaaattgagcaagacatagaagtgtatgtgaggacatgccttgtatgtcaacaagacaagacggaaagaaggcaagaagcagggttgcttcaacctctgccaatccctgagaaaccatggcagtcaataagcacggatttcattgtgggatttttagaagtgaaagggtttcggtctatcttggtggtggtggatcgattctcgaaatacggcatattcattcctgcgcctcatgcgtgtccagcagatgtggcagcaaaacttatcatgaagaatgtggtcaagtactttgggctacccgaagacattataagtgatcaggattccagattcacgggaaggttttggacgacattgttcaatatgcttggttcaggccttaagttttcaacaacaaaccatccccaaactgatggtcaaacggagaggatgaatcagttgctggaagagtacttgcggcattatgtgactgctagtcagaggaattgggttgagttgcttgatgtgtcccaattttactacaacattcaacaatctctgcaacgggaatgagtccagcggagattgtcttgggaaagac

SEQ ID NO: 369539 - DNA, 269 bp, Cannabis indica
atatctgcaacggcctagggctcgggtcgtgacattttctgtaaaaataatagagtgtcacaccacaccacaccaaccaacccaacctagctcggatcggacagacagcacgtgcgctcatgtgtggtgggtcaagtgtgtgagtcctcagccattcgcacaaaactgggtaccccttagggcccaaatcccaatgtcaaagttgcactctatattctcttgtaaataagagttcatatgccatgtggaacatgttggaaattatttta

SEQ ID NO: 369540 - DNA, 570 bp, Cannabis indica
atttaaaatatgttaaatatcaaaatatcttatcttataattaaataataaataaatattaaagaagtttaacaaattttttaaatcttaccataataggaaatatttaaaagtggaaatattccgaaatggaaaatattttaaaattggaaacattccaaaattgaaaatattttaaaattggaaataattcaagttagaaatatttaaaattggaaaattaaattttgggaaacaatcccataaaaaaaattggatttttggggaaaaaccccaaaaaaatcacaatttttgggtttggctgcccaagagcctacacgtctgaaggctgcaaaatgcccatatgcgcgcggagcatggggacccagcggatgcagggtgcatgggcggcaatcgtgggcgctggcagggtgcacacggacgtgaggcacgtcacacgcgcgctgtaacaccctaactaacttaggcgtattacgtgattttttaaacgtactgtgcagctcgttgctaatcaacgaggtttatggaaaaacgtgattaattaaaattttgctttttaattaaacttat

SEQ ID NO: 369541 - DNA, 1430 bp, Cannabis indica
aagatccatactcacaacgctaccaaattactgagattgggaagaaataaatccatatatattagtttcacattatcacgtacgatataaatataaatattaaaaaattttgtttgttttaagctgaaaaagttttgaattttttttaattttaatatttatatttgtttatttttcaattaattaaattacttttttattatgtttttatatatatattattctttttgtacgtagtgattagaatcacacatgaatttacgatatagatatctgcgaactgtgcaggaacctcttcgaaccaagatagcccatcgtctaaccgaaaggcatgcttgtcaaaccatgaactgctaaagtaagcgagcaacatgagacaaactgcccccgaaaatttagacaataaagttataacgtcgtcaaacagcataccaaaaaactggatctttaccttgtaacattaaaagctacacaccaactcattaacatatcaaaatgatccacaaaatatctacaaaacaagaagataaagagaagtggattaacccctcgcgataatattaaaaactaataaaagaaaatctcaatagtaaaaagatgacaactctcaaataaaattataattaaaaaatttaatcagcgaagtctctgtaatagtaggtcctccacaaaattgacctacaaaataataataaaactctattaatacataatttaataaaaaaatatgtaatgtgaatgaagattgtaaaacaattcatataataatatcaaaacttgaaaacacttatctgtcaaatctcaaaagtcgtttgcggaatccacgaataccaaatatgaaacctttctcttatccattgaccatactacaaatttacccttaataattaggggcaagccataaaggtggcatgaaagtcatcgaaggcatctaaaccataaaaaaaaaaggtgcaaaaataatgctaataaagtactaataaaagtattgaatattgaatgttgatatatacatatatataaaaatagatttattttatagaggcagtttttacttaaggctaattagtaatttttccccccaaactttgacatgtactaaattatggctcctgaacttttttggccgttaaaaattctccctgaactattaagattgttaaatttaaggaattttatctaatttaagtaaaaaaaatttaacatggatgaaagttcaaggggcatgatttagtacatattaaagtttgaggagcatgatttggtagatatatcaaagtctggggagcatattttagtacataaacaatcactgaaacagtaaaattaaataaacttagacaaaagtcctaaatttaataatctcaatagttcagagggaatttttaacggccaaaaagttcaggaggcatgatttgatatatgtcaaa

SEQ ID NO: 369542 - DNA, 642 bp, Cannabis indica
tttctttctattattgataaatcttcacagaaacattacaattataaagaaatttattaattaactaaagaagaacaaagttaccataatttttggatcatgttcactccatatttcttaaatcccatcactcaacacttgagaaaagaaaatccactgatcaaaaacataatcagagctatcaccatcattactttcttggtccaaatattgatcaatacaattactccaatgctcatttatcttattatggattcttttcaatttgtctttggaaaccttactttcaagatcctctacctttgaatgaaacactttaataaagtttttgatctctatagggatgaattcaggactaaaaaagcttacctcgaaacgaagaacttcattgatgatatgctgaactaattcgtcttcgatttcatcattcaaataaaatattgtcttcttcctttccttcttattcgtctcgttataccaaaatggtccaaccaactccattgcttttttgaaaaatcgcaataaagtatcagaaccatctattacaaaagacttgttacgattctcttccacatttaagcattggattaaagttataacctcatcaagaaacaacaacaatgttgaaaatattaaacattt

SEQ ID NO: 369543 - DNA, 700 bp, Cannabis indica
catgattggagaagcttatggcataggcaagcctaaatgaccatttcaactacccttacctaagcttaacactacaagcctagaaagaccttctgattcttggttgtgcattaatttatattagtggagaatagtaagtactgcaagcatttggaattttgggttagtggattaattattgtaattggcatgcataaagtggttcaattgttagttgatcgcgttctatggtttcatgagctgaatgaaaataaattgaagtgtgtcaagggcgtaattgaactgaaattcttgattgttatgcataagtaaaatttttcattatcatgttattgagtctacttaaaaattactcatgttctagagattgacttgtttaacttttatttttcgttttagtattttactcgaggtcaagtaaatatttagtttaggggactttgttaggttatttttggtattatttttagattaattttagtgtatttttaatttagttttactcgtgtttggagaaattttaagcttgttatcttttatttttgcagatttaaaatagaagaagattaaaaaaatatcaatggaaaaagataaaaagatcacataaaagataattgtgcaaaatattcacttgcttagctgtggtgaatagtaggggtgttcataaaatagtcgatccaatccaatccgcacgatccaa

SEQ ID NO: 369544 - DNA, 560 bp, Cannabis indica
tatataatataatatatatatacagccacacatttcagctcttttcatcatcactagtactaccctgatttagtttctaaacgtactttctaattattattccaacataactttgatttaaaaatatatatacattattagggatataattattgtacttttacggggattgtaattcgttatgtacggctgccgtcagatgaaagagttatttgatctgacggttgagattgatctaggagtaattagggttaaaaagtagaaacgtatccgacactcatttaatgtaccttgagacccatttaatgtaccacaaaagtacatcacgagacaaaatcatatctctacattattatacatatatatttagttaaatgggatttagagtgaaaaaccacacaaaagttactattgagataccataattatatattttttgaagttgtattacatatgataaataacaagaatatatcattttggtttgttgccatttactacagattatcaaaaaaagttatttacttattagctaaaacaaaattaacttaatttttgtc

SEQ ID NO: 369545 - DNA, 575 bp, Cannabis indica
aaatatatatgtggagaaaaaaaaaaacacccttataagtattttttttttttttttcacctgtagagtcgtttatttttaattaattcgcaataataaattgattgatttaattattaatatagtaaaatttctatttaagaatactttatttaaaaataatctctaaatttttgtaaaagaataaattcataattgaacctctaaattgtaattagttatagatattttaagtccaatattaataaaatatacctttatataaaaataacttaataaaatatatatatattataaatttatttacgtagaattaataattttagtccaaattataatacatatataaatattatattttctcaaaaataattttgttacattgattattttttttatatttttgtattttttttttagtgtaactttatttagttataatctctcaataaaaatataatttgcttggtctaagtgtaggttctattgtataaccatttgtcttctacttcatatatattcaaattctattttattttttagagtaatttgcggtataaataattaagtttaac

SEQ ID NO: 369546 - DNA, 483 bp, Cannabis indica
ttagtatatacatatattagagtgttccatacgtttagtgaaatctcttatttagctactagtactacaccaagtcatacttcattatgttgaactcgttttatattaaaagtaactagaattatttttttatgagtaaatatattattttcttatcttcttaatttgacaatttaaattaatatttttttgacctacatttgtcaaatataattttgattttatattttaattaattgtgttataaaatttattgaacttataattaaattttgaatgacatttaaaaataataatatctgataaatcacaccatattatagtgtagacattatttttattattattatttaaaaaatgacataataagataaatttaaattgtgtcaatttaaaaattgtgaacaccctaatacataaaattaaaaacaactataaatatatttattcaaaatgatgggtatatatataaatatatatata

SEQ ID NO: 369547 - DNA, 650 bp, Cannabis indica
tgtttactcgtgttcttcacacaaaaactacctctctagctcctcttaatagggccttggtgagttgtaacaattctgcaccaggaaaaaactcttctccaagtggatacaaaggaagtaattcacaaggaccagataatcgaacaccagattctgagagcatcatgtggaactattataagaaaccaggtcacatcaagtttgagtgtaggaagttatagttcaaaaatcaacaacaacactctactactattactagcactagtgatgcatctgataaatcgatccttatttctactgatgaattttccaagttcttaaggtatcaagaaacacttaagtcttcatctccttctgttattgtcattgccaattcaggtaactctaatgcatgccttctttccaaatcctcaaaatgggtcattgattctggtgccatagatcatatgacaagtaattccagtttcttttcaactttttagtcgcatagccccaattctattattaccttagctgatggatcaccataaactgctcttagatctggcaatgtggatcctacgcctctgcactctttgtcatcagtctgacatttacctaatttgtcctttaatttgctttctatttgtcaactcactcataatctaaat

SEQ ID NO: 369548 - DNA, 545 bp, Cannabis indica
tggaacgccgtattaggtcgtattgtattgtattatattaaattggattatatatcatatttttatataaaactatgttaaactttaatttatactaaaatattatatatttaggtgtacataaaagttaataccacatatagttttacataaaaatattggataaaatacaattcaatataatacaatacaatacgatctaatacggcgttccaaacgagccctaaagcgtttatatattacattgtcaatttgagatcttatcccaagatccacgcacaccctcttatttttttttatggtcacttgagctagtcatagttgggacggtaatatataaattgttataaatataatttagttggaagaggtttcaatggttacatttttattgtaaccatcatggttacatttttttaagtcattggattactattaaatggttgtgattaatttagaaattaaataaaaataaataataaataacttgtaacctaaaagtaacctaatcatttattttcttataaaactttaattaagattaa

SEQ ID NO: 369549 - DNA, 784 bp, Cannabis indica
tttcttgcgagacgtagcctggcctgaacctccatatttatcttctatttcactcgcgagaccaatatttttacccaaagtcactgttgctttttcactaggtgaccttgaatttaacattatgtctactaagcctcgtaagtcaaagaccccacaggatcccaatgtcaccttcgaagctgaacttattgaatctaccaattgagcatatgttggaggcatattaaaatcatgtggtattgaacaaaggcgtggatgtcgcattaggtttgttgctcctgaggaattcagttgtttccctcctaagagggtaattcgcgaggagtgtagtggagccagcactagtcactcgtcgcttggagcctcgaacatatcaaggctcgagcagttcttccctgaagagattatttcaaagaatgttgtaattacctcaaagttgctccctttcaactgaatccaatttcttacaaaattcttgcaagcttaaaggttctgtatcatattttagaatgggagtgccctactcctcttgaaattgtatatttttattttgttaaagcagtccctgtgaggaagcgatgtgcagggggcttttactatctcggtacccacacaaatgatcgcaggatcattgtgaggttaccaaacaagaccgattttaagaaggatttcttctggacaattggtctttctccaataaatacaaccgcattttgcatcatacgtaagtaactcttctctcaaaaacttagctttgagttgtattgatttatatctttgaggt

SEQ ID NO: 369550 - DNA, 510 bp, Cannabis indica
gatgacatgtggacacttacatatcacttaacggaaaggtacctacggaagtttcagaaccctaacagaagatatttttaccgccaaaatttttacttaggtatttatctgcaactttgatttaaacctaagtatttacgccgcaaattactctttagtaaatagagttggataggattcatccaattgaatcgaaccaattcaattcaattacaaaaaaatgaatatcgaattacaattagattgaattagatgtctaattagattggatcaattattggatgttaatttcgaaattcaattaaaaacaagtccaatccaattacaattaaaatatattaaaatattatttatatataataaacatattaaaaataaaaaaattaatagtttagttatattttttagactttctatttatctaccaatatattaattaaggataatttttattatatatctattctatataaaatgtggctatgtaacagaatttttggtttaacgata

SEQ ID NO: 369551 - DNA, 970 bp, Cannabis indica
tgttattttgcttgtctacgttgatgatatactcatcacaggccccaactcatcattaatctctacaatcatcactggcttgaacaaagagttttctttgaaggatctaggcccggttcattatttcttgggtgttgaaattttcagagatagttcagggatgtttctctctcaatcgaagtacataactgatttgcttgtcaagctacacatggaaggagccaaagccagtccaaatccctcaagtgcagctgccaagttagctttaaatgatggggaaccactcgaggacatcactctttatcgtagcaccatgggtgctcttcaatatttgtccctgactaggcctgatgtcgcatacataatcaataaactcagtcaattcttgcatgctcctacttctacacactgggaagcctgcaaacgggtgcttagatatctcaaagggacattatctcatggacttcacattaaaccaagttcctttctctctctcacttcctactctgatgcagattgggcaagctgcatcgatgataggcattcgacagggggttacttagtctttctcggtgacaatctggtgagttggtcagccaaaaagcaacatgcacttgcacggtctagtacagaaagcgagttcagggcactcgcaaatgctgcagcagagatttagtggctcaaatctcttgtgtctgaactgtatgttactatgcctcactgtcctatcatttaggttgacaatcaaagtgccactgctctagcaaccaaccccgtatttcatgctcgatcaaagcacatcgagatcgatcttcactttgttcgagatcaaattctggccaaggaactctcggttcgatatgtcccagctagagaccaagttgttgatgcgttgacaaaagctttaactactgatcggtttctgtatttgaggtccaaactacaaatgggaattaccccatttcgtttg

SEQ ID NO: 369552 - DNA, 577 bp, Cannabis indica
taccaaatcatgccccctgaacatttggatttttagtgataattttaggattttcaatgaccttaaaagttcaggggcatgatttgttacatgtcaaagttcagggggcaaaaatcctaattagccttttaattatgactaaaacataatatttagctacaagttgttattagattagttttagtcataataattattgtgactaaaaatacatttaattttaacaaattgtgatttttgtgactaatatttttaactacataatttttaatcacaacataaaaataataatttataattagtcgtaattctttaacttttagttacaaattttattttgacgaaaaataaaaatttttgtagtgtgataaactaaaacataggtttggatatcaaattttggcaaatgaactttattgttaatgtatttgattatatataattaaagcttgttggcattaatttctattttcaaaaatgtgttttagaagataaaaaataaaattgtcattataatatgttaattaagatttgttgctcctaaaatcgcccaatatacgtggaccagtcaggaagg

SEQ ID NO: 369553 - DNA, 538 bp, Cannabis indica
atgattttccatataaaccacttacatcttttcatttatgtacattcacaaattaaagcatattaagtttatggtctcataaataagcaatattaacatatttacatatatatttataatcatagtatatatttaccttcacatactcatcaaatacacttttctcacacactaacgtactatgtacttcatcctaattgaaactacttaataataataattctgccaaacaagaatactttctcttcaaagtcttaatacgtgattcaatatgaggtgacgccttcaagttagaatctagtaattttgcctctagcatactctccatttgttgcaaataactatttttaaatccacaatcagctctccatgtaagatttcgactcaactctagaaggcagacgatcaatgcattatcttgttcaagggtccaataatgtttatttttacctcttcctatttgatcaacattagagtttgaactcatcctatacattcatttaaaatttctcattattataaaaataaaatcataaat

SEQ ID NO: 369554 - DNA, 202 bp, Cannabis indica
cgagttttccttctttattgaagccatcaaatggcagcactcgagctactccttcttcctcatctcttttggcttcaagaggagtagcaggacggacctctccctggtcctccatctcctggacttcaacgtccccagctgtgttctcctcttcagtagcgagacgggcttgttcagcatttggcaaagtggcaagacgaga

SEQ ID NO: 369555 - DNA, 566 bp, Cannabis indica
tcacaacatctctctttctctctctatctcggcatcccacacgatcggacctggggctttttttttttcattcgatttgagagagacaaagagagagggggtccgatggtcggaccatgggtccgatgggtccgattggtcggaccccatggtccgaccatcggacctggggctttttttctttctttgtttttcgatttgatggaccggcggtgaagagggggcctaggattcgtgggcttcgaccgtcggtgatgagggagcctgggattcatgggaccgacggtgacctgggcttcgaccgtcgttcgggttggggttgggattcgtgggtgagggtggttcgggttggggttttcgtgggtgagggtggttcgggttggggttgatcgtgggtgagggtggtcgacgccgtgggtgagggtggttcgagttggggttggtcgtgggtgagggtggttcgggttggggttgatggtgggtgagagtcggctgagcatttacaaatgggagaggtagttttggaaaattggtaaaaatggtcatacattacaaattttaataag

SEQ ID NO: 369556 - DNA, 409 bp, Cannabis indica
aacctaaccatcttaggattaagatctattgacctaagatcaactaagtgatatttacttagaaagatatagctataagtttatgatatcttatctaatgtcaatatcagtccagtctgatgtatactccatacatctgatactagcatacttttccaatgtcctgtaaaatgcataccatttatccaaggtgtaagtgaactttatcgttgattatcacgtcagtataaatccagtgtactaaaatatcatgggacttaaactttgaaacatataatcatgattattttccactgtttagacaacactataatcatgaataattatatgttaaggatttaatagaatttatacattaaacatatactcatgaaaataatcatgtaaaccatgcaacataaaagttgat

SEQ ID NO: 369557 - DNA, 812 bp, Cannabis indica
accaggcactcggacaagccaggcatccgtgcgtgcgtgacacgcccgtgttaccctacacctcgcccagacgcaccctgcagctgaccgagttttctcagtcaggcatgctgcaggcgccaaagatcctcggcgtgatcacctcctccgcgcgcgtacgaggctgcgtgcagccttcctaggctgcacgtgcagcctgtcctggcagcctaccaaaagattgcgatttttggggttttttcccaaaaatccaatttttcatgggattgtttcccaaaaattcattttccaattttaaatatttccaatttgaaatatttccaattttaaaatattttcaatttggaatttttccaattttaaatatttcctttttggaatatttccaattttaaatatttcatttttggaatatttccaattttaaatatttcctctttaacaccttcgtaagcggaatgaacaatgaccacgcacccacatgccaagttaatctagggggtatatactactactcctacatcaaatgcaatgatctccatggggttagtctagcggtgcaccccttaacccctaaaaggttagtctaggggtataccctttacccctagaggattagtctaggggtacaccaattaccccctaaagggttagtctaggggtatacccctaccccgtacacactcatggtacaagtcatgcattttacaatacacataatgacattctcgaaggtatatgggacatccacattgcaccatagtcattgacaacgaacgaggggttacccccccaacttgggtttaggggga

SEQ ID NO: 369558 - DNA, 613 bp, Cannabis indica
cctcaagtccaaagtcaagtatgggacctgagtggaatgatgctcgacaattttgggtccaatgtcacgacaaaggtaaatcaataagggtctattccaaaacactgtctaaaaacccgcataaaataacctagggttttaaaacgaaacttatggtgaaaacaccataaattaaaatacatattttggctctaatttatgtctcatattttagagctcttcataagcttcgaaacggtatatagaatgtctaaaacggatacccgagtgaaaagttatggctaaaatacaaaaatcagcgattcctgaaaattgaccatccggaattctggttggtgcagccttgtaccatccggaattctggttcaccacaccagaaactcgaaaaatttcaaatcttcaatgtcccaaacctaaccaattgttctcaaacttcacaaaatagttctataacatgtatacaacatatctcaacactcaaaaccaacaattaacttaaaaccacaacttcaccatggttgagtaaaaactaaactccttaaacattatttcttccaattcatgcataacaaccctaatatccaatccaactaagcttaaatcatcaccaatt

SEQ ID NO: 369559 - DNA, 565 bp, Cannabis indica
ttctgtcgcagagtattattaagagttgagcctggatctctttctctccttcgagtttggttaccaccattttttgcactatgattgagtacttgacttgctttgagtgggcatggcactctatcactaagggtgaattggttgaagaataatgaaggagggttcaaatcactatagaaggtgtctctcatctattaaatgtcagagaatgaaaactaggtttggtaggttgaagaagtattggacgagatgagagcatcatattccttttatagtttttcaactaaggcctaggtttgaattatatggattaaaaaagaataatatatttggcaaaaaataccactaatggccagccacttaagggaccattctctagttacaattttaccattttatttcaaccacttattcttctttcaataataccatatttttcaattcaatcctataaatgccaaaactatttatttaataattataattattatcaaataaaattgctatttatattatttattaattagaccatacaaagtctttaattaataaattaacccgaaaa

SEQ ID NO: 369560 - DNA, 749 bp, Cannabis indica
aaaggtaaagttagaaaaaaaaaaaatctctcatgagattaatctatattatatctacaatccaacttcaatgttatattaaagttaatattatatttataaatattagtttttattataaatatatgtgatatatatctaattaaaataggctaattaagtaaaaaaaatttcccgaactttgacatgtactaaatcatgctctctgaacttttttcaccgttaaaaattcctcatgaactattaagattgttaaatttatagacttttatctaattttagtaaaaaaatgctaacattgatgaaagttcatggtgcatgatttaatacatataaaagtttgagaggcatgatttggtagatatcaaagtctgtggagcatgatttaatacctgaaacactaaaattgaattaaattagacaaaaatctttaaatttaacaatctcaatagtttagggataatttttaacggtcaaaaaaatttaaagaacataatttagtatatgtcaaagttccgcgggaaaaattattaattagccatactaaaatatatatatattttttcctaattttattagagactcttccgaagatgggtaatatatttgttagaaaatatctgagataaacatacgggagaagaccactaattagcaataaatattaattatgtgtgtaatactaatacaactcgtataatatatgtttataaaaatgtaaaaataaatggacttagacacgtacaata

SEQ ID NO: 369561 - DNA, 601 bp, Cannabis indica
caaacttaatccagaagctgaaggattctaatggcgactgggaagatggacttcctacggtggtggtggactactttcagcatttgttcacacatgccgttggtgatttttctacagtcatcaattgtgtttcccaatcggtcactgatgagcaaaatgctgtgctgcttgaggaggtgactcgtaaggagattaagacggcattgttccaaatgcatccagataagtctccaggacccgacggaatgacaccaggattttatcaaaaaatttggaacttgctaggcgacgatgtggtgcggctggttcaggctttcttcattactggtgagttccctttagttttgaatgagactaatattgttcttatccctaagaagaagagtcctgaacaaatgggtgatcttcggcctatatcgctttgtaatgtcctttataaggttgtttccaaggtgattgcaaataggcttaaagttgttttgccaagcgtcaaatctacaaaccagagtgcttttttgccaagacggttgatttctgacaatattatgatctcttatgaggtgatgcattatatgaaacgaaagaggaagggtaaagatgg

SEQ ID NO: 369562 - DNA, 491 bp, Cannabis indica
ttatctctttgtctcccctcttgacttaaaataaaaaagccctaagaatacactatttatatgaaccaaatcggtgttaaccatgaacctagaactgcagtgcaccacaaacaacaaatcgtagtcgaccaccatctcgaaatgccaaacgtaactccgaagatccaccgacgagattcaaacacctagatccaagatagattcaaacagttttcacatttaaagagagagaaaaaaaataccgattgaaaagagagatcgtcggaggccatttggccctgtggtcgcacgggttcgccggaggagagacggttcatcttaggattgacgagttcgctgcctgctgacgagttcgctacctgcgtgtttgcacgagagaaacgaccaacatttggcctttggtcgcttcttgaaaaaaatagagggagagagcggctgaatgtagattagggttttttttaagtcaagagagagacaaagagatatatata

SEQ ID NO: 369563 - DNA, 635 bp, Cannabis indica
tttattttaaaaaataattttcactaaaatttatttatatgcaacactatttatatgtatactttttaaaaaatgttaatattataaatatattgtacatatatgttataaattatattataatacaaatatattaatgatatatcaaataaaataaaggccgaagcccatatctttttcttaacctgctccttctgttttgctctcctcactctcttcttaacttgctctatgctcctctcttattttttttttatctcaggtgaggcattactgtttcgagctccttcattgtaggtggtgaacatggcccattaaaaaaatctattggtcagtctaacaaagctcgtttaaagcacgatttgagcccaagcctggcacgattttttcgtgcccatgggccaggctgggcttgacctatggaaatatgggctagtacggcacgacccataattctatacgggccagcacgacactgttagacatttatatatataaactgaaatgtatatttttaagtattaagtgcggaattaatcaaacatatatacactatgaataaggatcgaaatacctccagccattgaatcttgagcttcaaacccacataagctttgatctgcaaaggaaattga

SEQ ID NO: 369564 - DNA, 696 bp, Cannabis indica
acaaaatggaccctgtattttttaaaattgtacaaatatgacattgaactgtttttgtgtcaaaataaaacttaattaataatctgatctatagatgttatgacaaaactggttatattttttgtatatgttcgtgttagaaattgtcttaaagttggtaatattaaaaaataaaattgctgaaaattgagctcaaaatcttatttttactattttagaaaatatacagtctattttgtcattttatgtattgaatagcaaaattcgtatttggtattgtatggaatttataatttttaataattaatataatacgtctttcttgtgcgaagaatgtattctaaaatatgttacgcgaaataatagtaataatgtagtttaataaatatttagattcatataaataagtagaaaaaatataaaaaggtgatctcttcacccttcacatgagtttagttagacataataataaatcttagtcaatttttatgggtgtttattaagtatccgatccaatccaatccaatctgcaaaatgcggatatctgcacttgcgcggattggattggattgaaaaaatctaaaaatgattggatgttgtttgaccttcaaagtattgatccaatccaattcatacttaattatatatatttttaaaaaaaaatatataaatacataatatatattaattttttta

SEQ ID NO: 369565 - DNA, 547 bp, Cannabis indica
tatcccaaattcatctgacttgtttttaaatagccattttgttcctattacattttctcctttaggccgagggaccatgatccatacaccaagtcttctaaagtttcccatttcatcttgcattgcagccaaccagaattcatccaatagtgcatctctgacacttttgggctcaatttgagagagatagcaggcaaatgctaacatgttctacagttttcgtctggtgaccatggtgtcattcggatctcctatgacaactgcctgaggatgagctttctgaacccaggagggtggtccatttttgtactgtttggcttgttagggttctttgggcatagcactactaacttcaggttccctgttttgatcactgacatttgcatccacctcatctgataatgctggttcggtgttttagagactctgtaggagtgtcagtatacacttgggtcagtttagtggtaactggtctaggtccagagaggcaaagggcatcatcctcgacactcactcttcactaccttataagtcatcaaacttacgt

SEQ ID NO: 369566 - DNA, 586 bp, Cannabis indica
  modified_base (561)..(561): a, c, t, g, unknown or other
tcttgcacataacatttgaggttgtcacatgaaaattggtattccattgtcgatatgggttatccccaatcagcaagtgtttatttttttcttcattttactgttatgtgttctttagatagagatttgagctacaaaatatttagtagatatattttgattttactcattaatcgagatacaattattactagcttttatttgtagtgacaactaaaaatgatgatgtgttatttgtagtggaaggactcttcaacaccctccctcgaggtgagctgtggtatagtgttgcttcattgaacctttttattgtgagtgtcgtaataattatatcggcaactactttgtatcatagacgtttactaacagatatatatatttaaaaatttcaactattaactttgacaatacagatacaacatggtcatggtggttagagattatctttcaatattggcatcacagatcatgcctacagatgctcagaggatgctttgggtgtgtgcttctagcttctgagttggagccaaattaggataagggcttcacattcttttttangtttgtttgtttgcctaatttagtg

SEQ ID NO: 369567 - DNA, 534 bp, Cannabis indica
tcagagtcatggtaattgatttactttcaagaaatttagacttaaaacgatatatgtgtgatttggatgtgattcatgtttatatatgtatttttgatgattgtttgatgtttgcaaagtttttacaaaaaaataatttgaatttttttgtggaattatttttgttcgatagtttggtaaaaactaagctattcacttttttacaaattttaatttcgatttaatttgaattagttttgatttttgaagttttgaaaaaagataggggtggtgacaccccatgcgcacgcggatccgagtgttcactcggtcacacgcgccttggacaagggcctgtccgagttttctcgctttgaagcccctgatttgtctgaaggctgggctttcgcgcgtggacgaggctacttgcaacctctctggctgaggtttctcagccgtgcactccttcctgcacgcgcggatggtatgcataccatccgcatcaaatccaattttttttcaattttcttcattttctcatgctttttcatggaa

SEQ ID NO: 369568 - DNA, 1225 bp, Cannabis indica
acaagtctcttatctccgccataacagctttcccttttcctagcacgggagaagatggccgagcaggtgaactgggctccctaatgcgaatttcatgttcaacgtacctagtctaggctggaagtttcttcctgcttttgagcggagtcacctgctcttccacaccttcatcttcaggattcaagggctcatgagcagactgtttggcccttgaaaatcccttcaacttaccctcaacttagcctcacgcttaagttgaatgagttcatcaactttatgagatctctcagcccgtacttcacaaagttgagcaagcctttgagctctatctctaagggcaagagtgaagggagggtggtgatatgtggggatctgctggaaccgagtatgggtggtgcccatgccatccaccatgaaatactcatcaacaaaatgcccaatttcactgatggccttatccatggtgcccgtcaaccacttgaagtctagttgagagaaatagaagtaccctgacctaccttacttaggggtggacttaaaatcaaaaaaccagctaacctcgtggggagaaggaatatcccacttctaggaggcacagagaacgaagagggaagacagatatttaatgcccttaggagtaaattgggtcaggtagaggcaaaagaagtctgccacattcctaaagtgcgggtgcaaaggcaacaatgccccttctgggcatgagcacccgaccaggcgcacattcccctctcagggtttgtcgctcgattattgtgggcaggaatgtaacagtccaattttcccaggtagtcatcctggtcgagatcccgcaagcgtgcctcactaaccttggacggagggctcaacaacttggcacccaaagtacctttccttctatgaggaaccgtagcagtaagttcctcactggcgtagtccacgccctcaaccaggacgtcgcaatcagcatcaactggctcaccgacctcattgtgttccccatagtttgggggtgcaacctcctcctcttcctctgcctcggagggactgttaggacagacatcatcctgctcctcaatctcttggacctcagcgtccccttcatgatcctcctcctcttggacggctagatcctgttcagctctggataaggtggcgtgtcaggccacttaagggtcagatgtgtcaaccctatgcattgtatttttggtacgagccatcatcctat

SEQ ID NO: 369569 - DNA, 726 bp, Cannabis indica
actcagaaatctgaataagattgactcgtggagtatgcagaattttaactgcaaaaccacgtaaaaaaaccatgtgttcatgcattatttttctatagcttctatttttttgcgttgaactatcattgtgaggctcaaatttggttaacaaaaatttgcgttaacagtttggtgctttcattgagagcctttgtaaaaaaaagctcagaaaaaagcctcctgacataaaagtgatggatgacaccaaagataatagtcctcaagaaggaatcaatcatcgtcccggaaaagaaccattgagtccccacggatctgtcgagtcatcgcatgaacagaatgcaagccccaggaagacctagtattgggccccctggcttgacggaacttggaagagcaacaatcggtcactccctaaccaggttgatgaggatggcgcttacgacctaactagatacataccaatcgtggaattaaaaaatcgccatcttaggcgtcgattggaggaagtaaaccggcgtaatgctaagttggagcgtgaaatagctgccgtaaaggcaacgatgggagatgatacccaaaattaatctgaccttgggaaaagagattcacagggcaaacctcatgactcttagaccaaggggcagaggataacccagagatatacttaggaccctcagaaaatgcaacctgagggaactgaggaaaacctagagacacagcctgaga

SEQ ID NO: 369570 - DNA, 546 bp, Cannabis indica
tttaattaattttataaaatgaccttatttgaaatttaaaataaaaatattttaatctagaaaattttaaaaatctaaccagatattttttcaactttcaacttttgttattttatttaaattaaatttaaaattagataaatgatatttatttatcattttattttattagatatttaattttattttcttttcaaaataacgtaaattttgaaaagttagttggccgttttgaatagatatttaggtttgttaaaaaacttactttttcaaatttataagtctaattttaaaattaattatttaatttaattttattattatcaaaaaagaataatttattacttagatttttcgaaaataatttaattatttaattacttttaaatttaataaatcctatatctaactatccagtttgttgcatgtgtgttttatatattgtttattattaaaacttttttttaataaaacttattattgtttgatctaaattgccatgattaccttgttgacagatcaaatgatctgattttaaccaatggt

SEQ ID NO: 369571 - DNA, 903 bp, Cannabis indica
atatacagactcgtggactaaggctcattaacgccccaaccacgtaaaaatctctcccttaattccttatagctctctaaattattattattatattggttgccgaaaacctcggtcaatagttataaaccctaaaatttatattcaaaccaaaattaacaaattttttaaaattacatgttagtttgccaaaaaaaattaattaaaataaatatctaataagataaaatgtcaaaacttacatttctctaatcttataattaaatttaataaaatatatttcaaaaataataaattttaaaaatctgatatggttagaaaatttaaaactttaagtagattatttctaaattttattaatattttaatatcaaaataagatcatttcaaatataattataaaataagtaatatctaatcttataattaaaataaataaaataaataaaaataatcataaatttcaaaattaaccataaggctagtttgtggaaaaatcaaatttttaaattcaaatgctacgaatatcttaaactaattttaattaattaaaaaatttaataaaaattaattttattctaataattagattttcatttaaaaatttagaatctacacaaaattctactaaaatttgaattttatttcgatgaaatataatttttgaatcaatagatatcacaaaaactagattgcgcgcccataaggctacaagtgggtgagggaaagggtgatggcagcctgcttggggggaaaatttcggtcaggaggggaaaaaattcagacatggccttgtctgaaggcctcatgtccgagtgagcctccccatccgcgcacgggtgtgcatccctttgagatatttttattcaaacttcaaaaaatcataactaattcataaaaaaa

SEQ ID NO: 369572 - DNA, 706 bp, Cannabis indica
tcaccaaaattatatataacaagtaaatttaaagctatttaaattgttgcttgtatcaatttctttatttttttaatttttgataaatacctgtcttataacggtaactatgagaaatgatgacatcttagaaaatgattctggtataatcgcattaaatcgcacattaatcgcataatgtcgaccaaaaatacagagccaaacaaagtaaaaatgaatcgcaccaacatcgcacacaaatcgcataatatcgccaaaaatacagagccaaggaaaccaaaaaatcaagatcctatcagctaacatcggcacaaaaatcgcataacatcgccaaaaaatacagaacaaaacaaacttaaaaatcaagatcctgtcagttaaaatcgcataacagtgcacaaagatcgcacaaaaatcgccaaatattacaatcgcacacataatcgcattctaatcgtacaaagtcgccaaaataaatcgtttcatccctaaccttggactgctcatgaaatcgcaaacaatatcgcacaaagtcgcataaaatcgcaaaaaataaaaaaacccagaaaaatacaggctgctcgtaacaaactctacctcgatttcaaggacacaaaaaccacaaattacaactaattacgttcagatccatacaatacaacaaaaaacaacattatttactaagaaaaacacttacccatatgtt

SEQ ID NO: 369573 - DNA, 738 bp, Cannabis indica
gataagcgtggttccgttgaatcccgtgagatgggaaccgcttggtgacaaatctcggtccgtgaggcctatcgctgtgaaggcttccttaaacaacgaattcatggaactcccattgtcgatcaatattctagccacgatcatgttggcaatgggagtctctatgaccagagggtcatggtgaagaaaatcgaccatccttgcgtcttcttccgtgaaagtaattggctgatccatgagtcggggcctttgagttggaagctgattgacttcccacacctcgtcgtgtttaacggccccggcatagcgctttaattcttttcgaatgcttcctccaatatggggcccaccagagatcatagccactcttcagttgggtcttggtggcaggccaggggtctgctaagggcttggccctcccgagggtacagttggtgccaatgctccaagcgcacttcctggtgtcccttggggcaatggactccctgccggaaccgggttgagatgggggagccagttcttgatccactcatatagatgacccaatcggatcaggttttcgatctcatctttaagatttttgcactcattggtactgtgtccaatgtcgttgttgtattcgcatcttttattaggatcccttcgggaactatccctatacagaggaggtggcctccgatagtgtgtatttttcctcgtggcgaaatacacacgttcttgtgtgtccgtcagctccgt

SEQ ID NO: 369574 - DNA, 559 bp, Cannabis indica
catgaaactcctgaaacttttcaaacgtttcagatttcttttgcattaggtaaatgaaactatatctagagaaatcgtcaatgaaagtgaaatactcataaccacctcgagctttgacattcagtggtccacagacatctgaatgtactaacccaaggggttgtttggcacgctctccctttgcagagaaagaacgtttggtcatctttccttctaggcaagactcgcatacaggtaattcacctaagacgacatttttcaatggaccgtctttggttaacctatggagtctatcatagcctatgtgacctaaacgtaaatgccatagataagtttgatcatcattatcaatctcttttcttttaaggtttctaggtctagcaacattgaaaagttcattgtttagtgcgatttgtatatccggtctcaaaacataaagcccttgttccatgtgagcaacacataattgaaatccattacgagaaattgtgcaaacagaactcgaaaaattcaatttataaaattgtgtttgtaaacatgaaacactaatcaagtttct

SEQ ID NO: 369575 - DNA, 453 bp, Cannabis indica
aatattactattttgtaggttttgaatccttttaatggtattaataaagctcgccatgcattacggtcctaattaggcttacaagcacagcctaattagacctaattaactttttttagatataagtctaaaatgcacctaaaagtaatgcactcgtggaattagctacgcaaaatgcaccaaaagaaaatatacatagatgcattcattacatgtattacaaaaataatggttgcattgtgggcctacgaccatgaacaaattagacttaattagttttaggtgtgactctaaaatgcccctaaagataatgtacctatgcatttaccagtacaaaatgcacccaattgaagaaaatgtacatagatgaacatcccaaagacaatttcgtgtaggagaaaacataacattcaaaggagacaaatatcaatgcctagaagaatacaaaaaggg

SEQ ID NO: 369576 - DNA, 578 bp, Cannabis indica
cctagacctgggacccaaaattagaacctaacaaaaattgtcgaaccaagaccctagaacaagaaaacgactgtgaccaggacccggacccagtcctagaacggaactcaggcccggacacggtcgtgtacccagaccggaactgagacccggacctggacctaaactccaacccaaacttggaccaggactcgaactccaacccgaactcagccccaaactcgaactcagaatcgcaaatggacttagaaccgaacaaggactaggactaggaacaagacctaaacccaaaaccgaacccagatcaaaacctagatagagaactaaacccgaaccttgactaggactcgaacccaaacctagaccgggacccaaacccaaacaataaccgagacctggacccagaatcaggatagggacttgggaaacagatctaggaacaggatgtagttcccgatcgagacccgaacttgaacgtagcacccatctcgtgaccctgcaccagattgtaaccagattcagacccgagatttgcatccagatattgacaaggggcttggacaaaacccggagtcggt

SEQ ID NO: 369577 - DNA, 672 bp, Cannabis indica
ccgtgcttttaaacaacagcatcccattgtcagaaattgagaagtccttagctttgcctgctaagatatctctcaagtcttaaccaatacaggatcttctaattgggccattttgattctttccaacaaatctgactaaagtgtcagattaaataatttctcaatcaccaactcaatattttccctagtcatctccgaggctaactgaggggaaatcatgaccatgttggatatttgatcgggtccctttcggcttaaggcatcagctacaacatttgcctttccagggtgatacaaaatttcacaatcatagtcttttaccaactctaaccaccttctctgtctcatgttcagatccttctgagtgaagaaatacttgagactcttgtggtcagtatagatctcacacctttcaccatataaataatgtcgccatattttcaaggcgaacaccactgctacaaggtctaggtcgtgaattgggtaacgctgctcataatctttcaattgtcgagaagtgtaggctatgactttatcagcttgcattaacacacagcctaaaccctgccttgatgcatcacaatacaccacaaacttttcttgatcagatggtaatgctaaaacaggagcggtaatcaaccgttgtttcagctcttggaaacttttctcaca

SEQ ID NO: 369578 - DNA, 1016 bp, Cannabis indica
tgcagacatgtctcggcagatgatggacgccttaaggagaggatgagcggaagctctagcgcctcccctccgccaagaagtctaagggcggagaggggtcttcagagaagaggccttctggagagttcattgatctttctgaggagctgactgctgcaaatccttccactcccatatctgccaagtctaaggagtctgggccaccaacatctgggtccgaactggtcaggaggattcctgagcgggtgcaggcaccaactccacccatgcccgtgctgcctgaggtcaagaagggcagggaggtgatggctcatcacatgaaccggctggttcccgaggtcggtgagcagctggctggtgctgacaactcatctctggatgtgttggtgggcggagtcttgaaggagcttaccagggttagtcttttcttttcgacacttcccttttagcttttcatacttagcttcatatgctgaccttttcctttatgcaggccggtttgaagttggcttatacctattcccgggctaagtctgctacttccaggagtacggctctgtccgacaccttgagggcggaggcggacttggccaagaaggaagctgaggaggccagggcggagactgcagctgttcgccatgagttgggtgaggccaacaagaagctgtttgccgctgagaagaagatcaccgtgctgaccaaggacctcgaggctgctgatctctttgaggaaaccatcgagaccttatctgctgaggttgatcgtcttcaggatgagaggacttctctgtgacaggtccttcttcggctgaaggaagataaggacgctcaggcagccgaggcggaccgcttgaaggagaaagtcgatgctttggagactgccggcctcgagctcttctttgatttttggaaggctaatccccacaccaacttcgactacttgggcgacgccaaggacatgtacctcgagtattgcgcggcccaagttgcctatggtgggaaagaggtggctactt

SEQ ID NO: 369579 - DNA, 836 bp, Cannabis indica
cgttggctaaaagcgaggtcaagttagcttcgggtgcaagttcatgtaatttcaactctgggtcctaaatttgattgctccatgtcttcatggtacagagtacagaatgatagtttgttggattcaagttattgaagtctaaacttccattctggagctcccaaagtcaatctgggcgcagagctaggatcccctcctaggttgactactatgactcgggtctactcaactttgtgatgtcatctctcttgccatatgtcaaatattgatgtcgtcgtcactagagaagttttttaggttaacaaactagttcacatttttctttccatcactacaacaagatttttattgctcatgtgttgagaatacaaaaactttttctacactatcatcctactagcccacactagtctttgtgtgtggtggaagatctaaaagatcaaggtgcgaaatttttcatcgccgttctaaggatacaacatatgaaaagactcgaggttaccttgatacaggggcggagccaggatcaattatcaagggtggccaaaactatattagaatttaagtaacaatttttttgaaaagtattgttaattaatacttaaaattaaaatataagcatctcttttttatatcaagaacgtctataaatgaatcttttacaaattctttcaagaatttattttttaatatagactatagcaaaaattcacttaaaaatctatatttcaacttgttgtaaagtttagtctttactatattcatgactgagaaaaattgttttgtgataattgtagaaattataagtataagaataagaattatcactttatata

SEQ ID NO: 369580 - DNA, 717 bp, Cannabis indica
gtaagctcgcgtttgacgaacaaaggcgtatgttcgctgaatggagagacaaagagatggaggcattaagggctcaccatgcagagatcgaagatcgtagtcggcaagctactggtctgatacgaagagcctaccaccagactataggtcagcaaacgccgaacgtcattcccctgggagaaacggaggatgacccgacgatgaatacttcccagacaactaatggtcagccgcccaatccccggtcacgagttctgctcgtgtgccaagaggtaggcgggcagaccttctccgggaattcatttggaggagccatacctgacggatccaacccgaatgatggtgttattccacctgtcaaccaagcgaattaatcgctaaggcaaccagactcttctgtgttcgataggttgggaacaacccatgacctaaggaatgatctaaacagaagaaggggaatagacgagcagaatactacaatgatcgtgcagcccggagcccatactcaaatccctgctcagaaagacgctaacgtaatccaagttgaccaaaatgccgagcaggtcaacccagccgtacaggcctagcttgacgagttgaaaaatatgtttcatggcatggccggacagcataacaatgatcttgagttagaccgtgctcgcggaactcccttctccccagagatcaatctcctgccactgactcacaagttcaaaa

SEQ ID NO: 369581 - DNA, 637 bp, Cannabis indica
taccctgcaatctactcttttaaagctaatcaaagaagtacaaatgcaagatccagagttggtaaaaacctgagatagggtttcggcttggaaggctagtgattttttagtggatgaaacgagaatgttgcgattcaaaaatcttgtttgtgtgcctatggatgtgagtatcaaaagagagatcatgaatgaatctcatacgactccttatttagttcatccaggatcaacgaagatgtatcgggatttaaaggctatgttctggtggccaggaatgaagaatgacattgttgagtatgctgctaagtgtctaacttgtcagcaagtaaacgttgaacatcagaggcctgcagtgttgctgcagccattgaacataccagagtggaaatgggaagatattgctatggactttgtggtaggtttgccatgaaccacaagacagtttgactctgtgtaggtcatagtggataggtttacaaagtcagcgcactttttacctattcacacgaatttctccattgaccagtatgccaagttatatgtcagagaaattgttcgtcttcatggtgtcccaaagtccattatttcagatagagatccaaagtttacatcgagattctgggagagtctgcatcga

SEQ ID NO: 369582 - DNA, 613 bp, Cannabis indica
aaattattgaatgacttttttttttaacattagtagtatctaaatctaaaaataaaatatcctaaaattattcagcatatttcaactctagatataatcacatttataactctagaaattaaaaaatatatatataaagtgtagtcatttacaataacagagtttataggcgaaggtatacaataataaattgaactttaaaccgcatatacaattagtttgttgagagagatcaaaaaaagaaagaataatatatggaattattttttatcaaatcgtttaggtttcctctcggtatttattttcatttatatttttttttcgatcgcagtccacttccactacaagcaaattcttattgccgtctagatggatgagtgaatctacgaaaaatggaggatctgatgcaaatttaccgtgagaaattcaaaaaaatcatctcccaatttcaagttcttatccaatttaggttttctttttattcgtaaatcattctccaattattatgattaatttttcattttctaacattttgaagatttttgtctaattttagtaaaaaaattctaacataaataaaagttcaaggatacatatcaaagtttgagggcat

SEQ ID NO: 369583 - DNA, 358 bp, Cannabis indica
agcccgaatgtccttctctttgtctgtgatccttcacagtcaggcgcggaggcagtgtataaggtgggatggccctggccccccctcaaatttttaaagaaataaatttattatatatatatatatgtatagctaatttttttaactaagtgttataaatatatatatttggatgtatataataaaatgagattatatatatacacgtatatttagtaacttaccattactttttgatgtgataaatatatatttatacaaatataattaatataaatattagtgtttttttattaaaatatataattaaatatttaatttattaaattaaaaataaatcaattaagttatatatttt

SEQ ID NO: 369584 - DNA, 562 bp, Cannabis indica
gcagagtttatctaagaaaattcgaaggcaaggttatttctgggcaacaatgattaaagactccaaggcctacgttaagaaatgtgataaatgccagagattttcaaagatacctcagtcaccgcccaatgaattgaatcagatgcaaagtccctggccttttgccatttggggaattgacctgatcggacagttgcccaaaggcaaaggcggtgtgcagtacgcagttgttgcagttcattacttacgaagtggacggaggccgaggaattgggaaccatcacatcaaagaaagtggaagacttcattgtgaagaacataatttgcgagtttgagttaccatacaagatagtcttggacaatggcaaataatttgacagtcaatccttcactgatttctgttcgaaccatggggtcatataaagtttctccacagtggctcatccccaagcaaatggtcaagttgaagaagtcaacaagacattgaaggacaccctaaagaagaagcttgaagatgctaaaggaaattggctgaaagaacttcctgaagttttctggtcat

SEQ ID NO: 369585 - DNA, 727 bp, Cannabis indica
aattttttttttacataatagaagaaaaagaaaaaaaaaaaaaaataaaataaaaataaaagaaagaaacatcataaaacttgtaattgggaagaataatttattttagaaatctaaaagtgaagttaaaaaatatacaatgtcatatttgaagaagaaatggcaaataaaaaaatataatcagaacaatatatagatgaaaaaaattgaaaattagaatttttttaaagaattcacacaaatctatagaaaatttactatatatataataaatagagaaatatgtaaaaactcaaaaccatacaacactaatttcgaatacttagagcatgtttggtatggtttttgtattttgttttaaaaaattatttttagaaatgagaacaaaaaaaagtttttaaagtttttaaaacacaagtcacgtttgggtagtgatttttaaaaacaatattgactaaaagtgaattagtttttaaaacagaaaacaacattttgttgttttcaaaattcttgttttttgtaactttgttttctgaaaactgtttttaaaaaacatggccaaacaagccaaattatttttaaaaacaaaaaacagttttttagttatgatgccaaacatgcacttattattttgctgcaacaataataaatattatgaattaatgttgaaaccccgaaacaaaaaataaaagaaaaacaaaatgaataataataataatattacctt

SEQ ID NO: 369586 - DNA, 621 bp, Cannabis indica
gtcggagataatttttgaaggaaccccgtatcgataaattacgtgggtccttaaaaatcagggatatcttctgcccgtacttcttttagtggtacggcttcagcccatttagagaagtaatctgtgatggccaaaatatatttatgggctttggaagagggtggcgtaaaaggaccaatgacgtccattccccatgtttcgaaaggccatgacagtatagaaggatggagtggttgagggggtgaaatctccatgtaattggcatgacttacaacattttgcaaaattaattgcatcttgaaccatagtaggccaatagtaacccaaccgctttaattgagccgacaattttgggccggcttgatgggcgccacatgtaccgacatgagtctcttgaagtgcatgtgctgcttcttctatcgagaggcatctcaataatatcccatcgaatgaacgcttgtacaatgtgtcattaaagaccacaaatcaaggcgctcttcttcttacatccactcttttcttcaagtcttctggcaagactcatttttggatgtagtctttgattgactcacgctagtcattttcatttgcactatccaggaaagttatcaagttgactgt

SEQ ID NO: 369587 - DNA, 627 bp, Cannabis indica
ccagtcgggacggagctaatattttagttttttttttctgcgtattttcagagtgaggatgcgtttcgggtgcgtacttttgggcggtccgagagaggtgggcgtgggtcggggtgggtgcggtggctgggtgcggtggttcaccgtgggtggtgtcgagttttgggtggtgcgatctagcctcacgggttgagttttcggtgtgcatacggttgagaggctttctttgacagagaaaagaggaagaaagaaagggttgaaaataatgagaggggtattttagggtatagggaaaagtgattctactttttcaatagatataagtattagtttaaaaaattaatttaggtataaaacatggatataaattcaaattttccttatgaaataaccgacgacatagggagggaccttatggcatcggtaatcgacaccatagggtcttatgtcgtcggttattatacaataaatgatgtcataagaccttcaggagtcggttattatgaaataatagactctataatgatttcttatgattttttttttaagtttacaattttgtgttttaacataatttttgttttaatttttattaaaaataatttttatatatattatttcattatt

SEQ ID NO: 369588 - DNA, 602 bp, Cannabis indica
agaaataaaccctgttttgtatctttttcatttttttattctccacgtgaattttgatatttttaatttaatctaaactaataatttgtggtattgagacagaaataaaatttgtgataaaaaattaaataattttgtaggaattttcttggtgaaattccaagaatgccctacaccaactcaagcatatcggtcaaaaacgacagggacaaaatcgtcccagaaaaatcaaatttaaaacaatcgatccaaacgacaaagaaacctcagtcgtttctttcccacacgtacaatggaacttgtcgttttcacctacacgacaaatacgtttaaaccaaacgatttgtcgttctgccttgaacaaaaactatgttcaatcagagctaaccctagctcatttgctaccttcgaacattcgagagtttctcaaactctctctctttctctctgccttctctctggttctcaaaccctagagccagagattcttctcaatctcttgatcgatcttacccagaatcacctcacgaaacaccacaaacacacacacacaaacgattagacaaaaacacagtaggttagagtaagaaatacaaacacca

SEQ ID NO: 369589 - DNA, 598 bp, Cannabis indica
tgtcgccccagcatttttgagaccaaatcgcatgactttatagcaatgtagacccaaatctgtttggacgcttgtatgatcttggtccggtggatgcattttgatttggttgtacactgaataggcgtccatgaagctcaataattcgtgccctgctgttgcgtccacaacttgatcgattcttggaagtggaaaacagtctatggggcaccccttcttgtggtctgtgaaatcaatacacaaactcttgggagctagtacaggattagcaaccgaattcgggtagaaagattcaattatgaagttgttatttcgtagcttctctacctcttcctttacggctagagctcgctccttgtcatacagccttcgcttttgttgaacttgtcgaaagtttggatcaatatttaggatgtgcgaaattacagaaggatcaattccgaccatatcctcatgtgaccaggaaaaaatgtccacgtttgctctcagaaattttatcagtgctgatttcacttcgaccaacaaaccttttcaagttttaagctttctggccagaatatttgggtcgatctcagtctcttatagttcttccacaggt

SEQ ID NO: 369590 - DNA, 440 bp, Cannabis indica
gtgattgcgccaaaatctaccaaggccggtcggccgaggatcgcgttgtaagcggtcgggcagtccaccaccataaaagtgcagtacttgaatgtgctccggggcatgtccggacacaaagtgactggaagtctcactttgcccattgggataagcgtcgttccattaaaccctgtgagttgggagccactaggtgagagctctcggttcgtcaggcctattacagtgaaggcctccttgaagagtagattcacggagcttccgttgtcaatcaagactctggccaccaccttattagcgatgggggtctcgataactagcggaacatggtgagggaagcgcaccatcttggcgtctttttccgtgaacgtgatgggttggtccatcagccggggcctctgagctgggagttgagtaacctcccaaacctcattgtgctt

SEQ ID NO: 369591 - DNA, 523 bp, Cannabis indica
aaaaataaaaaataaaaacaagttaataattcaatatactactttttaccttttttcttggatttttctttgtaacgatgaactatgaattaatgcatacatatatatatatatggtttttgttcattaagaagacatatacattgattttttagaaattttgaggggccaaggccaccacaactacacacttacgtccgcccctgcttgtatctaaatactatgttttagtcacaagtaatattttgttgtgactaaaagttacatttaataaaaaaaaaaaaaaataggatcagtgttatctcatatgaacacaataaactgtagcttcgttccatataattttattatcaaaatatatagttttattttaaactccatatataatataaaaatatataatcaccctagacgtcaatctaaccatcaaataaaggaagatatatttaatattagaaaaatgtactacatgtggagagagagagccttgcaattataattaggagtcattgtctgtgaatca

SEQ ID NO: 369592 - DNA, 661 bp, Cannabis indica
agtatactgttgttaagtttcactggtgttctacttgttgttttgaattaaactgtcttgttgtttactggtatttataaaaacacagttatttttagaaaaaattctgtgtgacagttatttttgtaaaaattcactacaaattctagtatttttgtaagtttccattttttatttactgtggtttcactaattattacgattcaatgtcgtttacataactttattatcttatttatttactatattacgattatttaagtaataaaaataaaatataataatatttgtatattttcaataaaatattaaatgatgattaataataatgatatttttttttacatttttatattggaacacaattataaataatgagctaaatataacataaaattatttttctgccaaatctaagaccaattattgtggataatatcccacatgaaataaatggtagagaattgagccatatataagaacatggactactccactcatggccaattggttttgagatggaacctcatgattttcaacatggtatcagagccatatcccttgcgggcaagtgatcatatctgatccgtacctatacagatagtgaccatgtccactctgatacggttcaaaattgatgagcaaaaaatagccatcatct

SEQ ID NO: 369593 - DNA, 726 bp, Cannabis indica
gagatcgagatcgatccagctatcccggccagaaagctaaaaattggaaagggtttgtggctcgaagtaaaatcataactgataaaatttctgagagcaaacctagatgtttttgcgtggtcacatgcggatatggtcgaaatcgatccttctattatttcacacgtcctgaatatcgatcctaacatccgaccaattccgctaaaacgaagattgctggataaagaacgagcagtagccctgaaagatgaggttgaaaagctacgtaacaacaacttcatcgtcgaagctttttacccgccttgggtcgcaaaccccgtactcgtacctaagccgaacaagaaatggggagtctgtattgatttcacagacctcaacaaagcataccctaaagactgtttcctacttctaagaatcgatcagctagtcgatgcaacagccgggcacaaaaatattaatctttatggatgcttattcgggctacaatcaaatcaaaatgcatccgccagacaaagaacatacaagtttcgggatagatatgggtctctactgctacaaagtcatgttgtttggtcttaaaaacgccggagctacataccaaagattggtcaacaagatgtttgaagaccagatcgacagaaatatggaagtgtacgtggatgatatgctcgtcaaatccagaaaggttggggggcacataggtgacctggatgaatgttttaaagt

SEQ ID NO: 369594 - DNA, 542 bp, Cannabis indica
tttcactatgttatggcttgattgtgaagaaatagtgttttggggtttatttgtttattaagagactttatggagtctaattaataaatattataaatgacaattttatttgatagttattttaattattaaataaatagtttggcatttataaggttgaattgaaaaatatggtattattgaaaagaagaataagtggttgaaataaagtggcaaaattgtaactagagattggtccacttattgtatacggccaagaggtatttttgcccaatattttattcttttttaatccatttaattcaaccctaaccctattgaagaatagtataaaaggaaggttatggtctcattatccaactaatgcctccaaagctaaaaacctagatgagacctcttccttcttctttcttcttcaattcgaaatactaagcctatcttcacactaaatattttcagccattagtgaatgagtgagtgcccacacacatcaagtggtatctcaatcatagtgtgtaagactgtaggagattccaaacaac

SEQ ID NO: 369595 - DNA, 534 bp, Cannabis indica
tcttcgagtttccctttgatggtgtgctttattattttgttaacagcttcagtctgtccattgctttgtgggtaagcaactgcggagaatgccttcttaattcccagatcgtcacataattgtcgcatctctttacaatcgaactgctttccattgtctgagatgagtttgtaagggatgccaaatcggcaaattatggagttgtagataaactcgcacaatttagtcactataatggttgctagtgctttcgcttcggcccattttgtaaaatagtctactgcgactactgcatatttgactccgccttttcctttgggtagcttgcctattaagtcgattccccatactgtgaaaggccatggactcgtgatagaatgcaggtcactcggagtttggtgggtatatgtggctattcgttgacacttgttgcatttcttcgcgaaagcgaaagcatcttatcgcaaggttggccagtaatacccttgtcgcatgatttataatgcaagggagttaccccctgtatgattgcca

SEQ ID NO: 369596 - DNA, 507 bp, Cannabis indica
tataggtccaaagctgtctataggatcctcaaagcaaggatctatgtctgcatccccacttttggctggacttcatttccctttactaggctcttcttcagagctcttggtggcatcttctttttcttggttttggacaaggccaagttgtaacagtgacgagcagattgttggtcttcccttaaatatcctacccgccttcaggtcgtatagggcaggtcgacctaccatggccttgaaagcagagggaatgtcaattacgacaaactatgccatcagagttctggtggttggattttctccaacagtgaggggtaatttgatataccccacaggtgtgatgccctagctaaagaagccatacatcacttgactgcaagatgccaaatcatttcccaccatgcatcttaccatagtcatattcttgatttgtgcagtgatgattagggggtcgttgtgtaggaaactaacttgagcatcatctccttctgtgaaagagatcgtggg

SEQ ID NO: 369597 - DNA, 522 bp, Cannabis indica
aaaagaaatgttgttttcagaggaaaaggtcttttcacttaaatccaattttatcaaagtctataaccagtcatgttctctttcacactggactgacataatctttttctgtgctagtggtcataaaatttgatgtcaagttaagtagtcaattagaaattagaaactcacaataggatgatacatcagccatttttagatcttcaactttctatagaactcccccaaataaaagaatatttacacaatccaaccaaaaaactcttttatttacttttttatattgtttctcataggatttttcttttcaataataattagtatctttcatataatattgtcaatttctttctcaaaaaaatattgcaggtttttcatttttcaaaagttaaggtgtttttggtaacacttttgttttttaatattttaattacaaaatgaatgtaaaattttgtttttaaaaattttgtttttgaaaaataaaaatgtgttatgtaacaacttttatttttcaattttaaa

SEQ ID NO: 369598 - DNA, 580 bp, Cannabis indica
taaataatttattattaaaaaaataaccgatccaatccgcactattgcggattggattggatttaaactcttatgcgaatcggattggatccaaaatatgaaatccgcacttagtgcggattggatgttgtttgaccaaaaaaatgcggattggatcggatgaacacccctaaaattctagtaggttaagtcacgattgcgggtttttttaatcataaatttataggacagatatctgcaatttgtgtagtaaccttctcgaactacttaaatagcatgttttgtcaaatcatggactagtaagtaagcgagtaacataacacaaaactaatttagaaatttagacaataaaattataacatcctcaaataatacaccaaaataattagaacttcaacttataacatcgaaaactacacgccaactcataacacatatcaaaatactctacaaaatatctacaaaacaaaataagaataaaaaaaaaaaaaattagagttactcctaatgatgatattaactaataaaagaaaaatactcaacagtaaaaagaatgacaactctcaaataaattatactt

SEQ ID NO: 369599 - DNA, 1149 bp, Cannabis indica
aaaccgcgatttaaattcggaccactacaatccgaactattgtaaaccgtaaccggggaaaccgtttttggtggtttggtcaatccggaccgtttacgtcgtaatggttcagttgcggttcgtaatatataattaacggttaaaccggaccggactgtttataataaataattaatttatattttttttatatatgactatatgtataatttaaaacctttttgtgtgtcaagttttttattgcataaattttagatttttatgttatgtttgacttttgagaatgtttttatatcattatttatatcttatagatctattacttatcattgttaaatatatattttaaaaaaataaaattaaaaacttagtaaaaatagtacaattactaaaaaaatatgaataattattaattccacataaactgtggtttcgaaccaaaccaaaccgttccttaagggttggtttgagaaattttttggtctggtttggtttttaatattgaaaaaaaccgttatgctggtttgattcaaaacttatggaaattcggaccaaactaatctgtgaacacccctagttctaggcactacgagcctaccctgaccttggtgctagctagtcttaagcatatctaaggatacactaaatttagtgtcacactatcattaaatttagcgtcaaaaaatatttctactccaaaaataaaaaataatatcactattaatttgcaaaaattaccacaattactatattgaactaataatttaaataaatttactaataagattaaagataataacactcaattttattttgggtgtgttaaatttttcaaaattttacaagatgtcttaaataactataatgtacatgaccatggaaaaaaaagattagataagtctctcaaatgccgaaacaggtaagagtatattagtgcgctacttttaaagaagtgcattacttttagcgtgttaaatttttttaaatttttttaaaattttataaaatatttaaaataactataatatacacgattgtataaaaaataaactaaaaaaatctgtcaactatcgaaataagtaagagtatattcgtacatcacttttaaaaatatatgttgtaaatttttttaaaaataaattcttaatt

SEQ ID NO: 369600 - DNA, 620 bp, Cannabis indica
ggcataaaacccaacacctcctatcctatcagaacccgttctcaaagagaacttgttcgtatacttcgttatcttcgagaatgcggttagcgcggccctagtacgggaagaggaaaaaactcatcatcccgtgtactatgtcagcaagcgcatgataggagcggagacgcgatacccggtgactgaaaaactagttttttgcctcctaatggcctcgagaaagctgagaccttacttccaagctcacccaatcaaagtattaaccaaccacccgctccggcaagtcctacaaaagccagaggcgtctggaagacttctcaaatgcgcaatggagctaagccaatttgacctacacaacattccacacacttccataaaagggcaagcgctagcagacttcatcacggagtgtcatgaagcagaagctaacgctaacataaccacaccaccagtcccaacgtggaaggtatttgtggatggggcctccaacgagaatgggtccggagcagggtcgcgatgatatctccgaacgaactccgactccaagcagccctacggttcgaattctcagcttctaacaatgaggccgaatacgaagccctgatagtagggctgagatt

SEQ ID NO: 369601 - DNA, 1048 bp, Cannabis indica
aactaaattgttgattatcatatcaatgtaaatcttgtgtactgataaatcataggactaattagtttaatcacataatattgattattttccactgtgtagataacacactaattatgaatagcaatgtgataaggatttaaaagaatttatacatcaagcatatgatcataaaataaacaagtgaaccaagcatggtactaaacaagtaataaaataattatattctaatattgataatgaaattcaagataacattgaaataggattttagttagggcacaaaatccaataaactcccgtctgcactaacataaaacaatcagtatatttcaactaatcctagattttatctatgtttttcaatgcattctctgtcaatgtcttggtgaatgggtcggctaggttgtctttagtatcaaccttttctaccaacacatctcttcttaccatatattctctgatgatgtggcatttcctctcaatgtgtttactcatcttgtggcttcgaggctctttactattggcgattgcaccggtgttgtaataaagtaacatcagtggttctccatacctggaataacaccaagctctgtgaagaactttgttagccataccagttccttagcagcctcagtagtagctatgtatttggcctccatggtagagtcaaaaattgcatattgcttgacacttctccgaagaagtgctccacctccaagagtaaaaaccatcccagatgtagacttcttatcatcaagacaagcttggaaatctaagtcagtatatcctaaaggattcaaaacaccaccttgaagactaacacatagttccttatccttttcatgtatttcagaatatgtttaactgccgtccaatgttcctttcttgggttggactgatacttgctcacaattcccattacatagcaaatatctagtctagttcgtaacatagcatacatcagacttccaacagttaaagcataatgaatttttctcatatcttctatctcttggggatcaataggagactgttccttagatag

SEQ ID NO: 369602 - DNA, 1036 bp, Cannabis indica
gaatttagaatttcccaaaatacccttttagtaccctttatgtgatgttagtgtggaggggcaaaatggtcattttgccccatttgtattcttgtcctttagtggacttagatttagaaattatgtgttttattctatttgtgttggctgaagtaataagggaattatgtttatttcatgttttattcaaaagtttctaagttgagaaaaaatcaaagttaaaggaaaatctttttctctcaaactctctctccattttcggccctccttgagcagcaaggatccttggtttttctctgtgattcaagctcttttttgtgttctaatgaagctaggttagctcctaatcttctcctctttaagtttgttgaaaatttttaaaagatgagtgttgcatgtatggtttttgatgtcattgctgctgttaattgttgttgttgtttctatgattaaaatgcttgaattgaatggattagataggttgtaatgcatgcttgttacccttgtttaagtttgtaaattttggtacaaagctatggttttcaaagtaaattgttgattttcgttgctgtggttgcgctattgttgagtagtgttttctggtgttaaactatgttgaaataggttgagttatgtttgatttagtggctgtttggaggtatagtcaagttttgagtttttgaactcaatcttgaacatccaatggtgaattgagtttctgtgattgaagcttggttcttttgctttggatttttcttaggggtatttagaacaagtctggaaagtttggtatgatttggatttgatttgaaagagttatgaatttttgaaagtttcctgcgaggaaccggaattccggatgtgcaaccggaatttcggatggggttcaggaattcccagaaccggtattccggatgtgcaaccggtctgccggttgggggattttcagaaaccctagtttttctcgtttctatgttatttggtgtatttcaatgctttttatcgatagggaaacttctagtttctagtttaagtc

SEQ ID NO: 369603 - DNA, 515 bp, Cannabis indica
gaataggaatatgagaatgagaattggaataggaatagaacgaataaaaattaaaatgcataaaaaaattattaaattttttcaaatcttgcattggaatagtttttccttacattttaaaatggaatagtcattccactaaaatgatggaaaagtcatttcatcgaaatggtattccaatagttttaaatgcaaccaaacaaatgaatggaatgaaaattatttcctatccattccattccatttcattacctccaaccaaacgctactaaagccaaaccgaaactcttgatttttttattattatattttattttaactagtatgaatgttctttggcttgaattctgtgttgtacaattacaacaacatgcatgccattgattttaatgaatgttgaatcatgatcagaattataatttatagcatactttacatatagttttaatcagggccgtctgataggcctagggcaaaatttaaaacgaggccttttttttataaaattaaaataa

SEQ ID NO: 369604 - DNA, 645 bp, Cannabis indica
agtcattatccacatgtcactttcgaattagtatatttaaagtaatttttaaataaaaaattaaaaatttattgacctaggctagccagagattttcatgtggccattgatttacacattacgactaactacctacgaaagtatcaaaaatataacttaggtactattaccgtaaaaaattaaacttaattatttatctacaacttagagttaaacttaagtatttatgtcacaaattaaacaaaaaaacaaaataaatagcattttaatatttttctaacaaacaaatagcataataaaacaatattgaaaattattttaatgaatatgttatacccgaaatttggctaccatttcaatgaaagacacgtgtcaaggtaggaagaatatggatcaatgtgtgtaacggtaattatattaaatgcggacgtgacagggtatatttataactcgctgactataaggtcttatgcaagataaatatatacaaactggtgcctcatgcattaagaaaccatatgacattagatgcacaaggtgagacatcaacctcgttacgtatgagtagatgtaagcgaggtataatgactgtgaagacacttatctcataatatacagtataaaaactaagtataacagtcgagt

SEQ ID NO: 369605 - DNA, 956 bp, Cannabis indica
acatataaaaagaggtatgtttcaattaaatataaaattaaaggtaaatttgattaattgattaataaaagtggtatttctcaacttaccccatttaaattttcctctcccatgtcaaaaataagtacactatttcttattatatttatattattttattagtatatttaactataatattaatttatttataaagtatatatatatattttattgttttacataataaaattgatgataaagttaataatttttatatttttaataaaaataataatagattaattaaattttatatcaagttttataattgtatattagagtataatactaaaaattgttttaaatttatcacaaaatttattttttttatgacaaatatagtataatttatcaccaataaatctttttggttttaggaataatatagaatagctagttttacaaaaatactgaaattttgaacaaaaatttacaattttacaaccacacagaattttttacaaaaatactatatttttataaaataaccataaaacaacataacatgacaattaaaaacaatagtaaaacaactaaaaaaagaaccgtagaacaaccgtgaaaacttaatacagtatacaaaaaaaaattaaaaaagaatttttgaaaaaaaaaaacacagtatttgtgaaaaaaaattttgtcccagtaaaaaagaaaaaaaataaaaaatttcagtatgtggtgtaaaaactccttataaataatgttagattaatttgtcctattactcttgcaactttattatttgtgctagctttagtaaaaacaataataaattgtaaaatattgtttgtatatatacattcaaactaaatttataaatgtagtgtgtgtattattaagtagtattaaattgataattttagtgttaaatctataaaaaagattatttaaatttcaagaattgaatt

SEQ ID NO: 369606 - DNA, 541 bp, Cannabis indica
aacaaaaccggagcaccccaaggtgagtagctcggtctgataaatcccaaattcagtaactcttgcaattgtatcttcaattccttcaactcagctggagccattcggtacggtgctttagacactggatccactcccggagccaattcaataacaaattcaatttcccgaacaggtggcaatcccggcaaatcttctggaaagacatcaaggaactcgcataccaatctcgtattctcaggccctgatgtcacaggttggctagtgtccactgtagtaactatgaaccctagacaacctctacccatcaggtctttagctttcaacagtgatattctcggtatgcgtgccccttgaactttacccacgaacaccgctgggttagcactgtcgggctcaaacaccaccatcttccgtttgcagtcaatcatcgctccatatttagacagaaaatccattcccaggattatgtcaaaatcagataattgcaactcaattagattggcggtcaactcacaaccgtcaatccaaaaagacaagg

SEQ ID NO: 369607 - DNA, 585 bp, Cannabis indica
ttttacctcagctttcggctcttctttctttgcctgagggcaatctttcttgaaatgccccaccatgccacacaaaaagcatgtcttccggttgcactctgccgaataatttttcttgcaacgtgggcactcagggtaaaagtaaccctggcgtccacctctgctttggttccccacggaaccgcttgctttgccccgaaccaccaggtgccggggtaactttcctcttctgatcagtggtggaatcaccaccatccctacaataggcaggagtaggaaaagtgggggttccaccaactatctgagtcacacggggctcctaaagaaatttcacagcaccctcagcccgcagggctttctcaaccattttagcataggatgttgcttcattagtagtgatcaccagatcatgcctgatcttcacattcaaaccagccagatacttttctttctaactaaagtgagttggcacgatacccacagcgagcttagcaagacggtcaaactttgtagtatactcagtgactgacattccctcagtctgaaccaactcagtgaactctttctgcttagcactgcgaacgg

SEQ ID NO: 369608 - DNA, 732 bp, Cannabis indica
tgcaagaccaacattctaaagtggtatgaccaatatctttatggtacttacagaacgttttttagggctcttcagtcgcgatttcccctgatagggggcggcttcttgaagactccattcctttcttcaattgcataaatgtggtcttggggcaccgcgagttcggtataattaacaaaacgcggtccacccttcctcttcagagaggactccttcttgggaggagatttggccaactttggactttgttgtctccgtgggctgtgtcttctcgggcttcagcccctggaattcttccctcggggactgcgagatcttgatcgcggtattggtgatttacgtttatccttgcccttgtccaactccgccagagaattctcaattctcttatgaggttcagcaatggcgaagaattcgactagcgattctggccttcgagcttgtagctccttccagaaatcggttctcagcaaaatacctgttatcaacatgcaaacaagtgaagactcgggagccttctcgacttttgttacttccgcattaaaccgtttaaaatagtcttgtaaagactcaccgggttcttgtttgatgttggccagagttgtataaggaggcttgtaggtcatcgtggcctgaaagtgcgtgaggaataggtcgacaaaggtttcccatgtcgatatcgtggactcaggcaactgggtaaaccaattgtgggcgttttcctcgagtgtt

SEQ ID NO: 369609 - DNA, 572 bp, Cannabis indica
tctgggatggtttaggtcgctgaaacgcaagtcgcagcaaatttaacctcacaaaggtagtaaaatctgatttggaaaccctcgaaatcagatcttcacacgcgaagggctcattcagctgagtatcgtcaaccgagtctgtcccgctcccttccgcctcctcttcatcctagcctgactcgcgagcaggggccatccaatcatcgtccatctcctcgacctcgacgtcaggagaatgcctcgagtgaataaggtagtcgcgggccgacactgtggactcgctatctcgaatgtcgatggtcccaggctcggcaagttcctgcaccattctttcgatgtctgcagaagacatcgggcctagctctattggtacggcctcctcttctgaaatcgaggtttggagaaagctgtcttcctcaaggtcaacttcaccatcgaatgcacagcctctagagccgagctgttggctatccgacaagtcgctcatctgaaagatagaagatcttttcagcgtgatgaatgtgtcaaaagcaaaataagtgatctcacccgcattaaactataaagtcgca

SEQ ID NO: 369610 - DNA, 594 bp, Cannabis indica
ttaatcaacatacttgtgagtagatctaagatcctggtaaaataaattccaacatgaagatgatcagaaattaatcttgtaatggcggaggctgagaggagatcattagtacgtcgatgcctcctaggcttccaatcaggcctggttatggtaccattggttgaggtaggccctttttggcaaagttcgctcagggggcttctgtcattacaatgtaactacaaccccagagttacatcatagaaagaaactcgagacattataaaccagctaggaagtctctactagagtactgctcatcctactgggggtccgagtctttgccttagaagccattgaatgccctgcaatccatcggaggaaacagactgcccaagagatcctggggtgcatgcacgcgtctcttggggcttcccagagctcaagaggtgtgtgtgcatcgcttttcgtgtgataaagatcattgggggtgtgacacatcttcaaccctccttcttggaatggaaggactgcttgaagtctgtcttactccccgtgatgctttccccctttgatcttttcaagggatgtcattgcttgaatttttatgcaact

SEQ ID NO: 369611 - DNA, 504 bp, Cannabis indica
attttgatatattatgttttaagagtttgaaaacgagatcccggtacttgtaaataatttggtataatataaagcctaatatttaatataaaagttttaatttgacacgtttttcaagaaaattctttgattagcaaagactgaactgtaattgaaaaaacactatggtgtgccttggcattagggcgtcacagatttaccacaatatcatgtactttcccgtacaggtgctggtatcaccgtaatgtactcttaaacaatattcactataccaatgcactctgtaccataactgtacatgtgtcggtagcgcaactaatattttaagcatgcatatacacataacatatacatacacttagatattaatatcacacattatatacagttcttaccttctttccagattcgagtgtgctggccgacctgaatggaaagtctcgtgctagatggatgtcctaatcacataataaaaccgggtaaatcacatgatcaaaaccctaa

SEQ ID NO: 369612 - DNA, 511 bp, Cannabis indica
aatttacagataaccttaaataagtacaatatatgggattataaaaaattattttgtatgataaaataggtggggaaacgtttttggttagttatttggtaaagttgcaatgattttctatgcttttttcttaatgatcggtgtttttagtttgtaagagcttattattagtcttaaaaattttcattctaaattttattgtattaactatgagtatatttcattattactattaaaagtattagttatttgttattaagagcgtttcagctattgattattaaagttctaaagttatttaagttattaatacggctgaacatcggacgggtttactggatttcggattggcagattggcgggtttcgggttcaaaaaattgaaactgaacccggacccgaatagggcacgggttggcaggtcacgggttggtcgggtttggcgggttggcgggttgacccggtcaactctttaaaaaacttaattttttattctaaataatttttttttt

SEQ ID NO: 369613 - DNA, 720 bp, Cannabis indica
gttcatcataagtcactttcatctgtaatatattggtagttgaagtaggtgcacaggataaaaagatgaatcaccacccacgttagcagaaaatgtaataattcacaagatattttctttttatcaaataaaaactcaataatttaccaatttcatttatgtgggatgagttttcctcttttatttatttatttatttattttttaaaaaaagtcaagtcaagagatacctttttctgggtaagggaagagatacttcttattagtctaagaggtgtttggttaaaaaaaaaaacggattaacttaaaaaaaaaaaaccgtaataataataaaaaaatacaaaatacaaaatacaataaaattaaatattttgtaattttaagatttcatttacataaaatgcggtctttttatgtatttttatattgtactcttgttaattttttcttatttgtatattatattcttattatatttttatattatttgaatgctattttcttgttaattttatgcaatttttttcgttatttttgtactatttttatgaacacgtaaaaatataaaaaaaatctttaaatgtaaaagtataaaaatttaccaaaaattataatttacattcaaaaaaaaaaacggaaaaaactacttagagaaaaatgcaagtttttgtactttattttgtcaattgattattttcattttttgtatatgatgtacatt

SEQ ID NO: 369614 - DNA, 583 bp, Cannabis indica
atgtatactgggagagaagatcctctttcccatctcaagtatttcgaattgcaaatggagttgcaaggggtacggggagatgtatgctgcagaatcttccctgccactctgtcggaagccgctcagtaatggtattttaagctggctcctggaaagtttagttcatggaaaaccttctcttcaaaattccatgcacaatactcctcctcgcgccaacttccattgcatttgggagacttggtcgaagttatgcaacgacttggcgagccactctgggcatacatcagcagattcatgacggaggcaaccaaagtttcacgggtaaccgaggatggaaagttatccgcgatactggggggcatcgaagtcctcggtgaactttggaagcatataaggaagaaagggccagtagactcaatgagtgatttcgttgaccgagctgaacgcttcatcaagcccgaagaagccattcaacgagtagaaggtgaacaaaagtcaggcaagtcaaaggctccttccgctggaacatccacccaacttcccaactatccaaataatttaagctcaagtggcaagcgttcca

SEQ ID NO: 369615 - DNA, 785 bp, Cannabis indica
aagtacgtgccagtttacaccatttatacagagcttaattaaacttgggagaatatctaccttgggcatgagcataaggttgcattcagtaaacctgagcccatgagcacgcaaggcataaaagagatccaaccaattactataagtaccacaaagacattgggcacacagcagatgagtgttgttagttgaaagatgagatagagagtctcatcgtgcgaggccacttcaagcaatatgtgaagaggcatggcaatggacataaccagcccaatccgcccaacaacccaagcaaccagggattacgacctcctcttgtggaaggagagggatatcctggtaaccttaggatggccacatattgcaggagagagcaataacacccaaaagaggtacgtgaaggaagtgaagaacgagcagtctgcatttgctccagaaccttctcagaaaataaaaactaaagagcctcctattataattttggaggaagatgaaaagaacatgaggtaccctcacgtcgatccattggtgatcaccgttcatatccctaataagaggatataaagggtgctggtagacaatgggagttcagtaaacttcctttacatggaaacactgaagaagatgaggctcgaaaaagctaaattaataccttacatggtaaatctttcggatttagtggtgatagtgttgccagtcaaggaataattgagcttgcattgaccttgggcgaagcacctttgtccaccacaaatatgcaacactttttggttatcaacctgcca

SEQ ID NO: 369616 - DNA, 986 bp, Cannabis indica
gctcaaaagtggaatcaccactctctcttccagggctagaaatagggagagtagtggtcccaccagcaccagtagtctctcgagtttcttgcaagaacttgactgccccttcagctcgaagagccttgtcaaccatttcagcataagttgtggtatcatttgttgtgataactagatcgtgcttaatcctggcattcaaccctaccaagtacttctcttttttactgaagtctgttggtacaatcccgaaagctaacttagccaagcgatcaaacttggttgtgtattcagtcactgacatattctcgccttgtaccaattccacaaactctttccgctttgcactgcggactgcctcattgcaatacttggcattaaacacgtcccggaattcctcccaggtcattctagtaacatccttggtgagggataccatctcccaccacaccaaggcatcttcctgaaattggaacgtggcacatgccactctgtcatttccgaccactcccatgaaattcaatattctttcaataacagtcagccactgttctgccttaagtacatcaagacctcccagaaacactggaggtgcttgcttcctaaacctctcatataaaggctccatacggttaccagcaacatgctgctgtgctagaggagctacaggaaccgcagcaggcggttgcgggggaagctcaacaggagcattccgttgcctgagtcttcaaatctcatcttcttgttgctcaattctggcttgcatctcagcaaatttttgctcctaatcaaccggagcctgaggtggatcctcttggccacctctcggggcacgaccgcggcctctagcgcgtccacgggggtttctaccacctcgaccacctccgatctcaaccatttcaccctgccttctgacgtttcgctgggcgtccattactcaggacttagcctacgaacccacaaggaatgtaggttagacagtggtcaaa

SEQ ID NO: 369617 - DNA, 646 bp, Cannabis indica
tcgtcaagatcgagttcctcaatgtttctcatttcttcgattgaggtaactttggacatgaatcttctggggaggacaccaagcacctttcgaaccagtttcgagttagagtaagttttccccagagcatacgattcattagagatgtcacaaagttttgcatggaattcagccacagactcatcctcctccatggtaagattttcgaaagcctttgccaaggcacgcagccttgatttcttgacagcatcagttccctcgttcttaatctttagcttctcccatgcttccttagcaatttcacaattggctataaccttcaactggttagtggagacggcattaaacaaggcatgaagagcctttgagttgaaattcgctctttccatttcaacagtggtccattgactcatgggtttgggtataacgatttcattctccatcatcgttggtttccaccacccttcttctatggacatccaaactctttcatctacagctctcaagaaagcacgcatcttggttttccagtatggataattggctccttccagcatcggaggtctcgaggtggagcctccttctctaaacatttccatcctgcacacagaagtggtaaacagacacacaaatgttctgtagttct

SEQ ID NO: 369618 - DNA, 602 bp, Cannabis indica
tggaacaacttctcggcgaattaaacgctcccaaatcacattgataacaatacgaataagtgactcgctaaatcccacccgggacatgggttttaaaccaaaaacctatctactgcaacttaatatggcaataccctaaactagcagggaataaaactgacgcgaaacgacaagctgaatttttggatttccctgctgcaaaatccgggtaaccggttttacaatgcttgtaaaacctaaccggttttacccagaaaaaccaaaaagctccaaaccctaaccaaatcgtttccaaacccaaccaaactttccaaaccttcataatacaccccgataaacatttttcaagtgatagaacaacaatcaaagctcagaatcaaatttcaccattaaagctccaagtttgagttctaaactcaaaactcggttaaaactcactaacaaccctaaaatcatgctccaaacaccatttctaaacatatttaaactcccaaaaactaacccaaacaataatagccactacagaacacaaaactctaattcatgcaaaataccattttctttaaattcaagaaaacaagaataggagttaaagagattat

SEQ ID NO: 369619 - DNA, 1010 bp, Cannabis indica
gattccttccgaggcggaggaatacactgtgcctcacgacatagtattgactccggtcccgggagatgaggagaggcaaaatctccagatagccaaatacaattacgccctcgacgagtacagccgggggcatgctgaagtggaggccttgaagaggatcttacgggaggagcaacaaaacactctcaacgaggaggccttccggaacccgtgggacctgaacatggacccgctgacggactggttcaatcgtttccttgggcccaccttggctccctttgcctcagagataaccagcgagtttgtctcccatctgactcagttcccgcccaaacgatatgccgcttgtgcctccttgaactccgtctaccaggtgcaagacattagcaacgccatggctgcggtagatacttgcgttttattttttcccttgatattttgtctaaggcattcgttcctactcttgcctcctttttcagattattgcagagaccagccgcctttccaagaccatagttaatcatggctacgtcatgtctgaatttgggggcatagacgaggccgtgaggatcctgcgggacctgtttgctgaaaggcgggcgatccaggaggaggctgagcgaagggaggcccttgctaagggaaagctcgaggaggaagctaaacagaaggaagaccaggcagaggcgaagttccgagaggaggcctaacggagggaggctgggttggtggcgaagcatcgggaggcgctgaaggcggaggctgaggccgtcgccaaggctaggcgtgagcttcgggacgctaaggaggccatggaggaaatggctgccaaggtgaagtccctagaggagttgcaccaggcggacttgcagtccaaagccaacctggccgtggagttgaaggagctgaaggactttagagatcaggcctggaagaaggctaaaagagatgagctcctgccccctctcctgcaagcactgcgtcaagcgcttcgacgatggcgtctatat

SEQ ID NO: 369620 - DNA, 534 bp, Cannabis indica
aataaacatttaaaaatacatttctataataaaaaaaaccagttaaaaaatagcaacaagaacaaaaccagttaataaactcaccttcttcttcttagcgcgagatttcttaacctcaggtttcttaggtgcatcaaccggaacttctgaaccagttctaaaatcagcaccaacaaacgcaacattaccaagctcaacaaaataaaaaatacaatattaaaactggttaaaaaactagttataaacacaacaagaataaaagaaaagaatccaaaaacagaataaatgaacattaattaacacaaatatggaaaaagaaaccagttatatacttggtccttcaaatttttggaaaaagtttcagattgatgagaatccttctgttgaactccaggatcaacataaggaataatgtcctgaaaacattgaacataaaataaacaacacaaaaacaagaaaaaaaacagtaaaatacaaaaaataacaaacaaaataaaacatgaaaattaaaaacataccttacttacttcaccc

SEQ ID NO: 369621 - DNA, 946 bp, Cannabis indica
gtactattactgcctcacacgggctcgtttgaaacgctgtattaaatcatattgtattgtattatattaaattgtattttatgcaattattttttatataaaactatatgtggtattaactttatagacacctaaatatatagtataaattaaaatttaacatagtattatataaaaatataatatataatccaaatttaatataatacaatacaatacgaccgaatacgacattaattccaaacgagccattcatgtcatactatagtcgtactactattagtctaattaaatatcaagtataattttaaaaaataatttttagaaaatatcgctaactaatcgtaggaaaccatctatacaaaatattaggtacactactaatatctaataacaatgtttgatacaaaatttgcgagacaacaacatcaatttttttttttaaaaaaaaaaatgaagaatctaaattggttaaaataaaattaaaggtgaatgttgtaagttcgtgcatgtcatgctggccactcgtatttatctgtgattttccaaaaaaaggtcgtatcgtgtcgtgccacagaaaaatataagtcgtgccgtgttgtgttaatatttttaaaaggtaggcctggtattgcccgtaagcacagtattttcgtgctgtgctcgaattcgtgccgttctttgctcgtgtcgacccgtatttcttaaacaggtcaactcattttcatatccggacttatattcgtgctttactttttcacttttttttttttttttataattactaaattatgtaaatatttcaaaatttaagttatatttatataatttttgaacaatatattttaaagataattatataaaaaaaatattaattttattagaatttaaatatgggcattttacaattttgtatacattattttaattaattacaaaatatgtg

SEQ ID NO: 369622 - DNA, 590 bp, Cannabis indica
ttaatcacataatcttgattacttcccactgtgctgacgacacaataaacaagaacataaatgtgataagggtttggatgaatttaaaaatcaaataaacaagtaaatgataacttgaaccaaatgactcacaaattagtgaaaaatacttctgtttctttattgatattttaaaaaataaagattacattgaaatggagttttatttagggcataaaccccaacaatcgaatccatcaaatgttttagattcagtatgaattggattgaattggatccatccaacctaacaaaaaaggtaaaaatttaattttaattttcatatatacacatatgggtatgctcttaatgagtattacccatgtatgggtattttattcttgaccattggatcaaatatctaatggtttgatatttatagtcattaattaaatattaaaaaattaatatttcctattttgttattctctatcttccgaaaatacacaaaactattaatagaaataaaaaatttatacatagaattgttatttaaaaataaaacacttaaaaaattaacaaactatttttttaataaaaattattttaaa

SEQ ID NO: 369623 - DNA, 631 bp, Cannabis indica
gtgagttagtactggaaacgagagggccaaggtttcttggctcaaggaggggataaatgctcgaagtttttcttcctttctgcggctatcaaagggagacagaatgctattgaaagtatcttgaataaagatgacatttggatttctagacgggatctaatcggtaatgaatttattgacttcttcaagggaattttctcgggtacaagcgtcggtaatgatttcaacagcaactacctgattaaagataggatctctattgctgaccaagctgacctggttcattctcttactcatgaggaaatctgtagtactctgttttccatgagtaacaataaggctccgggaccagatgggatgtccgttcttttcttcaagcactattgggaaactgtgggtatggaattttgcgatgcagtgtctgatttttttcagacaggaagaatgcataagggtgtcaatgctacgaatattgtgcttatccccaaggttcagaatccgaaaagaaccaaccattacaggcatatctccctgtgtaacgttatgtataaggtcatctctaaaatcattgccaatagagttaagccccttcttccttcccttatctgtcctacccaagcagcttttgtcc

SEQ ID NO: 369624 - DNA, 532 bp, Cannabis indica
atataatatttataaaaaaataaaaaatttaaactactattatttttttcataggagttgatttgaactttaaattcaattgatatatttatctcattatcataattaactaaaatatagcaattgaatgtgaaagaaaaaaaataaacattattgctcagtttggatgggttaacccgaccaaactgacaaattcattgggcaggttaaatttttttcttaattggacaggttgcactaagaattttgtaacccaatttttacgttgagttgaaaaaaatgtaacctaaactgaccgacatacacccttaatctcaaatatatgtacccttttgtgtaaatcccaaaatatttcatttaccctatcacttttcctttcttatcttttctctttctcttttcactccaaacattttcactcttctctacacccaaaaaaatatccccattagattaattttcagagctattatctgtgaaagataactatatttcaatcaagaaagagccttatcacaagataggaggagaa

SEQ ID NO: 369625 - DNA, 602 bp, Cannabis indica
aaatgatctcaattctgagatggttaggttctagttcagttgtattatttatgttcttcaattcatttgttaagtcgaccaatggatctccttgtgacatatagattaaggacatggtagttcaattgagtgggagggctaatcatagatacgaaatatatagcttctatttggacatagtagtaaaatgatgatttccctcgagcttggcttaatagagacaaataattgagtactcattccagtaattatattagtttactgaaatatcatttataggtagctaagtgcttttaggataaaatacattgaggggtgtaacggtaaatatgtccctactcgacgtagaccatctatagaggatcattgattaataggattataacaatagataattcataccgtatctaaatcgcggaacatatagagcgctctatacaattaaacaattcaaaatctatagtggtgtaaagaagaattaataagttagagaatttacttattaaaatctaaagctgcttattggaagcttgattgtagagacccatgctccccacactagtttagacaatactgcttgtaagactcagttaattagtttt

SEQ ID NO: 369626 - DNA, 951 bp, Cannabis indica
gtcttgaacaacaacatcccactttctgacgctgtaaagtctcgtggcttgaccaactgaaacgtcttctctgattttcactaactctagatcaattaattgaggagctttaatttgttctaacagatcagattgcagcgtcaagttatgaagttttcctacaacaaactcgatgcttgatctgatcatgtcttctgctagctaaggtgaaatttgaaccatactagttattttcctgggacccttcctgcccagggcatcgagcactacattggctttcccaggatggtaaaggatttcacagtcgtattccttaaccaactctaatcaacgcctctgtctcatattcaagtctttttgagtaaagaaatatttgaggctcttatggtcagtataaatttcacatctctctccgtagagataattctaccaaatcttcaaggcaaaaactaccgcagaaagttctagatctgggtcgggtatcactgctcttattcttttaactgacgagagtcataggcaataacccgatcgacctgcatcagtacacaccctagaccctgtctgggtgcgtcacaataaatcacgaacttctctttattagaaggtacgctaacactggagctatgattaatctctatttcagctcctgaaaacttgcttcacacttgtccgtccacacaaaatgctgattcttttagtgagctcggttaagggtgttgaaattttagaaaacccttctacgaaccgacgataataaccagccagacctaagaaactcctaacttctataactatttcggtcttggctaatccctgacggattctatctttcctggatccaccttgatcccgtctttgctaatatgtgcccaagaaaggacacctgagatagccaaaattcgcagttcttgaatttggcatatacttatgttctcaaagtcgttacag

SEQ ID NO: 369627 - DNA, 597 bp, Cannabis indica
attattatagatgggtttttacatccttctagaattattcctccacccctagagtaaccaccatctctaatagattatgagttggtgtagatagaaggactttaatatacacccctatcatctaacatataggtcacttttatagatcttccttggctgtctcctaatgttccttgtttgattacatcttagatggctcccacttaacagtaggagtttggttaaattcgtacatagaagtacatttaaccattactattgtttctcaaggacattttgttgtgacatattatcttagtctgaaactgtaagttccttctagactatgtcatcaacatagcaatctagtattaacattaatgtaaaatacttgcttaaaattaagtaatcattagagataacaaaaaaatatttcatgaggattatgaatttcgcctaagtcattcgaatagaccatgcgaaaattctcctatcttatgcttaaaattctaatgagttatttgtatccatatgaatggttagatctactttctcaattgaattctaaagtcctatcacaagtgtcatccaaatgaagatgggcttagaattttaaaa

SEQ ID NO: 369628 - DNA, 542 bp, Cannabis indica
cagcatctctagccttggcataatcgagctcgcattaactttaggcaagccacctttatctgctattgttatccaagacttcttagtcattgacttgcccttgacttacaccatattgttggtcgtccagcactaatcagactaggggcaatcagttcaatccagcagctatccttgaaattccaaatgccagatggcgtgggagtggtgcgtggtgaccagatgctggctcgcgattgctattgcatagagttgcaacatagaaaggccggtcatcagttgatgacggtcctggcagaagaaaacgagaaggaagacgaagatcttgatccccgagttcaagatgaccgaaacctgctaaaaccaatcgaagaatttgaagaggttattctcgacccaagaaattccacaaaatgtgtaaacattgggaagaacttggacgagaagctttaatagtagctaattttcccacttttactgggtcaaaactatcgtgtattaaacacatctttaattgttgaatctggagatgtctcgacaga

SEQ ID NO: 369629 - DNA, 1513 bp, Cannabis indica
aacacgtggcaagcatcagtttaatcgatcccgctgttagttggtcaatttctgaggtcaaccacactattcaacatatggtttgtattcaataaaaatggccattttgtcgcatcccaaatggattcagaaggtccctctccctccaaatggttttatggtggaagaagttttggaagatccacttacccaaaaaagtattgagttttatttggcgcggatatcatgaaattccctcaacttcagttgggttacataaaagacgtgtacttgctcactcctcttgcccaatttgtgatttcagtttggactccaatagccatgctattttctggtgttatggattcaacaaggtgtggaagatgttaaatatcaatatattatctaatctttcaaaggacattccgttccagttaattgttctaaaggccactgagattttgtcacaaactgaatttgagttgttttgtgttgcttcttgatttatttggggagaacgatgtgagatagtctttgaaataaatctcgttctcttaacagcttggtattgagaatacattctctatttggggagtttacaaaatgtcaatctctaagggatagagttgttgatgccccttgtacttccacttcaaggtggataactccattaataggtcatctcaagatgaatattgatgaaatactagatgatcataataattctattgtcattggggctattgtacgaaactcctttggcagtgttatggcttgtttgtctaaacctctaataagtgtgtatcttatcctatttattaagtatatttaggctatatatagattattatttttctgccaaatccattattgttggtaatatttagctctctaagggttcgtttggaatgttgtattaagtcgtattgtattgtcttatattgaattgtattttatataatacttttatgtaaaactagatgttattaaaattgctttgtctttattctggcccattaccggcccaatgggcttccttattaatgtgtatgtatagagaaatgtaagtaaatgatcctatttttaactttatagatagttaatgtccattttttaaaataataaagcaaatgtccttttttactttttaatacctaaaatactcttcattatataaaaggtattatatgttttattcctttaatagaaattataaaaaacaatagttcaaaacctctctactgaatttttgtcaattattttttcattatataaaaggtagtatatgttttattcatttagattttgttgttgtcgttggtgtctaatatgttatttgagcatataattagttttttattaatatatcgtatgatatacaaacaatataccttaaaccaatatacatatatcacaaacgtaaactaatatactattaaatgaattgttttccacaatatacagtagcatacaaaaacatactacaatcataagcagatataccatagtcaaaaattaatataccaccagcata

SEQ ID NO: 369630 - DNA, 635 bp, Cannabis indica
ttggacaaggagcgagccctagctctgaaagaaggggtagaaaagctacggaataataatttcataattgaggatttctacctagcctgggttgctaatcccgtactggtacccaagccaaacaaggaatggtgagtttgtattgatttcactgacctcaacaaggcatgccccaaagactattttccacttccaagaataaatcagcttgtggacccaacaacagggcacgaaatattaagcttcatggacgcatattcggggtacaaccaaatcaaaatgcatccaccagacaaagaacaaacaagttttcgaacaaatatgggtttgtattgctataagatcatgccatttggtctaaaaacgctggagctacataccaaagattggtaaacaagatgtttaaagaccacattggacgaaacatggaagtgtacgtggatgacatgctcgtcaaatctaggagaaggctggggcatatagatgatctggacgaatgcttcaaagtcctcaggaagtacaacatgaaactcaatcccctaaagtgctcttttggagttagctcaggtaagtttctaggcttcatcatcaacgcccgaggaattgaagccaatccagagaagattcaagccctc

SEQ ID NO: 369631 - DNA, 1728 bp, Cannabis indica
agtttgggttcggattcaggtcgagtctcagtcctagtctagggttgggactgggtccgagcctgagttccgaggcttggttctggttaagtttcgggtcccagtctaggtgcaagtcctggtcacgatcccggtcctgttccagggtcctggtctcgttctggttcaagtttcagttttgggtcccaggctaaggtttgggtccatgtcctagtctagcttcgggtccttcgctgagtcccaaatcaagacaccgactatgggtcttgtccaagacctggttcccagatcccaggacaagatctgaatcccaatcacgggtcacagtctggtttcggttcatgtcccaagtctcgatctgggtcttagtctaggtctgagactgagacttgcatgcaattcttagtctcgatcccaattctgggtcgcgagccctcgtccatgttcgggtctaagtttaggtcttggttcttgtcccacatcctggttcgggtttggatttgggtttgggacccaatcccagggtgggtttgtgtctgagttttggtcctggtccggttatagtttaaggtatgggtccaggttttggtcctgttcttagtcctgattcgcttctggttttggtctgtttcaagtcacagggtatgggttcaggtcgagtttgggttcgagtctgggttcgggtcttaatttttttctagggcaaggttcaggtctaggttttggtctcagttattgttcgcggttgggtccggtgccgggtttaggtccgagtccaggtcccggtcctattccaagatcccagtccggctccatttcaagttttgattttggatcctgagtgtgggtctcggtttggggtcaggtcatggatctccatagttttggtcctagtttgtgggccccattcctaggtctgggtccccaatctatgagtcttaggtcctggtctaggtccatgttcgtgttccgattcaagtttgggtctagagtcccgatctgagtccaggtcccaggttttgttatggtcccagtttgagtcccagttctagtgcgagtctgaggttcgggtccctggtctgagtctggttcttaggtcctgggtccggccccagtttttaggttcgggtctaggtctaggttcgggtcccggtctgggtcaaggtccagttttggtttacgtcctaagtcacaggtcccggtctaggtccaagtcctggtatgggttctggtctgagtttgggtttaggtttgggtcatgttactgtcccaggtctgggttctagtcccaggcttggttcgattccaatttcatgtccgagatcaggtctggatccccgttttggtctgggtctaggcctgggtatggatccgggtatgggtcatggattcaaacactgactactggttaggtcgaagcctcaagttcagattcggatctcagtcttgttccaatttgaccctaggtctagcgccgggtcctaagtttgggtttgggtccgtgtttggggttgtgtccccgtagtcacgtcctacgttctaagtccaaggtcgggtcctgtgtctcgagtctaggatcgagttttgggtcttagtccctgttccaaggcccagttttgggtccaagtctcctatcaaggtctgaatccttggtccaggtctgggtctaggttcaggtttggggcccaggtcccccatctaggtctggatcctaggtctcggtgtagg

SEQ ID NO: 369632 - DNA, 686 bp, Cannabis indica
aaatttgaaaaatttgttagtttaggtttgaatagaaactttagggtttctaaccataaaatttttcaaacttattttattttctttaataaaattgggaatatcctaactataaaatatcttatttttcaaattgtttatttttgtaatatttaatttattaaattataagctaagaatataattttagatatatctatttttttaaaattcaatatatatatatatattatattatattattagaaatttaatcaatttaattttgaataaacttcaaatttgaaaaattggttagatatttgaatttaagttagaatttaggatattttaggagatttgttaggtttttgaattttttcaaatattctctaacaacctaaattttaaattctagttaagatatattttaaattttaaaatagagatatcttagcctactttccagttatctgttacttgtttggtttgtaatgttttgattatttatttatttattcaaaaaaaatttacaaacctattatttaattgatctaaattgctatgattaacttgttgacagatccaacaatctgattttaatcatagttcaattgtcaatagatcttataataatttgtaacaggtaaattttgcaatttctttcatctgtgtaaacctagtaacatgatacggcccatccaaat

SEQ ID NO: 369633 - DNA, 1014 bp, Cannabis indica
agaagttcatggtttattgcgatacattcagacagggtctgaggtgtgttttgatggaagccgatcgggtcatcgcttatgcctcgcgtcagttaaagggatatgaacgacgatgccaaactcacgatctagaacttgtcgcagtagtttttgctttaaaaatttggcgacatggtctctacaaagagcctcaaatatttatttactcagaaagatttgaatatgagacaaaggcgatggttggagttagttaaggattacgactgtgaaattttttaccacctcgagaaggccaatgtggtgacagatgcccttagtagaaagggtctcgggcaagtgactagtatgatcaagatttcacctcacctagcagatgatatggtcagatcgggtattgagtttgttgtaggaaaacttaacaatttaaccttgcaatctaatctattagacaaaattaaagtggcttagttaactgatccaaaattggtgaagatccgagaagaggttttaactagtcaagctatagattttacagtgtcaggtaatgggatgctgttgtatagaaccagagtttgtgttccaagtagtgtggaacttagaaatgagattctcgaggaagcccatgccactccatattcactgcatcctggcactaccaagatgtatcaggatttaaaacctttctactggtggtgcggaatgaagaaagatatggtagaatttgtatcccgttgcttgacttgtcagcagattaaggctaaacactagagacctgtaaggttgttgcagcctctgactcttcctgactggaagagggaagatgtcaccatggattttgtggttgggttacctagaacaacagggatgtacgattctatttgggttgcaatggatcaatatactaagtccgcacattttctactagtgaaaataacctttatagtagatcagtacacagagttatatgtaaaagaaatagtgaggttaccggggcttcgaagtccattatattag

SEQ ID NO: 369634 - DNA, 690 bp, Cannabis indica
tcaccctggtaaagccaacgtggttgctgatgccttgagcagaaagggacagagtcagatatatacgatgaaacaaatctcccagaagctagcaaatgagatgacttgagctaagattgagtttgttgtagtgcaattagctaatattaccctgcattctactcttttggagcgaatcaaagaagcacagttgtaagatctagatttagtgaaatccagagatagggtttcggctaggaaacctagtgactttacagtggctgaaacggaaatattacgatccaaaaatcgtgtttgtgtgcatatggatgagagtatcaaaagagaaatcatggatgagtctcaaaagattccttactcagttcatccagggtcaacaaagatgtatcaagacttgaaagccatgttttggtggccaggcatgaagagtgacattgttgagtatgatgttaattgttttatctatcaacaagtaaaggctgagcatcagaggcctgcagggttattgcagccattgaacataccagagtggaaatgggaagatattgctatggacttcgtggtaggttttcctagaatcacgggacattttgactctgtgtgggtcataatggacaggtttacaaagttagcgcactccttacctgttcagacgaattgctccattgaccagtatgttgagttatatgt

SEQ ID NO: 369635 - DNA, 524 bp, Cannabis indica
acctagttggatcatatgcatccccacttctaggtacatatcctccagcattattggttttttcgtttcttccttctgggtttagattatcaccaccataatttcttcttaaacatgatgttctagtagtatggggtctttgagaacccattggctctttcccagggcaatgtgtaatttcctcagggcgatttccatcgttttgattgtcatcagccatggatagatttctatttataaggagggatttttctgagttttatcactaagactctcaatgaaagcaccaaactgttaacgcagatttttgttaactaaaattaataagccttttagtaataaatactttcagaaataagaaataataaatgattaaagaactccagatatttttacagttaaatctgcatacttcacgagtctatattattatgatattttttgaatacaagatacaatatttaattgataatctctttctctcaaattctctgtccctttttttgtggaatctgcccctattt

SEQ ID NO: 369636 - DNA, 393 bp, Cannabis indica
aaatatagtgatgactacagataagatgttgtgataacaacgctttaaaatcatatataagctttttatagagtcatcaataattatatatttttttatttcaatttaagcgactaaaagaaaatacatatattataacaaaatcactgcaatatatatttcataattaattaagataattaaaaaagttaaaatctaccatattaattaggggaatcatcccatatactatttttatttttatttttttaatttttacagtttgggttgctccagtagttgttatatatgtgagtttgagttgcgatttaggttgttgttattaggtgggttgctatgtgtatttctgtaaatatatataaaaaaaaaaaaaaaaaaactaaaaaaacaagt

SEQ ID NO: 369637 - DNA, 572 bp, Cannabis indica
gtgaggctgaacccacagaaattgaaattgattaccacaaaactagacttatgtttctatttagttgaaaaatagtctttgagagaaaattataaagattgacagaaaattaaagaagaaaaaaaatatatgcaactgttatgaaacattaaaaatcaggacagtatttccatgtacgtaactctatttacatgtctcttcgtaatttaatatgaataaattcactattagaaatttggaaaacaacgaaaatataccaggataaatatttttactttaatattaatgtaatttttttggattatacttgagttggattgtttgggaactccagttcaattttttaagatttgcatttcatgaaaattgaaatcataacattaattttatgcaaattaaattaaatttctagttgaattttaattttatagtagtcaaactgtcaaaacttatcaaataacattttgctatctaattaatggatgtttatttttctaacaaaaatagatcatgatgtacatataattaattatgtatctttatatattaaaagtgtctatttaacggtattt

SEQ ID NO: 369638 - DNA, 710 bp, Cannabis indica
atacacgtgtacaattggacatttaatgctaattaattttttccacctttccaacttctattctatctgttgaggctatcgacataacatcgatgtttagcctcaatttctcctatccatatattatcgataacctatcgacaacctatcgacattctattgataaatgcacattgcatgccttgcacgtgtacaattacacatttaatgttaattaattttttctactttcccaacaagtattctgctctataaaagaaaatcccttttctaattcataagtgttattctcttatacttattttatacttcaaaagtattctgctctataaaaccatattgtgttcttctcttatacttctaaatgtctagcaaagagaacaaacacaaacttctatcaaccgaagagatcaaacaggaacctagtgacgaaattactccagaaatgcaagaatatatagatgcttttaaacgttttgaaaatgaaagggtggcgaacgaatggaggttcctacgcagtcaaataaatgatgagtggatgaaattaggggtgttcataaaaaccgataaactgaaaccgaccagaccgtaaccaaattttcggttccacgtcatcaccgaatttggctgtcggttttggttttggtttttttgacatggcggttggtttcgatttttgaaataaaaaaatagttaaaccaaaaaattgc

SEQ ID NO: 369639 - DNA, 767 bp, Cannabis indica
ttaatatttaaaccatttgattataatatttgtaataatattttttaaagaaaatagatttatactccttatatgataaatttgttaagcagtaaataactatttggtatactgtatttttttcaaaatacaaacatagtaccttatgtttctaataatgatcacttggtaccctttatttataaatcctacagatttagtaccatctctttgaatttagtagaccaacatttctaactagattacccctcatttaaatattttatatgattttaaatattttttaaatattatatgatttaataaatgaaaaaaaaaattgtggtatagtttctccaaatgaaaagatcttcaaaagttgtggttatggaaagttagatgacatctagatgggagttcccagaaatctaacttgttcatccagaagaagtctcgtggaataatagatatttttcggaagtggttcttggatgcctatcatgtccacctggatgaagtcttcaggaaagctagcctctctccagaaaggagttccaaatggccagttgttccctcttggaagggagtcccggatagtcgactccaattgttgcctttcttatccaggaagtcccttcagcgtacgttttggtctgttttccaagaagcgtacgtctcatccggaagcacttcacttatgctgatgtgagataatattacgagttattaactttgttaagtcataactaactcaaaaacttatcattggcagccactgattttaggat

SEQ ID NO: 369640 - DNA, 602 bp, Cannabis indica
agaccaaagttgaactcaaagcttaaacttgcacaaaacttaaaacaaacctcaaaatcagctactaggaactaaaatcaatccaaactaaccctaaaattcgaactaaacaagaatcaaaccctaatagcccccaatttacaatatcacaagttcaaactaagtaaaatgcttaaaaacacataatcaagagttctagggttttacctttgctctagtctcacaaacccttgctgaatactcagaaaataccagcttgaagatgatttttcccctggtttttgccccagccgaaagagaatagagagagagttctatttttgattttcttctttttcttaatttttcctcaaatggaaaaggattttccccaattaatccttactaaatattacttgctatgtgtcaaataataaggcagccacctaactcaccatttaaccaaatgaccaaaatgcccttaacccaaaactaaagtttttctagagctaggggtaaaatggtcaaatttcataatcccgctcaatccagatatttaattttctcaaaaatatttcccactaagaaataaggttctaaacttacccatgtgatcaaactag

SEQ ID NO: 369641 - DNA, 620 bp, Cannabis indica
ggtgtttactcttgggggtggagcagttgtttggagaagtgctaaacgaaccgcaacatcagactctaccatggatcttgaatacatagttgtcactgaggctgctaaggaactagtctggctaagaaagttcttctcaggacatggtgttgttcttggaatggaaaaactacttgttttaattttttgatgacaatagttttatagccaacagtaaagagcctcgaagatagccacaagagaagcaaacatattgagagaaaataccacatcatcagggaatatgtggcaagaggggacgtactagtggagaaagttgatattgaagacaacttagttgatccattcaccaaaattttgactgtaactacatttgaaaaagcacagactgaatctaggattaattgaaatgtacaaattgttttatgttagtgcaagtgagagtttgttgggatttgtgccctaaataaaactctatttcaatgtaatcttttatattcatttatcaataaagaaacagatttattttcattacttatttaatgtgttattttgtttcataagatcatttatttgatttataaattcaatccaaatcctatcacattgatattcttgtt

SEQ ID NO: 369642 - DNA, 615 bp, Cannabis indica
aaattaatccaacaaccatcaaagcccatccttaccatcatagctcggagataaccccactcaagcttatcataggctttgctaacatctagcttgagtgccatataaccatccctccctcttcgtttcctctttaagtgatgcataatctcgtaagcaatcatgatgttatccgagatcaaccggccttgcaaaaatgcactttgagtagtagatatgatagacgacataacactcttaagtctattagcaaccactttggacacaatcttgtacaacacattgcataacgcaatgggtcttaaatcccccatatccataggctgcttctttttagggattaagaccaagatggttttgttaacgtctgtaggaagagaaccattatgaaaaaacttcttaaccatattgatgacatcatccttaacaatcagccaacacttctaaaaaaatcgggggtcattccatcaggctttggggatttatctggatgcatttggaacaaagctttccaaactacttcatctgaaagcggtaacagcagctcagtattctgctgggatgatacacatgtttgcacgctgcttgtgacttctctccaatcggtttgggaag

SEQ ID NO: 369643 - DNA, 493 bp, Cannabis indica
aaataaaaaaaccagctaacctcatggggagaaggcatatcccacttttgagaggcatagagaacgaagaggccagacaaatacttaatgcccttgggagggaactgggtcggacagaggcggaagaagtctgacacattcttaaactacgggtgcaaaggcaacaatgccccttgttgggcatgagcacccgaccaggcgcacatccccctttcagggtttgtggctcgattattatcggtgggaatgtaacagtccaattcgcccaggtagccatcctggaggagagcccgtaggcgtgcctcagtaactttggacggagggctcacccacttggcacccaaggtaccttgccttctatgagaaaccgcggccagtaagttcctcactgacgtagtccacgccctcaaccaggacgtcgcccttagcatcgactggctccccaacctcattgtatcccccatagttgggggtgcaacctcctcctcttcct

SEQ ID NO: 369644 - DNA, 453 bp, Cannabis indica
aaacagttagcaatttattgtttccatccattttaagtgttaagtatcatgttggattattcatgtgtacatctatgtggacacggtatatatatgacacaattttattagttcacgtaaataaatatataaaaataaattaaaaattaaaaaaaaattaattgaaaataaaagattgtaaattaaaaaatatatatatattttttttaaaaaaaaaaaacctttttttcctttttttgttcttcattcttttttgccaatttgtttttttttttttttaatttcttcactttcacacataccatcaccaccaccaccctccacaacccatcatcagcgcaacaaataccaccactttaccctactgtttatatccaaatcacaaacagaaaatattaaacagaactcaaactaattttaaacaaaattagatcaaacacacacacacacaca

SEQ ID NO: 369645 - DNA, 501 bp, Cannabis indica
attttaacaccataccatgatataaacctatccgggtctgggttcgaatatggttctgggtctaagatccgagctatccgaatccgggttcggatatagttctgggtctaagatccgatatgtaaaaaatataaaatataatatattagacagaaaaaaaaaaattgtttttgaaaattgaaaaacaaggttgtttggcttcaaaacttagaaaatgttttgagttttttaaaactgaaaacagtttttaaaaactaatagtggtcgtttgacaaaattttttaaaaacagttttttaaaagtcagcttttaaaaaactagaaaacagaaaacattaaaatgttgttttcaattttcaaatattaattttttttttgtccaacatattatattttacatttttgctcacatattcggatcttagacgcggaacaatatgggttcatgtcatggtatagtgttaaaatattgattttttttagtaagaaaaaaatctaaaaa

SEQ ID NO: 369646 - DNA, 802 bp, Cannabis indica
atttaacgccgtagaatctcgaaacataagtattatttgtaagtattttatttttagtatggatcaccctaatggtggcgactattagtaggacttacaaaagtatgaaacaatggtggaggctcatgaaataggaatgaccttgactctcgcctaaacgggacaatgtcggattctctttttgatcgaataaaaggtttctagaatgtttgtcattttagatgagttgactactctattcaatgaatgatgctttgacgctcgcctgaacgagacactgtatcagtttgttaaaaaccttggaaaataaaatattttttttggtatttttataaacatatttgttatacttgttattttctgaatttgtgtatgaatttattgaaccaaatgatttacttctgtttactgatatttgtagtgtcaaaatgaacaacccacaccccgacccacttgttaatgatgaatctgaaattccaaaaagaaaacttgcttggaattgaattatcaaaagaacaatgggttcaattcattcttaatagtcttcatcccgagtatatgattaacaattttaactcttccgacatggttaagctagaagcggaattgcgagcagatgaacagaacttgattgcaatgccgcccccgaatttgcaaacttgtgtaagaggaaaagaattaaggatgaagcttctaacaatgatgcttcttcaagtacaattgatggtaatactcttcaatgttcaaattgtaatgagaagggacatcaggaagaacgatgtcccaaacttctaaacaattc

SEQ ID NO: 369647 - DNA, 888 bp, Cannabis indica
gaaaattcagcaacaactctaatcttttcatcctcaaatctaagcaaacttacaaattaatatgtagagttgctaacacattaaagagggtcaaagaacacaaatcatgcataaaattcccaacaataaatcccctaattttagattgcataaacaacccaaatcttgcttcaaatcaacaaaattccaagttcaagaacatgagttcaaatccaacacatccctattaaattccaacagcaaaacactagtaaaatataaaattccaacctagaaaacatcataaaatctctgcccaaactcaacaatggaacatacaacaacaacaagctcaatttcaacaagattaacaccaattcacttaacatgcaacaaagaacattcaaagcttaaaagagcatgctttccaattctaaactcagttacaaactcaaaattaaagagtgaggagaagaactacctcaaattcaagccacaaccaagcttaattcccaattacaaagcttaaaccaacaccaacatcaagcaattctcaccaatttagctttgaaaattagagagggttagggagagagagaggatcgggtaagagaggggaagcattaaccagaattttcctttttcattttccaaaaattccactttagtcatgtaaatcaaataaggtcaaaagactaaacatgcccttagggccaaagcacacatattcatcctcacaagggtgttttagtcatttcatactcaatcatttttcaaataaaattcagattatccattatcaaataaaatgccaattaattcaatccaatttgcatttcgggccctaacctggtttgacccgagatacccggttgtgactataccgcgccaacctgtcagaacacacct

SEQ ID NO: 369648 - DNA, 860 bp, Cannabis indica
atggtgtccattttagatgagttgactactctattcaatgagagattactttgactctcgcctaccggaacactgtatcagtttgttggaaaccttggaaattatttaacatgtgtttgctttgtattttctcatgtctttcttacttgttacttgtatgataatttctgaatgtgtatgaatttatattgaaccatgttgttttctgttattaatgttgtagtataatttcgaatcttcattgttggtctaacttaccatgttgtttttaatgggacaaactccaaaggattgtcatccgttagacaaacatagtagtgttagatctcaaagtatttgtaaatgcaacatctagttgtacatccaaagatgacaacttagactagtatttacaatatgaaacaatgatgagattcataaaataagaataactttgactctcgcctaaacaagacatcgttgaattcttattttaatcaaagttatcttttatttttctcttagcttattcatttcgaatttgcttaaatagtgtatcattggatgaatggtttataaatcatttgcttatgatgtcattctaatttctcttatgaaattaaatggcgtatatgactatattcccgacaatctatcttgaaatgatatatatcctctgtaacgacctaatgctaaggcacgctacaatactttttcaattacagtgcaatctttgccaattaaagaattttctcgaaaaacgtgtcaaattaaaacttttatattaattattaaactttataatatattaaaatatataccagtaccgggatcccgttttcaaactttttaaaagttaatattccaaaatacatttatta

SEQ ID NO: 369649 - DNA, 491 bp, Cannabis indica
aggtctatgatccgagttccaccaattaaggagagacaccttattcttcttgaagttttttccattcagcattgcatagaattcggtccaatttttcaaaaataaggttggaagctctaccattgcaccatgtataatcacctccttcagcatgaagttcacttaaaaggcatttcgaaatggctaaacggaagtttttcattaagtagtccggtttggggcctcctcccttttttctttttgatttatgatttcgttaaaatcacctccgcatatccaagcacaagagaacattgatttgagcctatccaacaatttccaactctccattctacctcccggatcggggctgccatagaagccggtaaagcgccaacaaaagccaagatcattttcaactagagcatcaatatgagagcttgtataagatttgatatgaactaaatattctttagtccatagaagggccaaaccaccactttttcctttcg

SEQ ID NO: 369650 - DNA, 753 bp, Cannabis indica
ttgtaatttatgtaattgctaaatgtcgctaaatgtcgctaatgtaatcgtaaaacgtcgcaagatatcgacttttcactaaatgaattaaagttctattaatgtcgcaaaatgtcgcaaaagtaatcgtgaaacgtcgtaatttttaaattttttccagaattaataaaagttcttcctatatcgcaacatgtcgctagtgtagtcgtgaaacgtcgcaattttttaatttttccagaatttataaaagttcttcctatatcgcatcatgtcgccagtataatcgtgaaacgtcgcaattttacgactttgtccagaataaattaaatttccaaacatatcgtgaaaatgtcgctacatatcgcaaagtgtcgtgaaatacacaattatatacaaaaatctgagatacgtcgttaaacaaccacatacacagaaaataatgtcgaaaaaatgtcgataaaacatagtcatacataaaaaactacaagtaacatgtcataaaccataataataataatgcatgcaatttaaaaacgaaaatgatgctcaaaccctggccttgcaagtagctttgttgtgtcccaatgcgccacagtttgaacatttgcgtggttccttgactttttgaccgttcgatggaaatcggttagtccgtagtcttcctgcattgctctttcttggacgacctacaggtttcttctccactggtacacatagtagttattggatatgcccggaattcttcaatcacgt

SEQ ID NO: 369651 - DNA, 783 bp, Cannabis indica
aatgtatgatgaatctctgtgatctgtgcgtttgtgttaaatttagggttgggtttggtcagatatgtgttttgggtagaaaaatgggtttttacgccaagtccgttgtgttgggattttataccataaataaaacccatttcaataaaatcttatttactatcaatagaagattaaaaattatttaggtttacatgtagtttccatgattataattataatatataaattctgttaaatctcgaacatatagttactcacaattacaacgatgtcatcaatgtaaaaagtaattgtgattatatgcttcacactatttagtcttattatttatcagtgcactggatttacactgacgtgataatcaacgataaagtttacttacacaatgatatgtgaaatgtcagttccagggtattaccaaagtatactagtatcagatgtattagctatacatcagactggaccgatgttgaaagtagaaaagatatcataaacttaatgttatgtcttttctatgtcaatattacttagttgatcttagatcaaaaaaatcttaatcctgagatggttaggttctggcttaactgtactgcatgtatttttgactttgttcgttacagctgaccacttggatcggacaaatacttacatcttaggaacatggtagtataattgagtgggagtgctaatcatagatatgaaaatctacagcttctacaattatttagagaagtgaaaacaatgatttccaaaaagcttggctaacaaacataaatggaa

SEQ ID NO: 369652 - DNA, 520 bp, Cannabis indica
gaatatttgaaaaaaaaaatcaagtaaaaaactaagaaaccgtacattccctaaattttaactaaatttcaatatctaaccaatttttcaaatttcaagttcattcaaaaatttaaattatttaaatttctaacaagataatataatataatatcttgaattttaaatttagatattcgtaatattatattcttagtcttataattcaataaattcaaaataaactatttgaaaaataagatatttttatgggtaggatatttttttaattttattaaaaataataaaatagaataagtttaaaaaatttatggttcgaaaccctaaaatttctattcaaacctaaactaactaatttttcaaatttcatgttatttttgccaaaatataattttaataaaaaaaatatctaatactataaaatgttaaaactaacatattcctaatcttctaattttaattaataaaatatatttcaaaaaataacaaatttgaaaaaaaaatgacatggttagcaaat

SEQ ID NO: 369653 - DNA, 504 bp, Cannabis indica
ttttgttaaaaaaaaaaaaagtagaaatctcatatttataaaacaacaataatttttgccggaaaagtcgtcggcaccagaaaagtggacggggccagaaagtctccagaaaagttagtgtcaccggaaaagtcactgaaaaaatcaatgtcactgaaaaattcaccgtcgtcggaaaaatcactgaaaaaatcaccaaaagtaaatgtctccgatatataactaaaaatataaccgatattatgaataaaaactaataactcaaaccggttataattgaaatataaccggttctgtaccataataaataaaaataaataaaataaaataactcaaagcagttataattaaaatagaatcgggttctataacagtgttataatgaataaaaaccaataacacgaaataactcaaaaccggttgtaactaaaatagaactatttatataacataatgaatacaaacaagtaacacacaacaattcaaatcgattgcaattaaaaa

SEQ ID NO: 369654 - DNA, 507 bp, Cannabis indica
gactcatagactagagtttattagtactcgagccgcgtaaaaatttcttatcttgttctttatttttttaatctatttctttaactttaatataattgttatcaatttccaaaaaactcggtaaatattttggtgctttcattaagagctaatgaaagagttgataccaaagttgtatactgcaacgatggtagccactagaaccattgtcggtaaatttagtcttcgtgatgagaacactcttgtaataccttggaattaagaaatggattagcaaaaaccctaattaaataattatgaataattgaggaattatattattatatagttcaatatatgtgaattaatatgaattttaatatgttaagatcccgttggtgagccaggggcattttagtaattgtgacccgagaagggtaaaatgataaaattaatttaattacgtgcttaatagaactatattattatatggtatgtctgtgttgtcttttcaggtgtgttctgaca

SEQ ID NO: 369655 - DNA, 590 bp, Cannabis indica
aaacttcttccttgttcttaagtcaatacaaataacgaggattaggctattgccgaactgctcaaggctgaacctctataaaactcttatgtcttattattgctttcttatatatattctcattacgacatatcgtttatcgcttattaaaaagactccttgtcgttggctaaaagcgaagtcaacaacttggatgaattaaacttagttccagtggaaaagctaagggagcctagtatatgtgaaacagaagacgtagagatgatacacaactctcctacatggatgactcctatcatcaactatctacttgatgggcaacttccaaatgacaaaaacgaggcgcgaaaacatttgtattcagtgcctcgctacacaataattgaagaaaaactatatagaagagcttattcgatgcctctactttggtgtgttctccctacagaatcgaacaaaatcatcacagaaattcatgaaggcttttgtggggatcatgcatgttggcaaagcctatcgaaaaagatcattaaacaaggatattactggccaacgatcaataaggacacccatgagtttgtcaagaaatgtga

SEQ ID NO: 369656 - DNA, 500 bp, Cannabis indica
ttaattagtgatcatgtggaagttacaaaatattaactccacctcttatatgttacaactatatgtcactcccaatcacataatattgtgattattacatgcatataattctcaattatattatatgtaataatatatataacatgtcacaattttaatcttaaacattatattatataataaaaatataacattttttctctccctccacaataagatgaataaaagactaaataaaatataaggacatatagttgtgatataaggaattatggtaaatgtgaaacttgtgtaaaagcaaagataattaaaaaaccttttccaaaagttgtgagaaattcaaaattgttagatttaattcatagtgatttatgtgaattaaatggtattctaactagaggtggtaaaaggtattttattacttttattgatgattatagtagatatacttatgtatatttgttaaagcaaaagaatgaggcctttggtgcttttaagat

SEQ ID NO: 369657 - DNA, 729 bp, Cannabis indica
tgtgtttattttattattttagagaattcatatttaggatgttaatgaaacatgcttgttagtaagtctagatcctagtaaaatactcccaacaactgcctcaaagccatggtaatgatttactttcatgaaatatggatttaaaatgatgagtacggtttgtgtgttgatttggatgtgttcatgttggtttatgtattaatggaagaatgtatgtgaattacaaaatttttccatgaaaataattttattttcaatttgaaaatattttatttggattctttgtgaaaaattaagcaactttggtttttacggaactcgattccgataaaatttgaaggagttatgaatttttgaaatcggtgtcgagtatggtgctcaatcgcaccaggaactcggacaagctgaagtgatgcacgcgcggaatgggggacaatcccttgtctgaagctgtgtctaggctggcattcagacacgacacacctaggaccctgcgtgtccccttgtgctgaggctgctggcgccgaggattgccgcacatggcaatttgcagcctgttttggctgcacgtgcagccttgctggcagcaagccccgaaaatctgatttttgtgggatttttccccaaatttcaaatttttgcaatttttaaactccaatttcaaaataaaatatattttttaatatatttaaacttaaatatcaattttaaattaataatatttaattt

SEQ ID NO: 369658 - DNA, 560 bp, Cannabis indica
caagcgccaaagaggaagaagaaaacttcctctagctcacatctctgaacctgagagcttcacgggcaaagttgtgggcttccatattaaactgccgagggatgaactgcaaagaagcaccagggaagttcgagaagagcaaccgaatgcgcgaaactaagccggagagagccgagttgtcctgccaatctccattcacttttgagactaagttgagacagtctgaaaaaaccacttgaggagtaaactgggactcgaggcaccaatttagaccttgaattagagcttggccttctgagaaaataggggagacaacaccaggcagcctgttgcaattagaggccaatacagaatgatgaccccgttttagaacaaaaccagcaccagtgaaatttctgaggtggtcagtggctgcatcgacaaaaagagcagttgcttcaggcggtaatggaggaggccttagctgatgagccaactgagagatgggagaaacttcagcaggctgactatcattttgttgggagagttgagcttctttgtattcctgtaaataattcaca

SEQ ID NO: 369659 - DNA, 529 bp, Cannabis indica
agacttcttccgcctctgtctgccccagttcactcccaagggcattaagtatctgtctgccctcttcgttctctatgcctcccagaagtgggatatgccttctccccatgagcttagcttggttttttgatttgtagtgcacccctaagtaaggcaggtcaaggtacttctatttctctcaaccaaacttcaagtggttgacaggcatgggggattcggccatcagcaaaattaggcgttttgttgatgagtacttcatggtggatggcatgggaaccacccacactcggttttagaaaatccctacttatcaccatcctccccacactcttactcttagggatagagctcaagagcttgctcagctgcctggggatgactggaatatatcccagtttacctccgaagacaactgtgtgaagtacaggctctatccgaaggatttaattcctaagccaatgaagggaggaagtggaaattaggtgatggccgggctgagggagctgataaggagaatgagctgattcaa

SEQ ID NO: 369660 - DNA, 931 bp, Cannabis indica
gagagagatgaccaagtttttgtcggtttcacagagactacgcccacttcaccaatgaatgcaacaatctgaagcaggaaatcaaattcttgataaggaaaaataactcgcatttatagaagtatgtcaaggctgatcagaatcagaggaatgacaataaccaagacttgctacctccaacagtagatggacatctacgagtcatcattggaggcctgcacatagctggagattcgggcaaatcaacgatgaagatgctgtcaaaattaggttcctgcatgacgacccgttggtcgtagatttccagatagctaacaagattgtggtcaggaccatgattggtaattgagcctcttccaatatcttattcaaaactgcctatgagaagatgggactccagctcaaggatccagccccctgtctcttgcctgtgtatggcttttccagccaaggagtcgcacctctaggacaaattcgcttacccctcactattgggcaagctccgacgagcatgactatgatggcacaaatcctagtattagatgttccttcaacctttaatgtcatgccaggccgaaaaactttgtatgacttaaaggctgccacatcgatattccactcgtgcttgaagtttccaacaaagaatggggtagggtgtctgagatgaaaccaacaaacggctagggaatgttataaccgttgagtggccaaggataagaaggaagtatcctccagccagagcacagacaagggcaaaaacatttccaagtagggagtttcccaaggcggggatgaagatgtgggtccttgacttggggacccaagccacaatgttggacctgtggaagaattagaagagatcgagatcgatccagatattaggccagaaagctaaaaatcggaaaaggtttgttgctcgaagtaaaatcag

SEQ ID NO: 369661 - DNA, 541 bp, Cannabis indica
ttcggtttggatctcggtctggttttttatttgggtttgtgttcgagtctgggtcttggtcctggtcctggtcctagacctagttcgtgtcagttctagttgctattctgagtttgagtttgggttcgagtttgggtcggggtttgagttcgagttagggttcgagttttgatctgagtttgggttcgggtctagatctcggtctaggttggtatcgggctctgagttgtggttagggccctgggtctagttctaagttcgagtctgagtcccaagttttgatctcgatctgagtctgggtttagttcgtggtctaggtcctgggatccgatcccagcctgggttcgagttcgggtccgggtgcaggtcttgggttgggtctgattttgggtctgggtcctaggttcgggatcgattttggattcggttcctagttcgagttttgtcctgatatgggttcgtgtccaggttcctgtcctagtttgggtcgggggcaggtttcgggtttaagtctgggtccaacttcagattcgtgggtcca

SEQ ID NO: 369662 - DNA, 643 bp, Cannabis indica
gatttctgatagtgtttcagggcttatgatttcttcctccctttttcagtctaacttgcctctattaataattacatagtcaggcagttaattacaaagttgactgtaatatttacaacaattatcccctgaaatcgtggggtttgattacatatcacgtaaaataattgcggttaatatatgaatatcacacgggtctgattagtccctatatgactggccctatatgacttcaaagctgctatcagttttccatttgtgtgtcaagttcccaacaaaaaatagagtgggatgtctcaaaggaaaccaaagaattgcacgagaatgctacaacattgctctaactaaggttaagaaggaaaatacctccggccagagttctgacaagggaaaaagcattgcctaataggaagtcgcccaaggcagggacaaagacatggatcccggacttggggaaacaaacacaaatgtagggccaatagaagaagtggaagaagtggaaattgacccaaatttcttggccaggaaactcaaaatcagtaaagattttttgctcgaaaaacaattggctttaataaaatttttgagagcaaacttggacgtttttgcctggtcacattaggatatggtcggtattgatccc

SEQ ID NO: 369663 - DNA, 762 bp, Cannabis indica
attaattagtaagcttgcttctttttttttttctagaagtttacaataaaaacatcttatatatctctttatattagtttttagaaaattctatataatttagagtgacaaattttttatattatgtcaaacccttattccaacatgtgaaattattctctgaattttctaaaaaaactaacatataatacttcctaactatataatatacaatctatatgaaaattcatttcattttttgatctcacgtcctccaaggtaaattcgtgttaaaatatctatatattattattatattattatatttttcaaaatataaaatatgttgtttcctgattttttttgaaggtgtttttcataataataataataataaaaaacattgaaaaagttttctaactaaaaaatttagtatattgggtaattaaatataaattgctgaacaattataataataaatataaataagtaaaacaaataaaaagtcttgatattttttttaaactaacagatacagcgattttctctctggatgagagtttaaccagaaagatcttgttatcatcctacgactatttccaaaattatagttctattaaaaagtttttttttttttttgaagcatctataaaaaagttaaaacagtggttttatttatgtaaagcggaaacaaaattaaaggtttattatagttattatactgaagattatctgtgctaaataattttgtgagagaatagaatagcagtgttttatatttta

SEQ ID NO: 369664 - DNA, 498 bp, Cannabis indica
cacatgaagaggaagaagagtgagagaccaatccaacgcaaccattaatgcaacaacttctgctaatatgactggaaaattccctacaaaaatcaacaaacagaggataagttcaaaaattaaattacaagcaaaaaaaagtaaatggtcaatcctaataaatgaaaacaataacaaaagaagcaaaactacaaacccggtaaacaaaaaccatacaccggatagaagagtctccctccggtcgaccccataatccaaacacaaatactccataaaataaacagccttacagactaaacttactagaagccgtaacctcccatccttagaaacgacaacacttaacaaaaagctaagagcttgtttgggtgtgtttttatgttttcattttttaaaattgtgtttttaaaagtgagaatagaaaacagttttttgtcattttaaaaatataatggtatttggcacaaattttttaaaatttttagattttttcttact

SEQ ID NO: 369665 - DNA, 584 bp, Cannabis indica
ttactgaaatgagatctcaatcatttatctctattcagccaatctcgaaggaaatcatcgtttcgcttttaaaaacttatagaagctctagattccatatctatgtttagtgctcccactcaattgtactatcatgttcctaaaatggatgtatcacccagaccaaaaggtaggcttaactaacaaatcaaaacacaaataacactcttgagatcgaacctaatcatgtcaggattgagattcatagacctaagatcaaccattgatgtaatgccctaatgctaaggcacgttacactgctgtctttgctaatcaaagaattttcttgaaaaacttgttaaattaaaacttttatattaaataataacctttataatttacaaacttattatatgtatcggcatcccgtttaaaagcttttatacacaaaataccaaaatacactactggtcgcacaatgactacaaaaccatattcccagatgtcctgagattgaacactccaggtcgcgctgcctcgacatgtacaacttcatcccagctttagctcactcctgttcagctttcgcctttcctttacctaca

SEQ ID NO: 369666 - DNA, 523 bp, Cannabis indica
atcacactatataaacagtgatgctattcatatatgcatgtgtgacacagacctgcatgttgcgctcacatgcctatttatgtctacgtggcgtagacctacgtgttgcgctcacacgtctatatacaacaaggccttagtagggtttacctcggttctagttaccgagcctaacctggttatgcctttctcgcatgaccctactcatatatatacgtagtccatatgttttatacacataacgcttaacatacccgcatgtattcaatatttatcacatcatataaaatcttagggtaataacctaactcatattttcattggattaataccattaccatatattaacgctttcttactttcataatattctagggtaataacccaagaccgcattaaaattaacctcaaggtactagtttaccgagtctagcttaattatgccttgaacgcataatccataatctcattatacatagcatggcatagcatttacacaatacatttcactagggtaataacc

SEQ ID NO: 369667 - DNA, 538 bp, Cannabis indica
atatccatttatttcagcccaaatatcaactttgccttttttatttttctcttttttctttcatttttcattttcaaatttagcattcagtttctttttctttctcagtttttcatttcaaaactaccttccaatcattaccctttcgaaatccacgttcaaaactcacgaaaaccacctcccatcaataacatttaccatcttcttcttccaactgtatcctttatcatttttttttttattatttttcatttcatatatataatggtgattacctgtggctctgcttctccatctctattgcaaaaaaaaaaaaaaatcttcaaaaataggtcataaatcagttgctaacaaggctaaaggaaaacgtctactcatcgacgatgatgactctaattttgctcattttgtggctaaaggtggtcgtcgtccagtgaaagtcgaaggtgtctttgcataaaaaaaaattccaactctgacgaccagaaggaaaagaagaagtcaacttcaaaacaactgtgatgaaactgtaatgcaa

SEQ ID NO: 369668 - DNA, 640 bp, Cannabis indica
aaaagtaaatatagctaatattaccatatatataataatcaataattattaccatatatattataaaaaaaaattgtaattttttttttaattatatataaaaatgtatgagaaaatgataaaaagttttgttgcacatattttgtaattaattaaaataatgtatacaaaattgtaaaatgccctttatttttttatttaaactacacttgtgtagtaaagtacattatttgagcagcaatacatgaaaatatttttcccgcgatatatgcgaacatcacagtatctaggatttttgtagtgtcatcaatttcagcatatgatatagcactgaaaaatagataataaaaatgttagtattaattttaatttaatttttattactataacattctatatattttaatttaccctggtgtgagaaatcattcatgttcacgtgttgatttatcacatctaaattttttcttacgattgtttaattcaatctttttatgaaatgcctcacatgacatgtaataaaaatattgggcgtgatcagttatttttattgttgtttcaatccaaaagtattttttctacatccaagtcaaattagggttgtacatcagtcggtttgggcagtttatcctatatattt

SEQ ID NO: 369669 - DNA, 1139 bp, Cannabis indica
ttatattgaaataggttttatttagggcacaaaacccaacaccccaagactgggtcttcctggggcttgcattctgttcatgcgatgactcgatagatccctaaggacccaatggttctttttcgggacgatgattgattccttcttgaggattattatctttggtgtcatccatcacttttatgtcaagaggcttttttctgagctttttcacagaggctcccaatgaaagcaccaaattgttaacgtagatttttgttaaccaaatttgagccacacgatgataattcaacacagaaaaaataaaagctatagaaaaataacatatgaacacagggtttcttacgtggttttgcagttaacattctgcatagtccacgagtcaatcttattcagatttctgagtattctttttagggcctctttcagattgagttttttttgtcccccccatccatgatcttgtctgccactatttataattacatagtggacagtaatttacaaaagttgacaataatcattacaacaattattccctcaaatcaggggatttgattacaaatcaagctaaataaatgaggtttttacacagctgtgaatatcccacttttattgggccgagatgaatgcgtaatcaaagatatacggtaagccttatcccatagggatgccacgccgagaatggagccaagttaactttgatagcgagcagttggcttctcgagactaatattgttttaactttgataactatattttctggtgtcgagatgatcttcctcgcatgcataccatcttctagcgagataaactctcgttgtctgttatcttgactcgtcacactatctatactcagtttgtatctcatataatatatgctaagtgtttttagtattgtcgtttctctttcacgcagcttggttgaggcctcgccatgcacgcatgcacccaaactggtttctcgttaatacataagttagcagtttctacatttatgtctcggagaaggctattcagccaactgagttataaacataccttgcgaattatatttctaatgagttgttccgtgctaagtgtacttttgtttgcgtgtttgagttcttcgttcttcccagctcgacacgtgtcttcct

SEQ ID NO: 369670 - DNA, 504 bp, Cannabis indica
gaggcttccctatgagatacagcttatcgtgtatctttaattacgcgctcatctcgacccaataaaggcgggatattcatagttgtgtaaaaacctcatttatttggcttgatttgtaatcgaatcgcatgattttagggataatggctgtaaatgtattcgagccagctttgtaattgactgccactatgcaattataaatagtggcatataagatcaaaagagggagacgaaaaaaactcttatacaagaggccctaaaaaatactcagaaatctgaatcagattgactcgtggactatgcagaattttaactacaaaaccacataaaaaacctgggctgtgtttggctgtgtttttcagtttttagtttttaaaattgtatttttaaaagtgagaatagaaaacaattttttgtcattttaaaaaatttaatggtgttttggctacaaattttttaaaaaaactgttttttaagatttttttactttacgtaaaaaaaaaa

SEQ ID NO: 369671 - DNA, 844 bp, Cannabis indica
gatcgacctaagaaatctcctaagttggaaaaatagtaatccttggcatgatctccccaccgggtcgagggcatcctaaacctaaggagacattcatcgaaccctacaagcctaaggctggcatactcgctaacagaaggaacgtaatgtactgctaaaggagacttaccggaaccggaagtactggcatcaggagcccctgtattcggcacctgaacagaaggctttggcctgggagccctcctctcagccgggttcccaatgcgaagggacttcccggcgatcgtttggcttctcctctcgaccgggctccccacgcgaaggggcctcccggaagccgcctgggccttggtatatgccttctcctgggccttccggtaaagatactcctagtacttcttctccgcggtggcaataagctcatctcgaaaggtcttctccgcggcaggaaccctcacgttcggacaaataaccttagaaaggttagagtcctccactgacaggtgcggcaggatcagcttagccttccggcagttctccgtcgtgaccaagccccgacgtcgagatcagcacggtcgtaagtcgcaaagacctgagcctgctgaagaaagatctgagtaagcgcagtccactcgtacggaggaatcctgacccactccgtgagaagctccgggtgttccacagctcggaacccggaggagaagaaaaagcgatggcgatattccttgacgtggctttgccgattataaaggaccctgccatcatttgaagggtgggcccggaaaccataaaaaccgtctttaagtttgtccccctttttggggacggaaacaagttcataaaa

SEQ ID NO: 369672 - DNA, 449 bp, Cannabis indica
atttagtcaaatgtgatggagatgttgaggcctttgattgcggataaatgaagaagctgataacatttccttccctttggttcacacaagagataaaacaaaatcaattaacattgtgttgatgaagagtatctctagctggctgccaactttgatgcttgaaattgattatgcatatgctcttgtggtgtacgggctcacaccaagaagtgatcttacccactttgtcaactttacttattttgtagcattttattgctttcttttttatctcttctatgacaataccaaaaatcattttatttcctctaaaatgaacataaactaaatttaaaataatattttcaattatataatatatcatattaatttcatgaaaatattaatcaaaacttaatttaatttaaactttaacatcaataaaataatatttttgaccactaatcaca

SEQ ID NO: 369673 - DNA, 559 bp, Cannabis indica
ctctcacttatagtttccctcattacacaagctatcaggtattcgagtagctcgcacaaagcgggaccaaagatcaagttaagacttgaaaataccaagatatatgcgaggactataaaggtcttcttgcaaaaagatatagattgcttctgaactctgtgagctggtccagatgacccagtaaccttgataacccgataaggactcgtgtgtcttaagttatcgacctattataagatctccgtacaagcgactagacaggacgcatacatcccaagctcgattattcttgtatgcatcttgagccgccgagcttatacaagaatacgagcagacaactcgcactatagaagtcgcatatgttgttgtatttagtgaattgggccaaaactgttcttcatttattgtgtttacatttttgttgatttaatcgttataattcaatgtacaatggattgataatgaatgcaatctctgtgtaatcaaaggacacttgctttgtatataaaggagtgatccaacatgaaatggacaagatagaaaactgttgcaacagtgg

SEQ ID NO: 369674 - DNA, 819 bp, Cannabis indica
tatacacaaatgcacactcattaaaaactataataaacaaaaataaaaagagcatatcacaaaagtcaaaattatctctcttaattcattaaggtaatataaaactactagtaattaagtcaattatctactaataaagccttaaagatgtatatctaagtcaataaaatcaaactaacattatgtatggttcaaagaataaagaaacactaaagagaacaatataataataaaattatcatcttatatgaactatattgtatttgtaatccaatgagagaataaaaatgagaaaaatgaatatatacatatatattaggaaaagggatgcgatttatgtatcatttagaattaaggtctatatagagataattattatttatattttttagagtttggtagaagattttttttttaaaaaaataattttatatatggtaggatatagattttttaatatattaaatgtatattattttttaaaattttaatttaaaaaaaaaagccaaaacgtggcaaaaaaaatgcatcatttagaattaaggtatatatagagataattattatctatatttttttagagtttggtagaagatttttttttttaaaaaataattaaataattagaaaatgaattttggtgtggtagtagaacattttttaaaaaaaataataaaaaaattaaaaaataactttgtatatatggtaggatatatattttttaatatattaaatatatattattttttaaaattttaattttaattttaagaaaaataaagccaaaacgtggccaaaaaaaaatctaataagtaaatt

SEQ ID NO: 369675 - DNA, 551 bp, Cannabis indica
ttggccttagagatatgcctccatgtgcatcgaccacgtgttgtaattttggtagtttagtttcttgattctgcggaccacttgaaggtcacccatcatgcaaattctgtagtactaaaccacacacgatcactctaagaaactcaacaaaagactctttcggaacgaacttgatccggctctgataccacttgttggacaccacaacacgtgagaaacgtaattactttaatgattgaaaaagtaattacaccaagacttgaacactttttactagaccacaatacaccaaacactcacactcttattttaatactagacacctttacaacactcttatgtataactcacacttttgaaacactttatctttatgttgggacactttagaacacactctcactcttttgaacacactttgaaaacactcttgttggatatacaacttgaagatccatgacccctatttatactactcaaaagaaaccaactataatattctagataattctaactaattgtattactaaaatattcttgaaacttcttat

SEQ ID NO: 369676 - DNA, 898 bp, Cannabis indica
cataactaattcaaataaaatcgcaattcagttctataaaaaatgaattgcttaatattttccataatatccaaataaaataattctagatcgtgaatctaattattttacttaaaaaatttgtaaacatcaagtaatcatcaaataaacagatagatcaacatgaatcacatccaaatcacacattcatcattttaaatccatatttcttgaaagtaaatcattactatggctctgaggccagttgttggaatatattttactaggatctatatttactaacaagtatgtttaataacatcctaaatatgaattctctaaaacaatagaattttaacacatataaagttaagaaaccttacattgattgcaaaaaccttacattaattgcaacagaataatatgtctcctcccactcaaatctctaacacttattcctttctgtcgtagagtattatcaagatctgagcccgattctccttcaactgttggattcttcacaatcttacacactatgattgagtacttaacttgctatgagtgggcatgcactcattcactatacgctcgcaaatttatgaagaacaatagagagggattcgaaatagaagaagaagaaggaatggtggctctcaaaaaactctaattttctgacagaatgtaaactaggtgtgtgttggatgagaatgagaccattctattcctcttatactatttcacctagggttaggatgtaaattatatggaataaaaaaatgataaaataatagcaaaaataactctatagtggtcggccatatatagatgggccccactagttataattttgttattttttggactatttatcttttatttacaattaccatattttttaattttaatcctataaatgcca

SEQ ID NO: 369677 - DNA, 989 bp, Cannabis indica
acttcttagttatactgtatgtgctaaaatataactttttcttttaatgagtgtttttataggaaaatggtaattctagaagagaagaagagaagaagaagagaaaaatcataaatgtacaacaacaaaaacccaatcgttatttttttttagatttaatgggatttattttatttattttattatatataaataaaaagtgacccatgaatttctcataaactattttatttttaataataaattattttatttttaatataaataaaaagtgacccatgaatttctcataaactattttatttttaataataaatcattttatttttaatataaataaaaagtctcccacgaatttctcataaaccaagaattcggttatataggcacactttatatagaatagatatataggatttttacattatacgacaaattttagtatttttttataattttatttttgtttggttttttaaatttttttataaattttatttttttaaaaattctttaactacaaaaatacttttgttgtttatgtcatatttcccccattttttcttaggctatctttggtaggagggatggagaatagaaatgatggaaagttgatgaaggaggtagaataggtgggagttagagagagtggagtaacaatctttttaagagggtataattgtaattttcaacaattgaagtagaaaagtgtggatttttccattaatggaaggattctaaatggagaatttataaggatttgttgtccatccaattatccctcaatctctcttgccaaacaagaaacaagatgaattgttatccactctcatttctctccctcctaccaaacatagtgttagtctattttacgttaactccctctctatctctctttctttcttcctttttttccattttctctttcttctcttcatttctctctctctctctctctctctttattttctctctctttattattttta

SEQ ID NO: 369678 - DNA, 808 bp, Cannabis indica
gttgaaaaaggataggcatttgtggttgactttgatacaaaccgatttagtagccgcattgcgaccagtaaggctttgcacatctttctttctttgaggtgaaggcatgtccatgagggcttttatcttttctgggttaattgacaatgaaatccaaaaactttccagatgaaacagcaaatgagcacttcaaaggattaagcttcatgtggtatgtcgtcttgctagtttagtcttcattggcatgtcgtctacgtagacttccatactttgcccaattggagtggcaaacattttgttaacaagtcgctagtaagtggcgctagcattttttagtgcgaatggcatcacattgtaacaatataattccatgccagtggtaaaacttgtatgttcttggtcagcgacattcatggcaatctggctgtagccggaataagcatccatgaatgacatgagctcgcgtccagtagtggcgtcgactaactgatcaatatgtggaaatggaaagcagtccttgggagggtttcaagaaacccaccctgttatgacttggaagacacttgtgatgaaaatccattgttagtttaaacaagtaatggatagtgagaataaggaactaagaagcaaagttaagagaactatggttaaaactattcatatggagtaaccaaaagttttctattataaggacaagaagggaaattttgataataagtatattcaatggacttaacaaaacttcccgatcctagtatagtaggtttgagattatctaaacatgtggcttgtggtatacctggtaatt

SEQ ID NO: 369679 - DNA, 775 bp, Cannabis indica
attgagtgcatcaatgtcgagcaccatgtgcgcatagcactcggacaaggtgatccgcacgtgcatgtgctaggaaaaatcctatccgaacgctcgttagccccacgctcagacacgagcccttcctaggaaccctgcattacgccgagtgagaggctggacctacagagaattctcggtgtgtcactctgcaaaagccccattccgcatgcgtaagaggctgcatgcagcctcctcgtggacagcagcacccaaaatctaatttttgtggatttttttctacaaattttgaatttttccaatttcaaaccctaaaaatcaaaataaaatataatttttatcattcaaacttaaatgtcaatttttaaattaataatatttaattatttaatagattattattaattttttgatattttgaggtttaaatttaaaaaattgattattttattactttatttatggttagattttaaaattttgttaatttatttaatatttatatattttttttaattataaggttagatattttaatattgcacatattttaaattaaatgatagcattattcttttaatttgaaatattatattaaaattatcttatagtatacattaaataattataaatttaaaattaacctagatatttttatagatattctaaccataatattttcaaattcaaaaaattgattattttgtgaaagatttaatgtttttaaattataagttagaaaaatgatattttatatcatcttacttattagaaa

SEQ ID NO: 369680 - DNA, 842 bp, Cannabis indica
ttttgtaattatattttacaagtttaattaaaaagcaaaaattttaattaatcacgtttttcataaacctcgttgattagcaacgagctgcacagcaagtttaaaaatcacgtaatacgcctatgttagttagggtgttacaaagcatgaaaaacaacctagaatcatactctaagctcaatcctacacaaatcaagagattaacaagcttaaacatccaattcactaagcatgcaacaccaagaacaaacaatctcaagcatgcttttatcaccatatttcagccatgaattcaacaaacaactcatataatttcagctagaaactacctcaatctcttgctcaaacaagctccaagcttccaacacaaatcaagcttccaaaccaagctaaaaatcaagctttcttctcaaaaatcaagtttgaagaagagggttagagaggatgagagggttcggttgagaggggaaagccaccagaaattaacatttcatttcctcaaaaatcacattttccaaacatagtaattaggggtcaaatgaccaaaatgcccttagggcttaaatacccacatacaccctcacaagggtaaaatagtcattcaatactcaattaatttcaaataaatttcagattatcattcatcaaataaaatgccaaataatcaatccaatttacatttcgggcccgaacccagttcggcccgaaattcccggttgtgactataccgcgctaacctgtcagaacacacctgaaaagacaacacaggcatactatataataatatagttctattaagcacgtaattaaattaatttcatcattttacccttctcgggtca

SEQ ID NO: 369681 - DNA, 507 bp, Cannabis indica
tgttttatgatttcaatacaaaattttgaaaaatgagtatttgatttatgactctaagtaaaatagacaaagattcgatatagaacgagagtaactatatggtttatgtaatatttaggatttttatgtttaatgtctcttatgtgtttaaatttatcaagagagtataaaatttgcatataggttgagatctatatgtcatagcccgaatataaatttttttagtaaatcccctatcacataaaaattaaattttaataattaaattatgttaaacttaatcactctaaacttattaattgttttatttgtttatttttaatttaatttttgcttagattatatatttagttttaaaatcattttattttgaaaaatcgagtttttgcaaatgtcaataatatatatgaaaatataaaactgtatacgcctgcagaagcagaatgtaattctgttactgcagaaaccagtttcgcaacgacaaaacagaacaggcagaatataaaa

SEQ ID NO: 369682 - DNA, 1346 bp, Cannabis indica
accctacaatgtattttatccttaaaacacttaaccctgtataaatgatatttcacctaagtgaaatgagatctccaccatttatcttcgtttggttaagctcgaaggaaatcatcctttacttctatttgccaaatagaagctatagattccatatttatgttagcgctcccactcaattgcattaccgtgttcccaaaatgtacgtatcaccctgatacaaaagtaggcttaactaacaaatcaaagaacacgaataacactcttgagattgagcctaaccatatcaggatttcgatcatgtgatctaggatcaacaggtgatattgaattgaatagatattacggtaagttttaacatatctaatcaaagttcaatatcggtcccttccgatgtatactccatacatccgatactggtaaactttgccaatgtcctggaaaggacataacacttttccaaggtgtaagaatacctatcgctgattataccatgtcagtctaaatccagtgttctgacaaatcagggaataaacttttgaacatataataaagattatattccactgtgctgacaacactataatctttaaccaactcatatgttctggacttaaaaagaattcatacattatatacatataatcatgaaataaatcatgtgaaccatgcaacataaaatgttatttctgatctttattaataattaaatctgattatatgaaatgagtgttttatttattgcacaaaacccaaagccatgggcctatataactgagctttcaataagtagatctagaattcaccaagtaaaattctctaacgtattaattccgccttgcgccactatagatttagaattgaataacactctcagttatatagaatgctctatatgtaccatgatatagatacgttatgattatctattgttacaatcctaatagtcaaggatactctatagatgatctacattgaatagggacaaatttaccgttctacccttcaatgtattttatccttaaaacacttagcaacatataaatgatacttcaataaactaatataattactaaaatgaggcctcaatcatttatctctattcaacaaagttaaaagaaaattatcgtttgacttctaaatacttataaaagttgtagattccaaataaatgatcactgctcccactcaattgaactatcatatccttaatctgtatgtcacgagaagatccaattggtcgactttaacgaacaaattgaagaacataaataatacatttaagtttgacctaaccatatcaggattaagatcggtagacctaagatcaaccattgatattgact

SEQ ID NO: 369683 - DNA, 527 bp, Cannabis indica
attttgctggtagcgtctttgtgaatggatctgcgaggttatgttcagaattgatcttcaagactgccacatcacctctctctactatattccttagtagatggtactttttcttaatgtgcttgactctcttgtggctctttggttcctctgagttggccaacgctccactgttgtcacagtagagcaccagtggtttttctacttctggaactactcccagaactgtgtagaatttcttcaaccaaactgcttccttagctgcttcacaagctgctatatatttaggttccatggttgaatctgtaatactggtttgcttaattcttctctagactacaactcctccaccaagagtaaatactaacctaaatgttgactttcgactatctttgtctaattgaaaatcaaaagcagtatatccagtaggacttaactctctatcgaaatatataagcatgagatctcttatctccaaagatacttgagaatgtgctttacaactatctagtgttccaaatatgtat

SEQ ID NO: 369684 - DNA, 841 bp, Cannabis indica
tggggattgtcgggctttactttcgtctttgaataatgtttctttaaagtttgttaaacgatctgcaaatagggctgctcattgtcttgctagagagtcttgtttttcgtcagattgtgtttttaatcagcataatgtctctgctggttttaagtctattgtaatggctgaaagtgtttaaataaaattttttcactttgactacaaaaaaaaaaaaaaaaaaacgaatttccaatcatccatttgtaattgttttctttcaatgttttgaatttggcaagaaaaattgaaagtaatatagatatgaatagtagcttgggtggttgtcttgtctaagcatattaagagaatttttttttaatgttatcatttgacatcttgataatattatcctcacttgttgtctaggctttaaagttttgacttttgagtggggaaattctaattggtttattaatgaggttatgttttgttggtggaggaaaagaaactatactttttctttagatttgtataaatatgtgagaaaagtgaatcaaaataaaaaagggttgatttgataccttttattgtttagatttgaaaaaactatgtaagaaaagtgaatcaaaatagaaaagttaattttgataaatttgagtggtgactaatataagaaaattttatgatgcacgtgtaatataataatttatgtaattttaaagggaatatttcataaatatatacaaataacaaaaaaaaattataaaaatatagttgtctaaaattttaaatatttttataatttttataattttatttacaaaaatacaatcttcttataccttttatgttaatataa

SEQ ID NO: 369685 - DNA, 601 bp, Cannabis indica
ccaagcccagcaagacagtataaaatatcgataaacatatttatcacactatataaacattaataccattctcatatgcctgtatgacacaaacctgcatgttacgctcacaagcctatttatgtctatgtaacatagacctacgtgttgcgctcacacgtctaaatataataaggccttagaatggttcatctagttaccgagtccaacccagttatgccttgaacagatgaccctaaatcttaatatactcatctatttaacatggcatagcatttacacaacatatatcactaggataataacactaggctattaaatagctcatgttagggtaataaccctgatcctggttactaattactcacatatatcattttcagtataagtgccaccgcgcataactctacgtgctaactactgtcttacttgatgtcccgcaatagtagagattccaaatcttcaggtgctcctgaccaagtgccggtgatcctagtcactagggctgtacaaaaaaatttgtaaacagcctaaaccgaataacccgcccaaaccgaaccgaaaaaaccgataaaaattacaaaccgaaataacccgaaaa

SEQ ID NO: 369686 - DNA, 588 bp, Cannabis indica
attttacaaaaattaagaaaagaagcaaaaatcatttctctcaaagctctatctctctcaaaaattccttgggttgctagggtttgagttttcttcatcaattctaagtgatcttagctcaattcaagtgtatccaagccaatataagttcttagcttcaatctttttagttgcttgaattgtaagaaaatggagttttgcatgaaatgttgtttaacttgctgttcttgctgctgttgttagattatgttttatgtagttatattatggtattgtaagtgatttgagcaggtttgtttggctagtttgttggatgagcaagctttgagtttttgaactcaagcttggctcatcaatggcatttcttgtttctgagtttgggtatttgttttgttgcttgtaatatgttctctaaggtgtatcgaacaggtctggaaagtttggtttgaattggggttgatttccatgagatatgaaaattttagtgattcctacactgaaccggaattccagttcagagaggcctgtaggaaccggaattccggttggcttccaggaattttcccagaattggaatttcggttgggg

SEQ ID NO: 369687 - DNA, 1006 bp, Cannabis indica
attgatatttttatatgcaaaattcatcaacttaattataattagtgtcggagaaataaatgtatttatatctgtctattactaatcacaacacaaagtaccagctcaagctagctttcttaatttgaagacggctctcataaattgccaaattcttatagaaaatcactaccttatacattaattacttttcattttcatagataatataatgattggttacccattgataaaaaactatatttaaaattattgatcttatattgtgttattgtaataaaaattaataaaacaggagtaagaaaaattggtattatatcttttaatttactattagtattatatgttgttatcatttatacaattagattattataaaataaattaataagtcaaatactcaaattccacctcaaactagatattaattatattgtaatatatgctatattgttacatatatataattaaaattaatacaagcttagaaaaatgacttatatttaactatgagtctatgatagtttcctcatctcatgtccaatttttgagtgatcaagataaaaagcgttgaatggaataatatatgttatgatcatatattctagctagtattcttctatactatatattttttttttcattaaaaaaaaatatatagtagaagaatactagctagaatattaatctactatcatcaacactaaaataaacaattacttttagtaattttttttagttataatataaatttttcgtgactatatgtaactttcagttagaacaaaaaattatttgtaactaaaacataatatttaaatacaagctgcgaataattttgttttaatcacaataagtattgtgattaatattatatttaattagtataataaattataatttttgtaattaatacctttagttattgataatatttttttacttttaatcacaaattttgttgtaattaaaaataaaaaaatttatggtgaaaggaaaaataact

SEQ ID NO: 369688 - DNA, 893 bp, Cannabis indica
acaatatatgtaagtcgatggcaggttgacaactaagaagtcttgcataacagtggcagataggggtgcttcgcccaacgttaatgcaaactcgattattttaagactgggaatgtagtctctagtaaatccgcaaagattaaccatacaaggcctcaatttggctttctcgagccccatcttccttagagtttccttatagaggacatttatcgagctcccgttgtctattaacactctcatgatccttttattggcgagttaaattgtaatcaccaatggatcgacgtgaggatacctcacgtttttctcgtcctcctccatgaatataattggaggttctttggttttcactttcttggaaggttctggggcaaatgtcaactgctcgttctttatctctttcacatatcgtttctgggcattattgctttcctttgcgatatgtggccctcctgaaataactaggacgtcctctccttcaacaggaagaggttgtaacccctggtggtttgggttattgggcagattgggctggttgtatccacgaccctgtcttttcacgtattgtttgaaatggcctcgagtgatgagactttctatctcatctttcaattggcgacattccttggtcgtatgcccaatatccttatggaatttacaatacctgttaggatctcttttgctccttgtattcctcatgggctcgggcttgccaaaggcaaccttttgctcctgtgcgaggtaaatattctcccgagttacattaaggtcgatataaatagtatacactggcacgtacttatcgtgcttcttctatttctttttatccttcaatcgacggttctttagattagtcctttctctttgaaccagaagcccccgagttatca

SEQ ID NO: 369689 - DNA, 551 bp, Cannabis indica
caattatttatttccttaattcaacttgcaaaaactttacatttgaatgtaaattttgctttttaagatgaagcaaccgtctatcaagtaaattttttagacaacaaaagccaatttgattatttgaaaaggcaaccggcaactaattccataataacaattatgtaacctttaaaaaagaggcaaccatctatcaagtaaacttttaaggcgtcacatgtaaattgcaatacatgatcgtaattatgtaacctttaaagaagaggcaattgccgatcaagtgaatttttgaggcaacaataacgaacttaattgttttaaatgggaagcagagacatatttcaaaagagtaagtatgaggcaacaatctatctagtaaatttctaaggtaacaaaaaccaacttacttgtttaaaatagaaaccaacaacaaatttagaaagtgtaattaaggcttctttaaagaggaggaaactatctatcaagtaaatttcaaagtcatgaaaggttaattttaaaacttcaaaaagcaaccgtctgaccgacacccg

SEQ ID NO: 369690 - DNA, 420 bp, Cannabis indica
gcaaaagtatcaagattcaagagagctgtctacagtgctgcggttgcagccatggtgtatgctgtctggaaaatgagaaatgccgtgctgtggcagggggtgcaagctgacaccaatcgtttgattgaagaagtaaaatggactctaaggagtcgggttcaaagtttgttgtcaaagaaactttcaagtgtagatagagagtggttttgtgctctatagacatcatagaaatctggtgtaagcaaattgaaaaaaaaaaaacacgcagcagcaaaagaatgtatagattgaggcctcttttttttttgggggggtgctcttagcttgtaaatttagtttgtgcaatacatctaattgatttatcaaaaaaaaaataaaaattaagccttctctacacttaattatttatttcttgaattt

SEQ ID NO: 369691 - DNA, 587 bp, Cannabis indica
attagtgtgtcagtccaagattggttcaagttatttagttttttttttcttttaaaaaataaaaaattaagtaaaaaaatgtattaataactataaaattaatgattgttaactattttcgttcctcgttgaaatcatcttcatcaatctaaatattgtaattttttttttatcaaagtagattaccaagtatttgaaattgttgcttcttttttacaaataagcataacagtataaaaaataacaagcaaattattaaaaccaaggagaaatctaagctggttgaatagagaaataaatttgtgacatagatgtaggagattgtattgaagtggaaaattcacataatgttaggttgggacaaattgaaactctaatttttaaattttttttataaaggaggaagatgatgcagttgttgcaaaatcataattagatgtaatttttaaaaattaattaagtattgaaaaatttattttagaaggggtggaagtctaaattttgtaaaaaaaaaatagaattttattataaatattatagttaaatggtttaaatgttaaaaatattataatagggacttaaatata

SEQ ID NO: 369692 - DNA, 458 bp, Cannabis indica
acgtggttttggagttaaaattctgcatagtccacgagtcaatcttattaaatttttcattgttttccaggaccttttttcatcctttttttactctaacttgcctctatttataatcacatagtaggtagttaattatagagttgactgtaatctttacaacaattatctcctaaaaacgggggattcgattacatctcacgtaatatgaatgcggttaatatttgaaaatcacatagctgtgagtagcctgcttttactgggtcaaggtaaacgtatattttatatgttgcagatcgtatcatctgggtcgtcttgctaggaacatggcaacaaccaccctgatagcgagctgaagcttttcccatgtcttcccgaggctgatataatcctcctcttctaatgtgtagcgagattgatgcctcgccttgtacacttgaagttgcatggtttctcgt

SEQ ID NO: 369693 - DNA, 522 bp, Cannabis indica
atatataatttaagcacatttaaattatttgtcttaatatacttcttttgcatatcttataaaaacttgtcatagtaatttagtcttgtgatcactttgattttggaggacaaaagatgagttatgggagctctgattttgtaacacttgtccttgtaaattgtaataaaattgaagaagagaaattaaaaattcattatttgaaataatgtttgcaagcttgacagggttcatacacatgcagcgtttacaaaagagaccatgttttagtaacacataaaagtcaagttttcaaccttaccagattagtatgtttagctccatttttctgttagttaaaataactagtattttcctattttggtccaatgataataataatcagcaatgctttctcagggtaaatacattagtagcctaccttattacaccagccatttgcatttcatactttgcaaagatgcaagggttctcgattttactttttttttgggcttcctagctagtcatgcatctatctac

SEQ ID NO: 369694 - DNA, 536 bp, Cannabis indica
tatggaactagttttgttattaaaatacgtttcaatattttaggaactgatttcctctttattttttaattgtaatcggtttgagttattgtgtgttacttgtttctatttattatgttatataaccagttctaatttagttataaccgatttgagttatttcatgttatttgttttcattcattataacattgttacagaaccagttctattttaattatatactgatttgagttaaattgtgttatttatttttattcattatctaataaaaccggctctattttttgtttatatctgagacatttaattttggtgactttttccggcaaaggtcatttttcaagcaacttctttggcggtggtgactttttcgacaacttttccaatgacttttttgactacactaacttttccgataacttttcggcgactttttcagtgaaccttattattacaagttttatcaaatttatttattatttttttccatatttcaaactttattatatatctgagaagactataaattacct

SEQ ID NO: 369695 - DNA, 726 bp, Cannabis indica
aaattcatataatttcacatatattgaactatataataatataattcctgaattattcataattattcaattagggttttgctaatctatttcttaattccgggtattacagtgtgcgctggacttcactggctcgtggagtaagtatttacctctaatggagttctcctacaataatagctatcaagccacaatcaaaatggcgccatatgagatgttgtatggacgaaaatgtagatcactgcttcactgggatgaacttggagaaagacgctatttatgtcggaagcagtaagggaagcttcagaggtagttgaaaagatacagcaaaggatgctcaccgcccaaagtagacaaaaaagttatgcaaatatgaaaaagaccggaggttgagttttccgtaggggacttagtgttcttgaaggtatgacctatgaaggggattatgcgtttcagaaaaaagagaggaaagttaagcccaatatttataggtccttttgagatactggacagagttagtcaggtagcttaccgtttggccctaccgacaacattagcagaaacgcataatgttttctacatttccatgttacgtaagtatgtacttgatccgacacatgtacttaagtacaagaacttgaacttacagcaggacatgagctttaaggcatgccctgtgcgcgtgatagaaaaaggaataaaggtcttacgaaataagactatacc

SEQ ID NO: 369696 - DNA, 592 bp, Cannabis indica
aatttgatatttaatgctaaaatgttacataaggttttaaaatattcccacccactacacattttttaatgatacttttaattcttttttaatcccaaaatatccttttattaaaaccaaaaaaattcactttcatttctcactctctctttctttctctcgttttccctcagccaccaccacccaccaaaaccagccggaccaccaaccaccacgacctcaaccgcgcctcaaccgcgcctcaaccacgccggaccacaaccacactcggtcagatctccaaaaactttattttcatcacaaaaactttcattttcctcaccccaaaagcaatgggtaagtattttttatacaaaatattattggtttttattgtattggatggatctacacattatttgttgtattatgtcgtttttgtgatctgaaatgaaagtagagtttgcacccgaacgttggtttttttctggattttttgaattttttgcgattttgtacaccattgtgcgatttttgtgcgatgccaagagaaatcaaaggtgagggagactttcattctttttggcgacattaaacgatgtccttgcgattt

SEQ ID NO: 369697 - DNA, 1009 bp, Cannabis indica
catatcaaatataccataaaatttgtttaaaggatttaccatatagtatataattacccactaaaatttttaagctattttttattaactattcatcttttctttctttttgggacactcccaatttataaaattatgcccattccattactataaaaaaataaaaaatatctttttgatttttattcccaaaaagtttgaaagttgacaactttcatggttttagtaagaatagcatagcatagcatagcataggtaggagtaggaggacccatctaaatttaaagctcaaatctttttcacacaccaaaataaaaatggacactttagtttaggcatctacacgcggcatcatcactaaccaaccagtcaaacaattatatttgagcacatatttttattatttattgttttattaattgagagttttatttgcatcaacaaaatttataaagacgagcattttatggggtactaagacgctaatatgtctagcagtattacgaggtgatgctttataattgactaataattttctataatatttattaaattaaaataaataaaatttaatattaaaatacactaataataatatcacatctcataaaagtattaaatactataaatatcctttataattttttttttaaagatactctattttaataatttattattttttgttatttttttttaaaaaaaatatatttatcaaataaaaataaattatactttaaatgtaataataaaaaaaataaaataaaaattatatgaatttttattaaaaaagaaaattatacataattcaaataaaaaattattacaataaatttaaaataagtattgaaactaacataatgtaagaaagaaatttttaaaaaaatagtaaaacttaatttttaaaaatttattttatgtttatcattatttttttttcaatattagagtatatttataatttttttttatgtgaataaagggggatgacgtgatggtttcgaacctt

SEQ ID NO: 369698 - DNA, 546 bp, Cannabis indica
tttgaaattttttgggtttagggttatatgtcacgaagcttcgaatgagtaaggtgaaggacgaacaatgtgcgatcaaaggcaaacgtggtaaactatgaaggtatacaaattattacagagaaaatcataaagttttaaacctaaattttccatgtatcttctacaacaagtcgaaaacgcatgtatcaaaccaagaaattaaacatgcaaagtaaaaagagaagaagattgaaaacttactcactatttggtgtctaagtttagtccagatgaagatgttcgggtgctttgggttgaaatctgtaatgaccgctttagtaatttggatcagtaaaggcaattagcactaatttctgatatttttataattatttatgaaattaattatttgtgggttccattgttagaaataggcattagagttataatttcacaattccgaagattttattaaactctaggggtattatttgaattatatgtgaaatatgttatttttgtaatttttactcggtgacaacggaaaatacgatggatggctag

SEQ ID NO: 369699 - DNA, 866 bp, Cannabis indica
caaagatcaatggctggaggtatttctatctttaagttttatcgtgtatatattcgtttattccgcattttatatacacattcatatattttatattattcatataaaatatctaacagttggtattagagcatatcatatatctctgtcttgattatgcatatgttcgttttcaaaattttacgtgcagatacatgtatatatacatcatcagattgaagggaaatcttgtttttaattattttgatacatattattgttagaattgatttttattcatcaattctaatattttctttgcatcaaaaattattatatatatacaaaattatcatttttagagttggtatatatgatacatatttatgtatacatgtttatatataatttataatgaatttataattttattgtttgttattgattagaatactttattctctctctatttctctatttaaacaattaaattattgtatatagttatatatgtatatatatatatatattgaagtggaataaaaataaatatgtgtgtatatctatagtaacttctttatatatttatttctttaaataaaaaagtattgtgtggtttacatataataatttttggttacataagcatatggtacttataattattatattaatcattgtatctatcaatatatagattatacactatatattatggttcttataaatcataattatataaatttaatggagtctaattaaattactaatgtaattactaattaaaaatatcataattactaccttaaaaaaaaaggaaaaaaaataattatcataattattataaaagataatattaatctcttttctattttcttttttgttta

SEQ ID NO: 369700 - DNA, 1032 bp, Cannabis indica
ctttcttaagctcatcaacactaggaacaaaaactcgagatttatatagtaacattccactattcgagattgaaaaatctttaggccgaccagccatcatctcatcctgaatcttgactagctcgggatcttctaattgtgcctttctgactctttctaacaaatcagactggagtgttaagctgtgaaattttccaactacaaactcaatacatgcactaaccatctcagaagctagttgagggttatcataacaatagtgaaaatctgcctgggacctcttctactcaatgcatcagccacaacattggcttttacaaggtgatacaaaatctcgcagtcgtaatccttaactaattccagccacctcctctgcctcatgtttaagtctttatgggtgaaaaagtacttgagactttatgattagtattaatttgacatttctcaccataaagataataccgccatatcttcaaagcaaaaaccacaacagcaagctctaggtcatgtgttgggtaacgttgttcatagtctttcagttgatgagaggcataagctataactttgtcagcttgcatcagaacacatcccagaccctatctggacgcatcacaaataaacaacaaatttttcttgattcaatggcaaagctaacaccggagttgttatcaaccgttgcttcaactctcaaaaactacttcacatttgtctaaccacacaaatcgctgatttttcttagttagcacagtcagtggcatagagatcttaaagaatccctcgacaaaactgttagaactattttaccaggatcttagatctgctcacaagtatgttgtttaacatcctaaatatgaacttctaaaacgatatgaaataaacacacataaagtatgagaaaccttacagtggttgcagcggaataatatgtctccttccactcagatctctaacccttgtatcctttctctcgcagagtattatcaagatctgagtctgaatgtccttcttgttgaatctggattcttcacgatc

SEQ ID NO: 369701 - DNA, 381 bp, Cannabis indica
aaaactagtataaaatttagtatacgtgcctcgcacgtagctttttactagtatatatatatatcatctttcattgtgaacttggatcgggcgtagagactggacccatcatacgtgcgcaaatttgatcagcaactaaagtttatataaatatatacacctaatacaactactacttaacttaagagtgacagatgagaaaaggttctcatctatggcattttgttttttttttctttccttttactttggcagtttggcttaattttggtcaagactcaaagattgcaaacgtgcataatacgtgcggtgctttttgagaggcccactgatcaatactcccacctttcttttacggaaatttacaaaaatattgatttt

SEQ ID NO: 369702 - DNA, 513 bp, Cannabis indica
attataattttttagtcaactttcattgttgaaatcacatgtcgaaatatttttcttcaaaaaattttcacagtgatattcgttatagttacaatatcattcttataaatttttttaaaatttcaaatagtttacaaaaccaaaaacaaagttccttatatttcagtctactacgcatgttcaaaaaacttcaaacctattttcgacattgtaaactattcaaaaatttacaataataatattgtaactataacgaacaccaccatgaaaaaaaaattaagaaaatattttgacatgtactttctggtacagaagttgactaagagattaatatgttaacgataacactcctctaattttaaatgatggattatattattaattttataatcactacgcaagaccacgtatcacactacaagaaaagatagtagtacgtaggggctacaaaagttgcccctaaaaacctttataatcaaccttaaaatgttagacttttatttgggcttacat

SEQ ID NO: 369703 - DNA, 907 bp, Cannabis indica
ttataggacttgatacataattacaccaatagtggtatgacaccaaaaaaatgtgttagcaccagtaatgccttttagcaattctactaataaaaatattcaaattattagacaccatagtgttaaatggcccgctttataatagagtattgttattgggcattgatagtgttcaacacttttttaagagtaccatacagttggttattgatattttctaaaattattttcttaaattatatgagatcagatactggagaaggtcctagacactagtagtatttttttaacaattctctttataatatcacatattattattagtgtaatttaatatgaaaatttgtttactttattaaaaaaaaagactataatgttatacaactttgagaaaatgagaaattatttatcttaataagctattaatctttgaacactatttttgtccatttaaagagagagttttaaaattagggtatagaaacattttattataattaaactcaatgtataattatatttttattttgtaatatataataattaaattataattttagtatttaacgaccaataacttttaaaatatacgactaaaatttgtatttactttattatataacttcgcgcaagtacttttactaattataaatagagatactctttgtaacaacaaagtcaaagaaaaaagtaattaaacaaactttgacaacaacatatattgaaagatcacttaaaacttataaataagtatagacaagtgattagtatgagataagactcgatactaattaatcgcacaaattaaatagtgtcaaggtaaggtaccttataataacgttgaacattttaagagataaaatttggctttttataaattttaaagtataaatttgtaaaaatataa

SEQ ID NO: 369704 - DNA, 792 bp, Cannabis indica
gttacccgaatcccgagtcaagatctggatcactgtcacgggtctcggtctggttctggttcaggtcccaggtcccattcctgagtttgggttcgggatcaagactggggtgttgttctaggtcccgaccctggttctgtgtccctagtctggttccatgtttgggtctgagttcaggttcgggttcgggtcccgagtccaggtttgggttgggatccgggtccggctcccaattcgggtctaggtctgatttggagttcgggtcctggtccggttacggttctggatctatgtccaatttcagttatgattccaagtccaagtcctagttctagtctcgttcaacttcccgttttggttccaatttcgggtcacaaggtacgggttcgggtccacttttgggtttgggaatgggttcaggtctgggtgtgggttcggggccttgcactactacaaattacactatttacgtcggtcaacgctactgttcatagcgttgaccgacgtgaattgtacccaaattattaaattcgtctgtttaaaaatgacgctaataatgtgtaattagcgtcatttgcttaaatgacggtaaaagggcaaccgacgaaataaagccaaaaagattttgaaaactttctttcattttgcgtctgttattaacaatcaattattttgtttgtgaggatttaaaactggcgtaaaattaaattattaaaaatgtaaacagacgagaatttgatagattccctaaaagccaaataacacaaggccactgttcacacattcctaacc

SEQ ID NO: 369705 - DNA, 807 bp, Cannabis indica
taagtttagcatataatttacataacttaaggggtctaatggggacatcatacataaaagtgggtatatctaaaaaaatatgaaaatggaggtaaaaattaaaataagtaaaataaattggatatacaatgtaatttcctcatttttaaaaatactgtgctaaagtttcaaaattacaaaaataaatactgtcttgcttttaaaataaaataaaaaaaaactaaaaaaaaaaaaaaactactagaataacttaacaaacaactataaaacaataaaaagataactacaaagtaacagaaaaataacaaaacaatatcaactcatcaatatgtttttgtactacgatttttttaactagttttgacaacttgatttattttttgtattattatattattttttcatagaatttattgttacaattttatacttttattttttctctttttctttttgagttagtacagttaaaataataatttattttttaaagttaaataaataattacattaataatagaaataataaaatcttatgattttaagtatttaatataataggtaaaatataattaatatgttaatatctactactgcacattgtgtcaattaataaaacacaaattttatcattgttttttaataaaatttgttaagaaaataaattaaatatatatttaaattacaaagcaacacacatacaattaaaaaaattcttacaaagaaattaaaaatatgcactatcaaaaatacacatgaataaaaaaaacaactaaaaaataactgttgaacaaaaaatattctgaa

SEQ ID NO: 369706 - DNA, 580 bp, Cannabis indica
aaaaatatatatctccattttatataaagacaccttatatatttattttactttgttgaaaaatatggggttccatctcaaaattaattattgattagtagagtagcctatgttcttatatattgtgacagtcagtagtcccgtgattcgtaaggagaaatacagagtaagctgtgcaaccctacaccgcctggggaaggtcaagtgggatgattttgagactgtacaggtatgggactacacagtcgaagaggcttaaataaattgattggtactatctataccaacaaggtgcatcttgtttttcagtagcccatcacgaaagaactcaaaagttaagcgtgcttgacgtgggataatttcagaatgagtgacctctagagatgtaaacagggtggagcgggtgccaggattgctcccccaccccatacatgcttcctcaatttaccccaatacccgtttaaatcaaagcaaggacgaggcggagattacccgacgggggaaggattcccatcgagtacccattacatatttatttttgaaaaaaaaaatgatgtcttaaaaagaatttaaaaaaata

SEQ ID NO: 369707 - DNA, 495 bp, Cannabis indica
ctctgatattagctagctcttttaggtacttggatatttcccaacaactccggtccatttacggttattgcttcggtgaacatagtagctaaataatcccaacgcgttacataagggagatattgtataattgttcggttttcctatttgtacaattttaaaaaatgcagggtctattttgtcatttaataaaatagagggtccaattggtaacttttgcataacacagggtctacaaatgatatttatccttttaaaaattaaaaaaaaaataaaagagtgttttgtaaattttatttttatttttatttgtttattttatttaagtcgggtttgaggtcgtgactgagagcgggtctaaattcgaggtcgaggtcagattcggtttcaaaagtcaaaattaggattcagagttcaaaatattaattaaaaaaacttatttaaaaaaaatattgaaagtgtaatttttttaaaaaaaaaaaaattagattttta

SEQ ID NO: 369708 - DNA, 607 bp, Cannabis indica
cccgaactcagactaggacttgaaccacgatcaggtcctagacttggaccgggacctacgacccaaagatgggggacttggaccgggacccgagcttcaaaattgacaccgagaccaagaccctaacccgagaccaagaccttgaacctggacacgaaccaggacctgggacccgaagtggaattagactgggactcgagaccaggatgttgatctagactcggggcttggacctaacccattgtcgatgtttggatctgggacccatacctagacttaaactgagacccaaactcagacccaaacccggacccagacctgaagttgtactccgtgacccgaaactttaagtggaaccggtagcggactgggacccgagaacaagaccaggggactaagacccgatctcggtcctgtaactggaatctgacaaggaaccagacccagactaagaacacgatgcggacccgaatcaaaactcggattgggactcgagacgcgaacccgaacccagacacagacttggacccagacccgaacgtaggacccagaccgggattagagactcagacctagacctaggtccctgacctagattggggaccca

SEQ ID NO: 369709 - DNA, 624 bp, Cannabis indica
atatagtatcagttacttcaaaatgttcttttaataaattcaaaacaaagtatgtactgacgaaattagaagaaaattacagttttataaacattaggtacgtatgccgctaaaaataaatattgggtttatgccgcttacaaacataagactttagtatttatgtcgctatttaccctaagtaaatattataagtatattatatattatatttataataatatataatatattataattttaaatatcatattatttaataagtaatataacaccaacatgctaattaataagattaggtcgaattaacctaaaaaatataagtatgattgtcatatataatgtgtagagtattgatattggacatcattaatggtgtctagtaccttctagatgtgttatcttatagttggttagctatactccctaaaaattattacattaaatttaatgagatttcatacttaattacactaataacaatattaatacataaaaaaaaaaactactaaacactgctagtcttgactacgtaattaaattgatcaaaacccaacatcctacttttgtattatacattagcaacccttatttattgtttgtgcgtttgatatcttcctaaaa

SEQ ID NO: 369710 - DNA, 678 bp, Cannabis indica
tcaagttccagttaccaaagatgccaataatctggtgtgataatctcagtgcgagtgcacttgcctctaatcctgtttatgatcatgctagaacaaagcacatcgaaatcgatgttcactttgttagagacaaggtgcttaagaaggaacttgaaattagatatgtccctactacaatatgccagctggcacattcctattgattgcaattttttttttctataaatgtaagagttgtgctcaaagcaaaatgagctgagatttatcaacttgttttttgtctaaaaatcaaactgaagttaacaatttgaatagtggaatgtgacatttgtaatggatgagtttacaggttctatcactaggttcggtgtggtaaaattttttcttttctttttctttttcttttaacaatcggtaatggtaatatttacgatttgcatgtatttatatacattcatttattaaaaacaatattaattcattaaacaccatttaattagtattaatttccggataagaatctaattcaacttatcattcgtatattatctaaagtactccttaatttgaaggtttcttcttacatctcctggcttatatatcattaattaaaaagtaaatcattttattatctttgttatatgtacatatttatattatggtcagttatattagtta

SEQ ID NO: 369711 - DNA, 584 bp, Cannabis indica
tctcataggccaattggtcatgagcggcagtgtacttgttatgtattgccttccagatatcacatacataaactaaacagtcatatcaatctcttatcttttcattaaatgaagccaacatgaaatacctagcataatcattatcatcatgccatcggttaaaagttctcctgactgcataactagaatgtttacgcatttttttccaaagagtttcaacaaagacaaggtgaaatagattttctctttgcaagagaagctctatttagatactccatttgcattggaagttgccataaagttcagttacattgtaatagggatagtcattcacaaaatattattgttccattttatatcgttattagactgaaataaaagataaataatacgagaaataagcaataggatataaatacaatataagtaccataaataagaaaaaataaatatcaagtttggaatctaaatatgatgcatgaacacacttaaaaaaatacataaaataatttagaaattccacgataaaattatgcaaaggttaaagttccaccttagggtcggtcaaattaatatcgaataat

SEQ ID NO: 369712 - DNA, 487 bp, Cannabis indica
ttgatagagttttctgaggatcactcctgccttgcagagacttacccccgtcaccttcctaaaatgaggttgtcggagttgaccattgaggagattgaggctcagaatgcggcccgtcggaagaggatgatgtcgaagtcccccaaacgaaaaagtaagggcgaagaaaagtaagggagtaagggttgaggaaaaacgccccatcggatctcggcatgtcatctcagcatgactcagccactgaggatgccattggggccctgcttagcgctcttcccgaggtctcgtcgggcgtgggcgaaagtgaaggcaattccgaggggctggccccggcgggagcctccaatttagggcctctaggtcgggaaggtttctctcagcctgagatcctcccaacagctacgccaggtccttccatcctcctctcctgctcggacctctgcctctctccttggcgtgccgtcatcttcccagcttgccctttctc

SEQ ID NO: 369713 - DNA, 679 bp, Cannabis indica
ccgtgaggcacagtatattcctctgcatcgaaaggaatcccagaatcatggctcggggcaagagtgtccaccctacggggccacttagaaggctcctcctccaccatcttgccctttcgcttgcgctaaagggcggtcggatctgccacttcaccttcttcaacttcctcaattccctcctcctcgtccaccaagacaatggtgcccgaaggggcattggaggaggacctcccgggagtgaccaactgagaagcagtcggaggtggggaagcacaaggactgtgggctccagcaagagtggccaagagttcatccatgggcctggctgttgcaacaaagaaaataagtgttaggacattcacgagacagcatacacttagcaaaaagcaaagtctcgaatcatgatgctagcttcatcatccccgagaaagctgtctgagggaaggaaccaactagaggataaatgggctgaatggtctaagggaataggcgccagaggtccagaacccatccgggaccgacctaaataatggcctaagtgggagaaataatactccttggcatgattcccccaccgggtggaaggcatcctaaacctacggagatgctcatcgaaccctataggcctaaggctggtatactcaccgacgagaggacataatgtattgttaaaggggac

SEQ ID NO: 369714 - DNA, 495 bp, Cannabis indica
tggcaggtatcaagaccaaatacatgattagacacatttttggcaagtttccttttctggtctgatttgttgcaacagtatttgtctctgatgttgcaaatcatgatttttttaaggaaaggtttgtacagcagctgattcgactatgtggttgtctctagggtttctatgctctataaatagaacctaaagaacagccattcgaataaactcttctagctttcattttttgtattttctcatttgtgaagagagagttctttttgtgagaacctagttgttcatctaggttctagtttttttcatatgtgttcttactctgtcttagggttggttagaacacttgattgaataagagagaggtcttcgggagaagacttgttcaagccttacttttggaggaagtaagcactcacacgtcaaagacgaagggagttcgctgtttgaatgtggttcagaaataagattcataaagtgtattacaaaaggtattgc

SEQ ID NO: 369715 - DNA, 643 bp, Cannabis indica
tctgtgagtcaatatgttcacttcaacaggcagcattgcttccgagcagatgctagcaagaaggagtgtgtcccgtggttattttctcagtagttctgtgggcccagagcacctgaggtagctcctcaacccatctgcctttggcagcgtctaactacttcttgatagtatcctttagggttttattaacgaattccacttgtccatttaactgaggcctagacactgacgagatgcttttgataattttattcctctcacagaatttagtgaacaagtcgccatcaaattgggttccattatcggatactatcttcatgggaattccaaacctacagaaaatgttcttgacgataaagtcaaggaatttcttttaggttatagagacgaggggctcggcctccgtccatttagtgaagaagtcgactgctaccaccacatacttaactcctcctcgcccagtgggtaatgctcaaattaggtcaatccccccatataacaaatgggtagggtgaggtcatcaatctaagttctgtttggcggtatgcgaggtatatgtgaaaatctttgacacttatcacatttcttgacaaactcatgtgtgtccttattaatcgttagccagtaatatccttgtctaatg

SEQ ID NO: 369716 - DNA, 587 bp, Cannabis indica
tgtaaatttaatagcaatagtgtcatgagaatgaacctaatagatgtagtgggagatcgaaaagaaagttattttttttatatatatatatataaaaagaaaattagagatttgagaggaagaagatgagtagttttccttctaattttctcagagtttgtgacataccacagttttacactctggtcatcaacacacacgagtctcgtcccgcttggccgctccactcacttaggctcacattttttaaaaaaaaaattgaaaaaataggcttataattttaggcctcttattattaattcaggttttaactttttataaagggttaatttcacaaatgcacaaaaacaacaagaatacggtttcacggaattttaaacatttttacgatttttttgattttatttacataaaatacagtctttttatgttgaaattttgttcatttgttgttaattttttgttatatgcatgttatttttttgttgttattttgatgttacttttatgttgttctcttgttgattttatgttgttttcgtgttattttttcgaaaaccgtaaaaatgtaaaaaaatattctttga

SEQ ID NO: 369717 - DNA, 538 bp, Cannabis indica
gatgttcaaacagggacttggggagcaaatgttatcccaaattttatccaccttacgtggcatgtctacgtaagccaagacagaggacacgtggagtacaaccttgctaatagcaggataaagtctccttgcaaggcatgacaaaaccgtcaagcagcaagcgaaaggagttaactgttaaggagttgtaccaccatgtctggccagccaaggggagtacataggccggccaggatgagcttgtagggtcggccagagtttgagcacaagctggccgacaaaaggtggcttttagacttaggggggtccgttcgactaaggaaggctgacctctgcaaggaaacggtgtacaaagactgacttccacctataaatactggcctccacctacaaaggccagcctccacctacaaaggttggccttcacctacaaaggctagccaacacttgttggaattattttaccaggatcttagatctactcacaagtatgtcaattaccatggctctgaagcgagttgttggaattattttacca

SEQ ID NO: 369718 - DNA, 974 bp, Cannabis indica
aagttaattcgttatagaaatgttgtcgatgctagattggcttagatttgagattgggagcaataattagagaaatattttcccaaagagtaattaattacttgaatctgaagttattatatatattataatttaaaaaatatatattttaaaattattttttcttacacaccattagtgatcttttaattactacaaaattataattagaaatgtgttaatttggtttttattttttaaaattgtttagaatgtgatcatgacaaaacaataataacatgcaagtccttaaaaatggactattacttaaataaaatataagataattagtggcgaaattctcttatattttttttatacacttaatactcttatttttttcaataaaaccctttacgtttatttttttttgtaaatttgagattttagttagatattaactggatggccagtaactactatgtacatctgtatatacatgatagtaaaatttcaaaatcaatacaataattatctaattgatatttaacggtgatatatatatcttattgtggtatctcaaattttgcaataaagaaaaaagaaaacataaggggttttgccaaaaaaaaattgttaagttaagtgtatacaaaattaaaaactaattaggatttgtgtcccctaaactttgacatgtaccaaatcatgccccatgaactattgagattgttagatttaaagacttttctccaattttagtaaaaaagtctaacatggatgaaagttcaggagacataatttagtacatgtcaaaattcgagggacataattcggtagatatcaaaatctggggagtatggtttagtacataaacaatcactgaaatagtaaaattgaaaattagacaaaagtctttaaatctaacaatctcaataattcaatgggcatttttaacggctttaaaagttcaagaggcataatttaatacatgt

SEQ ID NO: 369719 - DNA, 567 bp, Cannabis indica
tgaggaacctcccattacattcacggaggaagatgagaaaaacgtgagatatcctcacttcgatccattggtgataaccattcaactcgccaataaaaggctgaagagagtattaattgacaatgagagctcggtaaatatcctttataaggagactctaaagaaaatggggctcagaaaggccaaattaaggccttgcatggtgaacctttacggattcaccggagagagcattgctagccttggcataatcgagcttgcaataactttagacgaggcacttttatctactactgttatgcaagatttcttagtcgttgacctgccctcgaattacaacatattgttgggtcgtccagcactgatcggactaggggcagtcagtttgatcaagcacctatctttgaaattccagactccagatggcgtgggagtggtgcgtggcgaccagatgctggctcgcgattaatatcgcatagagctgcagcatagaaaatttggtcatcaattgatgacgatcttggcaaaagaaagcgagaagaaagacgaagatcttgaccctcaagt

SEQ ID NO: 369720 - DNA, 1180 bp, Cannabis indica
gaagtttatatgttatagttatctgatgtgactgatatagaccactgatgaggtgtagtgggttatttatactgtgcttggtgctcaagcatgagctcactttatgatcataagtgagatgaatcagatgatttcgactcatagaaccttatttaagaaaaaactccaaggaaggaaacaaataaaaaaaaaaaaaaaaaaaaagaattggattaaactcgtgctaagtacaatgtcccatacttaggaggagcttagccactgaaagaataccacaactggggcagcgtcccactcccaaagggttttctttgatcaattagaaaatctcttctagatgcagtgtcctgcttccagagagctttctataattaatgatgattttcttttctttttaatttttgtcatctgaggaggaacacttgtactaacactttaggtttataaactcggtcgttatattcttgtgagacctcaagcgttcatatcataaaagtgctaaactctggtgtacaaatagtctttatgtacagttgttcaacttaatgaacttaccaggactcgcactagaattttaggattaaaaaattcagttactagggataacgtcaatatttcattaaaccatagaatactaactcaggtgtgcaaaattccactgcaacccctagctctcgtatatcaaggtgtatgtgacatacatggctcttgtgtaacatgatttttgtgaattctcatgtaacagtcatagctctcgtatactatgtcttatttgcccccgagtgatcaaagaaatgccttcattggtcactttccataccaaaccccgttaggctttcttgattacgggtctcaaggagttgttacatatgtgagcacttgtccacttatccaaggatttgtgggttggtagtgtttaactcactaaagaaataaccgcagttacctcaagaccaactctacaagctttgttcagtgcttgagagcatcgtcaggtttgtgagctgcaattgattaatgataatgaagtaccaacaagctttactcaacgcttttattcgttagatattaaattcaattacatcactatgagctaagttgaaagaaaaagaggtagtggttgcagactttcatttttcatcaaagcttagctgaagtgattcccactacactaatgcaa

SEQ ID NO: 369721 - DNA, 810 bp, Cannabis indica
gatcccctgtcggactggttcggtcgcttcctcaggcccaccttagctccttttgctgcggagatgactggcgagtttgcgtcccaactaacccggtgtgcacctaagcggttcgctgcttgtgcatccttcaactccatcttccaagtccaggatctcagccactccctcactgtggtaagtgttttgaagtttgcttttttcccttattgttttctttttcggagattcttactcgtgttatatattttttttttagcctgctgctgaagccggccgtctctccaagaacataatcaaccatggtttcaacctgtccgattttggggacatggacgaaatcaggaagattcttcaggatcttactgctgagaggcgactttatcaggaggctgctgagcgctgggaggccgctaccaaagctaatgaggaagaggccaagcggagggaagcacaggcggaggcaatgatccgggatgaggccctgcggagatataggctggaggccaggcaccaggaggagctgaggacggaaggtgaggccactgcgaaggccaggccggagcttcgggaggccagggaagccttggaggagatggctgccaaggtgaggtccttagatgaaactcaccaggcaaacttagaatccagggccacccttgccgcagagctgaaggagctcagggacttcaaggaacaagcctcaaagaaggcaaaaagagatgagcttctttctcccgtctcctgcagccggtgcgccaagcgttttgatgacggcgtcttcatggcttggtctaccaatgaccagaa

SEQ ID NO: 369722 - DNA, 636 bp, Cannabis indica
tcaagtctaaagcatgcaatagcaacgcggacgacttagaagaatgtttcgaggtagtctggagatatggaatgaagctcaacccaaagaaatgcacctttagtgtcaaatcaggaaagttcttgggcttcatcgtcagctagagagggattgaggcaaacctagagaaaattcaagctctcctgagcatgccatcccccaagaaacacaaagacgttcaaagcctaactggaaaggttgctgccctgagccgttttatctctcggtctacagacaagtgcattcccttcttcaatattttgaagaagtgccaaaagattgaatggtctgacgagtgggaggaggcattgaaaaaattgaaagagcacatggccaagcctccaatcctgtcaaaacccgttctcggagaggatctgttcctgtacttggccgtctccgagcacgcagttagcacggccttagttcgggaagaatggccgcatatgtgacgatagtccgggaactactccacgagttcacggattataaagtagaaacaatccccagggaaaagaaggctcatgcggactgcctagctaagttagcttcaaacagtgagattgaaggactggggtagtacccgtggaacgcttggca

SEQ ID NO: 369723 - DNA, 518 bp, Cannabis indica
ttatggaggtatttttataaataaagtgtcactttatattttctatgtaataattccttaaaaataaacaaatagatatttttaatatcattttctaatcttgtaatttaataaaattaaaattacaacataaagtaattataaaataaatatggttagtcaattattattttaataataaaacaataaacaaataataattatttaaattatatgtcaaaatatctcaaattaactctttctcaaatttctacaaacatttatatatttttgatacgtaaaatgatataatatagtcataaatgtcatttttctaacttataatttataaacaataaaatatttaactaaatagcatatttttgaatttaaaaatattatggttaggatgtctaataaaaaaatctaatgtaatttcaaaatttataattatttaatgtctcttatcaaaaaattttaatataatatttcaaattaaaatgataatgctatcttttaatttaaaatatagcctaata

SEQ ID NO: 369724 - DNA, 509 bp, Cannabis indica
atttttattattctcaccatcttatctatttactccttcaaacaataccaaattatcatagattttttgttaaaattcaacattgcatcgctctcttgtcactgcaactttggtttctggctcatcagttggacaaatacattgcaaataaatttatttattaataaatatatttatttttacaaataataattttattatatttataattatgttgaaagagatataataattattattttattttattttaattcactattccaaaatggtatataagattcctgtgcttaaccaaacactataatttaattaataataatctaattaatattaccatgaataaccaaacacagtaataagtttacagataatcatattccccttaatcagattattttaaatcccttataccaaacgcccctagtgtattttcgttattttctaaatttctaatggtgaatttgttcatattaaatcatgaagagacatgtagatagagttatgta

SEQ ID NO: 369725 - DNA, 505 bp, Cannabis indica
gaatcgcagatcgctctttttaacattcgacacgatggtgcaaactcgtagaggcctgtctgacccagcaaactcagagatgctggatccgacatcgcaggactcagggagttcaagtgttccacccgctgtcaatcctagacagacgggaagcgtggtgaatggtgggacgactcctgttactgaaactgcgcctggtgtgcaagagactgggaataacagttccgcacacagccaggaaattcataacacgacaattccacaaggcatcaacgcccatacgaccataggagatgcggctgaattgcaaaatctccgtgctgagctcggactcatgcagggtcatagtaatactctgcatcatgatcaggaggaactgcgtgctgcagtaaacctcgcgtttgatgaacagagtcgtatgttagctaaatggagggacaaagagatggaggcattaagggctcaccatgcagagatcgaagaccgtagtcggcaagctactgtg

SEQ ID NO: 369726 - DNA, 411 bp, Cannabis indica
tggtaaaatatttccaacatgcgaactcccaaagattttctgtgggagtcaaatcgacttgaatctaaggccttagtaaaaaaatatcagccaattgcttttcagtatcaacatactccaactgcaatgatttgttgtcaacaagttctgtaataaaatgattccttatatcaatttgtttggtacaagaatgttgaacaaaatttttagaaatatttatagcactagtattttcacatacaaaatgacaagtaagaatagatgtgagaatataacaattatcaacagatctaaacccttgcaaaatgcattgtttatcactgttaaaaataaaacaatgatcattgtcaaaattgacggtatacccttgattacaaatctgactaatgctaagtaaattagtttttagtc

SEQ ID NO: 369727 - DNA, 532 bp, Cannabis indica
cggtaaaggaaagtatcgtaaaatatcttcagcgaagtcctcaggtcggctatttacgttatgcgacttgctcacatcgctcagcgcgaggtgaaatcttgagcccattcaggtgataatttttttgagcatttatacttcaatttcatttcgcattgcctgcttggttggtggtgtaacatttcgtccaggatcaaatttccttcttacgtgtcagcttgccaggtacccaggcccagccctaggcataggcgggctaggcccatgcctagggcctacacttcctacgggcccactaaattttttgaatatttcattatttaaatgttatatttaattttgattttctcaaaaaaaatgttatatttcattaaaattaacaattaatatacccaaaattggcctagcacagtgggagcctagagaaagataagattttattagttaaaagcgtgagtttgaaccctatcaaacctcttttcctagtattatttttttttggaacaaaattgtttaataaacaattacaagc

SEQ ID NO: 369728 - DNA, 649 bp, Cannabis indica
agtgcatccgatccgtactaagtacaaattttattttttgaatcaaatacaatccacacaatatagtttaaattcaatccgcaaaattgaataggttattttggactgattattttttaatattaaattatttaatatttatgaaaaaaaattacataactaacaataaaataaaacaaattatttttattttatgtgtccaacaacacattaaaataaataaaatagcaaataacaaatttaaagaaagaaaaaattgtatgtataaaaaaatatttaattttattgtaaattgtacatagaaaaaaaaaattatatataaaaatatagaatatacatttgattcataaagttttgaaatataattgtattatatgtattagacttttaaaatactattttctttacattaaaatattatttgtatatttattttttttatatataaatatgtgtattagattggattatttacttttacatgtcaattaacatccaatccgcataagtgcggattttgaattttctattcaatccaatccgcacaagtgtggatatccgcacaagtggggatatccgtactttggggatttaattggatcatctattttatgaacatacctattttttttaaaaaaaaaaaccaagt

SEQ ID NO: 369729 - DNA, 594 bp, Cannabis indica
tgctacgtttgctagtgaaaacaaacatggttacgacatggtcgcaagaaacaactcaggcattcttattgacgccaaagctggctgtagcctcgacacttttacacctaaagttgcagaaattgttggtatcaaagaagcattaagttggataaaaagtcatgactgccagactgtcgagttagagtacgataacctggtttctgtccaagccattcgaagcaagattcctctcagttcggtttttggggttcttgtccatgattgtcaatctcttttatcatttattccttttcttaaaattcattttgtaaaacgttcagcaatccgactagcacatgttgttgctaggatgtctcggtttttatctgaacgtagcatttgtgtgtccagcgctccagctgctatgctggatatcatgtattccgaatcctaattttaatgaagttctcatttcatcaaaaaaaaaagtgtgttctaatggtgtgtcaaaaagtgatataaatttggcacatagtaaactttgtgctaaatttggcacaacatttgttatgaatgtaaaaatttacaccacaataaatgctactatttttt

SEQ ID NO: 369730 - DNA, 747 bp, Cannabis indica
ggtcatagaaaaaaaattattttcagtctcttatttagaaataaaaatatgtaattttagaaatagataatttttttttgggctctgggcttggtagggtctaggtacagacctaacccgcttatgcccaaattgaatttgactatatatttgtatcataatgtaaataatttaagggtaaataccatttggatactgtattttataaaagttaccaattagactccctgttttgttaaataataaaatggactctgtatttttcaaaattgtacaaataagactctgaattgattttttgtcaaaataaaacttaataataatctgatctagagatgttatgataaaatttgttagattttctgtatttgttcgtgttaaaaattgtcttaaagttagttattttaaaaaataaaattattaaaaattaagctgatgctcctatttttactattttagaaaatacaggatccaaaatacaggatccaaaatagcatttactcataatttaatatgtgcaatataagcttttcatatatacatatatacactcatttaataatgtcaagtggtacttaaaatattgaccattaccaacacacttggtatcatgtagaaaacaccatgattatagttggcattatatctaaccattagaggaactcattatctatttatgaaatttaagtttgagaattttctttaaaaaaaaaattgcataataagggatcacataaattaaaatca

SEQ ID NO: 369731 - DNA, 771 bp, Cannabis indica
ctaaatttccctaagacacctgtagaattatgaaatggtcgtatacctagtttacctattatagaatctaggggtgctctactcatgtcttaagaaagaaagaaggcaaactagaagtgcaaacagacatttgcatgtttgtcaaaaatttaaactttaatttacttacagaatgaaaatataacttgtaataatttaaactttacaaactattccaaaatgtcatacatgttttgggatcccgtaaaaattttcacaaaacattacaagttacttttacatgtcgacctagacggcaaaatccaagaatgcaaaatacattcactggtagacccaacctcgcgtggtctagtgtggcccgaacatgtacaatccactgccaagcccttgaactaatggctgatcttaaacagatttaccctataacgttcccactccaagcctccattgggcccttacacccatggaacgaatggctcttatacacgagtacgtcactgtggctgcttcatggagtgatgactaactttacagaccaacacgagtgtttccagcgtgttttgtcctcactcgcacacttcctaggaaaacttctcaagaggtcacccatcctgaaattaccgcaagtcaagcacgcttaaccttggagttctttcgtgataggctaccagaaaacaatgtgcaccttgttgatataggtagtaccaatcaatccatttgagccttcttcaactgtgcagtcccatacctatatagttgaagaaggcttaa

SEQ ID NO: 369732 - DNA, 419 bp, Cannabis indica
aattaatttaaaaataaatatatacatattacaaaattaaaaaaataattaattgaaaattataaatagtcatacgataaataagttaaaaaaattataggtttggagtttgttagttgaacttgtaattaataatattcaagattaaatataaacaaaaaaagtatattaattatggtgtagttttcaagggttaatttgagccatttgattaaatcaaaggctacaaattactattcctattgatatgtaaaaatcagaatacctattgtattaactcccaaatatgaaaaatgctaaaaagtacaatgttgtctaacgttacttaaaagagtgtcatgtcattattaatgtaattgaatttgttaaaagtttaaataataaaaatatcttaatataaagatgttgggttttatgcc

SEQ ID NO: 369733 - DNA, 499 bp, Cannabis indica
aaaaaaaatagtttcattaacaaaatagtgaaaaaatttataatctaaaaacgatactaattttaaaagagaaaattagatcataatactaactttcgaaaatatttatgaaaataagcttaattattttaatctactgtgtggataccttttctttttaataaatgggtaggtgtgtaaccaaaaatcaatatttttcttttgctggccaccgaaaatcaaaaaattctctattttgtcttttatactctcttagagagatattagtgttgttttttttaaactctcttatttttttaacaatgacttttttatttattatcttttgtctttttctctattttttttttttttaaagacaagtttgtttttgtctttttttccttaactaaacgaaattatatctctctcttcctttcttataattttttttattatttttattttctaaaaaagctatataaataagattatcattttattatgtgggttatatttt

SEQ ID NO: 369734 - DNA, 494 bp, Cannabis indica
gtagaaggacatgattcaataccaactaaagttactaataaacatgtgaacacaaactaaaacgcaacatactcttagaaagacaatataaagcgtaccataataagaacacacaacaaaatatcataaaataatttagaaaaatgttagaccattcgtaggtttggagaggatggggcgggccagtgaatggtgcataaaaggcgagttcccaagacctcaatcgagacgaatcacctcagagactctcacttcacctttgaggtagtcattgacagcttccagaaatgctcccaacgtcttcacctggtcacttattccctcaccctggagcttgttttgtcggtacatagtcgaagcaagctcgataatcctctttcgagcctcatctagcaggtcaacacatttgtttttgaagcattcactgagttaagagtgctctgcaacatgacataattgcagcaaggttctatcgcctgagaccggtatctcct

SEQ ID NO: 369735 - DNA, 564 bp, Cannabis indica
cttaggggctatgctagcaccaagtatcaaactggtcattgggatctcattctggcctctaggtgggtctatttcttccttaaaagcacttgtttccttaattttgatgaagacgaataaaattctcaggatagatcttcagttttatgtcaacctaggtgatgggtgcttgggacacatgatgctccgggtgctcaaagacgaaagtgctttgaatttgattctaatgcctcaaatatgttcatgacatgtttaatcatgccctggtacaaattttgatccattttcactaagatggacccaaaaactaaaaccctagttggattgtttacctgggcactaggtaaaaccctaggcgcccgaattaatttttgtggtgttgtttcgtgtatgtttagctctcgagccttagactttgatgtctcatgtctttagggtacaagatacttaaagatattgagttggaaacaacttggcgagatccaaacactcattctagagttcccaaagtcaacttagacgtagggctagggacccctcccaggtcaactgctatgactcggg

SEQ ID NO: 369736 - DNA, 512 bp, Cannabis indica
ttataactggtttgagttatatttttgttatttgtttttattcattatttttagaatcggttctatttttatttatatctgagacatctacttctagtgattttttcagtgatttttctggtgatgatgacttttttggcgacaataaccttttttgacaatgttttcgacgtcggtgactttttcggcatcggtgacttttccggcaaaacttattattacaagttttattaagtttatttattgtttcttctcatattttaaaatttaattatttttaatctaatatttttttttcattaattatttatgcggtataaaagtaaactctactacattttgtcatatttataaaaaaaaatcacatataaattcaatttaaattttactaattatttaattattttaccgatttttctttttgttcttttctcctcgtaaatactcacctttttttaaaaaaaaaaaattagctgattatccctataataatcacaaacaatcatttattt

SEQ ID NO: 369737 - DNA, 640 bp, Cannabis indica
taaaagtgttatgacaaaactgtttacatatatgtttgtatttttaagtttgttatattaaaaaaaagttgtcaaaaattaagttaagggtcatatttgtaccattttagaaaatacagggtccattttgttatttaacaaaacagatggtccaattagtaacttttgtaaaacacagggttcaaaatagtgtttaccctattttcatttacatctttttgttctgaagtaataaaaagaataattagtatttttatcttttaaacttttaatattattcaattttactctttataatatacgacttattaaaaattttatttaaaatataacagttacataattattcttcttctgctagaatctatttcttttccagttaaaatttagcatttttatcccttaaattttgaccaatacaaatttttgccctttttttattaaaaaaaaaaattagttttagaaattataatattctattaattctaaaaaaaaattaataaaaaattataaaaaaaaaaaaaaaataaaatttactttaaaaaacctaaattattctcaaaaagaaaatatttttaaattttagtttatttataaacacgcatctcaaaaaaatcaaactaaaattattgaaaaccca

SEQ ID NO: 369738 - DNA, 535 bp, Cannabis indica
taagtgatataaattcaaagttggtgcactatatgataaagatctttgtatgaaataaagacatgtaaataaaatattatttgaaaaacatgtatagttgtctatgcaatataaattcgtaaattatacattgtgatagactcttaaagagttttttattatattataaatgattgaataacaaacttttatttcttgttgtatattaaatgtatatagtttgttcataagtattagtagaaaagtcctgaagtactttatatacatcaagaatatatggtattggagtactatcattattgtaaataaaaatttatgtaatcattaatgtgttatgttcatattacttaaaatttcaaactttgctatgaacaacgttgtatatacacacataaatgattcaataagttggataaatgtttatgtttcaagaaccactcatctatcatttagaagtccaacatactctagaagagttatagtagatatatggttatagataatatacgttgatattttaaaagtgataacaata

SEQ ID NO: 369739 - DNA, 624 bp, Cannabis indica
aattaatttttaactttaatctaattttcaaaattgtaaaatttcaaaatatctccatataaaataaataaatgaaatttgaaattagtgggaaaatgattattaaaataaaataaaatatactctgaatattattataatttaagtttatctgaaattgaaaaatttcaaactgaaatataattttccatttaattaaattcattaaaataaaaataattaagtatcttgaataaaatcaacttaattattaattctaattttatatttaagaaaatattttaatttatgttggtccaaaattaattgtcaatttatatatattttctatttaattaaatttcttgaaatagaaataaataattaagtatcttccaaaaaattaacttaattattaattctatttttatgttctaagaaaaatattctaatttaagttggtccaaaattaattaaataattaattttcaacttcaaatatatttttctacttaatcaaatattagaaaatataaattagttactagaaatttctttctagaatatttcattaaactaagtgtatttatctaaactaattttaaaataatccaatgaaaatataatttcatttatttcaaaatt

SEQ ID NO: 369740 - DNA, 597 bp, Cannabis indica
tatcaaaagataataatctattaatgaatattattaatttaaaaatgatatttaagtttacatatattaaaaatgtatattttattttaattttggggtttgaaaattgaaaaaaaccgaaatttgtggaaaaaaatcacaaaaatcgcactttttggggaaatctcccagctgcccacgaaacaggctgcaagcagcccattccgtgcccgggagtgaaaggatgcagggtgcatgtgcaggaaaacccggcaggttcaggattccctcgggcggacagcagggtccgtgtctgaatgcacacggcttcagactgcattggtgtcccttgtcggcgcgcgtaaggggtcttgtccgaagctcctggtgcgtgcgtgcaccaagcttcgaccccatggacatccaattttcaaaccttcataacttctcgtttttaatcgaaatcgaattccgtacaaacgaaagttgcttaatttttcacaaggaatccaaataaaatattttcatggaaaattttcgtaaaacacatacattcatcatataaacacataaaccatcatgaaaccatccaaatcaacacaaacatcgttttaattc

SEQ ID NO: 369741 - DNA, 612 bp, Cannabis indica
taaaccatgtatactgataaatctaggaatacatttaattacacaagcttgtttgctttccactgtgttgacaacacaataatcaagaatattagtgtggtaagggtttggatgaatttattaatcaaataagtaaataaatgatcacatgaaccaaataatacattaaacaagtaatgaaattaaatctattcctttattgataattgaatagaaaagattacattgaaatagagttttatttagggcacaaagtctaacactatgtaagtgaatgctctcatttcaaataaagaaatatcttttttttagactatttattatttacattatttttttccacataaaaaaaatcattaattttttcatattttttaagaattaaaaataaattacttaaatattatgttaaatattatggtatatctatattgttttgttatatataatagttgtatataattttgttagcataatacaaatattttaatgtatgtatacaattttattgacatgctaaatatatttcataatattttttatattttaattgtatgatatattatttattttaatactatttaattatttctattttattatatacaatag

SEQ ID NO: 369742 - DNA, 1085 bp, Cannabis indica
acacactcatatgtggcaacatgtgtaattcatctattgggtaggtcttgtgattgaaaaagggtttggaaccctattgcctaccgtggaattgattatctccaatgggcgaattaggtctatgccaattaggatcaaagataaggagttcagtgctgacctagtagagctggatttagcagaatttgatattatacttggaatggatttcttgtccaagtattcggccaacattgattgtaagcggaaaatggtaacttttcagtcggaggtgaacatccttttgtctatgttggatctattcaggggtctcgaatcccgattatttcagtcttaagagctagagatctacaacaaagtggatgtgtaggatttttagtagttgttattgactccagcagacctgaaacatttgggcctgaagtagtcagtgttgttaaaaaatttctcgacgtatttcccgaggagttgctaggattaccgccacaatgagaaatagattttgtgattgacttggcacctagaattgaggctgtttcgaaagcaccatataggatggctccaatggaacttaaggagctaaaaataaaactttaggggatgcttaatttatctgatccagtgtatcacctgggggacctccggttctgtttgtgaaaaagaaggatggttccctcagaatgtgtatcaattatcaggaatcaaacaagctcaaaatgaagaacaagtatccgttacctaaaattaatgatttgtttaatcaacttcagggaaagactgtgtttttagagattgacatacgatctggttatcatcagctcagaattgagaagaagatataccaaagactacatttcgaactagatatggacactatgagtttttggtaatgttgttctgattgaaaaatgctccaacgacctttatcgatcttatgaacagagtattcaaggatttcctcgataattgtgttatagtgtttatcgatgacatcctcgtatactctcagtcagaagaggagcatgagcatcatttctgaatggtattacaacgactcaaggatcataagttgtatgcaaaattca

SEQ ID NO: 369743 - DNA, 543 bp, Cannabis indica
tcacttgagctacaggaagagccaaaacccgaaactaacaagttggaagaaattaatttgtctgaaaatcctgaagaaaggaaacctgtgttcatttctgccgatttgcctgtagccatacgagctgaattgatagaattactgcataggtatcgagatgtgttcgcttggacatatgaagatatgcctgggttagaccctaggttggttactcacaaattaagcgtattgtctgaggcaaaacctgtaaagcaaacttcaaggaattataggccagaagtacaacttcagatcaaggcagaaattgaaaagttattaagagcaggatttattcgtacgtgcaagcatccaatatggctagctaacattgttccagtgaagaagaagaatggaaaaataagaatttgcgttgattatcgggatcttaataaagcctgtccaaaagatgactttcctttgccaaatcttgatactttagtcgatgcaacagcaaattgtgaaatgttttcttttatggatgggtttagcgggtacacccaaatc

SEQ ID NO: 369744 - DNA, 815 bp, Cannabis indica
taaccggaccaggatccgaactcggacacagacccaccctaggattgggtccaaaacctgaatccaaacccataccgtgacttgggacctgaaccgagacctgaactcagaaccaaacattgaacatgactcgggacctagaactgggatagtgacccagaactggaccctagtcttggtcctagatctagacccaaacccaaaccgggacataggacatgaatcgaaaccagactcggacccgtggttgggatccagatcttgtcccaaaatcaaagaaccggggcttggacaagacccatagcagatgtcttgatttggtcggacagggacccgaagctggacgagggcctagacccagaccgagacctgggactcaaaaccgacacttgaagctgaacgtgacaaggaccctagaacaggactgggaccgtgacaaggagctggacctggaccgagtactggaactcgaccaaaaccgagccccggaactcgggctcgaacctagtcgcgaacccggtcctggacacagactaggactgagattcgaacttgaaccccaacccgaacttggaacttgatcctaaactcagaccaagcccctaacctaaactatgattcggacctggacatggacacgaacccagacccagacccgaataccgacccagacccaaaccagaatcgaaacatgggacctagacccagactcagacctggaccaagaccaggttccaaaacacccgtaccaagactcggactaagactcggaccccgaccccaacctggaccgagaacagaacccgaaccccgaa

SEQ ID NO: 369745 - DNA, 625 bp, Cannabis indica
attatcccagcctccggtcctttcgaaacccctagatggtgaagggttaagcttatacctagcagtaacagaacatgcggtcagtgcagtcttggtgagggaggaagatagagcacaacatccagtctactatgtaagcaaaagactgattggggcagagtgcagactaccccctcatagaaaaattgacctactgcttactattagcatccaggaagcttcaaccatactttcaagctcaccccattgcggtactcactaaccaacccttatgccaggtgctacaaaaacccgatacatcaggatgccttcttaaatgggcagtagagttagggcaatatgacataacgtatcagccaagattggctattaaagggcaggccctggctgactttgtagtcgagtgtaccggggcgcaagagggtgaccaaccaacaataaccagtgacatccaaaggcctgacctgagcgattcacctgaaccacacatccataactccgagaaaaatgaaaacaaagaccacccggtgaaacctggaagctacaagttgatggttcttctaccgaccagtcatcaggagcggggatcaccctaacaacattagagggacaacgaatcacacgg

SEQ ID NO: 369746 - DNA, 480 bp, Cannabis indica
attgagtcaacaaaagtagttaatatatttaatataaattagattagttgatgtgtcaaactttaattggtttaacatagtatgcgacactaatttttaacaagagatcttaattccctagctaccagtactctctctctctccctctctacttcgtgtgaaccaaaaccccaagccccctccaatcccaatcccaagccccctccagttcgaaacccaaagccccctctagtcgagaaccccgaccatcaccttcctccaatccaagaaccccaacgaccgtcagcttcctccaatccaagaaccccagcagccgtcactttcctccaatccgagaacccaacaccccgactgtaacgtccccgcttcaagcctccattgggcccttacacccacggaatgatcgactcttatacacgagtacgtcactctggctgctttctggactaatgactgagcctacagaccaacacgagtgtt

SEQ ID NO: 369747 - DNA, 553 bp, Cannabis indica
atttttttactaaaattaaaatggataaaatacatgttttgcaaaagtaataaattatacagtttttttttttaaaagataattcaaactctatgttttgaaaattgaacaaaattatcctataaaattaattttagtcaaattaaaatttaatagcagcataatctaaaggtcttatgatcagattcattatatttttcagtatgacttttttaaatgttttatgataaatatggcatagtttagtttggacactttttatggtttttttaaactttgggcatattttatgggtttttaaaacccatacatttagaattaatgtttaaagagttcatattttattgtttgtagtttctgtaggttattttagtcattttatatttttaaatttttgtatcagttttttttacataaccgtttttttttgggttttgtcatgtaatcattacgatttgatagttgcttccccttctacactacttttttcagttttcacttcatactaaaccgtctaagatatttctctctccctctctattttcatttcatt

SEQ ID NO: 369748 - DNA, 683 bp, Cannabis indica
gcctgactatgtaattataaatagaggcaagtcagactgaaaaagggacgaaaaattcataagaaaaaaaagtcctagaattgtatgagaaatctaataagattgactcgtggactatgtagaatttcaactgcaaaatcacgtaaaaaacctttgtgttcagactttttttactgtttttatttttctgtgcaagtttatcactgtttagactcaaaatactggttaacgaaagtctagcgttaacacatacatatatacttttttttttcttaaacgctctatatatttagtgttgctcatattcttcatattatatataccgactctaataatgaattattctttacttattattattattaccgaaaaaaattatacaattattattatgatatagttatactaatgtttggtcaaagtggtgaatgtttgtaagactatgctttaattaattaaaaaatattgctatttatttgttatactaaaagctaatatagtggttcacaattttgttagagcctctatattgtatcttgattgttagtttcagttttaaagtttgctccaactaatttgttaccttgtttggtaactgagataattatctaagagcatctccaatggaggtgtaaattagagtgaaaagctaaaatatagctcatttacaaaaaaatgtactc

SEQ ID NO: 369749 - DNA, 421 bp, Cannabis indica
ggtgttaatcaacatacttgtgcgtagatctaagatcctggtaaaataatttccaacacatattctcctacacttgactcttgctcgtcctcgagtaagataaaatgaatgatgcttaaataaattggtctgtagtttcaaaaactgtaaatcctcttctaattctaagaaaaatccaaactcttcaatcattagaatttcaactcaagataattacttttcaaactcaatttttgtgtgtgtgtgtgtactcaatcaactcatcatattactaacactttaatcaattcatgcatgccgaggggtccctagctgtgcgcaggttgattttaagaactctggaatgggtgtttggattccaccaagttgtttccaactcactatctttcagtattctataccataaagacataaagcatcc

SEQ ID NO: 369750 - DNA, 443 bp, Cannabis indica
aacattctaagggatagaggcaaatggaaactcatgctacatcaggaaaactatatcaacaagatcatagaaaagttttctatgaaagattcaaaggttgtttcactaccgattaccaaccaataccttatgtctaaatctatgtgccctaagaccaagttagagcaagaagagatggcgaatgttccctactctaatgcagtggggtccataatatactcgatggttagtactagacctgaccttgcttatgcaatcagtgtgctaagcaggttcatgtctagtcctggaaaggagcaatggaaagccatgaaatggcttatgagatacttaaaaggtacatctaagttgggattggtctatcagggtcaccaaacacattagaacatcgaagggttcacagatgcagattatgcgggggacagggacactagaagatctac

SEQ ID NO: 369751 - DNA, 659 bp, Cannabis indica
attggatgtgatccaatgaacacccctaatttattacatgtaaaaaagttatatttttaacactaatttacctcctcaagtttgttccaataaaaataaaaaaaatcgttaagtacaatttttttttaagatttcttaatttcatgatccaactacgtgagagatgttttactagaatcattttttttgtttagaatcaaaggttcaaatttcactacaacatttatgtgaagaattataatggttttttaagagatttgctcgttgtaattgaagagttgatttttttaaaaaaaaagtgtagaatatattgtcatataaattctcaaagcaagtatatatgtttctcgtacattacatatagtgtaaaataaaagtttgattatcatatatttagaataatcataaaaaaaaaaaaaaattaatagaagaatgtcatgtcacttatattgagatgaaaaaaaaaacgggttaattttacaaatgcacaaaaacaacaaaaatacggttttacggaattttaaatatttttacaatttttttaaattttatttacataaatacgtcttttatgttgaattttattcatttgttgttaattttttgttatatgtatgttattttttgttgtttttttgtttgttattttgatgttattt

SEQ ID NO: 369752 - DNA, 597 bp, Cannabis indica
aaatgttatttatttttgattcatttatttccttccgaactcataatataatacttaatataaaacatagcatacgtgcattgcacgtaataatatactagtatatatatatcacatactcattgtgttcaagtactgattttatatagttattgcatatctatttctttcagaatttgggtatattatattctcaatgagattatgcatctttatttaaaaagcaagaaagtattaacctctgcatttatatattcctttcaaagtcagccttaaatactacaacattaatactaaaaatttccaattggaataacagtaataataattaaaaagaagagttgaaagggaaatatggaaaatttatagtaaaaatagattgtaaggttgtattcaaaataattcttttgcttcaagtaatctttgttaggatttataaaacactcaaagaaatatataaatcacagatccaaacattttcctaaaagtgttttaatatagaaaaccctgaatcataaatctataaagcctttgttaaattaaagaagaagatgatgataaaatatgagcggaagcactaacctgaagccattgttg

SEQ ID NO: 369753 - DNA, 879 bp, Cannabis indica
gttagttgagttagttggtttaaatgagttggataataagttggtttagaggatcaatttccacaaatttccaccttgattctctaaagcaatttatcagagtcttttcactgaagtcttgatgatgtgatatctcgaaatgttcagcaaactgagacaatgcatcagtttactgaatgtgagaacctttgttcccatgtcagcagggttgtcacttgtgtgcaccttttccaattccagaaccctgtcctcaatcttctctcgaatccaatacaatctaatgtcaatgtgcttgcttttctcatggtatacaggattcttgcacaagtgaatagatgacagactatccgaatagactgtccctttgtctttgagcagtagcagctcttgcagtattccttgtaaccatatagcttccttgaatgcttcagtggtggccatgaattctgattcagtagttgacagtgccaccactggttgttgttgtgatttccaacatatgcagcttttgttaaccatgaatacataggcagtggtgctccttctattgtccctatttgatgcataatcagcatcaacatagccttctaacctcacatcagatgtgtctttctgatagatcagaccatacttgattgtccctttcaagtatctaatcagccactttacagcattccaatgctctaacccagggtttgccataaaccactcaaaacacttagagcatgtgctatatcaggtctagtactgaccatgatatacattagacatccaacagccatagcatatggtacacctctcatatttccctttcagtttcagttttagggcagtactcattagacaacttgaagtgccctgcaagtggaactgcagtgg

SEQ ID NO: 369754 - DNA, 691 bp, Cannabis indica
tgtactcatttgaagtagaccaagttttcaatcaaaaaagtacattgttagaaaacttaaaagcttgataattcctaaagctatttccatgagagtttccttagtgcttagagatagggaaaataagtttttggacaaaagtgtaataccttgttcaagtcatgttgatccccactaatctacactcaaggttgtgagtaagtgtattatatatatattcttctcttgttatatgtatgtattatattacatgtattgtattttttttcttttacctttcatatatatatatgttggaattattttaccaggatctagatttactaataagtatgttattaacatcctaaaaccttacagtggttgcagcggcatataatgtctccttccactcagatctctaactctagtatccttattgtaggagagtatcaccaagatcgaagtctgaatctccttctcttgaaactggattcttcacagccttacacgctatgattgagtactacttgatgtgtgtgggcactcactctcttcactatgtggcttcagttttgaagagagaaagagagatatatggtttcggctagggtagtggaggctttgaaatttttttactgaaggaatgagatgcatcatcttttcgcttaagccatcactacctatttataggaaaccacctagggttagg

SEQ ID NO: 369755 - DNA, 670 bp, Cannabis indica
tcttactattataaaagtgtggtaatagtgtctataatagtatgccacttttatccttacaaatttataaaatttacaatgaatcttactattataaaagtgtagtaatagtgtctataatagtgtgccatttttatccctacaaatttataaaatttaaaatgaagaaaggataaatgtaaaatttgataatggctttttgcataagacaaaaaactttaatttgtttatgcatttgctttatattaatatttctctacaatatattaagagatataacatatagaatatatagtatcatatataccattagtattctttcttctcatatgtataaatgtaattattggaaatttttgtaataattatattttaaataacataataataaattgacatttataattatgtacaaatttctcaattataaatcagtcataaaaatttaaaatataatttagactacataattaattagttaaatagctaaataaacaaaattatttcattgagtgtcaaatttaaaaaacttttagtaatggtaactcatatgtttggccactaatagaagaatattcatctttggacaaggacattttaactaccctaacgactttaacagctttacctaattgtcagttatgacagttaggatcgggtcctgaaacaa

SEQ ID NO: 369756 - DNA, 555 bp, Cannabis indica
agctcaatctcagatgtgagctgatattgcatttatatagaatactgttacattggtcaaaagaaacatgtgacaaaaaagaatgtaaccaacaactgtaacagaaaatataacaactaactaacccataactaactctaacagggccaaaccattcaactcggccaacccaatccattttttgtagtaaagggttatgttaagagtaggccatttgggttgaaaaataataggttatataattatgggttggttatgggttggacacattttaactctatataacccaaacaaactcatttcttgaaagatgttctaaatttgagacaactttcatacataaaatatattttacattcacaaaatatatacaaatatatattttacgttttcatacataaataaattatattgggataaccttagaacatgaattaaccaaaatacatcactaacatgtagtctatagttaccttactacttctaccaacaagcctaatgtgagaatcaattactattattaactttgttactcacacaatgataccactacta

SEQ ID NO: 369757 - DNA, 579 bp, Cannabis indica
aaataaggaaatttgaaacttttaggttggtggtgttcttgaatattgaagaacaccatgaacatgaaaagtttcaatttccctccattttttcatctttgattttcatcaaattgataaaaatgtgtttgtggtggtgaacattgatcttggactcttttttttttttttgtttcttggccgcccccccaagatacccctttggggggtcggggtggtaccccgagccacccttcttggaggtaggggcggccaattgatttggcttccttggatgtcggggtgacatcccgagactaggtgccattgccgatccttcttgcttgatttaaaagtcaagcgttatttttagataaaattatccatagctaattatggcttcttagcttggataaatgatggaatattgctaccacccatagatagatctcacaagtggggaaggtactacatcaagccttacccgtaggttccacattgggttctatatggttatgtgtgtgatgacttaaacaattatgcgagtcatgacatagccaagttgaatgtaacttttggagtatctttcttgtacatatt

SEQ ID NO: 369758 - DNA, 601 bp, Cannabis indica
aggggatccaagttcagatcccacggattctggtagttcgggtcgtcaagagtattttgcatttcaactcgcaaaactctcttcagagcctccacgtcagcatacccccgggagtactcatccatggcatagttatgcttagctatccggagttcctgcctcgcctcatctccaggaactggagtcagcacgatgttgggaggggctgtgtgttcctccacctcgggagagatcccgccatcaagaccaggggccggagtatcagctctccgctgccgtttgggctcttcctgggcaaccatcttgcccttacgcttgcgaatcagagcaacttcttgctcttcttcactttcttcaacttcctcaggaagagcccgttgctcttctttaccttcttcaacttcctcagaaaagccccattgcttttcttgaccttctcccggaagcacctcctcctcatccactaagtcaatagtgtctggaggggcactggaagaagctttcaagggggtggccatctgggaggaagttaaaggaagaggagcatcaggagtgtgagccccgacaatttcagccaaaatggcatccatggaagtacctg

SEQ ID NO: 369759 - DNA, 600 bp, Cannabis indica
tgccactatttatagttacatagtgggcagttaattacaaagttgaccgtaatctgtttacaacgatcatcccctaaaatcattgggtttgattacatatcacgtaatgtaaatgcggttattatttgaaaatcatatagttgtgattttttcgcttttactgggtcaaaatgatcgtgtatttaaacacgtctttaattgttgtatctggggatgtctcgacggaagcttggttccagtgatctcaatagcgagctagggccatttttcattccgaggtcatcgatgcatgtcttgtgatgattgcagttcttatttacaaagagttcttcgaagttcgtttgaatgttagcttctgactcgtcaggattgtaagcctcactgaagttaactggatgaagttactggaagccttcccatagcgagacgggcacctcgcttacttggtctcgagccgacccgaacgttattcttagtttgtacattatacactaagggctttcgcagttgatatgtgtcgctttcgtcttcctatgtgtaatgtccttgatgtctcgctattcgcattcagcgacatatggtttctcgctaatatactga

SEQ ID NO: 369760 - DNA, 545 bp, Cannabis indica
taaaaaggactagtagtttttagtttttttttttttaggagattacatttgttttatggatgctatatatttgtccatcttatttctttaaatttgtaaatgagtgttaattacaacttcttattacaattttttaatcaatctccatgcctgaaattacatgtcgatcaaatttttttttcaatttttttatagcggtattcattatagttacagtattatttctgtaaacttttgaaaaaattctgaatagtttacaatgtcgaaaatagagttcttgatatttcagtttaacacgcgcgattaaaaacttcaaacgtatatttcggcactgtaaattatttgaaaatttacgtggatgatgttgtaaatatataacgaacaccgccattaaaaaaatatgttagaatgtgttttcgggcatggaagtgttgaaaaagttctcattacagagggaataggaggattacaatcaaaatactcaaaatacaaataaaagtattacattaagattataagaaaactagagaagaagaagaagaata

SEQ ID NO: 369761 - DNA, 679 bp, Cannabis indica
ataatgcggctaaggataggtttaagacagttgacaaggactctagagtataattttgtatagagttgaacagaggctgatgggtcgataatcagtcactagttgagggtgggagagtttgggaatgagcactatgtccgtgtggttaatggcctcaatgttagcatctccatttaaaaaaccttttgcagacctcaatgaacatcagtcccaacaatatgccaaatttttttggaagaaagaaccattgtagccatcagactcacgggctttgtcactggcaagttggaaagctgctctcttaatttcagaatcagtataagggagactgagagaattaaattcggtttcagagaggcaattggagagtccagaaaggacactgttaatgatctcttactcaggattttggctggtgaaaagttgttcaaaatggtgctcaatcatccacacgagggcttcagtgtcggtgactatagatccgtcaggacatgaaagagatgtgattttgttttttgctcgtcttgaggaagcaaagtggtgaaaatatctcgtatttttatctcccagtttgagccactgtacatgagatcgttgcttccaatattcctcctccttatataaaagattatcaagctcgagttccagctgacgtccacgttgaagctgagaatccgta

SEQ ID NO: 369762 - DNA, 969 bp, Cannabis indica
tgcacaagagtaagtaaattacccggcataccataagccataggtttggataatctcaaacctttaacactaggatcaagaatttcgttaagtccattgaatagacttattttcaaaaatttcctttcttgtccttgtaatagaaaacttttggttactccatatgaatggtttaactataattctcttggttttgcttcttagttccttattctgactatccatgacttgtttaaactaacaatggattttcatcacaagtgtcttccaagtcataatagggtgagtttcttgaaaccctcccactatgacaaggtactgtgactttttgtctaagaacactaaatggtattgtcctcttcggttgtgtcaatataacagaggcagtgggaccatcttatatagaataagatgatagaacacttttggaatcaagaaaaaattatctgttctactttactatgttttttcagacatagtcattttcttagaaaagtagtatttgttgaaacaaacactttcttatcttaaatgaccataggatggtccacccctaatcacttagaatagctatcaaacatgcaaatcttagttaacagttttagctttcttaaggtcatgattaggtcatcaatgaatctagtaatggtttacactaagtacacaaccattccatcattctaaaattttcctatcactagggtatatccctagaaggtcttaagcagcagctagtaactaatcatagaactttcatcttcatcaatatgcaatccatatttctggggaggtaagtttgaatacaattcaaagttcaacttaatgatctttgaactgtgtatccaaatatttttccacccctatcagttcacaagatctttaaccacttaccttaatggtttccgacatagctagaaattcatgaaatttctcaaacatttcaaataaggtaaaatctagagtgatcgt

SEQ ID NO: 369763 - DNA, 535 bp, Cannabis indica
gaagtttccttttcttatagctcttacaatagtatctctgaatatataattcttagatagccttagcttatagagtttcggcttataattttttggtcctttgcccagtgaacattcctcactttttatagggctggaaacttgaggaggaagagtttcctctctcgttacaatgcgcataaacagaaagatcgtgtgatcaatgttgaatgcaaggatcgtgggattgaggctgaatacactgataatgggatcgtgtgtatcacacatccacgcaggttgatccctgagttgtacggattgagctggtgactcatgatgtgttaagcttaattcgctaagtgttgatcattctgcatggcttgttaagtattccattctagatattccagcgaggcatcctgcttggcatattgctccgaacagatgctccaagtagagtccacgtctcaccattatcgtgatgccaagtcagagtgccaaatttgggataacatttgccccccaagtctgtacaggacctccgaggttgcgt

SEQ ID NO: 369764 - DNA, 537 bp, Cannabis indica
taggggattagggtttcataatcatttttgggtagcgtgcctaattatttagggcgttacaagtacccttttcaatcatttggcctacactaagtaggttttgatcgatgttgggtatgtatctcttgcctttattagtttcaatgacaatggtgcctttgtcgactgcttccatgaagtcaccattactaattttgactttagtcttggatttgtcaagactacaaaagatacttttattttttgtcatgtggttactgcaaccactatcaagatgccaagtatcttttccttcttctgatgcagcttcacagacagaaaagattacttttatcatttttctcttcaaaaaaattagcttgatgggatttctttaaacgacaagttttttcaatgtgcccaaattttttacaattttgacactgtggttttcctttaaaccaataatatttctccaagtgacttttcttttacaaatgccacatggaggatacttgtcgttattttctttttgtttttcttgtgtctttttcccat

SEQ ID NO: 369765 - DNA, 565 bp, Cannabis indica
tcaatatttaaagatctcaatttccctatatcaatatttacaatttcactatatcaatatttaaagttctagagatgcataattacgtgtgaggtaatatttagttttttttttttcttatttttttttgttctttaatgcatatattcttcatttatctttaatcctatttgtttttttgtttcaacatcaatatctcaattttcaattgatatttttaatatttttataatttggagaaatatagactttttttttatgttgataacttgaccgtatacccacgtacataaatatctctaatataatattggaaaattcttcaatagacactctttttatgggcttaccagtgtgtcctatatcacaaaatataattggtgacagctattaaatgaaagatttttgtggtaaggcttgttgtagagaatcaaaccttagtaaaattggggtccacctatacaacctttaaattattatttgattggccatataactctaatggacagtaaataatatccctaaaaataacaatccatctctctctcttcatcttcttcactct

SEQ ID NO: 369766 - DNA, 616 bp, Cannabis indica
aaaaaataactctttctctttttgagttttgaaaaaaagtttacaatttttttttattacactggtaattatttgagctcaaattttatagaaatttttacattaaaaatacaaaatgcaatctttattacactaataccactacacggctatatcaacttttttactcttcttctttattttattactattttaccacatgcacactcattctatctatcggtacacgtgctgacctatgacccctatcaatcaaccatccatcatttctctctctttttttcttttttttctttttttttccatttcttttcattttttttaaatagtaacctcaataggtgaatacttccctctccatgatcccaactctatttttctttttcttttttctttttttttgtttttcaatttttttttcaactcccattaactgaatctcataatcgttttacctcttttaatttttctcttaatccatatataaatatggctgtaactcgttcttcatcaactccttcccctattcaaacaaaaaattctaaaatggagttgaaatctttagctaataggaacaagggtaaacgacctgtgttgaggaggatgactctgattt

SEQ ID NO: 369767 - DNA, 522 bp, Cannabis indica
actaaagcaaaaacaattcgcgtctcttttctgaagtaaaatgtaaaagataatttttaaattttttttttttcggttcttcttttagcgtgggcatatcaactgacgctaattggtatttcttagattcagttattctgtgaaacactgaaacataaaatttctactttttttggtctcggttaactattttagtaaaacgtgttgatcaacgcaaattaaaccttttttagtagtgctcccgttgactacttcagccaaatttgacttgatttatttagttatttatttattttcagtttacataagttaaggtcatcaggagactaacgagatgtaattctcaagttcccaatggcttttttcccacattagtccccattcttttaactttttggcatattagtacctatgttttttttttttttttagagaaacctgatgctttataaaggaccaaagaagagtaaagtcaacaggtgtaactggaaggcaaacaaccattccagacgcactcgctaa

SEQ ID NO: 369768 - DNA, 671 bp, Cannabis indica
atataatgtgcaagatcataattatattatttttaaaaggtattatattattggagtatttttagaagtaaaggtactaaaaatgatgtggaaaaaaaatgaaataaaatattacatatttgaatgatgtatagatatataacatcttcaaagaatgctaccattggagatgctttaacgagatttcacaaacttgacttaatatattagttataatttcaatatacctgtccaatcttggtgaattattgttggaaacttaattagaaattttataattttgtgtgaaatagtaattttttaaatttgcattatttagcattaaaattcatcattatatataaattaatttttggttgtagataaataattaatttttagttttttacggtaataataaagttatatttttagaactttcgtatgtatttagcactcgttaagtgtcaaatcaataggcatgtggcagttcttgattggttcaggtcattaaatttttattttttatttaaaaattaatttaattatacaaataagaaaactatgtgaataatgactaggtacttagagaagtttcaaaaacataacttaggtacactactacaatatgggcctttagcttccctttttttaacccattttataaaaagggaagctaaagggtatgaaaa

SEQ ID NO: 369769 - DNA, 645 bp, Cannabis indica
aagaagtatgcttgttacagaaatctctatatgggttgaaacaagctccaaggcaatatggaacttgaggttcaatgaaacaatggagaaactgtacaccagaagcaactatgactgctgtgtctacataaatgaacacctgtacctgctactgtatgttgatggacacattaattgttggccaagacagaacagagattgacaaattaaaggcaaaactcaatgttgagtttgacatgaaggacctaggggaagccaaaaagatactaggcattgatatacaaagacagaggccaaatacaatcactctatctcagaaagaatacctggaaaaagtgattgagaagtatgacatgagtgattctaaacctgtgcaaactcctctggccccacatttcaaactgaccaaagatcaatctcccacaactaatgaagaaagagctttcgtggacaccataccctatgctaatggggtttgtagtctaatgtatgccatggtgtgtactaggcctgacttggcctactcactcagtgtagttagcagatttattgctgatcctggacaagaacattagtcagccttgaaatggattctaagtatgtcaagggctcacttgacataggtctcacttttggaaataagtc

SEQ ID NO: 369770 - DNA, 898 bp, Cannabis indica
gtctaagtctgggtccagataccatgtttagcttctggtttgagtctgggtcggtattcaggtctgggtctgggttcgtgtccttgtctaggtccgaatccttgtttaggttaggggcttggtctgagtttaggatcgagttccgagttcgggttggggttcaagttcgagtctcagtcctagtgtgggtccaggatctagttttggactgggttcgagcctgagttccggggctgggttttggtcgagttccgggtcccggtccaggtctaggtccctgtcacggtcctggtcctgttctagggtcctggtcacgttctggttcaagtttcggttttgagtcccaggtcttggtctgggtctaggccttggtccagcttcgggtccttgtccgagtcccaaattaagacatctactatgggtcttgtccaagacccggttctttgattttgggacaagatctggatcccaaccacgggtccgagtctagtttcgattcatgtcctatgtcccggtttgggtttgggtctagatctaggaccaagactagggtccagttctaggtcacgatcccagttctaggtcccgagtcatgttcaatgtttgggtgtgagttcaagtttgggttcgggtcccaagtcccggtttgggtctggattcaggttttggaccgaatcttagggtgggtttgtgtccgagttcggatccttgttcggttacagttttgggtctgggtccaggtcttagtcctggtcctgttcttgggtccccatccgagtattgttttggttccagtttgaagtcacggggtacaggttggggttgacttttggtccgagtttgggtttggtcctgatttgtgtctggggtatggatgaggttcgggttttggtctcgg

SEQ ID NO: 369771 - DNA, 550 bp, Cannabis indica
ttgtaatttgtggcttttgtgtccttgaaatggaggtagagtttgttcctaacagtctgtgttttttttgggtttttttttgttttttgcgattttatgcgacattgtacgatgttttgtgcgatgtcatgagaaatctgaggttagggatgacatgattaattttggcgacattgtacgattgttgtgcgattatgtgtgcaattttgatgtttggcgatttgtgtgcgacatttgtgcagcattatgcgattttgttatgtatgttttattgtgcgaccttatgcgatatttttcttttgttgtgcgattattgtgcgacaagatacttgtttatattattgtgtattaggcgacattatgcgacattcgtagtaacttgtgcgatttagtgtgcgatatagtatgctaattttttctgtttatttgttagtatttctttgggacagattcaactgtatttgtgcctgtactgtatgatgacgtttggactgtggagggtttcaactgggtatttgattcctcaaaaagtaagacattgatgttggac

SEQ ID NO: 369772 - DNA, 549 bp, Cannabis indica
ctattcttgaagtctttcattaacttcccaggaaggatcaaacaatcatgtttgaactcattcgccactataaaacccgtctagtttgaaggaaaacaaatacgattagagttaacgtctgaattaatcaaaaacaaatttaaattctcacaaataaccgcttacctgtatatatttccacactttattttttagtgtagggttgacttctttctaatttttataggacaaccctatcgtctgatggcatctaactcctaaagtcgatactagcttggagtagtttttgccacattactgtcttttgtcattcacctcgagtgccactctttttccttggtccatcagcttgaatatttcattcatctgagtagctcctcgtagtatcggcctaggacactctgcttttgggtctgaatttgatcctcaacctgagttggtcatatcgacaccattaacaaacaaaacttaaagttagctatataacaagtaatctataagaaatattgagttgtataagttgtaaaagttgtaattaactaattaggg

SEQ ID NO: 369773 - DNA, 862 bp, Cannabis indica
acatttttctattatttgttgttataaaattgtaaaaacttaattatttgatgcaaaaataatgtgttatgatggatactttatttttaattatcaatatattataagcaattaatatatctcttttagaaaatttagctgaaaattattaaattttcaatgattgttttatcaccaaattacatatgtcgtagaaaatattatttcttttagttgactatatttgtaattacttgcccaaaggtagtaattacatatattagttcacattccatgaagtgagtttatattaaatgtgtatattttaattatttacccaaaggtaataattaaatatatatgtttattattattttttggtctgaattaatatatatattttaagaaatttatttgtccaaaggtaataaattctaaattgatatgtattttatctttattattaacttcaggaaggtcgatcatgtgtgttttatattctcacccaaaggagagtttataatgactagttgactctacaatattattaaattgtattgctcatatagcttgatcaagttttaatttttggattttttggtctcctttctatgaacaacaataaacgtttatatcgaaataccgaatgctccaactttaaggtatggaaaaaagatgtgaaaattactttaggcatgaaattttctattttaatattcccagttttattatttaattaaatgcagaataatgaaacaggtactgaaaacagtttttccgtagttactataaaacaactctgtaactccagaagaaaccagaaaaacaaacagtgcagaaaagtaaaaatacataaggtttttgtacgtggtttcaacaatcc

SEQ ID NO: 369774 - DNA, 718 bp, Cannabis indica
taataataataataataaattttactaagaagtcaaattttttaacatctacaaatatataaaataaactaaatttattaaaaattcttctaataggaaaaatggatcaaaatatagtaggatgtcacctcattttctttagtactttcttctatatttatatatagatatagatgatttatttattaatttttttttaatttaaaatattttacaaagattaaaaaatgtaaaaatatgtgtaaataaataatatttattattcacatatttgatgaaatatatataacttaaaagtttaacattcacaaagtctcatatcacagaagtatatataaaaaaaatatatttaaggtgtcttattattctaataaatatcatatattaataaattattatagttttaattatttaaataaaattaaaataaataattataagagaataatttttatatgaaaaaaaaaataaataaactttttaataattatttataacctacatagataaatagttcttaaacaatgtgagacttttagtttgtttgtgtggtttagttttctaaaaaaaaaaaaaaaaatgtgttagaaattaggaaaaataagaagaaaattttataaaatgaacacataaactcttctgtgctttcctttatattatatatatagatatagatatatagattgacaaatattgagaagtacaaaaatatattttg

SEQ ID NO: 369775 - DNA, 767 bp, Cannabis indica
atcaatttttttttatagaatttcatctaatgaaaacaacgtgtaaatattataatataaatataaagcagcatagtataatgttgttgtgaaaacaacagtctacactttggtatattattatttgaagtttgacctaaataaagtgatcattttagtgttagtaaatcgttgggtattaaagtgtcatatactaaatgtgtagataccttaagagatatttctaatttattgaagaactaaaaaaaaaattttaaattaataacatatctatgaggttatatatatatatataggtagtggtctctaaaaaacaaaaaacaagagtcactctattctcaatcttacccaagagagaaaactagagaaccttaagtcttattgataactctaagatttagagttatttttatatctttaagcttgaattttaatgtgaattgtggagcaattaatgtctatattgtgtaattgtgtttagtttgttgtgtctttgtaataaatggaagtgtgtgtgttagtaagtgttagatagacttatgttattgtttttatgtgttttaagcagaaaaaatacaagaataggtatttggaaatatttgggacaaggagaaaaaggagcagaaaaatgattattgctgactggcattgctatagcaatcatcgcgtagcaatttgtcagcccagtaagtttattttggcagatagtccagctggctttaatgaaaagaaaaacgagctgaggtggcggaatttggctattgact

SEQ ID NO: 369776 - DNA, 723 bp, Cannabis indica
tggaattatttttatatgatagtttggaaaaagttaagcaattcacttttttacagaactcaatttcgattttatttgaattagttatgaattttttaaaatcggaaaatatcagggtgtcatcaccccccacacgcgcgcggatctcttctttcctcggacgcgtgggcttcgaacaggcttgtgtccgagttttctcggtttgacatgggcaccttgtctgaaatcgtcccagtgcgcgcgcggaatggctgcttgcagcctccagcgccgagaaacctcggccagacaccctcgtgagcgcgcgcggacagtatgcaatatactgtctgtaccacttgcaaattcgttttcttcgatttttcatgctatttcatggaattaacttccgtctttttgtgtagttttgtatttagatatttactattcctatttcaattctaattatcagaattaaattaattaaaatttttaaatttaatttatgacattagtgtaatttgaacttgaagttaggtaaatatctatcttttttgcttaattatctatcttatttttaaatttgattattttatcttatttttaaatttaaggtcagatattaatttttttttaaattattctattttttaaattaatttgaccttatttaaatttaaaataagattactataatcataatattttgaatagatataagatattttgctaacttttaaattt

SEQ ID NO: 369777 - DNA, 623 bp, Cannabis indica
tgagtgaaggaattgttagtaataataaaatagttgagtgaaggaattgttagtaatgcagttacataccttgtataatagttgagtgcctaagttatgagattgaataaacctgctgtaacaatttttattgttgtgtcttttgagaagtagatgaaaatgaatataagtgtgcttaagaaaaattgtaatgttgcaattttttttttcgacttggttttttttactaatcctagtcgtgtctccaataaaaagagacgtccgattagatttcaggctattattttagctgactgctattaataaaatttcataatatattaaaaaagaataaataaaatatatgaactttttagtatattaaattttattttaataaaattgtatgatttattgataaataattattaatagtatattaaattttattctaaataaactttgtacaaattttgttttagtatgcattattctaaaatagatgaactaataatcatacatcaaaatgaggtcgggactggttttgtcgcacgtggttgtgatggccgattaattgaggtgttttcaactatttcttctgtcagttgccgcccgaaaattgtagaggttctaagtgtcaaaga

SEQ ID NO: 369778 - DNA, 613 bp, Cannabis indica
catacatgcaaactagagagagaaagagaaagagagagttttagagggagaacatttaagagagagagaggtgggtggtgcccctatgaacttgggtgtgtagtaaaaaatcaaaaacttgaaatgcaaagcacctcttctattagttttaagtccattagtttattattttattaaatataaaagataatatattatttttatgtttgttatagcttatgatgttagaaaaataataaaaagaaaaatgactaaaaaagttttagtggtatctagtatttttgtatgtgttaatatcggtttaattaaatatcagatttcatataattgtatacaataatttttagaaagtattagtagtcaatcataaaatgacatgtctataggtggtaaacactattagtgtctaataataataactaaaaaaaataaatgcatagtatacatcttaaagggttgtttaggtactaatttttttttcttttagtttcttgaaaaaagtttatctatttctttattattattattgtgtaggttgtagttttttaagattatttataatttttaaaaaaaatttgtagtttacagtccaaaaaataaagtttaaacagtt

SEQ ID NO: 369779 - DNA, 836 bp, Cannabis indica
cctaggtgctcgtcccaacaccaggtttaaacctaggcactcggaccagtttttggccaccagatgactccatttgattctcaaaaacacttgtatcttaatctttgatgaaaaagaagaattttctcaaaaaaattcaaaaaaaaaaatgtttggaaatggccaaggttgacaaaatgtcaacctgcgcgctgggtcccccttctcacctccaaattgatctattttttctctaaaagcacttgtttccttatttttgatgaagacgaagaaaattctttggataattcttcggtttggtgcttggaagtgccccaagttgaaaaaatgtcaaccttgggtgttgggtgcttggggcacccggtgctttggttgcttaaaaaaagtactctgaatttaattgtaatgcctcaaatatgttcatgacatgtctaattcagtctcttattgacccatttgcactaagatgttcttgaaaacccaaaccctagtttggttgtcaacctaggcgttagatgaaaccttaggctcccaggttgacttctgcaatgttgttttgtgtattttcaactcctaatccttggacttggacgcttcatgtcttttatgtgttggaattttatgcgctaaataaaactcatctcatggtaatcttattgactattaaagaatgatatagaagtcaaactttatattatttggttcacatgcttatttcgtgattataggtttaatgtataatctttatttaaatctagaacatatggataatcatgattattgcgttgtctacacattggataataatcatgatcataagcttcaaacttttagtc

SEQ ID NO: 369780 - DNA, 913 bp, Cannabis indica
aaaaaaatataataaacatatcattgtaatattaaatgttgtagatatatattttaaaataaaaaaatgttatccatataattataacctttatcatttatttatgagaagggtagataaggaaaaataattttaagttggtatggaatggcttttcaagtcattttatttaggaaaagtaattccttagtttacatgaattataattcctatggaatgagttttccaatgacaataaacaaaccaaacacttgaatgatctttctttaggaataacaattccattcctacactcattcatgtaaaccaaacactaccttatgtgtttaatttcatcgtattagaaaattcatatttaggatgttaatcaacatacttgttagtaaatctagatcttggtaaaataaatcctaacacaccctccaaagagtggggatgagacatcaaccttcacacgaaattgtaactagtttgcccatttgggccgacctttctcatccatgcccacatccaatagagtacccactttacttcccaaattgttagcattctccactgtagggtattcagagggaagattatgggtttgaacccaaatatttagtggcaatatgaataactaataaattatattacgcttcgtgcagtaatatcattactattttggctctttgaatttttggcactatctaattttgcctctaaaatatacggcttgttaaaaattcttcctaaaatataatagtacataatcatgccctttttgttaggttatgtttcttttaccgttaaaaattaatatttttatctcttgaactttgaccaattcaaaattttccttcttttattaaaaataattaattttgaaaattacaatattctatttttttaaaagcaattataatattctatt

SEQ ID NO: 369781 - DNA, 643 bp, Cannabis indica
tctaactgtcacataggtcatgaaaatactactcatttcacatagaacctcgattatccaattttagacatttctcaattcttcactttttcaaattttgaattgagatcatagaacatgtagaaggtgatcaagcttacacatggaattaaacacaaatatagataatttcacaaatcaagattggaggaatgacaattgacattaactaggaaaaactttaaacaacattcatcatcctcccgaatgggaatttaattcataaaagtaaaatagacatccatgattaaatctgaaacaaaaatagacataaaaaaaatagagagtgaaagaaagaaactagatggtgatttttcgctccgggtcttcaagatcgcttcctctcctccttcattcacttttttgggccgatttttgatgcctttggccatctgagtcgagtcccttatataggaattaaggttgtgcctccaattggaaaaatatcagaattaggtcaaaaaaatcccattttctgtgcccggtcgcgacccacttaaaggctggcgcgaccacaggcaaatctcgaaaaatagggtttttgccaaaatccccaaacgaccatagtcgcgactaggccttgtgctggtcgcgactactgatc

SEQ ID NO: 369782 - DNA, 1339 bp, Cannabis indica
agctagagtcagacatgagagcttacagattccggagttgttcaggttagatttcagggacgtaaatccgttttaagggggatagttgtaagacgcttagttaattggaaattagtagttaatagttttatatgaaaattattacagatatttaaataattatttatgatgttatatttgagttctgaatgcatttttatgtcatatagtgaaattttataatttgcatttccggtgcccagcaacatggaacgcggtgtatggcgcagtagaatcacaatttagtattttagtatattggggcagtttatttagacattgggaatgtcgggataagtcaggaatttagagttttcccaaaatacccttaagtccccttttacccctcttagtgttggaagggcaaaatagtcatttgcctttatgagatttgtcttttatggatttttataatatgttaagtaatttaattttttattttactttggctgaatcaaataaggaaaatgaatgttataactcattttattaaaaattggaaaaaatcaagaaaaagccaaaatcctttttctctcaaactctctctattttcggccccttcttgagcaacaagacttggaattttttccttggtaattcaagctaattttaacaagatttagtgatcactaattgttggtaaggttcctataactttcttctatgtttcttggaatttttgaagaaaatgataggttgcatgcttagtattggtttgttgttgctgttgtaattagatgttattttcagaagtttaagcataattgattgagtgaaatagaactgattttaatgcatgattagttgattttaagcaattttggaattttagctcaaaatcttgatttttatggtaaattgtggaattaattgttgtgattgttaattgtgcttggatttgttttctggggttatattatgtttatatatgttgaattgagcatgtttagctagctaattggttggctgagcaagctttgagtttggaactcaagcttgactcattaatggtagtttttgattctgagagtgttgggttgttttgatgctttgagattgttatttggggtatttagaacaggtctggatggttgcatggagtttggggttgatttgagtgagaaatgaatttttgaagtttcctgcactgaaccggaattccggttcagtatagcttctaggaaccaaaattccggttggtgttcttggttcctcccaaaaccagaattccggttgtagaaccggtctaccagttgggatatttttgggaaccctagttcttcccatttttgtgttgttt

SEQ ID NO: 369783 - DNA, 502 bp, Cannabis indica
aaacccaatgatgctataccattagacttaaataggtgatatcataagaaaattgtgttgatgtcactacatgaaattgatgtcatctcttttaaaaaaataaataaataaaaattaaaggtaaataaatagtttgacaatatttataattaaagcacataaaataatttgcggcgataatatctaagtttatcttctagttgtttattaatacctaagtaatttttttggtcggtaaaaataactcttgttaaacttttgttgcatctgcaagtacttggccgtaagtatcatgtcactctttgattggtccacatctttaatttatattttgtatttaagaaattaatttagattttaaaaattatcttaaattaaaagttatttaaaaaaaaacataattaaataaataatacataattattaatggtcagttatctataaaagtgtaacagaaagtattttaactgtcaaaaaaattacttaggtattaatctacaac

SEQ ID NO: 369784 - DNA, 582 bp, Cannabis indica
ttttactttgcaattttattgtgccaacattttgttatactttcaatacaagaagtcgtgaaaattttaaacaaactaccctaaataattaggggccagccatataataggcgctatagccttgtaaggcgccaaagccataaaaatggcgcaaatatagaacaaaccaataacaaaaagattacaatatatcccattataacaactcaacattatagaacaaaaccaaaaaccaacaataagatataatcaactaaccaccatttcagcattcaactcaacaccaaactgaacaaaatcacccacgattaaactaaaattaaaatttaactcaaaacacttcatcgcactgtgcaaacattcaaacaaaagtactaaaatctagacgcctttcactaactcagaaataaaaccagaataaatcaacaacataactcatatggacatctaaaaagaaaagaaattttaattcaaaatcaaaaaactcaccacgtaatcaagggttcggttcaaaccaatagaggatttgatatatccttcttcttgacccacatctgaatatcactgccatcttcatcaacg

SEQ ID NO: 369785 - DNA, 815 bp, Cannabis indica
ttttcgtccccctttttgatcttgtctgccactatttataattacatagtggtcagttaattacaaagttgaccagaatatgtttacaacaatcatccctaaattatgggatttgattacatatcctgcagtgtaaatgcagtttatgatttgaaactcgtatagctgtgattttctcgcttttaatgggtcaaaacaatcgtgtattaaacatgtcttaaactattgtatttagagatgtctcgacagaaacttggttacagtgattctattagcgagctggggccattcttctttctaaggtcgacaatgtatatctggtgtcgatcgcggttcttatttttaaagagtcattttgactcgctaggattgtaagccttgttaccatcaactggacgaggctataagaattcttcccatagcaagacggtcacctcgctttacttgctcttgagccgatctgacttttacacttagtttgctcattgtacgctaaggactctcacgattgatacatgtcgctttctttggtgcctcgctattcgcatttagtgacacatggtttctcgttaatatactaagtgccagtttgtacattgattcctcgccttagaccttacagtcagcgggttacaaatatacactgatacttatgtaattaatgagttattccataaaaagcgatgacattgattcacattccttttatcttgacacgtgtcatccagccaaattttgagtataacaattgccccttaaaaagttctcttttagtaaaaagagctttttaataattacagagggcattttcgtca

SEQ ID NO: 369786 - DNA, 818 bp, Cannabis indica
ttaagggatttactttcatgttgtattttttgaggactttgaagcactcgtccaggtcatctatgttaccccagcttttctggatttgacgagcatgtcatccacgtacacttccatatttcacccgatctggtctttaaacatcttgtttaccaatatttggtacgtagctccagcattttttagaccaaacggcatgactttgtagcaatagagacccatatctgttcggaaacttgtatgttcttggtctggcggatgcattttgatttgattgtaacctgaataattttccatgaagcttaaaattttgtgccctgctgttgggtctacgagctgatcgatccttggaagtggaaaatagtcttttgggcatgctttgttgaggtctgtaaaatcaatacagactcgccatttcttgttcggcttgggcacgagtatgggattcgcgacccaaaccgggtaaaaagcttcaattatgaagttgttgttgctcagcttttcaacttcatctttcagggctactgctcgttctttatccagcagccttcgtttatgctgaactggccggatgttaggatcgatattcagaacatgtgaaataatagaagggtcgattccgaccatatccgcatgtgaccaggcaaaaacatctaggtttgctctcagaaattttatcaactctgattttacttcgagcaacaaaccctttctaatttttagctttctggtcaggatagctggatcgatctcgatctcttctaattcttccacaggtccaacattgttgtttgggtccccaagtcgaggatccacat

SEQ ID NO: 369787 - DNA, 590 bp, Cannabis indica
ggtggggcacgccttgtaccctttggtgctccatccagacatcattgcatacgccgggaagtcattaatggtccacaaaatagcagctctcagtgtgaacacagtcccattgtaagcatctcgagcttggacacctgaatcccacaactccctcaattcatcaatcaatggtctcatgaaaacatccacctcttttccaggggcagtgcgtcctggcaccaaaagagacaacatcaacgactcaggtttcatgcacttccacagggtaagttgtacgggactaaaataacaggccacacactgtaagcgttactcatgttaccaaagggattgaacccgtcggtggccaatcccaatctcacatttctaagctcaagtgcgaaggatggatgacgtctgtcaaactgcttccactcttctgcatctgcagggtgtctaagcacgccatcctctttaggtctcttagagtagtgccaccgcatgtcctctgccgagtgtcttgaactgtataacctcttcagtctcggaattaaaggaaagcaccgcaaaacttttctagcaactttttttctgtctccctttctcttttt

SEQ ID NO: 369788 - DNA, 598 bp, Cannabis indica
aaaaaaaaaaattattttgaagtgtaaaaataaaaaagccccttaataaaattaaaataaaataatttaaagttaggaaaggaaaatgtattccctataaaaatggggggagaaccattcctttccaaaatttagtaaacaattgtatgtgaatcaatatcatactattcatttacattctttttaactaaacatgccagtaaatgaataattaccttattattgattcttattactcattaataaatatgtcaatagtggaatgaccaaatttctataaatataaaagttgaagaaatttttttaataaagtatatattttagggacaatagtaatattgtctaaagagagtaaaatttgtaattattggcggacgtagaaattcaaatttggaaactagttttcgagtgagttggcaaagtaggctttatgaaaaaaaaattcaggaaaatgacttttcaaatattttaattagcaaaatagcattcttttaaaattgataaataattaatataataaatacaattaatattaatttttctttatcattaaaaaaaatagatttggttggactcccatgacctctcttcatcttca

SEQ ID NO: 369789 - DNA, 680 bp, Cannabis indica
attgttcttgaggagaaattgatgttaaacttagttccaactatcacatttgacactatttagatttccatgcctttcattgatcaagaagtgaatcttaaaactttgatatgacaatatcaaacaacttcccattcaagatatggtaaatgtttcaaataatcaaactcagcaacctcaaagacaagtacaattaaaaaaaattatgagagaaaggacataaggaaatagtagaatgattgaagatgatccaatatccttttatcatggcatgaaggttcaaactctcaaaattagattcatatcataaataaggagtacaaattgagttgagacaataaagttttgtatttttttcctattgctataagctgtaaaaccaattggttataaatgaatatttatgaccaagaggatgcaaattacaatgtagagaaatataagtatgtaaataattactcataaagcatacattcaccttaaatagactttcttttgtttaaaagaaagactattttaggacaagcatgtcactaacttctcattatagttttgaaatgaattattaaagtttcatttatcaatggtaatattgatgacaataggatatggtgaaactagaaaaatttgtgaaattccgtaatttaatattcccagtttaattatttaattaagtgatt

SEQ ID NO: 369790 - DNA, 660 bp, Cannabis indica
ataattaaaagcttctcgtcagtatccaggcctcaggcgaatggacaaatggaagttgttaataaaaccttgaaggatactatcaagaagaagctagatgctgtcaaaggaaggtgggtcgacgagctaccaccaatactttgggctaacagaactaccgagaagacggcaacgggatacacttccttctcgctagaattcagctcaaaagtaatgctacttgttgaagtgaacatatcgactcataaacgagagtttgataatcaagaagaaaaccaagaacttccaaaattatctttggatcttcttgatgaaaaacgaattgagtcacaagtcactaatgcagcgtatcaacaccgagttacaagatactttaacaaaagagtcaagaaaagactattcaatgttggagacttggtgctaaggtgagtatttgcaaacacgagagatgcatctacaggagtgttcaacccgaactgggagggtccatatgtaatcgaagcagtagtaggaatcaaagtttgaaaattggctcggctaaatggttcgctaataaagaactactggaacgtggaacatttgcaaccctaccaccagtaaattaatgatgtaactcacattgctgatgtaatattttaacttcagttatgaataaagaga

SEQ ID NO: 369791 - DNA, 719 bp, Cannabis indica
tgaactcattcaacttaagcgcgaggctaagttgaaaggaggtgtcggggccaagcaatatgctcaggagcctttgaatctgaagatgaagctgaggaagagcaggtgactccactgaagaggaagaagaaactcccggcctcgcccaggcctgttgaacatgcgattcgcataagggagcccatttcacctgctcggccatctcctcccgtgttcagaaaagggaaagccgtcatgtctgagataagatcgatgtcaggtgatgatggacttctgagtcttgtgcgggcggtcaccttgcattttactttattctgttcttgagcttcttgattttcatgccttgtgtttctgatggctgttttctaaccatactgtttttgttctgtgcagacatgtctcggcagatgatcgacgctctgaggaagagaatgggaggaagctctagcgcttctcctccggccaagaagtctaagggcggtgaggggtcctcttcaaaggaaaagagaacttccggaaaggttattgatcttttcaaggagctgactgctgcaaacccctctacccccaagtctgccaagtccaaggagtctagaccactaacgactgggtctgaactggtcaggagtgatcctgaacgggtgcaggcaccaactccacctttgccattgctttcagaggccaaaaagggaaaggagatgctagcccactacatgaac

SEQ ID NO: 369792 - DNA, 563 bp, Cannabis indica
tgtatagtataggaacaaaaccacagtcactaccataaaatttctctctatatatatacatatattggatggattaatctgaattaatccaataaatatacttgtctaataaatagaactaattcaagctataattagatcggttcagttgaaaaaatctaatattcattatataatcaatctaaataaacctaaaagtattagatgtaaactagtaattacaaatctaattattagctatatatattatctaattattaaaaaaaatactaaaaatatatttttttattaaataaaataaaagtatttttaaaagattaaaataaaaatgaaaagataagttacattataattggattgaatctcaataaaccatgtgaaccaataaacaagcctaattatcttaaaatgtagtttttatggattcattataataatatttttttacagtatttcattcaaaacatcactacaaaaaattttacttttagtcacaacaaaacttgtgactaaaagtgaaaaaattgtgactaattataaatcatgattcctatgttctgtac

SEQ ID NO: 369793 - DNA, 547 bp, Cannabis indica
tacaatacaaaaataacaaacaacaaagattagggtagaagaacttatgcaaatttctctttaattgttcctgttctttcattgactgttaaatttttatttttatttatttttttacttaatttcctccataaagctacaattccgttattatagtttcgtagccaaattattaagaatgtttccctacacataacgatccaatatatcatcaacaaaccgatgtcattcaaaaagaccacatgtcttctataaattacataaactacatgtaagctaaagatcgttaaaggtctttacttacacatacgagctaagccaatatatagacttagaagctacacaagttaacatactctcaggaatgtagctacatgcatatatcactataaaaagaaacatttactaatccatccaactaatgaaataggaataaaacttactatcaaaaatcactctttctaagaataacacgagaaacaaaatcacttaatccaattctcatatacatttttcttttactcacttaatcatataccatttgtaa

SEQ ID NO: 369794 - DNA, 601 bp, Cannabis indica
tagacttttatttgggtttacattaacttttattagttttattaaaacttaggttgattagataattctttattatgttagtccataatgttgatgatcaatagttaatgagcctatatataaagtctagttgaagcagaattgtgagcttttctagttagctgaaacctttgatgagcagggtcaatctaactaaggttatgtagctaaatcccttccctaactctataaatacatatgcaaagtcatttttttggcaagttagatgccaaaatatgttttatttatggtgagattgctttgtgtttccaattcaattttctcacctttattattcttattgctcttttctatgttaggaaagattgctttttcagctggacttttcttgtatggaaacttcttgtaagagaagcaattctcttatggaaagttggtttttaaaggaaactttgactattgctatattccttattaaatttgattatgtcttgatacaatcagattatacagactgtttatggcaggaatcaagacccaatacaagatcagactcgtttatgacaagtttccttttctggtttgatttgctgcgtcagaa

SEQ ID NO: 369795 - DNA, 996 bp, Cannabis indica
aggcacccctatccgccacaattatgtaagactttttagttgttggcctgccatcggcttacaatatattgttaggtcatccagcattgatcgaactaggggcagtgagttcgatcaagcacctatccctgaaatttcaaacaccagagggtgtcggagtggtgcaaggcgattgaatgctagcttgagactgctatcgcatagagctacagcatagaaaaggcagtcatcagttaatggtggtcttgaataaaaaagcgaaaagaaggacgaggatcttgacccccaggctcaagatgaaagaaacttattaaaaccaattgaagaattggaagaagttgttctcgacccatgaaatcccacaaagtgtgtttacattgggaagaacctggacaagcagctaaaatagcaggtaataagtttcttaaaggagaatcaggatcagttcgcctggagccatggagatatggtagggattggccctagtataagttgccatcatttaaatgtcgatccaaactagccagcaaaaaagcagaaaaggagacccttggattccgaggggcaaggggcactaaaacaggaagtggacaggttattggtcaataactttatacgcgaggtgttttatccctcgtggatagccaatcctattcttgtcccaaaacctaacagaactaggagaacttgtattgatttttctgatatgaataaggcatgcccaaaagactgtttcccactaaccaggatcgaccagttggtggatgcaactactgggcacgagcttatgtcatttatggatgcatactttggatataaccagagaaaaatgtaagccccagatcaagaacaaacgagcttcataaccaacatgggactctactggtacaaagtcatgccatttgggttgaagaatgctggggcaacatatcaacgattggtgaacgagatgtttacaaatcagattggaaggaacatggaggtgtacgtcgatga

SEQ ID NO: 369796 - DNA, 868 bp, Cannabis indica
taggatctgacaggctgtattcaatacaacctttctccaccattacatctctttagtcacaacatccttgatattgtgtaagtcctttctatatgattactcctcttaggatactgaattctttactatttggcaattatatctgtgttagttaggaaataatactagtagttaatttattactagaataatgctaaaaactgtatagaacttttcataggctgaataattatctaatagccttcttggccactttaacattcagtctcactggtagagttagagattctaaattggtctttaaacttctccaaaaaaaatcattgttccacccccagagtaatcaccatctcataattagactttctagcattaacgcaagtctataaatttgatttggtgtagtctaagagtattaaaataccatcattatcatttaacatatagttgttttttttaatcttaagatttagttcattatcttacaatgttccttttctggattgaactgatacctactcataactctcactaggggtgtgcagaaagtcatccaatcgaccgatccaatcccaaccgatccaatagaatcggatatccaatcataattggatcggatcggatgcaaattttaaaaatccaattggatcggatcggatattggatgagatatccgatccaatggataaccgatccaatccaatccaatatcatccaatgtccatccaatcatatttaatatttataattttatacatttaattattttatttaatattttatatattattttattatctatgttagattattaggttttaaattagttttttcatatatatatattttgtttaatgaaattagccta

SEQ ID NO: 369797 - DNA, 831 bp, Cannabis indica
actcgatacacacacatatttttattgggtgtgactattattactactgttaaacttcttcttcatagacattatctttgtgattgagatgataatgttgatgatgatttcttctccatagccatggcattttaattttttcctcccattgtttttgaaaataaaaataaagaaaaaaaaaaaaaaaaagttttaaaagattgaaagggagagagagaggagtgtgaggagatcaagtagagaatgaatattatatttatagagaaactattgcatgagtgtgagatgttatgtagaaaaaaaaaacttgaaaggtaggtaggaaaatgaaaagactttgaggaattgtaataatcaaagtgaagtggaagagtctctacttgatatatattgtgtataattgattagttaatgttttttaatttttatatatatataattataattactaatattactattattatgtgtaaatataaatttgtggtattagagtcgttatataattttcttttataattgaatatatatatattttattttgaaaggatttgtaattgaatatttaattatgtatactatcacaattatatatattaattaattataataggtaataaatatataataataaaatatgttgttaaattctttttaaaattcatcataattcttttcaataattcttaacagttacaaaattttaaatatggatattttttatttaaatattaaatagatataaatttaaataactaataaaatgacaaaatagaattaaaaaaatattacaactatatatagtgaattttttctgaaaaattattatta

SEQ ID NO: 369798 - DNA, 883 bp, Cannabis indica
aagctgaacatcaaagaccggcagtttagtgcagcctttaacactacctgagtggaagtgggaagatatcacgatggactttatggttggattacctagaaccacgggtttgtttgatcaatctgggttatggtagatcgattcacgaagtctgcgcattttctactagttaaaacaacctttatagtagatcaatatgcagatttgtacgttaaggagatagtaagattacatgatgtaccaaagtctaagtttcgaatagagatctaaagtttacttctaaattctggcagagtttacagcggcctatgggtaccaaactaaaattcagtacaactttccatcctcagattgatggacagtctgagaggacaattcagatactggaagatatgttacaagcctgtgttatggattttgagggttcctggagtaagtgtctaccattgatagagttctcgtataacaaacagttatcaaagtacaatagggatggctccatatgaattgttgtatggcaaaaaatgtagatctcccattcgctggggtgagacatgggagaagaaatacttaggtccgacatcattacaacagactaatgaagttatagaaaggattaagaccagaatgcttgcctctcggagtaggcaaaagagttatgcagatccgaaacgcaaaaatgtagagttatagacatgtgttcctacgggtatctccaacggaggggatcaaacgttttgggagaagaggcaaattatgccctaggtttttaagtccttttgagattctcaagaaggttggacaagtggcatatcgtttagctttgcctctaattctttcagcagttcataacatattccagtatctgaattgtcctctcaga

SEQ ID NO: 369799 - DNA, 649 bp, Cannabis indica
atacctggctgtcacagaacatgaggtaagtgtcgtactaataagagaggaaaacaacatccaatacccggtctattacatcagttcaagactcattgaggttgaaggccgatatccattgatagaaaagctcacttactgcctgattcttgcaacaagaaagctaaggccctactttcaagctcatcctgttcaggtatacactgaccaaccgttgcgccaaatattgcaaaaaccggacgcctctggacagttactcaagtgggcggtagagttgggttagtatgagattatctttcaaccctgaacaacaattaagggtcaggccttagcggattttgtagttgaatgtaccggtaaagaagagagcgttccagaaaacaaccccgagccagtacagatacctcagcaaggtaacaatgaagacaagctgacttggaagctacacgtggctaggtcggctacagatcaactatccggagcagggattgttgggaatattttaccaggatctagatttactaacaagtatgttaattaacatcctagatatgaattctctaaaacaatgaaataaactcataagggttttagaaaaccttacaatgattgcagtgaaatatattgactccttccgttcaagatctct

SEQ ID NO: 369800 - DNA, 604 bp, Cannabis indica
tgaaagcattgttggttcatcaaggtatttcagaggccttgaatctagaagctctagcagctattgatgataagaagaagaagttcgaaatagaaaccaaagcacacagtgcaattttgctcagtttgggtgatgaagttttaagagaagtctcaagtgaggagaaagccttgggattatgggacaaactttctgagatttacatgaagaaatctctagccaacaaattgtacctcaagaagaaactctacactctgagaatggatgaatccaaagaattaagaaagcatcttgatgactataacaagatcatcttggatctgtgcaacattggggtcaagatcgatgatgaagatcaagcaattattttgctaagttccttgcctaaaacctatgaacattttgttgacactattctgtatgggaaagactctctcaccatgacagaagtcaaggctgctctaagctctaaagagattcaaagaaaggatgacaacaagattgaatcgagtggtgaaggtttatttactagaggaagaagcaaaaatagagagtataaagggaacaagaatcatcatggaaatggaggacacaaagcaagatc

SEQ ID NO: 369801 - DNA, 602 bp, Cannabis indica
atactgtcaaaaaaaaaaaaaacctgccgtataaaatttaaataatgtacacagtaaaaatgtaaacattaccgcctcacagtatatatgtaagaaaatggcaaaaataagtatattatgtaaatttcccaaataaatttgtattagggaaacgtacaaaaatattaaatttttaactttcacaaaaatattgctacataaattttttttttcaaaaatattatatatttttttagaataatactggaacacaaaacagaacaactaaaaacaacagtgaaacaactaaaaaataagagtaaaacaacagaagaaacttaacacagtacacagtatttttgaaaaaatttccacctccacagtaaaaaaaagtaaaaaattttagtatgtggtgtaaaaaaaaccctttatattaatgtcttggatatgatgaaacaagagatttacctataactattattgcatatcaggaataacttttccctattattttaactaaaatataaaaaaggaaaagggcatgagttcgaacccatactcagcatttggaatgaagtattcaaaataatttgattatagataatattatgaaggagaacatg

SEQ ID NO: 369802 - DNA, 779 bp, Cannabis indica
gagaactaaaatgaaagattatattttaaaataaaataaaataaagattagaacgtaaaaaaaattgtatacaaaattgatgtagatttaaaatccaacaccaataatagtgtagaatttggtgtataatttagtgtgtcattggtagggacggacctagtagtatcaatgtgggggctatagcccccactaacaaaaatattgcattttaaaaaattaaatgtaattttttaaatttgataattatagactaaaataataaaaaagcctccacaaaattaaataaatctagtaaaagtgattataatataagtaaaaatattttttaatgataaataagcccccacaaagtaaaaattctggatccgtcactgattattggagtaaaatagtgtaaagattccacagcaaattaatgaaatagtgtaacattatcaatgtgtgagaaatgagttctttaaaggtgagagttgcaaatttggttggagtgggagttaaaaacttcaatttcgtccattcaaaaaaaaaaaaacttcaagttcgtaactagatttagtgcatcatgcaatgtataactattgttggaacgttttgaatatttttttttttgcttgattccatctctaatgtaacactcaaatcttttctattaaaccctttaactaggggtgtgcataaatcgatccaatccaataaaaactgaccgatccaattacaatcgaccgcctaacattggatatccaatgtgatcggatcggattggatgttatttttaaata

SEQ ID NO: 369803 - DNA, 492 bp, Cannabis indica
acaaaacatataaaatttaaaaatgatgttattgtaattatggacagctacaattttttttttgtttgaaagatccacaaaattattatcaaatatacattttccaatcccttaattattatagttgtattacaaaattatagcatatataatattgtgcactttaaaaaataataataataataataaagtcatttgtataatatagaacaactaaatggtttacatattaatttggctgtacatatggtggtgagaattagggttgttcatccgattcaatttgtacttttttggtcaaacaacatccaatccgcacttagtgcgaatttcatttttttggatccaatacaatccgcgcaatagctcaaatccaatccaatccaatccgcaaaagtgcggattggatcggttactttggattggttactttttaatattaaattatttaatatttataaaaaaatatattttttctacataactagcaac

SEQ ID NO: 369804 - DNA, 611 bp, Cannabis indica
tttttatatttccatataatatggatatttattatagagtttttatttttatttttttaaaaaaagtcacacattgcttaaaaatgtgatagtgttagacttgtaacttataaatatatattactcattcttctttccattgaatcagtgagtgattaactaaatcttaaccaattaaatatttggtaaaatgaacaattaaaaaaacaactaaaatttaaatttaaaatatcattataatttagccattctttggactccatttaaaaaaaatcgtgtaagacaaaaagtaagagaatggtcacaacttagtaacctgaatagttttggagaatatttagtatcgataatagttcaaagacataatttttttggtaataatttaggaaaaataaacttatttattgttatcataatgtacaaccatgaatttaaacataatattaaaatcattttaaatatattgatattgattgttttattttattaattaacaatgaaaaaatagataagagaatatcaattaaaattaacataggatcccacacaaattattttaaagttcatatttttgtttttaatttataatgtaaactacaaaaagtattttt

SEQ ID NO: 369805 - DNA, 499 bp, Cannabis indica
gatttatgtgtgatttggatggtttcatgttgatctatgtgttatttgatgatcgattgatgtttgcaatatttttatgaaaaataattgaattttcgttctaaaattatttttttagatagtttggaaaaaattaagcaaatcacttttttcacaaaacttgatttcgattttatttgaattagttatgattttttgaaaatttgaaaaaaaatctaaaaatcgggtacacatcacgcgcgcgtgcggacacgggtgatcactcgtgtgcacgcgcattagcacatcctcctgtccgaaggaacacgcacatgagcgtgtctgaaactttgggcgtgcgcggaaatgctgctggtagccctcttggccgagttttctcggctaggcacccatgctacgcgcacatatggtatgcactgcataccatccgagccaaatgcaatttttttttcaatttttttcattttttcatgctttttcatggaattaattccgattt

SEQ ID NO: 369806 - DNA, 579 bp, Cannabis indica
tcccaacctcgctacgattatccttaacagaacttggtgtgggactaggatcgacgcaaacattcttctttaacaaagtcacaaacaaaggagtaaattcatctggcttcttcgcaagtgtagataaaaagtaccttgcacgcttatcatttccaataacttcagggcgatactcaaagcctttcttgtacttgtaatgtacttccaatttcaagtcatactccactttgtcgacatccagttcttcgtacaaaacatcaaccaaacctgagtagcttaggttcggatcaatgtcaaatgtcaaattgtcgccccgtttataaacccaatctctaccatcaaactcccaaacaccattatacataacacacgcattaacagttgaacctgtcacatacatttaaaaaaacacagttataatttacaacaaaaatctcaccgaaaaaaaatcttaattaatcattaataacaaaacaataataattaattgataataaaataataattaataataattcataattcataataaaacaataattaataattcataataaaataataattaataattaaaaa

SEQ ID NO: 369807 - DNA, 809 bp, Cannabis indica
aattaataattaagttgattttgttcaagatacttaattagttatttctatatcatgaaatttaataaattagaaatatatttaagtgaaaaattaattaattaattttagaccaacttaaataagaatatttcttaaataattaagttgaatttattctagatacttaattatttctattttaatgaatttaattaaataaaaaattatatttaagtttggattttttttaataacagatgaacttaaattagaataattttcagaatatattttattccattttccccattaatttcaaaattcatttattttagatgcaaatattttgaaatttttcaattttgaaaattagattaagttgaaaattaatctattaattaattttagatcaacttaaattaagtaattttcattaatgatttaatgaaatcaaatagactaaaatatactattttaattagaaaattaagtaattattttatgaattatttagatagatattttctatgtcgaccttttggtatatttctagatatatttaattaaattagaaagttaatatttgagttgattttattcaagacacttaaatatttgatatttttagtaatagatttaattaaatagaaaaattatatttatgctgaaaaattaatttatttaattttagatcaacataaattataataatttttccggaggaggttctaatggttacatttttattgtaaccacatggttacatttttttttagccattggatcactattaaatggttgtgattaatttggaaattaaataaaaa

SEQ ID NO: 369808 - DNA, 698 bp, Cannabis indica
atattttattttttagaattaggtaaataaataatttgtttaatttgtttgtggaaagaataattagtttgtaagtctatttttttttaggtttaggtaaaaaaattatgttatgtgattttgtttaagttaatgtattaatgttatatgtaaacaaagtttagtatatgtggtgtaatctatagttttatatatatacatatatttattatatgtatgtaatgtgtttgaaaagttctattattattacttattttaaattattaatgtttattttttttaggagttaattgaatttttcggtggtccaacaaagtcctcctcttttatcagtagttttccaagtgatcttattctcggcatataattatttaattggataagtactttatgtaatataatatagaatttgtgtaaattaattaaactcaattaacaattgatgcatatttcaaatttattttttacgtttaggttcttggtgttgattgaagagcgtaaaagtagctagctttatttgagaaatgtataatcactaaaactttaaaattactatatttggtgaacttcgaatatcttaaatattcatgtgtaataaagtaggttctgcgattaaatgtactgttattggatgggtagaatatgcatgttagatgagtttgaatatcttaaattttcatttgtagtgaagtagattc

SEQ ID NO: 369809 - DNA, 459 bp, Cannabis indica
tttttcaattctattgattataatttgaaaattaattgtgcatatcttatcaataattgatttaaaatgtttgtacacctttaatttccgaattggatcacatattcgggttactttcttctttagttttcggatttgttttagattagatatacctaagtttatgtgtttttacatgaaattaatatcgtagatctattagaaattgtaaaccgatcaaaacccctatttttcccatccgtttccttacttttttggctgaaatttcatcccaacccaaccgggtctgaaccgggtcgcacaaaacccattttttcatccatggaggctgctggaggttgaagacaacctgctaggacgaagcccactcgcagatgccgaagagtgagagagagtgaggtagtttcgtgacttcgttttcgacgattcttttttccagtattattagaatttaatttc

SEQ ID NO: 369810 - DNA, 796 bp, Cannabis indica
gcactctattacataaaaagacaaataataatatgtaaacaaatccacagaataaaagaagagttacctaatcacaggtttttgcttctttaagccattatacattgtctaatggctccactgctactactatttagtctaaatctattttcagtgaagttctagataaaggagaggttgttgaagtgttttgtgtttcatattttcatggaaggggttatcgaagagtacctgttggataaactcaaaaggagcctcgatggaaaggagagtagtaacagttccaaaatcccgatgcacagcaaattctgacacatacataattctcttgaaaacttctcagcctcagctcaacccaacctgtgagacaacagggtcagtcttcattcaaagaaaagctttatatccttaacgatttgttaactgaatgccagattctataaacaaaaaaaacgcaccattcactttccttacatcaacatcaggaccaagctaaacaaaattaaggcagagctcgaatctgcactatctcaaaacgggaatgtaaatcctcaacccaacgggggtgccaattcatcactgaacgctaatatttcccaacgacgaaccactcctactacagagcgctttgtcgagccaaaaataattcatgggttcgaagaacacttggtgacgctggaaaggttggttgtccaacaaaagagtgacgaagatgacgagttcaaggcgatcgccattgtaaaaacaaaaggaatcggcaaaacgtcactatgcactgtagtttttgacaacgaaa

SEQ ID NO: 369811 - DNA, 568 bp, Cannabis indica
atgtgataatattatgcatgtgatatatgggctcacctgattaggtgatgtgatttttctggtgacgtattgggcgtaagtacaggcatcagtgatatatgatgagtaccgagcataggtacgggctcacctgattaggtgatgtgattttcctagcaacgtactgggcgtaagtacgggcgttagtatacactactacaaaaagaggtattttcgtcagtttttaagtgacatatatagtttttgcgtcgatttataaaactaacgtatatgccgtagtcgccaatagattttatttgcgtcgtttcttaagtgacacaaataacaattctcttcattttgaaaccgacacaaaatataaaatgttctttttaatatacatgtaatatatgatgaaaatcgagcgtaggtacggactcacccgattaggtgatgcaatttttattaggcgacgtgtagatacggtatcagtgatatgcaaattgccaagttatggcatagaatgaaaccgttgtagggtttcctcctgacgacgtgtagatacgggcgtcaatgacatatgataagt

SEQ ID NO: 369812 - DNA, 516 bp, Cannabis indica
ctctgcaaaagaaatatgatacaaaagaagctggaactaacaagtacgttgttagtcgctacctcaagtatcaattggtggacgataaatttgtagatgccaaatctcccaagcttcaaacaatttcacatgagatcatctcagaaggtacgacttcagtagaatagtttcaagttgctgtactaattgataggttacccctttcctagaaagatttcaaaagtactctcacgtataagactaaggaattttgaaaagtttgaacacccgccttcgtatagaggaggaagcgagaaaaataagaccagaaagatgaggtgcttcaaataagaacactaagaagtccacaccagcagttttgaagcctaatggcaaaaatttcaggaatcaaaaccgcaacaaccctcctcgtaacgataatcagagttggaaatgttggaaatattttaccaggatctagatttactaccaagtatgtttgatttgttgggttttatgccctaaataaaactcttt

SEQ ID NO: 369813 - DNA, 1166 bp, Cannabis indica
attaaagcagaacatcagcgacttgcaggtatacttcacccattaacacttccagaatggaagtgggaagacattgcgatggattttgtagttggtttgccaagaaccacaagaatgtacgacttagtttgggtcgtggtagatcgctttacaaagttagcacatttcttgcctgttaaagtaacttatacagtagattagtatgctgatttgtatgtgaaggagattgttcgccttcatggggtaccaaagtctatcgtttcagatagagaccctaaatttacctcaaagttctgggtgagtttgtagaaggttatgggaactagtctaattcagcacatcctttcatcctcaaacagatgggcaatctgagcgaactattcagatacttgaagacctgttacgagcttgtgtcatggattttggatggtcatggagcaagtatttgcctctcattgagttctcctacaataatagctatcaaagtactataggaatggctccctatgagcttctctatggtagaaagtgtcgatccccaattcattgggatgaaacaagagaatggaaatacctaggccctgagttggtccacaaaacaaatgaggcaatagataagaatagagcacgaatgcttacttcgcaaagtaggcaaaagagttatgcagatcccaagcgttgggatattacgtttcagctgggagatcatgtcttcctgcgtgtatcaccaatgaaaggaatcaggcgctttggaaagaaaggcaaactaagtcctagatttataggaccttttgaaatacttgagaaggttggataagtttcttatcggttagccttacgcccatcgttatcggtcgtgcataatgtatttcatgtttcgatgttgaggaagtacgtgtctgatccaatgcatatactgagttatgaggcattggaattacaaccagacctgtcttatgatgaacaaccagtgcaaattctggataggaaggaaaaggtccttcgaagcaaaaccatagcgttggttaaagtgctctggaggaatagtaaagtggaagaggccacttgggagttggagtctgatatgaggactcaatatccagagttattcaagttagatttccaggacgaaatccttttaacgagggaataattgtaaagaccgc

SEQ ID NO: 369814 - DNA, 720 bp, Cannabis indica
ccaaagaatatactttttgtgacagtggaataccattagtgtcagtttgaaatcaagaccaatgcccaaaagtctcggttcaaaactgagaccaaagaatatactttttgtgattgtggaataggtgtcggttatatcaactgacactaaaagtataagtctcagtttaaaactgagaccaaaagtataatttttagtagtgtcggttacatttcagaacatagtatgagtcgattgagagattcctcaacactttctctatcctgaatgtgcgaatgaatgagcaaggtgtgagaaccttgctcaacaataaactgggggaagaatatcatgactactatattgccaacatcccagagactacagttggcatttaccaggatgcaaaaaattttgattatgagccaatttcaagagacatctcagaggatggttctgatgtggaagattcggatgagcctgaagaagaaaaaccactattagcaaaccctgagccggtggaacgacaaggggaggactcaggagacaatctagaagaagagttagaagaggatccgaaagaagatccaaagaagaggatgaatagacgttcaacttggattagtctttagctttagataatcttttagttagttagaagtttagggtatggctgtttaaaacaattgatcgattcttcggagttaagagttttagtataactcaaacaatgttcttatt

SEQ ID NO: 369815 - DNA, 614 bp, Cannabis indica
acaagattttgagtgttacaaccaacaagaagataaaaattccacctcttatcccatctcaaaacatgtctcttattccaaactttcaaaggcttataaaatgtttgttcttgaagtgacagccgaattcgagcctcaaaactacaagccggccattcaattcaagaaatggcttcaagccatggacaatgagcttttaggactcatcaccaacaatacatggactgtggtgcttctcccacctaacaagcgagctataggattgttacgaaaattataaacactacgcaagtatacgcagtcaagtagtagctcacgcaagtgaggtcgaaccacagggaattggattaattattactaaactatacctataattctatttggcaaatcggaattaattatgatttaaaagaattaaattaattcagaaaacttaataacacaattaaagttaagcaagatgagatgatagggaggagaatcctgttgttgtttacctcaattcgttaatgcctaattgctatcctattcttgaagtgaatgacatattataaagtaacctagcttttttcagatcttctaggttctaaatcacatgttttctaattaatttc

SEQ ID NO: 369816 - DNA, 662 bp, Cannabis indica
tgttaatcctggacagacgggaagcgtggtaaatgatgggacaacttctgttactgaaactgtgcctggtgtgcaagagaccagaaacaacggttccgcacacagtcaggacattcctaacttgactgtcccaccaggcatcaatgcccagacgaccatcggagacgcaaccgaattgcaaaaccttcgcgctgggcttggactcatgcagggtcacaacaatgccctgcatcacgatcaggaagaattacgtgctgcaataaacctcgcgtttgacgaacagaggcgtatgttcgtcgaatggagggacaaagagatggaggcattaggggctcaccatggagaaaacgaagatcgtagtcagcaagccactgtactgatacgaagaacctatcagactgtaggccagcaggcggcgagcgtcattccccttggacaaaccgaggatgactcgacggtgaatgcttcccaaacaaccaacggtcagccgtccaatccccggtcacgagttccactcgtgggccaagaggtaggcggacagaccttgtctgggaattcatcaggaggagtcatgctcgacggatccacgcaaaataatggagccattccacctgccaaccaagcgaaccaatcgctaaggcagccaggttcttctatgtttg

SEQ ID NO: 369817 - DNA, 531 bp, Cannabis indica
atattaccctacacaaccaaacgtagtttacacattttcctataattaaattattttgaacaactcgtaccaaacaccccctagtaaacataatatattagtaaataatattcatactttctattttgtttatttatttattgcaatattatttagttaccaatatctaataaatggttttatttttttgctttgtccaaattttaataaatttaatttaattttaatatatatacatttttgtgaagtttgtagttatagttggcttgtaaaaatgaaatagtaagaagtttatacttaatttattaaatgttatcttatctcaccctctcatagcttagtcatgttagaccactaactctatactgcccaaaattaactaccgtattacaatacaattgttcaattagaataaactattgggaaattctataatgcatcatttaaaagggatacactgatacatctttatctgttttagtatccgaaataattttttagtcaatttttttctcatggtcatgtaaatta

SEQ ID NO: 369818 - DNA, 627 bp, Cannabis indica
atctatattttgaatgcaaactttatattatgtgaaagtagaattagggattgatcctatttgtaaaatctaagattgtgtgactaggattatcgacacctgatcagcagcacccaggggtttggaatctttgttattacgagacaacaggtaagacaatagtttgcacgtagagtatgcacggtggcgcttatgttgaatatgatatttgtgagtaacggtaacggggattaggcttattaccctaataggagcggttaatagccaagggttattaccctagtgatataagttgagtatatgctatggtatgataagtatatgatcatattgagattttagagttatgcgctcaaggcataatcgggttggaatcgataaccataaccgagataaaccattctaaggccttattgtatttagacgtgtgagagaaacacgtaggtctacgccacgtagacataaatagacgtgtgagagtatggacatgtctgggccatatcagacaaagcgggttggggtctaccaatgttgtgtttttgggactctgttttgccgtttaggccggctaaaagaaaaggacttctaataatattttgtaaatgtttttgggatcccaacttctgt

SEQ ID NO: 369819 - DNA, 613 bp, Cannabis indica
agcaataaatgcaagagttaatgagagaaaagaaaggaaacagagaaggcttaggagagaagaattggattagaggaacaaaaccatcacaaaaccattttggatggaccagatccaccatgaacggtggagcaacggagggatgcatgccactagagttctctagaaccaacagaataaattttattatatgataattaactaaatgatgagcttattggtcagcttttatgtgtggttatgagattttggttaacgacactctttaataattaggagaactacttcatatatattattttttaatttttttttcaatttatgatttaagttattatgatggtttttatgtaagttgctatgtgaattttggttgaaatttaggttgctaaataaattttagttgcgatttagattactacgtaaatttttgtaaaaatacaaaaaatttcaaaaaaatgcaaaaattatttttaaagcgtaaaaatgcaaaaaacataaaagtgtgataagtacccctacataacctaacttttttttttttttttagaaataaatgaatatatcattgtacaaaaaaagaatgtttgattacaaaaacgtaaaaacctac

SEQ ID NO: 369820 - DNA, 628 bp, Cannabis indica
gttagtaacaacccaagactaatgcggaatactcaaataataatacaaatatttagaaaatattagatataaaaaaacatattaatttaccaatagataatatgtttatctattcaatattcaatgttctcttatttatacacaaactaggcaactaagccgcgcttcgcgcggtcttataaatttttattttcattattattgtgattacaaaatattagcattgaatgagtggtatattatacaatatagtattattattttctcaaaatcatgtattttttgaataaaataatttgcaataacgaagacattatacaatatgcatatactgttattatatacatatatatatattagatttctatgttttaaatttattttgcatcaatatataaatatttttcatgtatgtaggttaaaaattagttttgtagcttttgaaaatattattatataacaatatataaataaagaagatatatatttaaataaatatttttctatgttgtaaatttattttgcatcaatatataaattaagaagatatatatttataaatatatatatatatatataacccctaataaagaagaaaaaggaatgatcactctactattaattgata

SEQ ID NO: 369821 - DNA, 1128 bp, Cannabis indica
tttaacaaaatatttaccttgagacttgggtagagacttgtgctgataacatgttataaaataatataaaatagataagacgaaaaaaagaagatgaagagagaaagagaaactgaatgagaatttcttatttatttattccaatgggatgaactcatatttatacaaaagtattgactaaatgaatgtgaaactaaattaatataataaaggaaaatagaattaaggattaatggtgataattaatatagtaatttaattaaacatccataaataatacttcataatatgagcaatattatttggcacttttaaatagtacaatatcataacgacatgatagtcatttaattggtaattttttttgggtaaattgttggaaattattttaaacacatataaagtttaagaaaaccttacattgggtgcagcggaatataatgactccttccgttcagatctctagcccttgattcctttctgtagcagagcattatcaagatctgaacctggatctctttctctccttctttgagcccgattctccttcttgttgattggattcttcacagtcttccacactatgattgagataccacttgatgtgtgtgggcactcactctatcactaatggctgaaattatttagtgtgaagaaaggcttagtgtttcgaattgaagaagaaagaagaaggaagaggtctcatctaggtttttagctttggaggcattagttggataatgagaccatagccttccttttatactattcttcaatagggttagggttgaattatatggattaaaaaagaataaaatattgggcaaaaattcaaccttggccgtacaagatagtggaccaatctctagttacaattttgccactttatttcaaccacttattcttcttttcaataataccatattttccaattcaaacctataaatgccaaaactatttatttaataattaaaataactatcaaataaaattgtcatttataatatttattaattagactccataaagtctcttaattaacaagtaaacccaaaaacactatttcttcacaatcaagccataacatagtgaaaaattcataaactagacatagtctaattttagaat

SEQ ID NO: 369822 - DNA, 560 bp, Cannabis indica
cttgagccagatacgccgatttagtcgagaaacaccccctttctagcgtccaaacccatctatcagtaccactgccagagggatgaccccctttaagaatgtccgagaccgtttctcggtcaaaattgtcacacagcttttgaatatcccactgcccattatttaaaagaagttcagccacatagttcaaattgggagaggttcccccagatggtttcggatagaagcctttccgatgcggaatccagggatctccccagatcttcgtattctgatcagtagcaaccaacttacaagctcattttctcaaaatggtatttgccttcaccacacttttccaaaaccaagaacctgaatctttgtacctgcaactaaggagatcttttcctttgaggtatttagcaattagaactttacagcacagagattgactgccattgagaatattccatccccatttagccagaaaggcctgattcatctccttggttttccggaacccaagcccacccagggatttagggagacaaagtttgtcccaagcctttagatgaatccca

SEQ ID NO: 369823 - DNA, 782 bp, Cannabis indica
ggatatcctaaaggggtgttaaaggatatagactatgtcatgttgaaaatggaaaacctaagattatcatatctagggatgtagtctttaatgagcatgatttcatgcacttgatagccaaggaaggcaaaggttctgatgttgcaggtactaacagggatgaccttgctgagttggagatcaacactgacaagattgaagtctccattgatttaccccacacaccagaagcaaggacatctcttgaggtggaaacacagggtgcagacacaactgaggctggtatagatacagctgaggtggaaaccagtcaagatgatcaaccagatttgaccaactatcaattggctagagacaggtcaaggagagatattagacctcccagtaggtatgctgaagctgatttgatagcctatgccctggctgtgatacaatctgagagtgaacctgaaccaactacctatgaagaagcaattgcatgcaaatcaaagaagaaatggcttgctgcaatgggagaagagatgcattccttgaagaagaatagaacttggattctggtgccaagaccaaaagacaagaaagttgtctcctgcagatggttgttcaaagagaaagaaggaatgtcagagggtgaaccacctagatataaagctagattggtagctaagggattcacacaggttgagggagttgattacacagatatcttctcacctgttgtgaagtacaagaccattagaatgatgttagccattgctgcacacaatgacttggaagttgag

SEQ ID NO: 369824 - DNA, 762 bp, Cannabis indica
attaactcgagctcactactattcagcctttcctttgcctttatctacacatataaacaatgtatgtgagtcgatagactcagtaagaaaaatataaacatatcataagataaaccggattataactaggcgcccatacactcaattacaatcctatcctgcgtcccaggcgtactaagtctggaacattcgtacgacaaagcctaatcatatatctgttgatatcttagtgcaattctatttacacttcaccaatatcttgatatgctaatataatggctactgatatgctaatataactacatttgaaaagcagagactgaatttaggattaattgaaatgtactgatagttttatgttagtgcaagtgggagtttgttgggctttgtaccctaaataaaatttcatttcaatgtaatcttttctattcaattaacaataaagaaacaaatttatttttcattacttatttagtgtgttatttgttcatgtgattatttatttgtttatttgatttataaattcatctaaatccttatcacattgatattcttgtttattgtgtcgtcagcatagtggaaagtaatcaagattgtgtgattaaatgtattcatatgatttatcagtacatagggtttaactgatatgataatctacaatgtaatttacttgcaccttggataagtgctatgttcttttcagggcattgattaaagtaagcttgggttggattcatggagtatgcatcagaagagaccgat

SEQ ID NO: 369825 - DNA, 599 bp, Cannabis indica
catatcaaacacagcaatattgtcaacagaatttcatttaatccacacttattaaaattaaagcaagaacataatataaactaaaaaaaacaataaaaataagcaaataaacaactaaacaactaaaaaaaaattggatagacacgacagttaatctcgccccacacttaatataagcattgtcctcaaggctcaatcaaataaaatcaatgcaaaataaaaagaaaagggtaagaaaaactcccgtaaggttgctttgtttaacgtcgttagctcgactgcatgttgtgctcattcttcacgttgggtcttctaacaaagacacattctttatgtatttatgaatggaatctaacacattgaatttgagtatccatgctttcgtattcaacttctcactcgcagtgagtaagaagggtctcccaaatagagctgatgtaggattgggatcaccctcatcttccatctcaattatgtaggaatcacctggaatgacaagtccataagcctgcacaaaaatatctttaactatccctaaaggataagcattagtttgatcaatcggttgaataaaaccctgagtttttcttgatggacca

SEQ ID NO: 369826 - DNA, 542 bp, Cannabis indica
agattgttaaattcaagaacttctatataattttactaatagacatttgccacggataaaaatttaggagacacaatttgtacatattaaaattcaaaaaatataatttgatacataacaaaatagagggacataatttagtacattggtaattattacattagtagaatggaataaaatttgaaaaaattctttaaatttaataatcttattaataatttgaaaaaaaaaataacaattaattactcaataaacacaaatattaattagcttaaaaaataataaaaacatggcaggattttacgtggtagatacccattggcaccgtacaatcttaaacacgcgcgcgagtgtgttttactgtgtctatctcgtttcctttcccgcggccattaaatgagctccttctctcatttctgaatgtgcaatttgtaatactaactttaacgcatggcatgatatgatacagattttagagagagaaagtaaacacagacactcttagagagagaaagagagtgaagagagagagagagagtacg

SEQ ID NO: 369827 - DNA, 551 bp, Cannabis indica
gttttccatcccatacgtgccccggatgcaataggagaatgcttagcaattggagatatggatcctaacatggttgaggagtccaaattcaaagttagtaagaaggtgagaaagaagattctccttaaagaaattgctaaggatcacgaggcacaagaaagcaaagacaaagcatcatttgactctaaaaaaccacccaaaaagaagagaaagaaaaagaagcttagtagaaaatttcggtctcaaatgtttgaagttgggcaacaagtgattttttccaactctttaacgaaggctactcatggacgactagattcaaggtgtgatggatctttcttggtggtgagagtataccccgatggggtggtggaacttcgtgatgcactttcaagaagaaaattcttagtgaaaggccaaggagtgaagtttgggggtggagaggtcaaccgagaaaagacctctatctctttgaaggatgtttgatgcttgtaatttgggggtgccaaaagaaaagaaaaaaaaagagattgaattgaaaaaaaaaaaaaaaa

SEQ ID NO: 369828 - DNA, 533 bp, Cannabis indica
tcgtgtttttaaaaattatcgtttattttgtttacaccaatttaggcaatcatttcataaaaataatttaaaaaagcataatatttggaggaaaaaaaaaagaacatatttgtattaaaaagttactaacgtctcgaataaattcaggttacaactataattgatgtttatatacgtacctactcaaataaaactagagatgatttgttttttatatatgataatagtaattataaatgactccttatttaaccccttctctaacgttttccttgatcattgaactactttattagtctctcttccttttcaaccaatttttctcaattctgataagattcatttctttaaatattttcaagataacgtctacttttcaaagtgttcaaaatgtttaatattttcaacattgttgttgtttcttgatgaggttatgtaatatctagtttaaaatagtatttaatttttttttttgatattaattgtgcgaggataattgtctcatttatttgtgttgttagtgagttgatatt

SEQ ID NO: 369829 - DNA, 676 bp, Cannabis indica
ttttttttctactaggatcatagccaatgccactttttaaaaaaccacatgattgacttcctagcataagatcatagtcttctttacctctagtaattgtatatatttcattctttaggcttatcacatgagcatttaaatcagcaattttatttcttatatgaggagcatgtagtacgttgagacttagctaaaagttcattttcatttaatttaaaaatctcaatttcttttagtagcatgttggtcttctctctaagatttttgtttttagcaagtaatttaccaaaatcatcaaatagttccttaaatgaattagaactcatcatatgacatatctaagttatcatcatcattttcactatcataaaaattttggctagaaattcttaccccatcatcaagtgtcatcatgcacattttgctacttcattcatctcctcatttttgaagtcctcctcatcactattgagccaatctgccaacatcgcccatcctttgtatttattattctttctcattggataatccattttcatgtgttcgagcttcttacattcaaagtaaatcggtggatcatctttgctctttctttcttttaagtcactctctctttgtggcttcttcccaaagttctttttgaatttcatgaactttttgtatttcttggaaaaga

SEQ ID NO: 369830 - DNA, 611 bp, Cannabis indica
aactcaaattaaacttagaaattaaactacaattcattcaaaccctaacaacaactataatacaaaattacatgccaaaacaaactaaaacttaagaaattcacaaaataagagtttctagggtatacctcaacttaaatcacccttaattcttgctgaatcctcagaaaaaaatgaagttacgggttggattccctctggtttgtgtgagtcgagaaaagggagagagaaagaggtgaagtgtttctttttttttctaatttaatttttgttttattctctttaattttcttagttaataaaaagggataattcaaaaccctaagtaataatggccagacaccattcaagggataagccaccacatctcactaataacaatgaccaaagtgcccttttatcccaaaagttaaactataacaagcctaggggtaaaatggtcaaaagccataaccccactcaaacccggtgctctatttatctcaaataattatcccactaagaaaaggttctagacatatcaatgtgactctaagggccatccatggcagttttttcatcgtcgccgagcaaaaatcataaaatttatataattcatatatggcatatat

SEQ ID NO: 369831 - DNA, 537 bp, Cannabis indica
aattttaagaaattcagaaaagtttaacatgccgaaaactacgttcaaacagcgtgttgcacacgtgactattttattatatacgcgtgtaaaatagactgtttgaacattgatttctatattgtaaattattccgaatttttcaaaattttgtaggatatcttaaataaatataacttaatgaatatgaaaaaattagagtaaaaaattcttctagatgtcgaaacaacttaagagtgcatcagtacatctatgttaaggatgtgcattatagaatcaaatatgtgtacattttattcattaattacacttataaagaataaaacatgcatagttatatactagatgagagttacgtggcgagccacgtaaatattagttttatataagttttagtagtttttgtttaagaatccagtaactgagcaacggcaacaacaatggtagatagatctatttaagttttttatatttgtaaagattataaatctaaacttttaattttcttgatttgagattttgaattgttctgattta

SEQ ID NO: 369832 - DNA, 468 bp, Cannabis indica
catttagtcacaacaaattgtaatttttgtgactaatatacatttagccacgagctttttaggcacaatatagaaatgatgatttataattaatcacaacttttttacttttagtcacaagttttgtttgtgactaaaagtaaaattttttgtagtggtgttcggttctaacaccttctataacctccaaaccacccatttaagtctacaaacgtccaatttaaaattggtaatagccaagggatttatatacgatggtcatttatgttcaaatgagagtgaaaactctataaataaaggtcatattgatcacttgtgataaaaattgttgaaaccactagttgtatggttagaaccttgtgaggatatgttcatccttagacactaggctaagcatatgagacttgaaaatccttagaagcatttttagagtttccccaagtgttcatgtgagggagaaaatgactt

SEQ ID NO: 369833 - DNA, 546 bp, Cannabis indica
atgtacaaaaacatgaaaaaaaaattggtagcagatttggtccgatggtagtccgatgggtccgatgggtggcccgatgggtggtccgatggtggtctgatggtggcccgatgggtggtctgataggtggcccgatgggtggttcgatggtataaatagggtgatgtaaatgggggtattttagggatatcataaaagttgtcatatcttacaaatattagttattatttgtttagaaatttttttttaaccaaatgtaagcataaaaaatcaaatttccctttggatataccataaacttaaactattatactattaaatgagatttttttctcaagatatacaatagcatacaaaaaccattatttacaatcataagcaaaaataccataataaaaaattaatataatacagtaaaaaaaattatgtataccaaaacttaatttaatattccataaatttttttggctaattagtaatttttccccctgaactttgacatgtagtatattgtgccccctgaacttttttggccgttaaaaaatt

SEQ ID NO: 369834 - DNA, 854 bp, Cannabis indica
acgtggttttgcagttaaaattttgcatagtccacgagtcaatcttattcaaatttctgagtatttttttagggccttttgtataagagttttttcgtctgttttttgagattgtttgccactatttataattgtacaatggcagttaattacaaagctgacccaaaatatgattatagtcattatcccttaaagtatgggatcagattacatatcataaaatgtaaatgcagtgcatgattttaaaaatcatttagctatgattttcccgctttattgggtcaaaaatatcgtgtattaaacacgtctttaacaaactcgatgaatgtatacatgatttattaaatttaaattaattaaataattaaattatttttaaaaagtaaataaataaacaaataattattttcaaaaataataaaataaacctataaatttgaaaaaattaagtttttaacaaacctaaatatctatttaaaaataccaactaacttttcaaaatttatattatttttaaaagaaaataaaataaaatgataaataaatatcttttatctaattttacaatttaatttaaataaaataacaaaaatttgaaagttagtcaataaatctggttagatttttaaaattttctaaattatttaataaaatatatcttattttaaatttcaaataaggtcattttataaaattaattaaataatgtaaaatataaaatatcagacctgatatttaaaaataagacaaaataataaaattttaaaaaataaagataaccaattaagcaaaaaaattaagattttatctatttccaagttcaaaatctattaatatctaaaattaattaaaaa

SEQ ID NO: 369835 - DNA, 628 bp, Cannabis indica
ttctagcaacaagaaagttaaggtcctactttcaagctcaaccattacgccaaatattgcaaaaaccggacgcctctggaaagttattcaagtgggcagtggagctgggtcagtacgaaattaccttcaaaccccgaacagcaatcaaaggctaggccctagcagactttgtggtagaatgcacaggcaaagaagaaagcataccagaaagcaacctcgaaccggtacaaacacctcagccaagtaacagtgaagacaagccaagttggaaactacacgtagacggatcggctacagatcagctatctggtgcaggaatcaccctagtcacgcctagggggcaacacctgcatgttgtattcaaattttgattccaagcatctaataacgaagctgagtatgaagttttaatcggtggcctaaaattagccccgtagatgaaagccgagcacattgaaatctacagtgattcacagctggtggtaaatcatgtatctggagaatacgaggctcgtggaaaagatgatagcatatctgagaaaaatacatgacttgctcgcacaattcaaaagctacagtctcagacaaattccaagggaaaaaaaacaattgcggacgcgttagctcg

SEQ ID NO: 369836 - DNA, 644 bp, Cannabis indica
tatacgtgcctcgcacgtaactttttactagtataaatgagagtatgaagcggtgatgtgacactctaaaatctctctaattagtattatttgttctctccttaattctctaatttttataattttttattagcttcataaacattaattgatataaaaatatatatacttctatttgtttttcttatttaattatttcaatattttaattaataaataaaaaatattaatagattaattaattaaaaaatatatttatactgccttctcaaccgaatagttcatgttaaataataaataaaataatttaaaaaaaaaactatataaatattactattattttaattatttttttttcataaaaaaaaaaaatctctatatataaaggagaagtatgaagcggtgatatgacattctaatatcacttcaaatagctttatctcttctttccttaattctctcttttttttttgttattaggtttataaatatttatttattttcttatgttttttctattcatttttattatttaataatttttttaaagctttttctaaaaaaagaatgtggcttttttttataaaaaatacatatatttgtttttataaattaataattttcttaagtttttttttaaaaaa

SEQ ID NO: 369837 - DNA, 608 bp, Cannabis indica
atatcaggtctcatataaattaagaggccttaagatttttgccccccaaactttgacatataccaaattatgccccttgaacttttaatttcgttaaatatgtctcctaaactattgagattattggatttaagcacttctgtcttaatttagtaaaaaaaagtctagcatagatgaaagttcatgaagcatgatttagtacatgtcaaagttcgagggacatgacttggtagatatcaaaatttagagagcacggtttagtacataaacaatcactgaaatagtaaaattgaatgaaattagacaaaagtccttaaatctaataatctcaatagttcatggaaaatttttaacagttaaaaaagttcagaagacataatttagtacatgttaatatttaacaggtaaaaattttaattacataaaaataataattttaaaaatatatcgataacttatcgtaaaatgccaactataaaaaatattgggtaaataccattttagaccttgtgttttgcaaaagttacagattagaccctgtgttttgttaaatgacaaaatgaaccttgtattttctaaaatagtaaaaataggaccctgagcttaat

SEQ ID NO: 369838 - DNA, 266 bp, Cannabis indica
ttgaatttccaattattaatttgttctgtaattttataaataaataagcgttaaaaataaaaggagaaaagagtcaaaatatagatatgttccaataattgtaaaatatgtttcatactataatatgttcacttattcaataaatttgaactttgctattgcaatacattatttaaaaaattcatctcttattaatcttacaatacaatactatattttatattacatcgctcattcagtacaaagattataattattgtgaaaaa

SEQ ID NO: 369839 - DNA, 713 bp, Cannabis indica
tattaatttatattttattataaattattagtacttatttaaattttttttttatgaaccagaaagttgtattgctcaaaaattgattttattataaagaaaacaaatttaagaaatacataaaatataatttttggaaaataaattttaaaaagagtcatcaacaagcttattaaaataaataattttcgaaagtaacatattaaaaaaatatctttagaagaataataaaaaaaaatactaattaagaatttaagtgtactaaaaaataatataaaataactattaaatttagttttttaaaaaaaataaaaaaaaaaagaaagaagaagaaaaagacaatagtgtaaagatataaaaatgtgtaaaaatactataagctaggttccattattactatcatgtttccttaactttattactattagatcaataatcaagggctagaaaagtattcttaccatagggacaaaaccaaggtctccactattgacatttcctatatatatattagcccctataaattttgggtcgcctttgtcattgacacttttacaaaatttatgctatgcaagtgcacatatctttttagaataattacataaggcaacatttttttgtaaaataaatacatttttacgttcaaagaatgtgttttcacatttttacggttttccaaaaattaacatgaaaacaacataaaatcaacaaga

SEQ ID NO: 369840 - DNA, 680 bp, Cannabis indica
tatgggatgaaaagagatgtggtggactaggtgtccaaatgcttaacctgccagcaaatcaaggctgaacatcaaaggccggcagggttactgcaacctttagcccttcttgagtggaagtgggaggatattgtaatgggttttgtaattgggttgcctaggaccacgggaatgtatgattcgatatgggttatagtggacatatttatgaaatcagctcactttttgctagtgaaagttacatattcagtggatcagtatgctaaactgtatgtaaaggagatttactacgagcctatgtcatggactttgagggttcatggagtaagtacttggctctgattgaacaattcatatattagaagatttactacgagcctgtgtcatggactttgagggttcatggagtaagtacttggctctgattgaattatcctacaacaatagctaccagggtacaatagggatggctccctatgaaatgctatatggtaggaaatgtcgctcccctattcattggaacgaaactggagaaaggaagtacttgggtccaaaatttgttgagagggccaatgaagctattgacaagttatgctgatccgaagcccagagatgttacatttcaggcaggggaacatgttttcctgcgggttttaccaatgaagggtattaggcgcttc

SEQ ID NO: 369841 - DNA, 535 bp, Cannabis indica
taaaataatttccaacatggatttcctatttaaatacttagtccgtattgactgcaagaggaagatggtgatcttccaaccggaaagtgaagaaccattggtatttgttggttcaattcggggatctcgggtctcggtgatttcggccatgtcagctagggagttactgcattgcagttgtttagggtttctggccgtggtgatggacaccactcgaccagaggacatcaaagtggttcaggaatttctagatgtttttcccgaagaacttccaggtttaccacctcagcgggagattgattttgttatatatttggcatccggagttgaactggtttccaaggctccgtatagagtggcaccagctgagcttaaagaattaaagattcagcttcaagggttagttgacatagggtttattcgacctagtttgtcaccctggggagctccggtattattcgtcaaaaagaaagatggatctatgagaatgtgcatcgactatcgagagttaaacaagctaacagtgaagaataaa

SEQ ID NO: 369842 - DNA, 1126 bp, Cannabis indica
accaaaggaagagacaacatgcggatgagaatgtccatggtaactatcctcaaaatcctgaagatgcatgttacagctgtggtacaaaagggcattggtctcgtacatgtcgtacgctaaaacacctttgtgattgttgtgataaatccaacacgcaagtatatgtatcgttttaacaagtaatactcaggtaagtgagatcgttcccacgaggactgtagctaagtaccaatcaattgaattcttgtttctatttggtataatcaataataaggttgaataattaaataagtaaaaattgaaaagcaggaaaataataataaaaaaatataattaattatggatgaatatttaggaatatgaatcctgttagttcagattctcaattgttaatgttaattattaattatctcccttttggtgatgacagattatcaaattaaccctaactcttctcagatcattaaggtcctaaatcatatattatctacttgcatctctgaagtaaattaacatataacttgcattaaattcagaatctaaaaatcacataagctatgtaaatactctcgttttacatcaaaaacttatgtttgtcctattagagcattcctaatattcacttctcagatttcatattaggatcataaatcacattcaagatggccagtctaaaatatgtaattaaaacaaataagaacaaatcacacaatatagggaagaaaaactaataatcacattaactgaattaaagaaacatcatctaacattcatcatatccctaaattgggaatttagttcaaaaagctcatgttcacatccataaaaattgaaacagaaattaacataaagacataaaagggagaagaaagaactagttggtgatcttgctccggatcgccacaattacttcctttgcctccttcttcagttctagggtttaatttctgcctcccttgcctctaaaacacgcaacccttatatagaaaataatgcagatatctttgaatggtgaaattacaaaactgcccaaaaatctcgtctttcgccgttggtcgcgactacataaagcctagtcgcgaccataggaaaattggaaagtccatgctctctgcctggcctccta

SEQ ID NO: 369843 - DNA, 502 bp, Cannabis indica
tctgaatctggatctccttcaagagtttggatttttttcacaatcttctaccacactataattgagtactaacttgatatgtgtgggcatgtactctttcattatgattcgaaattaatgaagagagagggaggtgatttttgaattctatagaaggaggctctcaattttgttatttcacagaatagtctgatgtaggttatgagaatgagatccatcttattccttatataggatttcaactagggttataatttaaattatatgaaataataaaaaaaaaagataaaataatggctaaaatatgcttaagtggtcggtctcacttagtggaccccactagttataattttgttattttatttaaaaatttatcttttctttcactaatgtcatatttttaatttcaatcctataaatgtcacatctatttatttaataattataattaattatcaaataaaatttttatttaactcatttattaattagaccttacaaa

SEQ ID NO: 369844 - DNA, 1045 bp, Cannabis indica
tggaagtttaataattatttttgaaattcttccatattcatcgtactgttaatatatagatttgtctatttatatacgtaggcttattattgattttatttataacatagagtaatgagcaaattcctaatatacatgatttgtctatttatataggtaggcttattatttctaattagtttttaaaaaaattatgttatcttttttgacaaaaaaaagattattatttttgaactaattaaatgtaaataaataaactaagtcaacatatgctcaaaaaataagagggtagttttgtgggatgaggagatcaaggaggaagaaggtagtgcaagaatgctcgatcggtggttggagaggtaagacccactgtggtgttgtgccatcgtcggcaaagcacataacgaaagagaaattagttgtttcatcgggttgtgttttggatctccacagatcactcctcagcgtctattattattattattattattattattattattattattattattattattattattattgattttcttcatgcttctgtcgttggatttttctttttttcattatcatatgttgaatttatttggtatcattagcaaatgattttttttccatgcatattttctttgatctcctagttggagtctttaatttcgtgttgcaaaggtttaggccttgatctgattggtcttatttctttatggatacactccgaaggaagggcttatcggattcggtgatgtattggacttgtggagactctcaagccccccgttgttgccgatgattaaaggtggtagtgagagtggcggcttgagttggggtgtgaatgcggtggcgcaaattatgattttggcagtaatggctgagatttttgcggcattgtcatttaacgtgtattaatggcaaagatttttggagttttagtttttgggattgctttaattaattattctttttaattacacgtaataaatatatattattattttaatttatattaaattaaaaaatattaatatgggagctataaatt

SEQ ID NO: 369845 - DNA, 520 bp, Cannabis indica
tatttataacttaatatgattaaacgttgattttttttagcatatatatatatatatatcacatgcacattaattagccactcaatgaagctatatattctagtccctagcttttgatggatcctatatgattattatgtgttttgaatcaatgttagttctagtaaattaataagaaaaatattgtgacagaaaaaaaaaaccgttcatcttaaaataatgtataattctagtaaaattaaaaatatgttgacaaaaattaataaaaaatgtagcgcatctagcgtatatatgtagataactagagccaattctatgttaatttgggccttaggcaaaataaaattggggtccagtgagaaaagtaagactattgggatttactctcaacctctttgttgttaaactaatcaaattaccactaagctacaacacatatttaacattaaaagtattattatttattttattactaattatatttttatttttttttacgtaatgggcctgagcgtggggg

SEQ ID NO: 369846 - DNA, 1012 bp, Cannabis indica
ttcttatcatctttgaaagcataacattgatttttttgtctttttacgaaacttggtaagatgcatgctctaaaataactttattttttgtataaatctttctagtttctttgttattcgaatttttttgaaaaaaaaggggttgtgtaacttgacttgtgggctaaggaaattcggtccttgttttttcttatggtaagtatcaacatatgctctaattgattgtttatgatgattttccttttaaagtttgatatcttattcattgtattttgtttaattgttgatcttgaaagatttatcaactttaattggtttgtttatggaaaaaatcttggtttattcttgttctttttttttattttattctgtgttttttttaaaaaaaaataatagataagaaaagaggggtggttctctgggaaaggcagttgttttcagttttctttttactcttccttcatatcattatttataccaactcattttttatttaatctcacattctctcatcttctacccgatattactctcccttgttttcctcactctttgttttcattcttactttcaataattcatggctaagacaaagaatttagggtacccaagaaagatggttaatactaaggctgtctccatcaaatgcctcccctatgccgtcataaccatctcatgctgcagcaacagcttcgaatctaggttattcatttcatcttcgatgtgaaccaaagaaaagtgtcatcttccactccttcgagcaaaagagcacccaaaatacttgctcaaaaaatctatgaggcatatccgattgcctaagacttctaggcctggttcaaaatctccctcgttgtctggtgaggcatctccttttcgtggtactcaatcaccacctgctacactggtgttagttcaaaccctagaggtctttcatctcagacccatgcctagcaagcttctctgaacaagaagctcaaaccaaatgacgtcatgataggcctgttcctgctgc

SEQ ID NO: 369847 - DNA, 471 bp, Cannabis indica
gaataaacatcagtatacagatatttgataatataaaactattataccaataatagaatttatattcattaaatcatataaattatttatatgttacctcataaattaacaatctcataacatcatgttgcctaatcagacaagtcgatgcttaaataggataatcctgtatcgaattgtctaatcaggcaagtctgtgccatagcctggcacccatatattgtataactgcatcacctaatcagatgagcctgtgacaaaaacctgcactcgtatatcatataattgcataaactaatcaagtgagctcgtgcaacaaattggcaccaatatatcgcatcgcctaatcagacgagcccgtacctacacaaggtacttatcatatgtcactacgcccgtactctacacgtcactaggaggaaacccctcaaacagtttcattctatgtcataacctggcaattttcatatc

SEQ ID NO: 369848 - DNA, 580 bp, Cannabis indica
ataattactgaatgattagtataataagaattaaaattgaatctttttaaacaaatgcataaacaaaataataagtcaaattaattaatattttaaagatttataattttttaaattcgtatctaaaataatagtactgcagagggtgggtccatgttgtcggcctgaggttatttttgtctttttcagtccttcatattttctatgtatttatacagtgatagtggagtacgctatatcatgtaccgagtacatttatactttatgcatgatgtttagtaaaaaaaatagtacaaaatattaggtacctagtatgtgcctttatattttatagtacattggttagaaaattttcttataactcatgaaattatgtgttgttatatattgagttttacattggtgtatttggttttattttaattaagttttagattaaaaattatcatagaaatattttattttcaccttataagatttgggttttttttacctttaaataatttagttgttcatcaataataattttaagatttgttcaagatgagaaaattaccttaaacacctcaagcataacatg

SEQ ID NO: 369849 - DNA, 515 bp, Cannabis indica
aggcattactttataacaatacagacctcaatctgtaatgaacaaggtaagttcttgatctggctcatacatcgggatttgattatatcccgattatgcgtccatgaagctgagaagttcatgacctgcagtggcatcaacaagttggtcaatgctaggaaacgaaaagctatctttgggacaagctttatttaagtctgtaaagtcaacacatgtgcgccatgagccattaggcttgggcacaagtacaggatttgctaaccaatcggggtagaacgattcctgtataaagtcgcatgcaaggaggcggttgacttcttctttgagcgtctggtaccttgcggggtccattttgtggcgcttctttcgaacacctcgcgcttcggggtcaatgttcaagcgatgacacatggcctgtggagatattccgaccatagctgaatgttctaagcgaaaacatcaagattttgtttgagaaaggtcgttagtttttctcgctgctgaaaagtcaattt

SEQ ID NO: 369850 - DNA, 498 bp, Cannabis indica
ggaaaccctaggcctagaaacttttgcgattctttttgtcatgtcttcatgcaattttacagtccataatgcttgttttctaaactgcgtaacgtctgtctttcatcttgcttattctaagcttcatgaactttttttgccctaacttgagaaaatttctgactacttgagttctgaattttctttgaacattcttattctttaatctgttgagtactcctggtcggcatatttgcttgtatatcgttcgatattccgaccaaacactcatcttgtatgttgtcttttgtagatgagctcaagtgagtcttggaagaacggacaacggatcgaccaggacctgcttcaacttttgcacgaggatcatcatcgtcttcgttctagcccacgttcctctagtgaagaacattctccaaaccctgtacccagccatagaatgatggctcgtacaaagaaaacaacgcatctagctgacgcatctgaccctcaagtggctcg

SEQ ID NO: 369851 - DNA, 1116 bp, Cannabis indica
ggcataaaacccaacaactttttacctcattatttttcttaaggactttactcactcttgcatccttttccagcttgctgcagaggccgaccgcctttccgagaacctaatcaatcatggctttgtcttgtccaaatttgggggcatagacgaagtcatgaagaccctacaggatctgtctgctgaaaggcggatgtaccaagaggatgctgagcggcgggaggcccttgccaaggccaagttcgaggaagaggccaggaggaggggatgatccgggaggagacccttccgagggacaagctggaggccaagcaccaggaggagctgagggcggagggcgaggctgtcgccaaggccagacgcgagctccgggaggctagggaagccttagatgaaatggccgccaaggtgaagtccttagaggaagtgcaccaggcggacttggagtctagggcaaacttggccgtggagctgaaggagctcaaggacttcaaagaccaagccttgaagaaggctaagaaagatgagctcgtttctcccgtctcttgcagccggtgcatcaagcgctttgacgatggcgtttacatggcctggtcaacaaatggccagaatatcaagcttgacttctaccccaaacccgcggagatgattgctaaattccgggagaagaagaagaagcttaacgccatgctggaagcgcgcattggtccttgccttcctcctcgaattgactaggccgttatgacccagatttttcttattttttttttttttatttacagccaattctcttacatttaagataatttttatttatatagctatttttctttctaaggggaaacaatggttaaggcctatccccgggccctttgtatatatttataattattttttgacctgcccttagggctagaattttttatatatataatcttatttgatgcacatatctttcttttggacctgccctttgggtcaggatgtttatatatatgcttttttcttttttgtgcatactttttttttgacatgccctttgggttaggatgttttacttggcctgttttttgtctgtctgtgtggtgtgccttagtaccccctgagtggcataga

SEQ ID NO: 369852 - DNA, 547 bp, Cannabis indica
tattttattgtgaaactagtttttatttaatttatatttcagtgttttaggaactgatttcttctttgtttttaattgtaattgatttgagttattgcgtgttacttgtttgtattcattatgttatataacccgttctattttagttataaccggtttgagttattttgtgttatttatttttattcatgataacactattatagatccggttctattttaattataactggtttaagttattttatgttatatatatttgattataacgagttttataacataatagaaccagttatatttttagttatatctaagacaattaattctggtgacttttccagtgactttgccggcgatagtgacttttccggcgacgttgactttttcaatgacagtgattttccggcgacttttcggtgccaatgactttcccggcaactttttcggtgtcgatgacttttccagcaaaacttattgttgttttacaaatatgagatttctatttttttttacaaaaatatggcataagaaaaactcatataaa

SEQ ID NO: 369853 - DNA, 529 bp, Cannabis indica
aagtgtttcaactctcacacttatacctaagaatcttcttcatctatagaaaaccctcttacaaagctcaaacccaatctctctcttttctatgcacttctctctctacacctctcaatcttttctctgttaaactctcaatttcatctgaactaatttctcaaactcgtgtcgaaataacaagtcattactaataacctgatcaaggtggcatttgtagcactaaggcaagtctagtaacctgatttggtgtagtctaagagtataaaataccacccttatcgactaacatatagttcttctttttgatcttaagattacttaatttttttccaatgttcctttcctgaattaatctgatacccattcattactccaactcaactgcaggtgtctggtctaatgcatagcaaagcatatctgagagctctccttgttgattcgaaggaattatttccttggactttatgttttctagaatagatggcacttttccttagataaataaataaaatctatgtctagaagt

SEQ ID NO: 369854 - DNA, 610 bp, Cannabis indica
aaaaaatatgtccttaagcacaatacgacatgagaagtatggaatgtatgacatgtaagcacgaatagactagctcaaagagcacgacacgtgacaagtccgaaaagtacaacacgacatattaaaaaactttataatttatgattattaataataataagatataaatttattaataataaatacgttaaaataataataaaatttaaatataatactgatattataattatacacttaaaactatggaaacatgtaaaaactaagattatatattaatttatttataagacgtgatataaaaatttgagtatttataagaaaacattcaaattttattaataattatttttataacactacaacagttttttatattaccggcggaggcatccgctggtattaataggccaaaccgccggtaataattaataccagcggaatttgccggtaattatctgccgggaataattggtcactattagtggttattagcgacgaaaatggtattccgccggtaataatattaataccagcggattaatagcggcggggtccggccggtattaatgtctgcacttttacacgcagatgcattataccgcgcgga

SEQ ID NO: 369855 - DNA, 503 bp, Cannabis indica
caccaaaatctcaatttcactttgaaaaaccaaactttgcatagaaaaaccataactataatcaatctaaccatcaagcaccacaagtagcttaattaacctcaaattatcatgctttaacttctaaaaataatcatcaaaatccagcatcaagaacaacctaaaactaagcatgcaacctaccatttctcttcaaaaattcaagaaaacataaaagaaagatgtagaaaacataccaacaacttatgaacacttaatcttgctgagggcttgaaatccaagaggaaaatcctcctttcttgctgctcaaagggggccgaatagagagaggaaaagagagagagttttccaacctttttctaatttttctaagttttggaaaaaaaatgaaagaaatgccacttaacccacttatttcagccaaaacttaataaaataaaacacatattactcaattattaagccacaaaaagacaaactaacaatggggcaaaatgaccatt

SEQ ID NO: 369856 - DNA, 1095 bp, Cannabis indica
aactttatgagctcatttcacaatttaaatccactttgatcactttatttttgctatgacaagaaaaaataacaaaaaggtataactctcatagttcatcttttcttatctcataaaatgagatgattatcaccaaaataaatttatttccaagtaattatctttaatcacaatataatctcaaagtaataataatagaatgaacacatttttcttatcatcatctcaattatcataccatatagtacatatattaaatatgataatttatatacatatattaatatacaaaattaatataaaactcccataaaatttgaactctcaaataattttatgttgattaatattacatgtatgatattatactatcataaataacatacacaaaatatcaatattaatttcacaattaaatatatatatatatgggtgcactcttaatgagtattactcatgaatggataaaattagaaaaaattgagtttttatgcttaattttttttttatctaattagaaaaatgtctcacttttacatcatatgggctaagattgttccatcggttgaaaaaaaaattaaaaaagaaagtttttagcaaaaaaataaaataaataagtaaaagttgagtttcacttaaatatttttatgtgaacatatttttgatataatataaaaaagagatatttttttatatttttttttaattaagtagttatactaagcatagaaatttaaatttctcttttattattcgttattagatcaaaatttgaagatttaatatttttaaaattaatatttatagttaaatttgtttagtaaccattcatggtaatactcattaagaaatgatccatatatatatattacatatttcatatatataacatacaaatacattaatatacatatagacaatatttagaaatcactattttttatatatttattctcacaaatatatatatatatatataaaaatataaatatatcttatgctcttcatataatgtacatataaacttacatatatcacatgtgatataatatatctctctcacatatatacatatactaaatatgttataatctc

SEQ ID NO: 369857 - DNA, 1139 bp, Cannabis indica
tatattcatatttatatatatacacttttatattcatattttataatctatatgttcatatatatatataacattcatatttatattcatatactgtgtatatacatataattttcatatatatatatgtttatatataatactcaatactttcatatttttattgcataaaattttatgtaatactctcttccatacattaatgatgattttatgcagtatatacattgtatacgagtatatatatacatgaaagttttatttttcggtctgtaatttttccgtttttattttcggtatttattttgaatcctctattcattactatattcatataatattttagatcgattttatgaataaaaaggatttaaaaaccatttaaaaactgaaaaattctcttaagaacacaatcggacccgaaagaatttttatgaaattaaagtctacattttacgtgttttcgatgcttgaaatcaatatggatctctaaatttatttatttagatcattttgaaattggtttcatgaattttggttgtcagaattgtatattacgattgggtcttcagtcgggtccgtgtgacccgcgttgcatgaaaacgggtctaaacgacccattatagaggttgaagacaaagaaaatgacatgtcgttttcatacattcccaaaaacgacacgtcggtgtcgttttcagaactaatttttttttttaaaaaaaaggaaaattaagaaaaatttaagaaaattccaaaattttattattttgatttatttttggaattttattttatttccttatttttgttgatttagtcaattaaattacatttgtttaaactttccattcttatttaacatatatcttcatatattatatgttatttagtaataaattattatggaaagtttttaatttggtaaattaattacatgctttatttttacatgtaattacaataattgtgatattttaagaatgtgaatatttaattattctacaattaagtgcgcaattattatatttatttaccaattaagtaatttattgattaaattaattgataatctgccattaagtatattctttaattttgcatttaattcatttcatataattaattgtactaatttgtat

SEQ ID NO: 369858 - DNA, 435 bp, Cannabis indica
taaatggttagaatttgaaaataacatttttgagaaaataaagaaaatttgtcaaaactggaaaaattcccaagtggggctcatcactatggccagtcacttaagtggtattttccacttatttttcttattattttaatgcctaataaatcctaacctaaaccctaggtggttgcttataaataaactagtgatggctcacacttaaagaggatgaaaattcttgccttcagtaaaaaactttcttgagccatcctccttctatttttcgaaccagccacttctcttcctttttcatactgttttcataccttgagtgatagagtgagtgcccccacacatcgagtggtatctcaatcatagtgtgtaaggctatgaagaatccggaatcaagagaaggacattcgggcttagatactctgctacagacaggat

SEQ ID NO: 369859 - DNA, 540 bp, Cannabis indica
ctctcgcataaacgagacaatgtatcagtttgttgaaaaccttggaaaataagaatatgtttcatttttggtatttttgtaaatatatttgttatacttgttatttcctgaatttgtgtatgaatttattgaaccaaatgatttacttctgtttattgatatttgtagtgtcaaaatgaacaacccactcctaataaatgcctttgcaaataaactctgtaatgtgaaaatgctccatagaaagagcattacgtcatacttgttaatgatgaatctgaaattccaaaaagcgaacttgcttagaattgaattatcaagagaacgattggttcagttcattcttaatagtcttcttcctgagtataatggatttgttgtaccttatatgatcaacaattttaactcttccgacatggataagctagaagcagaattgcgagcttatgaacggaacttgattgcaatgccaccccccagatttgcaaacttgtgtaaagaggaaaagaattaaggatgaagcttctaacatgttgctgcttc

SEQ ID NO: 369860 - DNA, 560 bp, Cannabis indica
aatttcgtctcgaaatttcaaagtacaacctcaagttgaaaattaaacaactgaggatacttcatatacatctcagaatctaactcccaagtagcctcgtcttctatgtggttttttcataagaccttgactactagaatctctctgttccttaacacttttagctctctcgctaagattttgataggttgttcttcataagtcacatcttcctgaagagggatagcctcataatcaatacatgtgacagatctggagtacacatcctcaacatagacacattatgaacatgtcccaactgtcctggtaagtttaatcagtaagcgacctttttaatcctctcaagaacgtcaaaaggtccaatatacctcgggcctagcttaccattagcccccaaatctcattacgccacgcataagagtaactttcaaaaagacacaatcaccaacaccaaactcaacttcctgtcgatggagattggcatagcttttttgacgactctaaacaaccttaagtatttcttaaatttccttaatctttttagtggtactagtgataat

SEQ ID NO: 369861 - DNA, 798 bp, Cannabis indica
aaaggaacatttttttgggtttaacttcatgttatacttctttaatattttgaagcattccgcgaggtctgtggtatgatccctacattttgttgattttaccaacatatcatcgacataaacttccatgttcttccagatctagtttgtgaatatttcgttcaccaatcgctgatacgttgccccaacattcttcagcccaaacggcatgacttcataacagcagagtcctatgttggttacaaagcttgtatgttcttgatctgggacatgcatttttatcttgttatatccaaaatatgcatccataaatgacataagctcgtgcccagtagttgcatccactaactggtcgatcttgggtagtggaaaacaatcttttgggcatgccttatttatataagaaaaatcaatacaagttctccaagttctgttaggcttagggacacaaacaagattagctatccacgagggataaaacacctcacgtgtaaagtcattgactaataacttgtccacttcctgttttattgtcccttgtctctcagaatccaagggtctccttttctgtctcttcgctaggtagtttggatcaacatttaaatgatggcagataatgttagggtcgatccctatcatatctccatcgctccaagtgaattgatcgtggttcgcccttaagaaacttattagctgctatttgagctgctcgtccagggttcttcccaatgtatacacattttgtgggatttcctgggtcgagaataacttctttcaactcttcaattggttttaata

SEQ ID NO: 369862 - DNA, 1343 bp, Cannabis indica
aattacattgtattttaaaatacaaggtatgtttggatgtcaagtagtgattacatgtgaattcctaatatcatgtttgacatgatagttagtaattacacaataaattaattaaacacttttttgtcacaactttttcaaaaaatagattttaatttttctaaaaattgtagcaaacgggatataaattatatatatatattaatcatgcacatattaacctaaaattaaccaaatcattaaccaatttataaaatgtttacaataatataaatatttatttgtggtatttgatattgcttatgtataggttaaagttttagttaacttatttcattgatataggtgttaaaatatatgtttaaataatatgtttgaacatatattttttttaattaaaaaaaaataatgaattaaaatatgttatatatgttcaaaatataaatgtgttgtgtatgagtagaaaaacgacaatccaaatatgtcatatttaaatattgtgttgtatgtatggtgagttatgtaaaaaaatcgctctgtagaagttattccttacgattgttaacgatgtttgcgtccggcttcgtccagtcctttcgtccggtagaatattggtgggcgtccaccccatttcctgtgcccagtgatggttctttcttcttctccaacctcattgtttaccctaggctcttctatgcatttttgactggtgtgggaaatggccttctctggctctgcaatcttcacgctcaggggcatcaaaactgtataaactctcagtttaatgctaccaaaggaggattttctctttccattaatttgcagttgcatagatctaagacaatggggtggttccagatctgtgtaattgaagaatattctctaatgtttttatcagattcgatcctaaatggcctcaatgcaattggattcatgaagatggtgttggtacaggaaccatggcattattataatcaatacattgttttgtgttcactaggtgctcgaccaaatgccccaatgaaatatatgactcaatttactctctggattcaaccacatttaccattaataaaatggtgcactccaccctcaggtcgactaaaagttacaactaattaatggaatttttctcttccaatagttggtgttcgggcgataagaagaactttgcacggaatgtactttcaggtcttttcctgcctactattggctttttcaagactaaggaattggaaattattatagcctcatttggaacaatctggagattattttgacattgattcatgaagttcaaggccatactcatcccaatgatttagtctagttatttaaatctt

SEQ ID NO: 369863 - DNA, 428 bp, Cannabis indica
catgagttgggtgaggccaacaagaagccgtttgccgctgagaagaagatcactgtgcagaccaaggacctccaggctgctgatctctttgaggaaaccatcaagaccttatctgctaaggttgatcgtcttcaggatgataggacttctccgcagtaggtccttcttcggctgaaggaagataaggacgctcaggcagccgaggcagaccacttgaaggaaaaagtcaatgctttggagactgtcggcctcgagctcctctttgatttttggaaggctaatccccaggccaacttcgactacttggacgacgccaaggacatgtacctcgagtactgcgcggcccaaattgcctatggtgggaaagaggcggctgcttcatcttacgaccaagcttctgaccaggctgttgatacttctcttgctcg

SEQ ID NO: 369864 - DNA, 801 bp, Cannabis indica
  modified_base (489)..(489): a, c, t, g, unknown or other
tttttaaaatttattttcttaatcttaacaattctctctcacaaaaatataaggccatgaaacaacaaattatatatatgctgtgaatttttcctccaaagacacactattttgtacaccattttgagtttaatgctacagtgcacaataacattcgtcttttcgttttttttttttaattattgtttatatatatttatattattagatgtatttataaaattaaaaatttattttggaaaattctacaatacatttttctaaaaatgatgtattcctatcggtttcgacgtccgactaactttttaattttatttttttatagtcgtgtatattatagttatttaagacattctgcaaatatttaagaaatttagaaaaatttaacacgctgaaaacattaatgtacctatgcactgatgtactcctacctatttcggcattttttttattttcacacttcaaaatagttatttttttttttttttntttttttttgcatttttacagaattacatatagaaactcatatagcaactaacggaacaacttaaatcgtaactaaaatctacatagcaacctacatagaaattaccggagtaacccaagccgtaaatttaaaaaataatatatgaagtaattatttataaaaataacacttttttggactccttttcttatggaataattacataagacactattttttgttaaaatatttacattttacgtttcaaagaatattttttacatttttacgatattccaaaaataacacgaaacaacataaaatcaacaaga

SEQ ID NO: 369865 - DNA, 725 bp, Cannabis indica
aaacataaaacatactttagcttgccgtgaagattttcttggtcgacctttagccttgatagaagtacaaaggaaactttggattctgatttactttccatttgataaagaatcaaagtacaaaaaaaatattagacacaaagaacttatcaatcatgataataaacataaaaaccagtttcacaaaaaaccgaaacaaatcaaaccaacaaaaccgaaaataacacatgatttgggcaaaaaacaaaatgataaaataacaaacattaaaaccaatttgaaaaacaacctaaaaaatgaaaatcataaatatgggctaaagagggatactaataataaagtctacaaatgaaacttgaatgaaaaattaaaataaaaataacacataatgaaaatgcccaaaaataaacaaacaatgaacacaaaaaaattctaaaaatcgaaactacctaaatcaacaaataaaacacaaattaaaaaccagtttctagtacttactaaaagtttatacctaataccaacacaaatcatacccaaaacaaaaaaagttaaaaaagacaacaacaacccgatgcttaacaaaaattaaaaaattaaaactaaacaacaaaatactaaaacataaaaccaaacccaaaacaaaaaatactcaaaaaattcattatgaataaatacaacaacacacaactcacttcggatgaagcaattttttttttttaaaaaaa

SEQ ID NO: 369866 - DNA, 922 bp, Cannabis indica
ttgtgaggttattttaaatactattcatccatttagagtcttttggagggattttaacatattttggtggaaaataatggaagtcggcgagctcgattgtacaaggaggaatttaattgcgaattcggacgaacttaaatacagaattggacttggagctcaacatgaaagttttagatctcgttcttagctttccagaacatcttaaatcgtccaattccgagtaatattgagagagttatggccaaaatactatcagtcgtcgcagcaggaaatttctaaaaaaaaagatagcgaaaataaagataaattttcaagaagagttgcgatttttatcttttgtttaaaagatgagttatctttatcagagatatttcctaatactattataaatagaatcctaattctaagaggatttatctatccactataaatagaatcccaattctaataggattcaactaactttctcattactataaataagagctcttagactacaaatagaggagaatgaaaaaaattagagaggagaatccaaaaactacaaattaaatcttatgacttttattaatgtctagttctgagtagttttcttttagttaagggttatttcaaaacccgaaacatgaattcttaattttattattgaatgttaatttttagtttccattatatcaaattgcttctattcttctatgttcaatgtcatgattattgttttaatcttatttagatggccactaaattaggttttactttaatctaccgtcatcttaggattactattcacctaatagtctaggattctaagtgtttgtgacaaattgcaatttttatttgtgatgaagaatagaacctaggttaaatgaattatatgcttcattgatttgttgcctagattagtctatctccataaatc

SEQ ID NO: 369867 - DNA, 497 bp, Cannabis indica
aatataatgactccttgcgttcagatctctagcccttgattcctttctatagcataacataatcaagatctgaagttggatctatttctctccttcttgttgattggattctacacaatcttccacactatgattgagataccacttgatgtgtgtgggcactactctatcactagggtaaatctaacttgaagagaagaaaagagaagagagggtggagacttggaggctcaggtttttctctgaaaaataataagatgcaagtccatagtttcctgaagccatcactttctatttatagaataccacaaagggttaggtttgaattgtatggcattaaaataatgaaaaaatataaatggtaaaacactttgcatagtggccggccatgatatggataataggcctcacattacaattttaccattttgtcatttttcaatctcttaattaataaataaatctagaatctcttttctttacaatttcacccttgc

SEQ ID NO: 369868 - DNA, 661 bp, Cannabis indica
tataattgagagtgcaactccaaataatagtggtgcaaggaggcattaataagttaggaaatttacttggtaaatcctagatccgcttattgaaagctcggttatataggcccatggtcctcatactagttgagacaatactgcttgtaagactcagttaaatgattttaatcaattaattataattctaaaattagactatgtcttatttatgaattttcactaagttatggcttaattgtgaagaaaagagattctagggtttatttgttaattaagagactttaataagtcgaattgataaatatattaaatggtaattttatttgataattaattttaattattaaataaatagtttttgcattcaagtagttgaattggaaaatatgacatttatgaaagaatatgataaatagttaacaaatagcgaaattgcaagtggtaggcccacatcctatggctgaccactaaagcatatttttaccatttatttatcaattttctaatgccaaataattcaaacataaacctagaaggattcctataaatagatagtgatagactcagagctaacagtctaagttacactagcctttagtcaaatttgagccttctctttctatttgtaaatttttgaatccttctctctctctttctc

SEQ ID NO: 369869 - DNA, 575 bp, Cannabis indica
ccttgattcacggggtgtcacgcacattaggacaaggatgtccgagatttctcgaatagggtttttgtttgaacctatgtccgcgcgcgtaatggctgcaagcagcctcttgagccgagttttctcgactatgcatctctgagcaccaaatgcaaatttttaccatttttttttcattttttcatggaattaatttcgaactttttgtgtaattttgtatttagatttttatttttcaattctcaaatctaattatcagaataaaattaattaattttagatattagtatattttcaacatgaaaaatagataaaatctaattttttgcttaattggttatcttattttttaaaatttaattattttatcttatttttaaatataaggtcagataatttatattttgcattatttaattaattttataaaatgactttttttgaaatttaaaataagatatatttttaaaaaaatctagaaaattttaaaaatctaaccagatattttgttaactttcaaatttttgttattttatttaaattaaattataaaatgagataaatgatatttattt

SEQ ID NO: 369870 - DNA, 794 bp, Cannabis indica
agtatttgtatgttatattatatattatgaagaaaagaaataaaattaaaattaaaagaattgaataatagtttagtgttcggtatatttatcttgcactatgatatattatttttatgtgtaataatatactaaaaaaatgaaagaaaatatattagtttaatattgtggtatattgtctaaatgtactatggtatataatgaacgaaagaggggaaaacatgaattattagtttaagtacgaggtatagttatatttgattgagatatagtgattttatgctcattggtatttcgtaaatgaaagaaacaaaaaaaaaaaaacttagtggaatattaaattaagttttttgtttaattttttttctactatgctattgctggtggtatattaattttttttttaccatgcaaacaatagaacaaattgaaaaaaatggagttgagcttcatctatataaccaagggcattttaggtattaacatttataaaaggtcatttactttatttttttttttaaaaaaagggacattaactttcatcattgtgagatttaaggctatttgttacaattttcctagtctatatatagaaaacagactggcccaaataaagcacaacatgaatccgagcacggtatgaaattattgggcttacgggccgtgtcaggcttgtcctataaattgttagcatggcatgacacgacttatattttttatagggaaatttacaaaaatattggaatttgggttaacttttacaaaaatactgtcacacggaaaagtttttaaaa

SEQ ID NO: 369871 - DNA, 699 bp, Cannabis indica
gatgatttctcagtctttggttcgtcattcgatcactgccttgagaattcggagaaggtgttaatcagatgcgaaaagtcaaacttggtcctaaactgggaaaagtgtcactttatggtaacagaagggatagttttgggacacaagatctcaaaagcaggtattgaggtggacaaagcaaaggtgtcaacaatagagaattttcctcctccagtttctgttaaaggagtaaagagtttcttgggtcatgctggtttctaccgaagatttattaaagacttcttaaagatctcgaaaccattgtccaatttacttgttaatggcgttccttttgagtttggggaagaatgtttgaaggcattccaagttcttaaggagaaattgatttcagcaccaatagtcacttcaccaaattgggagttgcccttcgaattgatgtgtgatgcaagtgactacgcaatcggagcggtcttgggtcaacaggttgatagggtgtttcatacaatctactatgctagtagaaccctgaatgatgctcaactaaattatgccacgacagagaaagagatgctggcaattgtgtttgcttgtgataagtttcgcccctatctaattgggaataaggtgatagtttacacggaccacactcagcaattaagtaccttatgaccaagaaggatgcaaagccaaggttgattc

SEQ ID NO: 369872 - DNA, 1102 bp, Cannabis indica
agtgtttcagtgtgctttgtcctcactcgcacactttttgggaaatctttctaagaggtcacccatcctcaaattaccccaggttaagcacgcttaaccatggagttctttcgtgatgggctaccgaaaaataagatgcaccttgttgatatgggtagtaccaagtaatccatttaacccctcttaaactatgtagtcccatacttacgcagtctcagaataatcacacatgaccttccccaggcaatctgggattgcacagcttacccgatatttccccttatagatcacgagactactaactatcacaatcaccccgcttacggggttcgatgtcctcgtcgactacacttctggctaggtcaaggctctaataccttttgtaacatcctcgcttcaacagtgcagtcccatacctacacagtctgagaatcatcacacaccttccccaggcgatgtgggattgcacattggctaccagtatttccccttacagatcacgagactactgattgtcacaatcacccccttacggagtctgacgtcctcgccgaccgcacttctagctgggttaaggctctgataccatttgtaacatccccgcttcaagcctctattaggtccttacacccatagaataatggctcttatacacaagtatgtcactccgactacttcctagaatgaagctgaccttacagaccaacatgagtgtttttagcgtgctttgtcctcactcgtatgcttcttgagaaaacttcctaggatgtcacccatcttcaaattaccccaggtcaagcacgtttaactgtggagttattttgtgatgggctgccaaaaaacaagatgcacctcattaatataggtagttctaatcaatccatttaagtcctcttcaactatgtagtcccatacctacacagtcttaaaatcatttcacttgaccttctccaggcggtgtgggattgcacagcttacctggtattttcccttatggatcatgggactactgactgttacaatcaccccccttacagggttcgacatcctcattgaccactgtaaagcccgcttagttaatttggaaattagcagttgttta

SEQ ID NO: 369873 - DNA, 611 bp, Cannabis indica
ggtacaaaaaataggataatattttttccccaagtctgcgtgggaccttcctagtcgcacgtggacttcactgagactagagtcttctcgggatgggtgttgcgtgtcctggatgtcaaatgacgaaacgatgtgaccctaactagaggtctcttaaatttctatccatttaatgctaattgacggttttacctcaaattacgttctatgcttgcgcatgtttaacggttacactccctgtaatgagtatgtaacgtatacttttggggggaaattcaagaaattcgaattttgaattaattaattcactttttagattgcttataaataggattaaggatctcaggcaatccttttagccattttaactcttaaacaccagagcaaaaaaaaaaactttagccaaatttcctcccaagtccttcaaggaattcacaggaaaccctctaacgataccatctgagcggaggaagaacgcttcaaatcagtgagtttgttcttcatttctttcttgtacatatttgcaatgaaatgcatgcccaaattttagatttttgctatgaatctcgcatgttcttgaactgttctaggttaaccatagaatacctagg

SEQ ID NO: 369874 - DNA, 434 bp, Cannabis indica
gtgtaataaaatatttgaatcttatttagaattttttaaaaatttagagataatcttaaatagttataacatacatgatcatttaaataatagaataaaatatttttcttaataccaaaatagatgaaagaattactagaacaacttttttaaagtgttctattatgagattaggtaggcacattaactgtaaaataaaaaaataaaaaaattgatgatatattttaaaatagagtaaaatgtgagtggtaatatatatacatataaatataaatacacatgtcattattatttatatatatataatagtttgtttagtcctgtgaaatcctatacgccaagcatgataaatcctccaagtgaagatttcttatgaatttgactacctattcgaatcataatatattatatatatatatataatataaataaaa

SEQ ID NO: 369875 - DNA, 575 bp, Cannabis indica
gaaaattagaataataaatgataaagttatatattgttttgacttattataaattattttttcatataaggataactgtaaatattacaattaacgtactttttattattaataccaatgtacatatcataattttatatacacaagtatattttactaactaaatacaataacacgaagattattttaataaaacaaatcattcatataatcatacctttagttacagaaatctaaaaaaaaccaagaaacctaaatcttaaataaaactaacatttacgtggctcggcacgtaacattcacctagtacaattataaacaaattgtagcaagagaaagaagaagaatcactatgttgagtcattataaagagtttaaaagatactacactttattttacaaataataaatcaagttcaaaaagatattataagaataaagattgaaacacacacttctcataatatttaagagatttctcataactatacactatttataattggaaaattttaccacacacaccctttttttatgcactatatatctttgttttgatatttaacatacttttt

SEQ ID NO: 369876 - DNA, 593 bp, Cannabis indica
tgcagaattttaatacaaaaccaagtaaaaaaccttgtgttcatatattatttttctatagcttttattttttctgtgttgaattatcatcgtgaggctcaagtttggttgacgaaaatctgcgttaacagtttggtgcttccattgagagcctctgtgaaaaagctcaaaaaaagcctttccttcttttaaagaaaaaccttctcctttgtggctgaagatctagagaatattaacaccccacatgaggaaactaaccgtcatttttgaaaagagcccatgggctctagaagatctactaatctgcagtccagaaggatcacctgttctaggagaactcaacatgatgtttgtcctagtacgcggacaacgcgctcgaggagaactcagcgtgggaatggtcagaatcccagaacgagggatgaagaactcaattgtggaggtgcccaatctgtgggagaaagaacttatgaaatggtaagtcattggttgagacgccgactggaagaggcgcagcatcgaaacgctgagttagaataagaggtggctttgcccaaggtatcacacggaacgaacactcaaaatcaacttga

SEQ ID NO: 369877 - DNA, 580 bp, Cannabis indica
ttcgaattgctactattctacgggaccacacacagagaatcaaatttattagaagaatctcaagtgattacaaaactaaatttacttatacaaataaagactccctctttgaatttaccgcaactgttataatctatcctcctaatcaaatttttgaagtatcgagatcttgaacttccttcaaatcgtagcacttgcacacttcctctcgaagagtgactcacttgtacttttcctcctgaaaaatgactcacgaataagtcttctcccgaggcttgatgaatgatatccaatgtgttcaacctgtacaatttcaacaagaaacaatacagaaataagcaagagcaaattaataagatgtaaagaccgcttagtttaaatttagaaattagcagataataagggttaaataagaaaaataattaatgaaaattaaaataattatttatgttgatttatttgaattcagaatgcattttataagtcatatagtgaaatttcatatctttgcatgttcaatgctcggcaacattggaacgcagtgtatggctcagtagaatcacatcttggtattttatat

SEQ ID NO: 369878 - DNA, 442 bp, Cannabis indica
agttatgattccaagtccatgtcctagttccagtcccggtcaacttccagttttggttccaattttgggtcacaaggtacaagttcgggtccattttttggtttgggactgggttcaggtgcgggtgtgggttcgggttcttgtcagcgttcgggtccggggctgggtcccaaatctagacaccgactacgggtttcgtccaagccctgagtccatatccagatcctaatctcggctcccagtctggttccatatttggtaccaggtgtcgagctgagtcctaggcaagttcagttctgggtcgggtactaggtctcagtcctagttctgtttcccaggtgccaatcctaattcttggtccaggtcccagttatgtgtaggtttgtgtcccagtctaaattcgggttcgagtcatagtctcggttcgggtttaggtctctgt

SEQ ID NO: 369879 - DNA, 507 bp, Cannabis indica
cctcctgagttcttggggaggcacactttcttccaagagggaatgcgataattgcttctgtttcccttggatccccaaagaaagtctctacaacatttgtcaatagccgctatgatttttcgaggaagcaagaataaacccatccaatagttcctgattcctagaagaattgaatggatcaattgagctcttccggaaaaggagaggttcctactagcccaagtgtgtaaattcttgtggagtttatcaaggatgataccacaatcatcagatcgccatttggtaggtcttagattcacacctaagtacttcaaaggtaaagaaccctcttccatttgtaagatgttggcaagtctctatctacaagaagtaggaatacccccaaagaacaccgttgatttggctttgttggcaattagacctgttgcttcactaaaccgttggaaggcctctttcactatctcaacatatttatcattgcccttgcaaaagagaataagatcgtct

SEQ ID NO: 369880 - DNA, 677 bp, Cannabis indica
tgaattttccccaaccggtagaccggttgcccaaccggaattccggttctgggaattttcgaaacccatccggaattccggatgcacaaccggaattccggttcctcgcaggcagaaattcaaaatttcatacaatgctcaaatctaatccaaacaacctcaaaccttccagacctgttctataggtcccaaataacatttctaaagcatcaaactcacccagaaagcacataaacaaaaagtgccattaaagcccaagctttgagttccaaaactcaaacttggttaatatcaactaacatgcatccaaaccatgattcaaactcatattcaagcatataaaaactgcagaaactaaaacctaactcatgcaacaactacagcaacaattcacacaaattcactttgaaaactcaagctttttaacaagaaatctatccaactagagcaagaataactagcatgcaattcaacctaattaaacatacttaaatcaacattttaaacatggaaacaacaacaacaattaacagcagcaacatcatcaaaatcatccatgcattactcatcttttccatcaaaatttcaagaaaacttaaaagggaagctagagaaaacataccaacaacaagaggttaaaatctatccaaaaaccagcttgaaattcaagaggaaat

SEQ ID NO: 369881 - DNA, 760 bp, Cannabis indica
cattgatgaaatctgtcgtatctcttgatacgtttggctgtctctctggttttttgagagtttgttctgagtgtttgtgttgttttgtcttgtttctgctggtggttagtcccatgatggcatctagtagcagtgaggggagagttttagaggtagagaaagaaaccattcctctggaagaggaagagacggaagtattacgactcccaggcagcagagaagaagtggcgattgacaccagatggtgtctggtgggaaagcttttaacaggtagagtttcagatttcaatgtgtttcaaaacatgatggccttcctttggcagccggggatgggaatgtatgttaaggaactcaacccgaacttatttctcatccaatttcaccatgagattgatatacaaagggtaattgatgggagtccgtggacctacgatcggaagccttttatttttacgaggttgaaggaaggagataacccaaggcttgttgaaattaacaaccttgatatgtgggttcaaatacacaacttacaaacgggtaacatgacgcttagtgttgtgatggctcttggaaattacattggtactttcattgaatcggatcctaataatttcgtgggcatttggcgggattaccttcgcgtgagagtccgaataaatgttgacaagcctattaaacggcgaatgaagataagcatcgataatctctcttggtactgggctaatttcaagtatgaaaaaatcccaaccttttgtttcat

SEQ ID NO: 369882 - DNA, 315 bp, Cannabis indica
ttctctttcaaatatttatttaacgaatatttttaaattattgacaaatattacttaatatttactatatcaatacgactgggtttttgaatcattaaatctaaaaaataagatatgatttttactgttgtacatttattacatcaatacgattgggtttatgctaatacatttttttatttctttacaaagttgtagcttcaaactagtatgtttgacgatgtggggacataaagtctacgatgaatgcttacaaatagcagaagtaatcgaagacaggcccataatattgggatcaaaactaattgttcaaac

SEQ ID NO: 369883 - DNA, 524 bp, Cannabis indica
tttcttttccttttttcctttttttctttctctgtaaggtgaaccatggatggtacctttttttttttcttcttctttcttccttctactaatctctctctctctctctcttggcttggtgagacaccgaagtaagaccaggagcacggtgctccgaccatatgaccagtcgaaatcttcaatggagacgtttgaaatgtgaggatatttcggatcgagtactccggcggagttgaccataatatgaggttggacattgaagaacttcttagccgaatcgaagagcgatctcacttggtcaggatcaaacacgtcaacttggaccacgatggctcgaggagtggttgtggcggtggagggagaagatgagttgacgttgatctcggagactaaaagttgagcttgagcggagttggaggtgtaattgatgactagacgagctccgagtgaggctagatggagagctatgccttggccgattcctcgagaggctccggtgacaatggcagaagaagaagaagaag

SEQ ID NO: 369884 - DNA, 524 bp, Cannabis indica
ttcaaatattacaaaattaatgtacatataaatatatcttaaaaaatgataaaggaatcttatagtaatttgttgagtaatttgcagcataaatacttaagtttaactctcaattacaaataaatacctaagtttaatttttgtcagtgataatacctaagttataattctgaaatttttgtaggtacctaactgttaattgttaagtaaattgtcacgtggcaatttttgattggtccaagtcattaaatttttattttctttttttaaaaatttaatttaaatataccaataaaaaatgacacatggataataacataatatttaacggtttggtacgtatagagttccaaaaatataacttaagtattattaccgctaaaaattaaacttaagtacttatttaaaactgagatttaaacttaattatttatgcctcaaattactctaatttgtttataaaaaatctcaaaccccacatattataaagggcttttttttttcataaatgtacaacaaaaaca

SEQ ID NO: 369885 - DNA, 690 bp, Cannabis indica
tcaatggcttccagtcgatggctcaggcctgaggtaggctttcatttaggcttatttctcctttatttttttttcatctttccgataaagtctgtacttttcttttgttttcctaattagtttatgggtttggggtttttgtattttagctttacccactgttcgctgccgtcggtgtcgccgttgggttctgtgggtttcatacaactactacataaataagaacattacattttaattaccataagtaactaatttgtgtttttttttatgtatgttctatttgaattattcaccaatgaatctcctttttgtattttttaaaaaaagtttttttggttaacaccgataattatttgagctcaaaaattatatcaccgcaatctacttttcaagaggatcgttttaacatatgggaaatatatatttttttatcgttgttggaaaaaataattaaatcaaaagtaactttttattaattttttcctttttttgagaaaaaaccttttagtttctttactagaaaattaaatttcaaatacgaactatttctaaaataacttataataatttaattttttttaaacatgacctcttctatactatataggatgtgtagtgttactcatttaaagtaaatttatttagatactaaaaaacttttaagtatgaaatattataatatttatt

SEQ ID NO: 369886 - DNA, 793 bp, Cannabis indica
aaagtattgataataagattgagcgtagaatttcaattaattagaggtcattcttattattttttattattaattaacgttatgggtgtaataattttaaattataataagttttagtaaaaatatttcaataatttaagtacaaaaaaattaatttctaaaagatttttatttagtaaaaaattgtataatattaattaataattattagtaatttaattataaatataactaatttcaattaagattttataacggaataaagtaccatgttacaagttttttatttatttatttttatttttatttttaaaataaatttaacatgatagttactgtaaatattgaaatctcctccatatttataaatatatagagtaaaaaatgttgaaataatattaaaaaaacaattttagtgaaattacattgctatatatatatttaaatatatatgtaaagtaaaaaatatatatatttttaagaaaacaactccatgctctaattcatgtgtggatctacctatgtgtagcacgggtttcacttagttttagagagtcccacattgttaatgtgtagaaagataatagaatatataagaggaaggagctactcctccgattgccaatttatttaaagatcgaacctaattcatcttatccccaaattttaacatggtatcagagcagaaaaataaacaaacaaaaaaaatctctagcaactatgcaacccaaaaaaaaaatcgatcgaaatagggccaaaaaaagccacctaaaaattcaaaaaaaactgaatc

SEQ ID NO: 369887 - DNA, 401 bp, Cannabis indica
aaatacttatctgtcgagatctaacactattatgtttgtctaatggatgaaaatcctttgggatttgtcccattaaaaacaacaagctaagttagaccaacaatgaagatttgaaatttttactataacaattaatatcaaaaaacaacataggctcaatataaattcatacacatttagaaattatcatacaaatttgaagtaagaaagaacatgtgaaaatacaaaacaaacaactcttaaataattttcaaggtttcgaacaaactgatacagtgtctcgtttaggcgagagtcaaagatatcattcagtgaatagagtagtcaactcatctaaaatggataccattctagcaagcttttattcgatcaagaatagaatccggcgttatcccgtttag

SEQ ID NO: 369888 - DNA, 756 bp, Cannabis indica
tttatgctcgatgtgctctattatatacatcccgcaatcaccactgtatgagacaataaaaaataattaaataaaagtatgcaaattaaatttaagttaattaataaaaaaatcaattgtaattaagttaccgtgatttcgtctgtcgtacaatcctcccatcgatgacttctgaactaaaatttcttacatggctctctaagacggtcaattgaggcatgacgatcatttcatgattctcgataggtcagacagcaacaaagttgggaataactcttcccacaatgtccagtgattcttcaattcattcggggaaatcgatccaaggctcgagtcaaatatgctcaacatccaacaatcaaggtctgcctctaaagtcacccaatgctttgcattgtcgaagaagaaggccatatatattctctccttatttttccaactgtccaagtattgggcatcatcccctcgaatcaaatccaatatgtcatcatcccactaaaagttagagtggtcattatccgcagcttgccaccgaccaataactcctgatgggaaaatgtgaggcatgaggacacatctatttgggtacactttcggatataagtgttttcgcttcctcatcaaatgaaatgttgcatctaaatgctaaaacatgaaaataaaatatgtaagagattaaataaaaaaaaggttagaataaagtactttaaaaaccaaagaacgtaaaaagtacttaaaaacttacatcgtctccaa

SEQ ID NO: 369889 - DNA, 583 bp, Cannabis indica
atcacaattgtataccttttgataatcaaataattaaaaattgcttctaatttagagctttagggaggaagacttagctgatagtattactatcaaattgtggtaatttctatggatcaatcaggtatgcatacttaattattatatattattattgtgttctatatggttatctacaatgtgttgtttaataaacatgttgtaaatatgagcactttataatcttttgttcctttggattagtgggagtttcttattctatcatttgagattacatttatatgtaattttattattgatgttatgaactacttggtttgatatgtgggccaataattttttggctaattagaatttttgacccttgaactttgacatgtaccaaatcatgccccctaaacttttaaggtcattaaaaataccccctgaactattgagattgttggatttaaggacttttttctaattttagtaaaaaagtactaacatagatgaaagttcaggagacgataatttagtacatgtcaaagttcgaggggcgtgatttagtagatatcaaagtctggggagcatggtttagtac

SEQ ID NO: 369890 - DNA, 672 bp, Cannabis indica
tcgatcataatcgagtcaaacgataataatcgtttcataatatttccctcgatcataatcgagtcaaacgataataatcgtttcccattatttccctcgatcataatcgagtcacaacgatgataatcgtttcctattatttccctcgatcataatcgagtcacaacaaatatatatcgggatctcgatcataatcgagaccataataatcatatcattaaccataaacagtgcttaatacttttcttacctcaagtccaaagtcaagtatgtgggccgacctgagtggaacgatgcccgacactttcgagtcctatgtcacgacaaaggtaaatcaataagggtctattccaaaacactgtctaaaacccgcataaaataacctaggattttctaccaaatcttatggtaaaaacaccctaaaataaaatatatcttttggctctaatctatgtctcatactgtagagctcgtcataagcttcgaaacggtatatagaatgtctaaaacggacacccgagtgaaaagttatggctaaaatacgaaaatcggcgattcctgaaaattgaccatccggaattccggttggtgcagccctgttccatccggaattccggttcacaacagcagaaactcgaaaatttcagctcttcaaagtcccaaaacttgctc

SEQ ID NO: 369891 - DNA, 649 bp, Cannabis indica
ttcaagagttaagagaagatttaatgacatataattagtgtattatgagtttatcatttctttatgcaacgtatatttaaataaataaatatatcttttaaatgtaaataaaatcttttgtgtccttcaatactcgaaaataaggtattatatttttaatagtagtctttttttttttatttttacacttttaaaatagttttttttttttttttgattttttacaaaattctaaatagaaattcatattgcaactagcgctgcaacctaaattgtaacaaaaaatcgtacagaaatctctattgcaactaacgctgtaaccactttaaaaacccaaactgtaaattttttataaaaagtatatgggataattcccttattaatattagtttaaacagaatttatatttttaatcttatggataattcattaaatggtaacttgtctgtcacaaactcaaagaatcgtacaataaagaaatctagacaaccaaaccataacattatcaagagaaatgactatagcaagatcatgagttatggtgttggtgatcctattataaaatttaaatccaaccacattcacattattagtataaatataatagggaaatttgaatatctatgcattaattgagggataatttttt

SEQ ID NO: 369892 - DNA, 446 bp, Cannabis indica
gtacgatcctcgggacagcagggcttttgttgtttagtcgctgggcgacaaatcttttgtaaatgaatagcaaacttttgtaattgtattttgtaaacgggatcccagaatttataagtataatatgttatgttttaattaaaaagcaaaattttaattattcacgtttttccaataacctcgttgattagcaatgagttgcacagtacgttaaaaaaaatcacgctaacacgcctatactagttagggtgttacaggcatagaatctacgtgtcccattccagaaacgcagataacagggcctaataccaccgctgatctggaacctacatgccaatgctaccaacatattttcgttcaagtgggtaatcttaaggaaatgttgacattttttctgagctaatgggtaccattttcggttggaatgttagagagagagagagaga

SEQ ID NO: 369893 - DNA, 673 bp, Cannabis indica
aattcacaacacaatcaaataaaaagaaatttacaccctataccgatttttttcattttatttcttttttactgtcacacggcaattataacaattttactgtgtatatatatatatctttttttttttgaattttaagcaagtctatttaatttagcttaataatatatatgtgtatatacataaaaaaaagttttcaaaattgattgatgattttatgttactttcatgtcagattttttatttcttttttaaacttaaatttaaaatttaagtccaacgtgagtgatcccattcttaaaaattgtaatatgtgtttatatatatatgactttttacatgtgtttagttgattgatgtgataaattattttttacttaaatttaaaattaggaataacccacccacgccccattctcaagtttatatatattttgtttctctctctttctatctctttttgtgagttgtgtctgtaaatattttttggatattggtgtttaaaataaagtccatcaaccaaggactttacataaaacccatctccattgttcactgtttcaaaaacttacaaagtttgctcctttcattcattttacttgagttttgagagagaaaaacaagatatacatagagaaagttttgtgggcgtgctaagagagagagagagaga

SEQ ID NO: 369894 - DNA, 338 bp, Cannabis indica
agatcctggtaaaataaaattccaacagcgtgcgcacgggccttcgagccgctcgaacacgcacgcccattcagacagaaatgactgagttttctcgcacatgccttgtctaaacaagctgcatgcgccgagcattctcggtcaggataggctgcgtgcagcctctgtcttggcccattcctccccatacgcgcgcgcaggggtatgcattgcatacccctgtgcctcaaacttattttcttcatatctttaaattcaaaaatcgtttttcattgaaacaaaagctaatttttggtagaattttgtgtagaatctgaattttcaattaaaaatctaat

SEQ ID NO: 369895 - DNA, 754 bp, Cannabis indica
taattgggtttataaagtcgaaggcagtttgactttgacagttagaactgacacaaccctacagcaaatgcgcccaattttatatgaggagttggaggttgatcctttggcgcatgatttaaaattggagatttgttccttgtacatggagggacaaatggttccgccagatgttattaagaaagaacgccaactgagaacgttcttagagatgaaggcaacaatgtcaaacatagaatttatgccattattcgtgaccaaggtgagaaatgttgggattttggagcctacgtcgcctactaatcatctccctcggagtgtggtaaggtctttcgttctcgaaacagatgttgggatttttttgaatgaggaggttccgaccaatgtagatcaacatcaagaagcgacatgatttgatcagtttgaggagtttgatactaccttcttcaataacgatcctattgtagatttgaatatggacgatgaacatgatttggcagttcatgaagccgtagcggtaccttccttgaggttagagtgtgtaccgagcaaccattgtacacagcgagaacgacaaccccgtaatgaaaatcacactacaccatgaactagcaatagccgacaaggcagaaccgaagaacatgctccttctcgtcatgcaaccttctcaacattctcctcttttgaagtttgtaccaagttcaaagctcgatgtggacaaggaagatataacggaaaatcatgagctaactac

SEQ ID NO: 369896 - DNA, 686 bp, Cannabis indica
ctgaaagagaccttgaaaaaaatactacagaaatatgaataagattagacacgtggactatgcagaattttaactgcaaaaccacataaaaaccttgtgttcatatattatttttctacaatttttattttttctgtgttgagttatcatcgtgaggctcaaatttagttaacgaaaaatctgcgttaacagtttggtgctctcattgagagcctctgtaaacaaaagctcagaaaaaagcctcctgacataaaaatggtggatgacaccaaagataatcatcctcaagaaggaatgaatcattgtcccgaaaaaaaaccattgagtcctcagggatgtaccgagtcattgcatgaaaataatgcaagccccaggaagacccagtattggggctcctggcttgacggaccttggatggggaactatcggtcactccctaaccaggttgatgaaaatggcgtttacgacccaaccaaatacataccaatcgtggaatttgaaaaccaccatcctaggcgatgattggaggaagtaaaccggtgtaataccgagttaaagcgtgaaatagctgtagtaaaggcagcgggggaagatggtacccaaaatcaacttgaccttgggaaaagagattcacaaggcaaacctcacggctcgcagccaaggggcagaggataacccagagatat

SEQ ID NO: 369897 - DNA, 1110 bp, Cannabis indica
ctaattgagtaatgacttttatgattaccaatattctttggagcattggcggacccacatggagaaaggagaggctatattggtattttagtttattatattattgtatatgttttaaattaaaatgagttactagatttttggtgttgtggttgtctaaacttgggtttctctcaacagtaatggtttaagtccctcattttttttaaaaaaaatatatgcaacttattttttatttttatttttttgacgcggtgatcaaaatcacacatgattaaacaaagcagcaatccacaatcggcggagacaactcctcgaaccaggatagctcatcgtctaaccgaagggcatgctttgtcaaaccatgtgctgcagaatttttatcccacgccacatgggacaaagctgcccccgaaaatttagacaatcaagctatgtcttcaaaaataacaccacatcacattgaaaaaatacctccctattattaataattatctccagagctagcgaaactaaaaaaataaatgcaacaccaaaccaaaaatacagctatattagaatgacaatcttcaaaataaaaataaatatacaaattaagaaattaacacgcaactcactagctcaacactcaaaattactaataataactagtcaaaggtattaccctttggctagtaacaacatactaacacccaaatataaattgttgaaaatcaaaatcaaaaaattatatataaaattaaagttatgagtaaattccctgttattgtaggccctccacaaaataacaaaaaataaactttattaccacacaatataatgaaaaaagataatatgaaagaacaatgataaatcaatccatattaaaagggaaatttgcggcaaaagtccacaaaaacgtcacgttgatgcagattagtcctcaagctccaaaaatagcggcaatagtcctcaagctccaagttgttgtttgtccgttagtcctaattttaactgaaccctttacttttttaatattgccacgtgtcaaaatattactgatccaaattattattttaattaataaaataaataaataaataaacattttaaaaatgatttttttttttc

SEQ ID NO: 369898 - DNA, 508 bp, Cannabis indica
cttctgcttcactcctaattttttaaaagaaaaaaaaggtaatgttatattaatttaagcagtatatgtgaactaaaaaatagaacaaaaagtgttatatttaatagcgtaccttggtgtagaacatactttgttatataatttgttataatataatatagattaaaatatttaaatgcgacatattatatattaatatgagattatatattgtgtgttggatgttgtattatatcatatatatattataataatacacataaaagttgtaacatatgaggagttacaaatctgaaaatatattgtaacttaaggatcacatgtaattaagtgagttattacatatggaagttatggaattaatgggataagtttctagttgttagaaactgttgcaatactcaattatatcatttaaatgagtattgggacattggaggaagatttaactcggagaggagttacaaaaactcaattttgagttttttagaaacagttgtttaatggt

SEQ ID NO: 369899 - DNA, 595 bp, Cannabis indica
ttacaaatatcatattttggatacacaaatcttattgattttggtcgtcttctcaaaacatggattaaagtgcagaaaaactactaaaaaactaaaatttaactagaaatctaatttaattcgcaataaactaatgtcgtgacttcaatttttagatccatgaaatacaaatctcaaaaaattgaactagagttcccaaacaatccaactcaggtataataaaaaaaaacacatcaatactataacaaaatgtttatcctggtgtatttctgttgttttccaaatttctaatggtgaatttattcatattaaatcacgaagagacatgtagatagagttgcgtacgtagaaacactgttatgatttttaatgtttcataacagttgcattacagttacataaatattttgctcgctagtagatatttctccacatattactattaaggtacaagtaattatcgatcagtgacaaaaaaaaaatactaacaaataagtttctaacatatacacattccacacttttatatttttagttgtcaattaagttgtcacgttagttggctcgcaatagatataactgttgccattacagt

SEQ ID NO: 369900 - DNA, 400 bp, Cannabis indica
tagctatagctatttccattttgggtcaacctcagttactaatttgtctttaccctttacttcattttcctattatttgttattcaccacacgccactggtcgtcatcacctgtttctctaaaaaaaattgtggctttaattctgcagtctttaattgcttattacttgatataatatatatgtatatttttactaaaaaaaaaaaaggcaaaaacccaaaaaaatcaaatagtattttttctttccttcaaatgataaatatgtccctatcatgcatttggtttttttttttttaaatagcataaaaatctgtaaaatcttttgaggaaaaaacaaagtgagttcataaaaaacatgtctattagtactagtagtattcattcatccagattagccttt

SEQ ID NO: 369901 - DNA, 1106 bp, Cannabis indica
caggtgacaaggattttttagtaaatatcagaccaatgcaatgtggtgaggtcatgtttggcaatggtttaactggaaatgtcattggtatgggaactctcaattttgaagggttaccaaggttgaaaaatattatacttattgagggactaaaagctaatttactcagtattagtcagatttgtgatgaagggtatactgccaattttgacaatgatcattgctttgttcttaacagtaataaacaatgcatttaacaagggtttagatctgttgataattgctacactctcacatctgttcttacttgtcattctgcatgtgaaagtaccagtgttgtatatatttctaaaaatcttatttaacattctcgtacaaaacacattgatatatgacatcattttattaggaaacttgtttacaaccaaacattgcagttggaatatgttgatactgaaaagaaattggatgatattttactaaagccttagattcaagtcaatttgactccttcaaaaaatctttgggagtttgcattatttaattcttttcatttggttctccatttcgtacaaaattttgagtagttcttatcttgcatgttgacaaaacatgtttatgcttttggatgataattagcttagtgtcttgtacttttcatacttttgaggttgggttaaaagattcaagttacttgcatatgtgtgatcaggataaattaaagtatcaatgtacagagttgagtaatttttgtttcagtttcttgtcagtccccttgctggaatagagctacccatactgaggtgtgaaagccatcttttgagtaacctagaactttgtaattgacaattatgaagaggatgcactgtcatagaaaagggctagcttcaaaatggtgtgatagcatccagttgcgggatcaatttagaaaaggcaaaaaataaaaatcttgccaaagacaatgatcctattttcactgcacacactaatgtctaacaagtgtgtacaagtttgtaagtctcctctacttaaataaaaaaaattctggttcacattttatgtaacttgtctattttttctcaacatctggtatgtatggtttatat

SEQ ID NO: 369902 - DNA, 664 bp, Cannabis indica
aagaaatgccgttagataggcacttttaatatataaagatatatatatatagttgtgtagttttttaataatgatatacatgtatattgtgtgtatgattagatatgtaaatgtatggaatactttttaatgggttattattcattaataggtaataaacaaatttaattataaatattaattttaaaaatattaaatcattagattttggtcctatagcgaataataaaagagaaatttgaatatttattcttaatttagctacttaattaaaaaaaaatatatcaaaaaataccccttttgacactatatcaaaaatatgtttatataaaaatatatttttgtcaaattcaactttttttaacacttttttgtcgaatttttttttattattttttttttcagctgacggactacttccagcccatataatgtaaaaataagaaaattttctaattaaatagaaaaattaattataaaaactcaaaattttctaatattacatattcataggtaatacccattaaaagtgcacccgtaatatatgtatatgtatatgtttcggatacttctcaatgggtattactatagttattaaataaatttaactataaatattaatatatattaaaccatcaaattttgatctaatgacgaataataa

SEQ ID NO: 369903 - DNA, 687 bp, Cannabis indica
tgataaatcaatgaattgtattgcataatacgaaattttttacaaactatgcgcacccaataagggtcgaaatctgtatacctctatatacaatggtataatctttccctaaccacattgtgtttaagctctataatgcaaaaaaccattctttgtcaatgttcttaattttttttggcaaaattctctcaatccgagcctttgaggtccactgcacttcttcaacaattcgaaccaggttgacattttgttctttccagactacagcatttcggcatctccaaaggctatacaccagcccgattaaagcagcagccaacacccccttcttgaatttagacaatctagatcttcctatccacctcagaagttgctgaaaattgctggtttgggcatgccaccccagccatcttttaacttctatcagacaatggtgtgcaaccgggcattcaaagaataaatgctggcatgtttccacctgcaaattacacaagtaacacacagcagaagtttgaataccaaatctcagcaatctgtcctgagtttttaatctattaagtgtggccaaccaagctataacattgtgttttggagtgttgagcctcgaccatatttccttgctccagttcactcggtttgagggtggcaataacaagttataaccagctgaaatggtgtatttctgct

SEQ ID NO: 369904 - DNA, 500 bp, Cannabis indica
cataggtttagataatctcaaacctacaataatactaggaacaagaaatttgtttaagtccattgaatagacttattttcaaaatttcctttcttatccttgtaatagaaaacttttggttattccatatgaattgttttaaccatagttctcttggctttgctttttagttccttattctgacaatccattacttgtttaaactaacaatggattttaatcacaagtgtctcccaagtcagaacagggtgagttccttgaaactcgcccactacgacaaggtatcgtgactttctgtttaagaatctaaggggtatttacctcatcggttgtgtcaagacaacagaggcagtgggaccatcttatatcaaataagatgatagaacacttttggaatcaagaaaaaatatctcatctactttgttactttgttttcagatttagtcatattcttagagaaatattattttttgaaacaaaacactttcttatcttaatga

SEQ ID NO: 369905 - DNA, 585 bp, Cannabis indica
gtgaaaaaaaatcacaaaatgattatttgaaaaagctttttgaagaaattttacatacaattgctacttgaagtagttaaatatctttgtatgtaactagatgtacaatttttatgaagtcattaaagtgacaagtcatgataattagactgcttagtagtctattaataaattagatgacttgttagaaagacgtgaggaaaaatgaatgctatattatggttatatttatttgaccattacaacaacatgatgaagttgtcctgtacctttacacatcgttgaattgatgatgaagaaatataaagtttgataaacataatagtgatcattgaagagtttatacgttttggagaataatataattattttattcgtgtctataaaaataaaacttgtaatattacttatatgttgtagtgattttacaaattatcctacgaaagtttcattaaaatacaaattatactgaatctgaagtttatgaattgagttattttgacatgattaatcatactcaataaattatcaaatgctttgactaagttttgttgaagaacttgaagattattctcattgttaatt

SEQ ID NO: 369906 - DNA, 700 bp, Cannabis indica
aaaggaaagcacaaaaattgtcattctttctctaattctaacattccatgtggcatcttaaatgatcttttcttcctaatctttcttctcatatttttttcaaatttaattatttttttttatttctctcattttaattatcaaaaccacatatttttgaatcattaaattattgtgtcttctcatttttataacttacatcatttataacacattttattattataattattattatgcaataaaatatatatctatctctctaataataatatttcttttttttttttaacttttattatttattaaaacaattatatatataatcaatctatcaatcaaatctatatatataaaagaatgttcaacaaaaactatgtgacatcttaaattttttttagcctaacttatctattttatgcaaaatttcatattttcttaaaaaaaatacacatgtatttatattatcaatcaaatctcataaataaaattaataatgtcttttcatttttctaactctcacatatataatactcaataataaataaaattaatgatgtcttttcatttgtataactcttaaacatatactactcattattattaataatgttaataatgctatcttttcatttccataacttacacaatataaattattcaaaaaaataaattacactatataaattatatttgatgt

SEQ ID NO: 369907 - DNA, 538 bp, Cannabis indica
agataagttctgaaataaaatagaaaaattgaaacctgtagggcccactatagggttcggccacttaaggtttaattaagtcattattttatcttttttaattctatataattctaatcctaaccctagatgaaatcctataaatagaaagagatgactcttatttttaacctaataacttaacctagttttcactttgtaagacaacttagaaaataaagagagagcctctcagatttcaaaaccctcttcttcctcttctgaaattttcgaacccttagtgagttgacaaattgcccacacaattcaagccaatactcaggcctttgtggaagattatgaagaattccaacaataaaaggagatccatgtttagatattgagcatactctgtaacagaaaggatcaagggttagagatctaaatggaaagacacattatagtttgctgccaccaatgtaagattttttataatgttatgtgtttattgttgggttttatgccctaaataaaactctttacaatctgattagttatc

SEQ ID NO: 369908 - DNA, 780 bp, Cannabis indica
tcaggtatgactcctcctgatgaattaccgaacaaggtctgctcgcctaccacttggcccacgagcggaactcgtaactggggattgggcggatgaccattagtagtctgggaagtattcatcgttgggtcctcttcggtttctcctaggggaatgacgttcggcgattgctgacctacagtttggtaggctcttcgtatcagcacggtggcttgccgactatgatcttcgatctcttcatggtgagcccttaatgcctccatctctttatctctccattcagcgaacatacgcctttgttcatcaaatgcaatatttactgcatcgcgtagttcatcctgatcatgatgtagagtgttgttatgaacctgcatgagtccgagcgcgtcacggagattttgcaattcggttgcgtctccgatggtcgtctgggcattggttcgaagcggaatagtcgtattatgaatgccctgcttgggtgcagaactgttactcccagtctcttgcacaccaggcacaactccagtaataggaattgtttcaccattcaccatgctacccgtctgtctgggattaacagcaggcggaacccttgaactccctgggtcctgtaatgtaggatcaagcgtctttgaattttctaggtcagactgacctctacgagtttgcaccatcgtggtggcggttgagtatcgaataaagatcgatttgtgatccttatcttaatgaaagcaccaaaatattgacttcgcttttagccaacgacaatgagtctatttt

SEQ ID NO: 369909 - DNA, 500 bp, Cannabis indica
tatgggctgctagggatattttcttccgtctaggtatctaaaatatgggacacatgtcatccattcctattgccacgtcatggtacaaaaaataggataatatttttttcccaagtctgcgtgggaccttcctagtcgcacgtggacttcactgagactagagtcttctccggatgggtgatgcgtgtcctggatgtcgaatgacgcaacgatgtgacctgactagaggtctcttcaatttctatccatttaatgctaattgacggttttacctcaaattacgttcgatgcttgcgcatgtttaacggttacactccctctaattagtatgtaacgtatacttttggggggaaattcgagaaattcgaattttgaattaattaattcacttttcagattgcttataaataggattaaggatctcaggcaatccttttagcccttttaactcttaaacaccagagcaaaaaaaaaacattagccaaatttcctcccaagtc

SEQ ID NO: 369910 - DNA, 585 bp, Cannabis indica
ataaaaaacatactttacacaaatgaaaatttgtgatctcttctccaagccaaaaatttgaaacctcttctacaatttttgaaattataacagaaaaaattacattaaaaaacaaaaccaaaaaaaaataaattgtaaaacatatattggtaaatataaatacctaaaacacttgaaaagcagacggaggcagaggcggagacggagacgacagtgctggcggcgacgaagctggagggagaaacagagaaagaattgaaaggaaaaaattggggggaggcggtttggggagggggtttgcttcggttttcagagaagaaaatgagaaaacaaaaaaattgggaaaaaatgaaagggaagaaatgggggaaccgggtgtgggtgggtttatatagaataacattagcggcgggggtccgccgataataatgggcgctaattctaatttgaataaatgagcgggggttgtccgccgctaatactggtaccccgtcggtattactatttttaaattatatttttaatttttttaaaaaaaattaaacactaataccggcggacccctaaatccgccggtaataacct

SEQ ID NO: 369911 - DNA, 704 bp, Cannabis indica
ccatgcatgtaattttcataccacattatcttgattgaagtatgtcatttggctatgttgatatatgtgaccattgatgggtttagttgtaattgatacaacgaaaatcgctttgatcctatattgatatagttaacggacgagattgtacatgcctacggttatgatgacaaagttaggagctcaataaggttaacacatttatatgtatacatatgtggccaagtgggagattgttagaaatttattagggtcacaactgtataaataaaatgtgtgttgggtcatcaaataaataagtcaaatttatgtggtctattttagaataaaatttatgacttaagggcatgattgtcatgattttaatatgtggataccataaagaaaatttttaatttgatgtggggctaaattagaaatagtaaataaagattagttactattttatcagttgttaataacaggtattggtccccaatttgtatcgtatcttttcactcttgtatcccattaatatgagaaaaagtttcatagaaaggttttgatacaaattggaagatcaaaccatttaaaggtcgattctatggacatcggtacgcttctgctaatctatattctattgtttgattttcttaacttaattagggctatatatagatttagagtattcttaacaaaatattttcaatttttcaattttaaaa

SEQ ID NO: 369912 - DNA, 1246 bp, Cannabis indica
ggtgctctactgtgcaggaaagggtaagactattgctgatcaaccttgagtgtaggagctcgacgaagaatgtacatgtccgagccatatcagaccaagtaggttggggtctacctatgttgtgtttttgagactttgttttgccgcttaggccagctgaaagaaaagagcttgtaataatattttgtaaatgtgtttgggatcccaacttctgtaacttttagattgtaaagtttaaattattttaagttttattttaattccgtttataattaaagtttaatttctgcgctaattttaaaagtaatcccgattaggagattagggtttcataagtatcttgggtagcgtgcctaattatttagggcgttacaaaataacatgtggtattttatcaattattttccctaagacagctcctatagcatcatcaaaagcatcatatttatttcaaaaggaaggttccaatcaggaggttgaataatgggtgcagaagttagcatagttttcaatttctcaaaagtaatgtgacaatcatgattgaaaacaaatgcattatcttttccaagtaaatggcacagaggccgtgaaatttcgttaaagtcttttataaatcttcggtaaaaaccagtgtgacctaagaatgatctaatttttttcacagtcttaggtggtagaagttttaaaataagatcaactttagctttgtcaatttcgattccctcagatgaaatcatatgttctaagacaattccatgttttaccatcaaatgacatttttcccagttcaacactaaattcttttctttacaacaaatcaagacaagagacagatagtgtaaacattcatcaaaataagatccataaatagaaaaatcatccataaaaatttcaaaaatttgttcaaccatattagaaaaaattgcagccatacacctttgaaatgtcgcaagtgcattgcataagccaaaagaaattcgtcgataagcaaaagttccataagtacatgtaaaagtggtcttttcttgatcctcaggtgcaatcagaatttagttgcatcccgagtaaccatcgagaaaatagtactactcgtgaccaactaatctttcaagcatctagtcaatgaagggtaatgggaaatggtcttttttggtgaggctattcaattttctgtagtgaatgcacactctccatccagtttggattttagtggggattaatttatcatttgcattcttgactacag

SEQ ID NO: 369913 - DNA, 462 bp, Cannabis indica
aatacccctagagtttaataaaatctctaaaattgagaaattataactctaacactcatttctaatattggggtccacaaataatatatttcataaataattataaaaagaacagaaattagtgctaattgtctttactaatccaagttacttaagcggtcattacaaaaaaggtcaggcatacaaagacaaggaaacactgaagaaagtttacagctactacgcaatcaaaaacaacttccaagacactttttgaaaacatatttaattgggtttcagtaagaattttttttaatatcttcaataacagagtaataacaagagtttatacctctggaatggtcgtattccgatcgggcgtacttggattttcaatcctataaaaaaaatataagaaaacactactaaaacaacacaaaaaaaataaagaacataaaaacaagcataaaaaaactctggaat

SEQ ID NO: 369914 - DNA, 1026 bp, Cannabis indica
tcggggttgagcgtcgacggagcacggtggggacggggttgagcttcggtcgagttcgtccgactgtgtgggttttttcttttgggtttggtgttcggctgagagagacgaagagagaggaagagagaggctgatttcaaataagaagggtagtttaggaaaattggtaaaatggtcatatattaccaattttaataactttgcattaggggaaaaattttgaggtaatataagtataggaattcaaattttccttctcaaatattaataaggttagatctttacatatgggtggaacaaaacacatgacaaacttcatcaattaccttgggaagttagtgggtcccatgtggtacgcgtttgtctttaatctaaataacctctaattatgattgttgtggaatgaagtaatgacatgtgggcaagatgtactcgaaacccactggggtccgacaataaagtgaagcacgtgctctacactactgaaccgacgtcaggccaggttggctatgctgcccgacaaatctattcaggtaacagcatagcatctccaatataattaactatcccttcaatgtaaactatttaaaaacatatgtagaaattttaggtagcgtttggtacttttaaattttaaaaactaaaaaaataaaattaattttttgtttttaaaatttgttttagaaaataaaatacattctacaactattttgttttaaattttaaaaacagaaataaaagtgtgttctgcaatcacttttgtttttatttttaaaaacaaaaacaaaaatgtgttctgtaactattttattttttaattttaaaaacaaaaaaataaattttgatttttttcttttttaattaaaaaaattatgaatatcatttatttttatttttaaataaatatataattataaaaaaaattaaataaaaaatactcattagcatcttaaaaaaattcaagtaatttgaaatcacgaaactcattatctataacacaaaactgacaaaatcataataaaatat

SEQ ID NO: 369915 - DNA, 303 bp, Cannabis indica
tctggtaccggtcctccgccgtggcgataatgtcttcctgaaaagccctttcttctgctggagccctcacgttcgagccgatgaccttggagagattgaagtcatccaccgactggttccccgatattagcttggccttcggacagttctccgtcgtgaccaactcccaaccgtcgagggccttcttatcatacgtggagaaggtcttggcccgctggaggaatacttggataggcacgatacgcatgtaaggagggacgggcggcataaaaaataaacaagcctgaaagcaggcggtaagct

SEQ ID NO: 369916 - DNA, 588 bp, Cannabis indica
aaaaatcccatgaaaatcgggtttgggagtgagcttgcagctaggctgcacgctgcagccccaggaggctgcaaatggctcgaacgcgcgcgcggagggatgagccatgccgaggaaactcggcggatgcagggtcacgcacgggcgtgtgcagcatcctgggaggcaagatgcagcttcagacaaggttttgtctaagaagcgcgcgcgtggaggtgtcttgtccgagtgcctggtgctcaggagcacccactcgacaccatgaaactcgattttttcaaaattcatatctttttcaatttttatcagatttgagttccataaaaaataaaattgcttaatttttcacaaggaatccaaataaaatattttcagaaacagaaaaaatatttttcattgaaaaattttgtacaaccatacattcgtcacataagaatataaaccaacatgaaaccatccaaatcaacacataacatcgttttaattcatatttcatcaaagtaaaacattaccatggctctgacgcccgttgtttggaaatattttaccaagatctagatttactaacaagtatgtttcattaacatc

SEQ ID NO: 369917 - DNA, 470 bp, Cannabis indica
tctctctctctctctctcgctccctttcctccaatccaccaccaccatgttgaaaacttatttttatcaagatctagatttactaacatgtatgctgattataattctataatctaacatcctaaatataaaatttctaaaaacgataaataaaacatataagagattaagaaatccttgcagtggtggcggtggaattttatctcattccatttagatttctaacccctgattcctatttgtagcagaacataatcaaaatctgaacctggatcttctcatcctttgattgtgttcatcacagtcttccacaaaggcataagtatgaccttgaatagcgtgggttgatactgtttaccaagatttttggtaaccaattatatttagatcttaagaaaataaaagataataaacaataaacaaataattttttacgtggttcaggcgttaatgatccttagtctacgagt

SEQ ID NO: 369918 - DNA, 525 bp, Cannabis indica
tataatttcatcaaaaaggtttttgccttatgtgtgtttatattctgtgacttgtgagtgtttttggattgttcttggagccattcttggcatgtgggattgagctcgaattacaatatgtggtatcagagcttggagatcaaagataattcttattttagctcgaaggttcaagatttcggttataaagactcggtttttgaccgagtcaaatgtatatatatatataaaatattaattaaataataatatatatatatgtataaaaaaaatatatatattattttgaatatatactgaaccccttcgtccccctctctcattctatctatctttctctctttctctctctttaaaatacaaaaataaaacccataaacctccataaccatcacactccggcgacccacctccagccaccgcccgatccaacaaaccggacaaatcgaaagcccaagtgccggcgacctcacccccaagcggcgccgctcctctcgccgtcgttgactcgggatcgcaagtcaa

SEQ ID NO: 369919 - DNA, 711 bp, Cannabis indica
acgctattaattatccattgttagaattccaataatcaatgatcctctatatatgatctacattgcatagtgacaaaattatcgttacaccctttcgatgtattttatccttaaaacacttggccacctataaataatattttagtgaactaatataatcactaaatgagcgctctatcatttatctctatttagcctagctcgaaggaaatcatcgtttctcttctatgtccagatagatgttatagattccatatcagcgattagcgctcccactctattgtactaccgtgttcccaaaatgtacgtatcacccaaacaaaaaagtaggcttaactaacaaatcaaagaacaaaaataacactcttgagatcgaacctaatcatgtcaggaattaagatcatttgatctaggatcaactaggtgatattgaaatgaatagatattacggtaaatttttcatatctaatccaagttcaatatcagttccttccaatgtagacttcatacatccgatactgataaactttgccaatgccttggaaaggacataacacttatccaaggtgtaaagtgttcctatcggtgattatcatactggtttaaatccagtgaactgacaaatcaaggaattaaacttttgaacatataatcatgattatattacactgtgctgacaacactataatcatcaacaaatacatatgttct

SEQ ID NO: 369920 - DNA, 485 bp, Cannabis indica
agtataacatgaagctaaacccaaaaaaatgttcctttggagtctactcagcaaagattttgggattcatagttaacgcgagaggtattgaggcaaatcctaaaaaaatcaaggcgttaatagacatgccatccccgacaaagcctaaggaagtactggccctgataggaagaatggcggcacttacgagattcattttgaagtcaactggtaagtgtgtaccgctcttcaatattttgcgaggcaacaaaaagtttgtgtggacaaaataatgcgaagaggcctttcagagcataaaaaggaatctcgcaatgcctctagttttggcgaaaccaataaccagagagatggtatttctttatttagccatctcggaagatgcaattagtgtagctatactgcgagaagagggaaagaaatatcaacctatttactacgtaagtaaaaggttactaggggaagaatccaggtatcttcctctagaa

SEQ ID NO: 369921 - DNA, 538 bp, Cannabis indica
aattttagctaaataatcctaccaaaatttaatctaacaaatttctctctctagagcaaaaaccctagcctccaacacaacctttaccagtttataatccttagttataatttcttaagctatattttataattttaattttcattttaaaatttaaaaaatactaatgaagacaacatgctacatgctattatacaaaagtattgcatttatatatcccacgatgtttcaaaaatactttggaaagttcatcttgaattaattattaatatgtaataaaagatattagttattatattattacttcaaacaaaggaaagttctagcggtgcttctactttctaatcatctcttggtttcaggcagaaagtcatattcatgtgttatgtgtacgttaaacttttgttaataggactgggaagagagtatagtcttacaaaacttgaaatgtgaacttgagttgtcagtatatacataaacctcaattttggcttctttaaccagctgccacacacaagttacttactctgaacttata

SEQ ID NO: 369922 - DNA, 827 bp, Cannabis indica
gcggaagaatcatcgtggaggcaacagtcgagaacgacaccgccgtgcatgaactcacctcgaagcacattggctaatatttaatatcagttcaaatattaatagtatttgttttattatattttattaatataaataatattttattattttattaaataaaaataaaaagtcacccacgaattactcataaatttcagttatatatgcacactttatatagaatagatatatttttttttagagaaatgtattttctattataaatactaaatgctacacgtcggttttgtcagttttattttatattttattctaaaaatataggtgcaatctatccaaattaaaaaaaaaaatagtaacccgtctaatgaaattggtgagtttggtcggttaaccgctcaaatcgacaactaatgtttttttacatttaattattatatttaattaattttgatgataagaaaaatatatatagaatgaatttaaagtttgaatcaactaccataaaaaaatatagtagtttgaattttatattttttaaatgcttatgtaaattatatgatatgttaatatatataataaaacatatatacacatatatataaaactctcttaattgggttggtcagtttaattcgggttgaatgagtgggttggtattattttcaacccaaccaatataaaaatgtgaaaattacaccaaatatgggattctacaaaaaagtttgaaaaatatggcttttttaagtttaccacccttatatggcatttatttaaatttaaagttatatatggtatttactttgccacatttttgtaaattc

SEQ ID NO: 369923 - DNA, 635 bp, Cannabis indica
ttaattaattaaaccatattcagaaattgattttatttaatgttatgtcctaattagctttctatatgtggtaggtacttcttccaaatctaattatatattagatgttaaaaaattgagatccaagtataatcaaagttaaaaaaagccttctttttttgtagagtgttggtgaagatgtttgtactattcctcctttggtacccaaagtgaaaatcttggcacatctaattgttacattaatgtctgtgaatttgttactattctatttaggttaagtagtatttttgtcttttaaatttttgatatgtaccaaatcatatccccttgaactttttaaggtcattaaaaatgtcccctgaaccattgagattgttggatttaaaaacttttgtctaatttcattcaattttgctatttcagtaattgtttatgtactaaaccatgctcctcaaactttgatatctatcaaattatgcctctcgaactttgaaatgtactaaattatggcgcccctgaactttcatcaatgttagacttttttactaaaattagaaaaaagtccttaaatccaacaatctcaatagttcatgaggtatttttaacgaccttaaaagttcagggagccttatatg

SEQ ID NO: 369924 - DNA, 335 bp, Cannabis indica
gggacacaaagtctctaatcaagtttagttgtagggtatcggcgtcactagtttcgtaacgaaatctgtaaccgctactgaacaatattctccatttagtggtgccaatgtaacaacatagtagtgacactaccactgtaggtgtttaggggttctgggacacaaagtctctaatcaagttagttgtagggtatcagaatcactagtttcgtaacaaaatccgtaaccgctaccgaacagtagtcattatttagtggtgccgatgtaacaacgctagtagtgacactatcactgtaggtgttaaggggttccgggacacaaagtctctaatcaag

SEQ ID NO: 369925 - DNA, 530 bp, Cannabis indica
aatattaataaaatagaaaaatctccccaaaaaattacaagaacgaaaattaaacaatctacattaataaaataaatagaaagcatatttgtaccttaatggatgttgagattcattgttttctccaccaaaatcagtggctggagttataccaccacatttttttttaaaataagttcggttatagtgatggaggggaaaaaatccaaacatttttacagtataggtttaggtattgaaaataaaagattttaaaacaaaaatgaggtaaaatggtgaataaatgagggagattgatggttttttatggctcattggcgtgggctagggtgatgatatggctattattatcgtgtatgaggaaaaaggccgaagtggagaggatgaatctttgattatacacatcatctatggcgtcagtcattaggaaataaccgacaccataggtgcacggtttgctaacacgtgtgcacctatggcgtgtgttattttcctaataaccgacgtcatatgtgtaataatgtcagttg

SEQ ID NO: 369926 - DNA, 484 bp, Cannabis indica
gtttattattataaaatgcgggcgttacaaggttccatctcaaaattaattgacaataagagaagtaacacatacattttatgtatggtatttagtttccacacattattaatgtgggactctctaacaaataatgtaaaatattacttcatcatttttaaatttttcattatataaatatgtcaaaaactaaacataaattatttattacacgccatagggtcttggtatttactagctttacaattttgtcttttagcataatttatatatatattattttattattaatataattaaattaagtataaattatatacaataagcataaataaaaattaaattgaaaagttaaataaatacacatttacattaatctaagtgtttgtatattagctatctttttattaatattttatatttgacattatgtgtttgtatttttgtagtatattagtataatttttataatttttttaagtta

SEQ ID NO: 369927 - DNA, 721 bp, Cannabis indica
ggggattccgccacattgacttctcttcaaaattcaccatttgaacctttttttttttcattcatcacattggaagattctaagtgtcaaatggctcacatggacaacatgggttttcgaggtatatttagtgctcattaatgccctaaataaaatgctagatctcgttgatatttatgagtattgttgatgattattaattaatgatgtggtgtttaatgctcatatgttgttatagttttcaataattggtatcaagatttagtatatttggatttagagcttaattttttaatgaaagtcattttttactcaaacgaataatctgattttttaaaataattttggattaatgtgttcatgataaataaatattaaattattcttttagatgtgtttatatttattttggatgatcctttttttttatatatattttttattagagaatactaagtttagaggtgtccattaatggagaaaacttattttcgggtttatgtttttgggtaatttttttgtaaaaatattttttttgtaaaaatgttttgtcattagtatgggtttaacttgtttattatttattaacttttaataatggctctcaaaacgaaaaagaaaattaaaaaatgaaacataaaatatgttatgctggcatggaaaatgcatcaagactatattgatgttggaaattattttaccaggatcttatatctactca

SEQ ID NO: 369928 - DNA, 679 bp, Cannabis indica
tggtttcgtctagacgactactattagtactagtgttcggtgattttctctacggggcattcttttccgtgtcggtggcttgggtggtatttggtatgatagtggagtcaatttcaaagctacaacatcagggacctctatatcttggtcgtctcttacgtcatcattaccctcaacatagcattcagggtctggaccatcacaaaaaccatcaataaagggcatttgttctacaatgtcagcactcggcatcatagtgtttaattcaggtaacacatcagtaactaatacctctggatttgtttctggaacaaaactcccagccttgctacgagtgtccttaacaatacttagtgtgggactaggatcgatacaaacattcttctttaacaaagtcacaaataagagagtaaattcatctgccttcttcgcaagcatagacaaaaagaaccttacacgcttatcatttccaataactttagagcgatacattaagcctttcatgtacttgtaatttacttccaattttaagtcatattgcactttgtcaacatcgatttcttcgtacaaaatatcaaccaaacgcgagtagcctacgttcgtatcaatctcaaatgtcaaatttttttggcgcggtttacaaacccaatatctaccctcaagctcccaaacaccatta

SEQ ID NO: 369929 - DNA, 558 bp, Cannabis indica
acttctataggttcagtctgtttttttagttggtttttggcttgatttcgacttaaggtgtgaactccatctgacgcttcaatatcctcttcttctatcttgggagtcaagtagaactttacataatccatctctgcaactttctactcaactacaaccggtagatttagcgacaagctgatcatcacttggttcgccacgaggttgccttagtgacctcagggcaaaggtcagactaataggctcctccatttctaagatggttacttgttcatgttgtagattaagatcatgagctatgcatccattattatatatatataagtatatgtattaataaactaataacagtggtatttgagctaataaataaataaaataaaaaaaaaggcgtgagagaatgattgtgagataaaaaaaaggagtgattatgagatagtatatttatagcggtaactatatttgtttttatttcacttttttttttcagtagcaatatggatgacaattttgttcaaccgacgatctacgtttcgatggtcactatgatcattggag

SEQ ID NO: 369930 - DNA, 594 bp, Cannabis indica
ttagaatattaacagtatatattttttttgagatgaaatatcaacttcattgaataagttagcattatgaatacaaaaaatataagagttcaccagaaatagaaatatcaaaaatactacgatcagattgataccgagaatgtctagcaacataatgtgctactcggtttgctgatcgtctaatgaaaaataaattaacatttaggaggatagataacaaaagttggcagtctttgattaaaaggccgaaagtggactccattgcttggttgcttcgaatagcttgtactgaaacaagactgtccgtctcgatctaaacatgttgccaattattggtctttacccaactgagagcttctttaatccccatggcttcaatgactccagctgcatatcttccaccatggcaaccggcccatgctgcaacttgtaaaattaaggtaacttgtatttaatagtttcctattttgtatttagtagtttcccatttagtctcatagctttgtatataaatatatactattttatggaatgcaacaactactaatttttttcactattctctacatggtatcagagcattagagttaagaa

SEQ ID NO: 369931 - DNA, 565 bp, Cannabis indica
aaggaaaactcaactttggcttcaacaaacgaaatccaattcaagcagccatagagaccacttaaaaccattcccaacatgctcaacaacctactctatacaccccaaacctagtttaagtcctacaacaacagagaagtaaaaccctacttcaaaactaactcaaaaactagtgttctcaatccaaaaagttggaaacctacctcaattaacctctaggctgacttgggattgaaattctgctagaaaaggaaggcttgctgaagaaaaatccccaagggggggctggctttggcttgctcgaagaggaagaagaaaagagaagctttctttttggtttcttgccttgtaaggtatctccttaaataggtttttaattttttttctttctttcttatttttttttgttttaaaaaaaataattatagacagccctaaaagtcaaacggacaaaaatcccataatactgaaagactaatctacccctctaacacattttgaaaataacttaggggcattttggtaattttactaatccattaagccgacattctaaaaattctaa

SEQ ID NO: 369932 - DNA, 1148 bp, Cannabis indica
tgtataaattcatataaaaaccaatcaatcaatgtaagccatcagatcttgattgatctaatggtttaaaatcagtgtaaatattggtgacctgtcccttagagatgatgatgatgatgatgaagctatatcttcactcttcagcttaagttgaagaaggaagacaaagatggtcaatcctctgaactaagtgatacatatacatatatatatatattcaggtacttgctatacacctagaaagctctatcctatttgtaattttcaagtgattttactaatcaatatattattcaactatgaatggaaattgttctgaatagactgtggcaatggagatttttgttaatttgaacaaaacacccaaatatagttctttggagccaatctaatcaatttttaattttgggcttgcaatttcaatctttaagtcagcagaaaactgatttaaaccaactaatattttttctctgatgcagggggcaggagctgtaaatttcttataataatagatcatgctgaggttgattgtctttttcatccaagataacaaaaagtaagtcagaaaaatatttgattcaacaaaaatttccataacaaaatatagtaaaaattggttggttttttttttacttttgattcttgacattctcaataacctttttttcctcaaccaaaatcaaacttccatagggttaaagaagtgaagatcaaaaactttgagcctataaagtgaaagatcacttgttatatcacattgtatgaatttcagcagggtataaatcgtgtttactgaaacttcttaaaaagatgtgttctttgggttggttcttgctgcaatcttaatttggactgaagaagagaaggaaaagggtaacgagtttgggatgaaaaccattcttattgaatgaattccaagatatgtggtttgttttatatatatttttaacttttgaaacaatttgatcttgaatataaggcttttaaaaaaaaaatccaaaacctttatatttataaaatttagtcctatgttaggttatcttattattttgttaaaagggaaatttgcggcaaaagtcttcaaaatgttcacgttgatgctgattagtcctcaagctccaaaaataacggcaatagtcctaaggttc

SEQ ID NO: 369933 - DNA, 526 bp, Cannabis indica
attgatttgcttgcaagaaatctagacttaaaatgatttgtttgtgatttggatgatatcatgttgttttgtgtgttgtattgatgattgattgatatttgtgaattttcgtgaaaaatagttgaattttgtttctggaattatttttattggatagtttggaaaaattaagcaatttaattttttacagaactcaatttcgattttatttgaattagttatgaaattttgaaaatcgggaaaaaattagggtgtcgtcacctattcacgctcgcggatggccattttcctcagccagacgtgtgttaggacaagattttgtccgagcaacaagcgcatggggtgtctgaaaccccattccgcccgcgtaaatgctgctggcataccccagcgacgagtttgctcggccagacaccctcctacgcgcgcgcagacagtacgcaatgcatgctgtccgtaccacttgcaaattttttcgtttttttcaaattttcatgctatttcatggaattaacttctaattttt

SEQ ID NO: 369934 - DNA, 996 bp, Cannabis indica
tttatgtacgtttatgaacgttttcaaaaatctggttccagatgttcgaaaacaaccataaaacaacataaaaacaactattaaacaactgtttccagagaactcaaaatgtaactcctctccgagttaaatcttttcccaacgtcccaatacccatttaaatgatataattgagtattgtaacagtttctaacagctagaaacttatcccattaattccataactcccatatgtaacaactcacataattacatatttatcaattgtgatccttaagttacaatctattttcagatttgtaactcctcatatgttacaattttatgtgtattattatactatatatgatataatataacctccaacacataatatatattaatctcctattaatatataatttgtcacatttaaatattttaatctatattatattatatcaaataatataacattcccccactagattaaaatttgtgacacaccattgtaacattatttaatcaatcaaatattacatatatcccccactttgattgaataaatcaaacacttttatagagatcttgcttagatgcataaagtaaaatgtctttcgacttgaattttaccttagtgtagttaccacaaagtttgttgaaattttggttgccgaagcattgaaccactattcctttaatacaaaccggtgataacacacacatctttgctagagttcacttgagacctcattatatctcgcttgtgcaccgttaatggccatgtgcaacatccatttcatggactctctagagaataactcccaattctcataagaggcggcaccacctctagtccatataggtggaaattagtgtctcacaacttctctttagacacatcattccattaaaaaacctttcggttttaaccctctaaatttaccattagtactctttcatagatgggacaagttgagtactactttttcactctattgacttgttattacctat

SEQ ID NO: 369935 - DNA, 738 bp, Cannabis indica
atatacattatactaactaagtgaaacaacttgaaggacatgaataacgaatagcgagacacctatctcgccataggaaggcatactcctggtaacctctagctcgatgtcagggttattgttgctattgagaaccccaaggacatgattgtccagtctgcaagaccctatggtcaaagagaatttcttaagtttactcaatacactggtgctcatgccattgctggaagacttgtgaataaatcaaattgtaaatgtaccaggcgagacatctcaatgagacatgttttacaacgtgttgtgatccatgtcagcattgacccgttaaaaacggttttaattacagctatgtcatttgaagataataaccatatttatttacgtggagcatgattacagcccacaattttgggaaaataatattgtgggatacgaatttgaatgtaattaactgccaccctatgtcattataaataggggtcgtatgtacagaaaaagggacgaaaaatccttcagtgaaaagaaccctagtttgtatcagaaaaactgaataagattgactcgtagactatgcagagtttgttgggctttgtgccctaaataaaactttatttcaatgtaatattttctattcaattatcaataaagaaacagatttaatttcattatttgtttaatgtgttattttgttcatgttatcatttatttacttatttgattaataaattcatcaaaacc

SEQ ID NO: 369936 - DNA, 702 bp, Cannabis indica
tttcgttttcgtttttttttttttttgtttcttttttaagtttctgaatgcagattctttaattcgtgatttggagttgatttgaaaatttcaagaagtcaatcagtcgaacttcttgttggttgggttcatgaacaagatgaataagaaaaaaaaatataaaattaaaataaaaaaaaaaaaaataaatttataattttaaaatatattttttagttttttattttattttaaatttttttaattaaaattattatttggaccaataaaaaattgacacgtggcactttatttgggtttaacggatccgttagaaaaaggaccaacggacaaacaaaaattgggaccttaggtattttcaccgccaatttttgaggttgaggactaatcggcatcaacctcaagtttttggggacttttgccgcaattatccctaattcttaggttatattaaattcttatacttggttttcgtttcttttttcacttattagaattttaaaatatattaataagcatttttgtctcttgaacttatgacattacatgatcatgtctcttaaaatatacgatttgttaaaaattcattttaaaatagggatattggtggctaaaccccccaaacttttgggtttgtgacagtttaaccaccaaaactcaatttttggcggctaaaactacctgaaccccacttccgttttg

SEQ ID NO: 369937 - DNA, 525 bp, Cannabis indica
taatttattccgattctgattactgtatagtaaacgtgccattatttttctttcactataacataatcaattatcattagtaactatcaaacaatattatttttttttaacaaaatatcaatttcattaaaatattaacattctgaataaaaaaaacttttaaaatcaacttaaatatcatgctcaaaaatattatgatcaaaagaaattgagaatgtctagcatcagcattgctataaaatattattgttataatgggaatggtaatggaatcaaattatccattacaatgtttgctttgctttttaaaagtaatgtaatgagattacattgtaatcataattacattaaacaagagaatccctattacattagaaaagctatgtaatgaggattacattacaaaagactaaataaaataaagctaaaatgactctaatgttttttttttatataaatataaaaattaaagtaggggataattttgtcaatttatcatttattctaatattcattccaataaca

SEQ ID NO: 369938 - DNA, 466 bp, Cannabis indica
ctagctgctcaaggccgaaagagagaaaggaagagagaaaaagaggtttgagcttttctttgattttttttttccaattttttgaataagtgatgaaaatgcatacactatgttttatttcagccaaacaacattacataaatcactttaacactaaataataagtccactaaaggacaaaacataattggggcaaaatgaccattttgccccaccacactaaaataacatacaagggcactaaagggtattttgggaaattctaaattcccgaccactcccgacattcccaatgtctaaaaaaactgtcccacaatactaacatgctaagttgtgattctactgagccaaacaccgagttcatgttgccgggcactagaaaagcaaaattatgaaattcactatatgacataaaaatgcattcggaattctaaaataacggcataaacaattatttaaatatcta

SEQ ID NO: 369939 - DNA, 669 bp, Cannabis indica
tttttgattttatttacataaaatacggtctttttatgttgaaattttgtttatttgttgttaattttttgttatatgtatgttattttttgttgttattttaatattattttcatgttaattttatattgttttcttgttgattttatgttgtttttgtgttattttttggaaaactgtaaaaatgtaaaaaaatattctttaaacgtaagaatgtaaatattttacaaaaaatagtgccttatgtaattattcctttttaaaactcaatttttaaaaaacagtttttaaaaatttttgccaaacgactcctaatagtttttaaaaactgttttcagttttaaaaaacagaaaacagtttttaaactgtaaagccaaacagcctcttagtttttgaagctttcaaaatctaagtcatgtttggttagtattttctaaaaacaatattgaccaaaagtgaattgttttttaaaacaaaaaaaaaataatattttgttgtttttgaaattcttaatttttataattttattttctgaaaactatttttaaaaaataaggttaaacatgcctaattattttcaaaaaataattttctatttttaaaataaaaaatagttttttaatgcaaacatgcactaatttttctattataagagagagagagagaga

SEQ ID NO: 369940 - DNA, 521 bp, Cannabis indica
ccacttaaggagtaatttagccatttatttatctttttttaatctatataatttaaacctagccctagatgaaagcctataaatagaacatgacagactcataacttgataactcgtcattagtctattttatcacagaattgaaaagagaggctcctctctctaattttttgagttctcttctttttcttcatcaaaatttcgtccctatagtgataggagtagatccacattcatatcaagtcaagtgctcaatcatagtgtggaagattgtgaagaatccaacacttaaaggagatctaagcttagatcttgttattactctacgacaaaaatgaacaaaggttagagatctaagtagaatgagtcatatcactctgctgccaccaatgtaagattttctataactttatatgtgtttagctcactactttaggaaattcatgtttaggtgttagattatagaatataatcgactatacttattagtaaatctagatcctagtaaataacttctaaca

SEQ ID NO: 369941 - DNA, 1092 bp, Cannabis indica
caaaaaccttacaaatctcctaaatatcctaaattctaacttaaatcaaacatctaacccaattttcaaatttttaagtttattcaaaaatttaaattaattaaatttctaataagataatataatataatatcttgaattttaaaatttagatattcctaatattatattcttaatcttataatttaataaattaaatattaccaaataaacaatttgaaaaataagatattttatggttaggatattaccaattttattaaaaaataaaataaaataagtttgaaaattttatggttagaaaccctaaaatttctattcaaacctaaactaaccaatttttcaaattttcatgttatttttgccaaaataaattttaataaaaaaatatctaataagataaaatgttaaaactaacatttatcaaatcttataattttaatttaataaaatatttcaaaaaaaaattagaaaaaaaaaaaaatatggttaacaaattttgaaatttgaactagattatttttaaaaataatattttaatatcgaaataagatcattcaaattttaataataaaaacatgtaatatttgatcttaaaattaaaataaatgaaataatctaaaattgcaaaattaaccataaggctatttttgtaaaaaatcaaattttcaataatcaaagcctactaatatctaaaactaattttaattaattgaaaaattaataaaaattaattttattctgataattagatttttaattgaaaatttagattgtacacaaaattctaccaaaatttgaatttttgtgtcaatgaaaaatgatttttgaatcagaagatatcaccaaaacaagattgcactagggatgtatgcattgcatactccccatgcccacaataggctgcaaatgggcgacggaagggctgctagcagcctcatgggagacaaaactcggtcaggaggggctcatgacagcccttgtcccattaaattcggacatgggcgtgtctgaagccgcgtcagaccctatccgcgcgcgcacagagtgttactcggtttcagatatttttatccaaattcaaaaaatcat

SEQ ID NO: 369942 - DNA, 526 bp, Cannabis indica
cctatcgtagctgaagtgggggttgattacaatgttagaatgtaaaaagtaaaatgaaatgaagaaataaaataaaataaataaaaaagatgtaaagatcaggacatatggcagtgataggatgtaaatacataatttatatatatctacatatatatatatatgatccaaattcattttttactatagtgtaaggcatcgccgccgatgctgactcaaaatcctcctttctaccagttacgcgtgcacagtacaatctatctagctaagcccaagtcatccattcattaaggccttatttgaaatgttatattaggtcgtattgtattgtattatattgaatgagattatatatcatatttttatataatatcttatattgaattagattgcattgtattatattaaattggattatatatcatattattctggtgtaaaaaatataaatgtggacatttcttaagggaaatttgattttctatacttaaaaaactaaaatattttattcttaaaccaatacatt

SEQ ID NO: 369943 - DNA, 532 bp, Cannabis indica
ttagatttttttttttatgattgaaaattgtaatttattaaatagaaaacaggtcattaaaattacatttagttttgtatttattaaatgatatttttacgtgttgcgtccctaaatttttaaaaaccactaagctagccttagtggtgagggaagtataggaaaagggagaggtcatgagtttgaacccaaaaactttaagctacaagctattaattttttgtaaaaatactattacgctacactcaaaaaaaaaattagaatttcttcttttatgaaaaatagtattttataatttctactatttatggttacgcaaaatgatttttttgatctccctacagaaacggaaaaaaacaaaatatgtttatttagaaaaagaaaaataaaatataatatttctaagactttccatgaatatttttggaaggaaaaagagttttgctaattaattactaatgtatattgaaaaatatttataaaatttattataattactaaaagctttctgtgtgaattttttttttttttt

SEQ ID NO: 369944 - DNA, 769 bp, Cannabis indica
attaaaaatttagaaaacaacattagtgcaatgagagaaacattagctagtgtattgatacatttttttagtttatacctgatttggttattgatcatattgaacgctagatctatttcagacagatctaaattttatgaatttaaaaattgatattaggaggattagttttcttcgatttaattgtaattcagggtttaaattttaatttcgaaccagtttttctgtccgattttgcataaatccaaattgtatgtgtttgaatttcttacggtcttcttctcaagtgaagtcaatcgccagagtttatggtaattctccgtctagcttggtttcttttcagttggcctattggtttggctgttgaaagctattgttgttgaagaaggtggttcgtgcgactgaatagttagagctaaaaaatatttttataaattattttgttattaggctatataaatatttatagggccgacccaatatatttgtataatatttgtcattttgatgtatacataaaaaatgccgtagtatatataatataatagtacactaaaatattagaatattatagggtaagtattgagtactataaaattattaaatagcaaattaattagcaatgttcaatagtactatatttgcaattgttgcttatattaaggactgggcagtgggcggtcattatcttaattacgaagcatatatatatagggatatgattttgttctgtgatgtactttcacggaatgtattccgtggtcaaatt

SEQ ID NO: 369945 - DNA, 941 bp, Cannabis indica
atttaactttctgcaattatttttatattctgtctgttcttttttatcgctacaaaactggtttctgcagtaacagaattacattctgcttctacaggcgtatacaaatttatattttcatttacattattgacattttaaaaaactcgatttttcacttctcttcaaaactcctcagcacgagagctttactctctgtctggaccctttctctctggatcttggagatgaagtctcgaattagggttttctttctctctcactcttctgttctgtatttttcttctgatatgtagatgatttataggatagtgcaagttgttgatctagttggaagttagttacaaaacagttgtaactaacttctggttctggtcttgtagaggcgaagccacctaagtttaatcttatttttaattatttatgttgtatgctcatgtggataaaatgtataaggattggttataagtggaatttactcaacaaaatttgatttaatatagttaatttctagaattttcttgttgctactaaaatttatggactattcttataattactaaagtgtctagagtttttttgtttgtttgagtactcttgaattttctagaattatctttcacttgtgttagtaaaagaattatgtacaataatgtagaagctagccatttaataatatttctagattagtccatagagtcctataaataaagatgtaatcccatcattttgtaccaagtcacaaatcacaaaagctgagatataaaatatagcttcttccattcaagtattctcttcaaagttcttcttattttccaatagttttagttcttaattattttgttgggtatttggcattgtgtcttttataatcaatgggagtgcaagatcagttcagttgttgggtttaattggattttgttttgggattatttcacaaa

SEQ ID NO: 369946 - DNA, 719 bp, Cannabis indica
gcttgttctcagtgatctcatttctagtaatcaaagtgcctttctcagtgaccgaattatttttgacaatgtcctcattgctaatgagatcatttctgccatcaataatcgtaaatctggaaaggttggatgggttgccttaaagttagatatggaaaaagcttttgaccgtgttgagtgggggttcttacagtctattcttactcatttaggtttcccacctactttcatctccttaatcattcgttgtctatccactgtcactttcaccatttctattaacaatcaccttctcccctcttttctcctaccagaggaattagacaaggagaccctctctcccttaccttttccttttagtttctgagggtctttcagcagccactcgtgttattgcttcccattctaacttcaatggtatctctatttgtagggcagccccttccatctcccaccttctgtttgctgatgacagcctcctcttactaccacttcccacaacaattgccgttccatcaggaaatttaaccctttaccacaaggccactggtcaatcagttaacctctccaagtcctccatcttattctctcccaacacctccccttccgataaggattttttccttaccactcttcaacttgaaaacaaaccttttgtttccaaatatttgggagtccctcaatgcttcggtcgttctaagcgatcctccttccattac

SEQ ID NO: 369947 - DNA, 711 bp, Cannabis indica
aagaacccatagtcaatcaacgcgaggaaaagacggaactcatcggaatactgattaagaaagtataggtacaagtagaattgaaagttactaaaggacgaggtccgttagtaactataaccagcaacaactagatcttcataatcacttgaaccagaaaaaacctgatctttgccaacaactcggtcaaaagcaagaggacctattcagctgcaaattgatgagttcgaggacaaatttaggaggtatcaagtcggggaacatggaaagcaatcaagatacgactcggacaaggaacttgagcctttccatccgaacattatgaatactgcattcctctaggtattcaagaaccctcacatctcgtcatatgatgggaccacagctccggtctcgcatttaaataatttcaatacaatcatgtgagccagcaatgttacgaacaatctacgctgtattttgttccccactttgctagttggagcacaaagcagctggttcaacaaatttacccatcattcaatcacctcttgggaacagttgtctaaggatttcaaaaaacagttccatgtcgcaagggataggcgacccgaggcgtcctcactcactaacataaagcaacagccgggcgagacacttaaggcctacttaagtcattagcacaactcctatgagggtgaaaaacctggacgatagtacccagcttactgc

SEQ ID NO: 369948 - DNA, 670 bp, Cannabis indica
aaactgcctgaaaacctaaaactagcacaaaacgacaagttgagaaaaaccagttttcacaccctgctgcaaaatccgggtaaccggttttacaggcagtgccggttttacccataaaacctacaaaaatcaaatccccaaccaaaacgtttccaaactcaaccaaactttccaaacctgctaattagaccctaataaacatttctaaagcaacaaaacaaaacttcatgcaaaaatacacaaactagcattaaagctccaagctttgagttcaaaactcaaacttggttaaaactaataaagatgcatcaaacctactttgattcaccataaacaaccatattataaccccagaaaccaaacccaagcacagttaaccatcacagcaaccaattcctcaatttaccaaaaatcatagttttgagccaaagttctaaactagcttaaaatcaaccaagcatgcatcaaaatcagattcattccactcaatcaagcatgcttaaacttctgaaaacaacacataattacagcagcaacaacaatccaaaactaagcatgcaacctatccatttttcctcaaaaattcaagaaaacatcaagacaagtttcaagaaccataccttagcttaggatcactaccaactagctgaattaacaagaattacaaagc

SEQ ID NO: 369949 - DNA, 859 bp, Cannabis indica
aatcaaattatcaccaccaccacatgatccaattttaacaaaaatgttaaaataaaaaaaccatctttgatcgttaaagctacagagagagagaatgagattgacagagtgaggcgccactactgccaccataactactaccatcacatcattatcaccaccatcataacatcaaagagataatcatagtaagaataagaaaatttccacaccacaacatcacacaacaatccctatttttcctaagtcaaataaaaatcctttaaaattttgaaaaattagggcaaaatacagaaaaataaatataaaattttgaaaaattaccaactatccaagtagatcgagaagaaataagggagtgagaatcgggggagggatctgaggtcggtggtgggacgacccacactgtcggtggtgactacaaatgacaacaacgatagcacgggggcctgggttcaagatcggcgttgaagtgggttagaggaaaaaccaacaacaatcgtggctgggttcgaagaagagcaaacccgtttaggttaaaaaaaaagagaaagaagttgagaagaagaaaaatgaaaagagaactattgttggtgagtagtgatggtgggaggaggagtgggtgctattaagaaaatgagaaaagaagaaagttgagcgtgtctaatatcttgatgagagtgaagagggttttattttattagccccattcccgacggttttaagctgtcgggcaaagtatgggccacagtttaaaatcgtggctaatattttgcccgacgtttttaaactgtcgggaatagtgcattatttttttttaaaaaaaaaaattctccacacttataaaccgtcgcctaat

SEQ ID NO: 369950 - DNA, 730 bp, Cannabis indica
accttgccgccaccttctctctctcttcctctcttctgaaaaccgaaccctatagtgagtgagtgagtgttcacacacatcaagtggtatcttaatcatagtgtgtatggctgtgaagaatccagattcaagagaaggacattcgtgctcagatcttggtgatactctgctacaaagaggatacaagggttagagatctgagtggaaggagacattatattccgctgcaaccactgtaaggtttcctatactttatatgtgtttatttcatatcgttttagaagttcatatttaggatgttaaataacatacttgttagtaaatctaagatcctggtaaaataattccaaccattcctgcaccggatagttgatctgtggccgacccgtccacatgtagcttctaagtcgacttgttttcactattactcggctgaggtatttgtactggctctaggttattttctgaaatgctctcttctttacccgtacattcaactacaaaatctgccaaggcctaacccttaatcgctgtttggggttgaaagataatctcttactggcccaaactccactgccaatttgagcaaccttccagaggcatctggtatttgcaatatttggcgtaatggttggtcagtgtatacccgaataggatgagcctaaaagtagggccttagctttctcgttgctaggattaggcaataagtgagcttttctatcaatggata

SEQ ID NO: 369951 - DNA, 613 bp, Cannabis indica
atcttattaagtgtattaagtatgtatgaccatcatcttgtaaaaatcgtcacaaaattattttttttaatacaaattacaaaatttaatatttaactaatattttattgaaaaaaaaattaataactttacaattaatattttaataagtaagataacaaaataataatataaatattttataatttaatgtgatagttaaatatactacagtagcacctctatttaagaatactttattcaagaataatttttaatttgttataaaaaaatgaactcccaattttggtcagttatataaataagaataacctctatattgtaattagttatacattttttatgtcccgtattaataaaatatacctctatataagaataattacatcttaaaaaaatatatacatatattttataaatttatttatgtaaaattaataattttatttcaaattatagtacatgtataaatattatatgtgcttgaaaataattttaatataatatagtattaagaattgtttattggtataattttgttatattgatattttttttttatattttgatttttttttcaagtgtaactctatttagttataacttctcaatt

SEQ ID NO: 369952 - DNA, 714 bp, Cannabis indica
taaaataatttccaacaaaactcgcataccaatctcgtattctcaggcccttatgtcacaggttggctggtgtccactgtagtgactatgaaccccagacaacctatgcccatcaggtccttagctttcaataatgttattctcggtatgcatgccccctgaatcttacccacgaacactgctgggttaacactatcgggctcaaataccaccatcttttgcttgcagtcaattatcgctccatatttagataggaaatccattcccaggattataacaatgtcagataattgcaactcaatcagattggcggttaattcacaaccatcaatctgaaagacaaagaccgaacccacctagtggatacaataaggtctcccgagggtaacagggttccaaatttcgaagcataaatatcacatggcttgtgaaaactttcaataactctactcgacacataggagtgagtagctcccgaatcaaacaacacagtataaaaacaaccattaatagacaactgacctgtcacaactgacggactagcatcagcgtcagccagagtcatggtgaaaattcaccccgggttatgcgtagtattcttcttaggctcctctttattggcctgaggacaatccctgataaagtggcccaccacgccacattggaaacatgctttggctcgacactcactaggatggtgtttcttgcatttag

SEQ ID NO: 369953 - DNA, 1081 bp, Cannabis indica
tattatgttgttttgatgtttattaaatttttaaaagtaatatttgattatatatataatggtaactaattagtgaacaattccttttatgaacaactaaatagttcttttgattttaaaagttgtaaaaaaatatatgtttcccacattttgaaatgatcacattgaagagtagattataacgatatatttttaaactcaaccgaatagcgatgtgatcaaaaataatttttaaagtttaagagaattaagatgaaaaaaaagttgaacaataaatttgaaaaaaagaagaaggaaaaatgtggcagggctaatagatttaaattcaataattaaaaaaaaattaaagaaaaagttatgcaacgttattaatatttaattgagattggcacattaattttgtaattgagatatggaaaatggtttttttattgtaaattattagatggttttttttagttgttgttgagcttatttcagtggcctaaatccactaaacgttaaaaataataattaatagtaaatgaacggtattttttaacaattagatattaaatatcattttcataatttagaaccaaattaaggtggtatatgtaaaaattcctttttatttttattgtttgattttatttaagtcaagtctgaagctgggttcgaggtcgggaccgggggcgggtccaagtttagagtcgggtctgggtttggttttgaaggtctaaattggggtatgagtccaaatattgattaaaaaaaactatttaaaaaaattttgaaagcggttttttttttgtttttgaaatttagatttttaattaaaaaattggggagtaatgaaaacagttttataaatcgtgattttaaaattatttttacttttttaattttaaaaataaaaatttaattaaaaaagtgttaacccaacgtactcctaactattctttctttttttaaaaaaataatatataattttaatatttttgtaggataataattttaagaaaaatcttaactagggcatcatttcttttgtggactgtactaggaacatttcttgttttttgatatataataagtatta

SEQ ID NO: 369954 - DNA, 602 bp, Cannabis indica
ttttaagcttgctttcttcagctacacactgagaaattaggtcgctgatagtccatgtttgattgtaagtgttgtaggctgtcttgataaggctgaaagaggcaggaagagcatgaagagctcgatgaataatgaaagagtcaggaagaggaatattatgatcttttaacttggactgaacattcaccgattttaaaataaaatctcgcactcattttaattaatcatacttaatgtttgtcatttcatccagaagatgtccagcttcagtattttcactagtgtcatatagtttttctacaaccttgaaaaactctttggcatttgtagtttttggcaaaccactcaatagatgttcaggaatagatcttttcatagcaagaagactaagacgacttgacttttcctattgtgcatgaagagttctctgggcagctgtactggagtcagtaagatcagcaggtttttcttctcgtaggcacaagtccaaatccattatgcctaaagtaaattccacatctcgtttccatgtcttgtagttggaagcattcaaaatatggatggaagcattattgttgttcacagaaaaggagactgaaaaa

SEQ ID NO: 369955 - DNA, 938 bp, Cannabis indica
tgtgtgtaggccatattatatataattctatcaaatctaaattaattatatgatttattttacaataatattaacaacatatatttacatattgcggacatatagttattgctgtatatatatatgagctagaggccgtacacttacaaaatatgtgataattaagctggttgtttttttttttgttagtgatcataggcttataattttttttgtaatatttgattaatttaatttattaattaattagatttttattacttgtgttttctgtgatattgaacagtggaaaataattgtataggcaatggcagatttaggatttaaagtttgagtttaattttatgtttttggtgagatttgaacttatgacctctatcatattatatatatatataatctaatttaattataacactaaaattaatcttacgtctataaatatcatcttttattacaaatatatgtcgtaattaattaaaatgcatatacatttttttttaagtaggcgactgtcccgcctcgttcctatatgggtccgctcctgtgtataagtataagtaaagttagaagagagatgaagctggagccaggctgtgtaattaaataatgtgagaaatatatgtatatatatatagaatatatatataggccaaacaaacgtaactaaatgaactgagctaaaattgttttgccacaccacagcttttgcaatctttgtttacttgttataaatatatctcaaataaataaatggaagctcataaaagcttatacaaacttgtaaattcaatgtgatttttcttcttcttcttcttattcttagagagtattttaatactctatttatgatttatttgaataataataataaaaggtattgtttgagtagtaagggggtaaattgggaaaagtaagcatgaaattgattatacatc

SEQ ID NO: 369956 - DNA, 590 bp, Cannabis indica
aatttccaaaaatctccacgtcagcatcagtcttagtgcaaccggatacatatataagcttctgggatcatggaccaaaggaacttcctgaagaagcttctggataggatagaaacagctagagccgactatctggaactgccttccagggagatcaatcttccaggaataataactagctgtgcgaaactccttttttgaggagggctaggtatcatgaaggctgaacccggagtggacatgatagtcatccgggaactccctttcggacacaactatcattccacaagactccttccgggatggacaagttagctgtctgggaacaacatccgagagacacctaactttccaggaacaactttctaggaatgattttggagaccttttcacttggaggaactatacagcaaaaaaaaaactaagtaaggcaaccatataattattattttctcttcatttttggtttatagatttaagagtttttttttaactttagtacaaaaaaaactaacaacatagtaataactaagtgatactggttaggtagtttctaacacgacatgaaactagacacgaataccagaaac

SEQ ID NO: 369957 - DNA, 553 bp, Cannabis indica
agattctgggagagtctgcatcgagctatgggtactcagttaaagttaaccactgcatttcatcctcagacggatgggcgatctgagaggacgattcaaatcttagaagacatgctacgggcatgtgtgcttgactttgaaggatcatgggtaaagtacttacccctgatcgagttctcttataacaacagctatcaggaaacaattgggatggccctttatgaccttttgtatggaagaaaacgtagatcacctgttcattgggatgaagtaggtgaagaaagttcttgggtcctcaggctgtttagagaacgagtgaagcagttgacaagattagagcgcaaatactcgcagctcagagtagacagaagagttatgctaatccaaagcgtcgggatatagatttttagattggggacatggtatttctccaaatatctctgatgaaacgcattaaacgctttggtaagaaaggaaagcttagcccgaggttcattggaccttttaaaatccttgagaggataggggaagtagcgtacaggttggctatgcc

SEQ ID NO: 369958 - DNA, 390 bp, Cannabis indica
aaaaagttatgcacgttttagtttgaaaaaatgaatcttttgcccttgttagccatccatcttaaccagaattccagttgtaaccaatctagaattctgaatcacagtagaattagccttgaaaaatgtgctaacggctataaacaactagttttcattcctacactatataaactcatttttcactcaaaaattatggtgggttgagcttctattgatcatataacatcattctaagtgttctaagataaagaattatcatcttttcataaacagaccaaccacacacacttgagcgaaacttgctcttatcttctctagtgtacttacaattctctctaagatttcacattgtatttcatctttttagagagaaatttcattgtattt

SEQ ID NO: 369959 - DNA, 519 bp, Cannabis indica
atactgtttggatgatcttccacatgatctcttttgtgacaatcaatagtccagtgattcgtaagagaaaatactgggtaagctatgcaatctcacatcacctagggaaggtcaagttggatgattttgagactgtgtaggtatgggactacacagttgaagaggacttaaatggattgattggtactacccatatcaacaaggtgcatcttattatttggtaacccatcacgaaataactccacggttgagcgtgcttgacttcagataatgtcacgatgggtgatggcctcttgggaagttttcataggaaatgtacgagtggggacaaagtacgctagaaacactcgtgttggtttgtagggtcactcgtcattccaagaagcagccagattgacgtactcgtgtaaagagtcatcattccatgggtgtaaggacctaatgaagctcgaaatggggacgttacaaatggtatcaaaaccttaacccaactagaagtgtggtcaacgaggacgtcgg

SEQ ID NO: 369960 - DNA, 734 bp, Cannabis indica
ggaaccaactcaattacaaattcaatctccagggtaggtggcaatcccggtaaatcttctagaaagacgtcaaggaactcgcacaccaatcttgtattctctggtccagatgtcacaagttggctggtatccactgcagtgactatgaatcccagacaacctctgttcatcagatgcttagctttgaaaagtgttattcttggtatatgtatcccctgaactttacccacaaacactgctgggttagcactataaggctcaatcacaaccatcctccatttgcagtcgatcgttgccccatacttggacagaaaatccattgccaggattatatcaaaatcagacaattgcaattctattagattggcggttaattcaccaccgtcaatccagaaatacaaggatcgaatccacctattgcatactataaggtctcttgatggtaacagggtaccatacctcgaagtatatatatcatatggtttatggaaactttcaatttactctacttgacacgtaggaatgagtagctccagagtcaaacaatacagaataagaacaaccatttatagataactgacttgtcaccactgacggactagcaactgcgttagcctgagtcatggtaaaaagtcgtcctgggttctgagtagtactcttcttaggctcctccttcttggcctgaggacaatctctgatgaagtggcccaccatgccacactggaaacaagtct

SEQ ID NO: 369961 - DNA, 535 bp, Cannabis indica
aaatttcgtgaaactgtatttttgtaattttttttttattgttttgtgtatttgtgaaataattaataaattgggattattacataaatactcaaaaataacaaaaaagtttacatttttacaaacctacaattttaatttatttttatatttttacaatttttttttacaaaaatataaaatattatttttttttttccattattttcacgttgctataacaagaaaactatataaaaatactatttctttctttttttttttcagaatggaaggaagttcttcaattataaacgggagcacaatgcatcaaatgtatgataaaatcactttttgtgtcaaatataaaacaacatttagggagatgatcttatagatcaagaaagttggccagtttctttccaagtggtgagttttagaccctgcactgtaaaagattttagaatgtacactatttatcttttcatttctttgttagaatgatggactaataatcatcattcaagcctactttcatgttttggtacaatgggtt

SEQ ID NO: 369962 - DNA, 481 bp, Cannabis indica
cataaacctcgttgattagcaacgagctgcacagtacgtttaaaaatcacgtaatacgcctaagttagttagtgtgttacaaaactgatgcatggtctcagtttgctgaacattggttcttgctgaacatttcgagatttcacatcatcaaggcttcagtgaaaagactcttgtaggttgctttagagaatcaaggtggaaatttgtggaaattgatcctctaaactaacttattatccaactcacttaaaccaattaacttaactaactttccgttatgttagttagttagttgatgctatccttgtttgagttgggtctataaatatgtctagtcttttcactttacaaaagaggaataggagagaataagagagagcattgaagagagttgcttaggatttataagctgagaattctgttcttgaagagggtcaagaacaaggggtgtactcaggttggtagagagaaaactgtgact

SEQ ID NO: 369963 - DNA, 743 bp, Cannabis indica
ggtgttggctgcccaggaggttgcacgtgcaggccaaatagactgcaagtggcccaggacgcgcgcgggagcagggtgtctaaccgagaaaactcggtgacttgcggggtaacacgcgcgaggaagaccatgcttgcaggatgcatcctcagacaggcaggcgggtgcagcttcggacagaacccctttagacacgcacacgggttcatcttgtctgaccacctgcgcgcgcatggtgtggtgcgatgacactatatgcacccgaaacttcaaaacaccatatctctctcatttttaatcggaattgagtttcgtaaaaacgaaagttgcttaatttttcacaaggaatccaaataaaatatttcagaaagaaaaaaaaatattttgatggaaaaatttcgtaaatcacctactttcatcaaataatcacataaaccctcatgaaatcatccaaatcaacacaaacatcgttttaattcatatttcatgaaagtaaatcattaccatggctctgaggctagttgttggaattattttaccagaatcaagatttactaccatgtatgttgtttaacatcctaaatatgaatttctaaaacaatgtaaataaacacataaagtttgagaaaccttacagtgggtatagcggaattaaatgaatccttccgctcagttctctaacccttgtatcctttttgtagcagagtatcaccaagatcaccgcctgaaactccttccttgtg

SEQ ID NO: 369964 - DNA, 783 bp, Cannabis indica
ttaatcatacaaaatgatttttcttcataatatttttttaagattaactaaaaaaaatgaaatctttctcatttttattttggagaagtctaatttgttatttgtcaaagtctaggagacaaaattactaattacaaagacacgtcagcatttacgcaaaataatgggacggaaccaaacaaaattaataactaaatttttgtaaatataaaaattcggagaaattttttaacaagccatatattttaaagacataatttttagttatatacgtaattatcaaaaatatcttacatataacgataaaaaaataaaacatcctatatatgtatatgcttaccgaaaattcgaaaaaaactcataaccaaccgaaaaaaatggcagcccagaattttcaggcaaccatcgtttgcccaaaacggtgcgcatcacactcttaccgagcaatatatattacataaaaaaaaaaaaaaaaaaaagaaaaaaaaaaaagcttcaatcaaccaaatccaaactctatcgtcgaagcttcgaaatcataactcgatcgtcgaagctctccaatcatgtctgtggaacctagcaactaaatccaccattaaagctactcaaaagcttcaattctctgaaatcaaacaaatttaaacaatctcaaactagaatttttcactattcgaatctccaccattgaagctcttctaacaactcagtcgaagctactggactgccattaaaattcgtcgaagctctccaccattaaagctacacaaaaacttcaattct

SEQ ID NO: 369965 - DNA, 404 bp, Cannabis indica
gtgagtagatctaagatcgtggtaaaataatgtccaacaatttcaacacttgttgaaatagtggagactgcgaattcccaaaacccaaaaagagaaacctcataactaaaattcaagcttcatccctggcggtcaccaccaccaacgaagccattcaatcaaaatcatcatcatccgtctacctccaaaccccgacgagctccaaaaagtcttcagccaattcgacacaaacgacgacaataagatctttgtttctgaactcggcgacgttctcaagaagatggtacaagaagaagggctggtctggttccagttggggagagagaagaaaagaagaagagggaggctagggtttcggttggtgggtttggtcttgcacgcaggaaagaagaagaagaagaaaa

SEQ ID NO: 369966 - DNA, 1413 bp, Cannabis indica
atgatgactctttggttagtaggctctataaggaaaaatattatgctcatggaacttgttttctgctgaattgggagataatcttaatttcatctggtgaagtattcttaaagctaaagatctagtacatttttgtgcttaaagaacaatcgctaatggggagaatgtctccattcttgcagatccttggcttcttcatagttctaacaactatgtcgttacaaggcaccctacttttgtgaacaaatcggtcagttgcctctttcaagttgacactcgtgcttgggattaggatgttgtgagagacttgtttatttcacgtgatcaggaccttattttttccattcagcttagtgattcagctgtaaatgatggttggaactggagacttgagacttgtgggaattattcagttaaaagtacttataaatttttgcaagaatctaaaggtgctgggtgtcgtgatgccaatactcatttttggaagggcctttggtcgttacgaatacctcttaagatcaataacttcttatggagggctgcttcgagtgtgctcccaacttgttttcacctccaaaaacgtcatgtacccgtcaatgctgactgtctgctgtgtaacgctcatgcagaaaccgttcaacatgcgttggtggagtgtgagtttgctaaagctgcttggaatcgcagcatggtcgacgtcggggctgtggctgcaacattcagcagtgtaatatccagtacaagtatattatttttggtatattattgtgtgttttgatatgttattgttgcattaaataaaatatgaatattattagtatttgctaagtacaattatatagttaattagattaagtattaatttatattaattatattagagaataagttattagtaaatagttgtatgattaagtgataagatttgttatacatgtaataggaatatagataaaaattagtatactattttatacgtataggtttattaaataaataagactagtggtatttataataggaatatatatatttgtataagcttgataataaaatatatatatatttataaaggctatagtaatagatgaatagagagagggtcacgtgagagtgagagaagaatgaggaagttagtttaggatatttgacttagttgaatttaaatttaaattatgaggaattttatattagtaattaatcaatattttttccttaaaaaaataaaaggtatagctgagtttaaattttaaattcctagattttctctaatcagttgaatatatacgatatggttttaccattcaatgaaacgatgaacacaaatttcattctctacttctttctctccacttagataattcctaaatctctcatagcctctatcacaccaaattacagcatagcataaat

SEQ ID NO: 369967 - DNA, 704 bp, Cannabis indica
gattgcacaaagtattatgtactttgatttagccactgaaatgtggaacgatcttgctgagcgtttcaatgaaggcaatggccctcggatttttcaattgcagacccaaattacccgacttcaacagggtgatcaattggtttctgcctactttacaaagctgaaatccctatgggatgaactcaaagagtttcagccgatcactacttgcacttgtggtgcaatgaaagtgttcttggattgttacaaccaaaatcaagtacttcagttcttgaatggtttgaacgaatcctttgcttcggttcgagcccaaattctgctcattgaaccaatacctaatctctctcgcgttttcgcattcaagaggaacgccaaagatctcttggttccgctgacccaattcctcttgcggctgctgctggtccttcgaatccatcaagggccaagaaaccacggcccttgtgttcaaattgtggcaaacctggacacttagtcgataagtgttactttctccacggctttcaacccggttatggcgacaaaaagaaacaagaaaaaggcaaagctaaggccaacaatgcctcttctaacaccccgaaatctgacctggatggacctcataccactgctgatctctcttctcaatgtcagcaactgattttgtaacgccctaatgccaaggcacgctacagtgctttttcaat

SEQ ID NO: 369968 - DNA, 503 bp, Cannabis indica
attaggcaatgcagacgcgactgtaggaggcactgtaggatcatcagtcgactccacggatggaacaaccatagcaacaggggttactgcaatgggtgtgatattctccatgatagagaggaaaaaatttggatgatgcagagcttagggtttcggagaggaaagtgaagaagtgagactgatcactttccgtaggccttaagtataggcaccctgacacaactgaccaggcaaaaaaaaatgatgatgatttttttaaaatttgatttttgccaaagaaaccgtacgcgcccaaattgaatatttactaccacatcatacggcacactaaacgaaacaaaccaacgtcatcaggcaatgagtgtatcaaagaaaccagaattgtgacaaatataccaacaatatttgcatttagcccacacttagacaaaacagaaaaaaacaaaaaaaaacttcaagatactcaacttttaagaaaaaaataatatcagctgatcaatgaa

SEQ ID NO: 369969 - DNA, 836 bp, Cannabis indica
aagttaatttgaattatttttatatcggtatttattttcaaaaaataattttacttacgaactctgttatccattttttttatactaatatttaattatagcaaaattattatttaagtacttttgccactaatttatttgcatacataattctaccataattatattttaaattaatttgctttaataattttataaaattatgtattaatatttttatttgaaatgttttattaatttcttttatcaagaaatataatttctatctccttcaaaagagaaatttacaactcttttatatttttaagaacaattttatctatgctagacaactttctttcctgtacaagattaaatctacgtttaaagctctctttaatgcatttatctatacaactcgaattcataagtttaacacgtaccaaaaatactaacaacaaacaaaaatattttattctttaacttattattggtctgagcaagcccagaatgagagaacagagggtgagtagaagaactactgtggcggcaatggagaagtaattctattgtgaaatattaattaaataataaaagttataaataaactctcagaggactcctccattataactttagtatagtctatctcttttaacttattattggtctaatttcttaccctatgctataggaacaaaatcataagccctgccctactctaaatgattagtaatttttatccctgaacttaaacatgtagtaaatcgtgccctctgaacttttttggccgttaaaaattccccccgaactattgagattattcaatttaaggacttttgtctattttcattcaa

SEQ ID NO: 369970 - DNA, 564 bp, Cannabis indica
ctgatctggttcatacatcggggtttgattatatcctgagtatgcgtccatgaagctgagaagttcatgacctgcagtggcatcaacaagttcgtcaatgctaggaagtgggaaactgtctttgggacaggctttatttaaatctgtaaagtcaacgcatgtgcgccatgagccgttaggttgggcacgagtacgggatttgctaaccaatcagggtagaacgactctcgtatgaagctgcatgctaggaggcggtcgacttcttcttttagcgcttggtacctcgcggggtccattttgcggtgcttcttttggacatctcgcacttcagggtcaatgttcaagcaatgacacatgacctgcggagatattccgaccatatctcaatagtgtcttctgcggcttgagcggttgcggcataatcgtggatcctaggatccaaattcggaccgtctttatgcggcacttcttctataattaggacctcctagcgaggaggtggtgcctctaacagatagatgacattaaccaatttcttctctgcgagcttgactgctgcattgt

SEQ ID NO: 369971 - DNA, 740 bp, Cannabis indica
taacaatgccaattctgacgaattttctagcattggtagcaactatgacgacttttccgacaccgacaactacttcattgactttttcggtaccgacagcaaactttgggaaattttttgaaattggcattgtcgccaaaaattttactaaatcaccaagaagttggtttcttatcaagaaaccagtttcttagtatttttgttgtaatttttggcgataatgccaattccgatgacttttttggcgctggaagcaattccgctaaattttctagtgccgacaacaactccggctactatgccaattccgatgacttgtttcagttaactttattgtttaacatttatatttcgttatgatttttcatagtatcgaatctagtttcagagggtttataagtttgaaactggctttataggttttaagagttttgtaatgaggttgctctatattatgatgttattgtatattttttattttaagtttctttttattattttatttctaggtttgaaactggttttcacacttatattttgttttagattattgctgtgcattatgtgttattttgtttgtatttatgagttattttttttgtgttttatttccatttggttgattgatgaaactggtttcaatttaggggtgttcattggatcatatccaatggatttggacccatccaatccaatccaattgaattgagtcatccgatccgattcgatccaatggatgt

SEQ ID NO: 369972 - DNA, 748 bp, Cannabis indica
tattgtgcaagatggaattgatttttcctccagctttttttgacataatgatacatttggattgcatttgcctgaagaagcgatattgggtggcccggtctttatgagatggatgtatccttttgaaaggtacatgaaaaaattgaagaattatgtgggaaacaaggcacgtcctgaagggtcaattgcagaaggttatgttgctgatgaggcagtaaccttttgttcaatgtactttaaagggtgtgaaacaagatttaatcggcttgatcgaaatgaagatgcgccttctgtgtgtcgctatctctcagtttttaattctcaatctcgtcctttaactagcggaattatcaagcctcttgatcatatcggtcgtgaaaaagctgagtggtacattcttcaaaattctcctgaaatccaagcttacttagagtaagtttgttacatttttataaattattttattaaatttttagtttttattctctatctccctctatcgtaccttgacattatcatacttcacagtgaacatttggacaagatcaggcatgaatatcctaatggtaatcacgatgtcttgcataggcaaactttccgtccgtggtttcataagaaggtataatgacaaaattgtaaagttttaattcaaccatttatattcctctcatattaatacattttatgtatttagatatatgagttgcacaagcttggaactttacaaaatggtgatgagttactcgct

SEQ ID NO: 369973 - DNA, 575 bp, Cannabis indica
caggacaagtgtggatgttggcaacaatatggatgcatgatttcagcaattggatgttggtgcaataatgccgaggaagagaaggcgagttggaggaggcggctatggtcagctgggccatttggcgtgccaggaatgactttgtttggcagcaagaaagttggactgctacaaatgtggttacatcaacaagaacgctacttgatcagttcaaagacgctaaaaaaagaaagggtctctctttgtcttcgttgttcgacggaggctgtttggttgagcattggagtgcaccttcttcaggaaagatcaaggttaatttatgttgatggcgccttatttgagcatgaatgcaggtttgggtgggattgtgtggcttgcgattgccatggtaatgtcgtggaggctttaaatcgaggtcatatagggagggttcaacctgaagttgctgtgatggttggcatcaaagaagcattaagttggattgatcgtcacaattggggacaattaattttgaaatcagacagcttggtatgcatacaagctattctaagtaaatctctatgtcatcttttttt

SEQ ID NO: 369974 - DNA, 395 bp, Cannabis indica
gtggtagttctcgtttaaggactgtttatttaaaaaataaataaataaagttttcattcaaactaaaattaactattaggacaatcatttattcaaatatttttaccaacagaaaaatatttagtgcataagctacactatttacagaattatgtatttttgatatacatgaataattacaattatatatatatattttttttatgagatggtaattatagcagatattttataaaattttaaataatttatggtaccaaaattaaatttaataaataatttattttacatatatatatatttataaaaaaatacgtacacaggtgtagtatattatttctttgtaatttcttgacattctaaattatttaaaatttacaaaaaaaaaaaaaaaa

SEQ ID NO: 369975 - DNA, 596 bp, Cannabis indica
atgaatggttggggaagattcgggggtgcaaggttgctcgaggggctcctgtgttatctcacatattctttgctgatgactgttatgtgttctgtaaagcctctgaggatagtgctattaacatgatagaaatgttaaatatctttcaaaaggcctcaggacaacaagttaatctacagaagtcctctatattttcagcgctaatattgtcaatgaggtgaggcaacacttgtgttctatgttgggagtgactgaggcaggtgataatagcacatatttgggtttgccaaatattgtgagtcgtaataaaacaacctcacttgggttcttgaaggataaaatgcgtaaaaagattcatggttgggaaggaagattgctctctagagtagggaaggagttgctaataaaaactgtggctcaatctcttactaattatgcaatgactttgttctagctacctgtggaaacttgcaatcagaaggagccattgatgtgtaagttttggtggcgttcgtcgaagaacaacaaaggaatccaatggaaaaagtgggatagattgacagtacataagtctaaagtgttgggatttatgccct

SEQ ID NO: 369976 - DNA, 422 bp, Cannabis indica
aactcaaaatctcacttttctcacggctcggtttcgttcgacgagcctccctctccgtctctgcctctcaccaccgtttctaaactctctcaaccctaaacaatcatataaacatcttatatatagtcctaaccctaatataaccctaaatcaacatctttaaattttaaaatatatatacatatattcctacgtaatagttacagtaataataataatactaataataataataataaataataatagtaatagtagttataataataataataataataataataataataataataataataataataatattaagtaataatagtaatagtaataataataatagtattaataataataataataaattaaataatatgctataatatatttatccatatttttattattaatatacc

SEQ ID NO: 369977 - DNA, 631 bp, Cannabis indica
ggccaatttcatgtcagaagaaagtaaattaataaaattaaaaaaaattaaaaaaaaaaagaagttggggtttttgggtggagaagttcattggagcagaaagtacacgtcaccagtaaccccgcgttcttccctctaaaaaagaagacagtactggtcggtcagtcatcacagtaacacgtggcagtgtttgtagggctattgtcacagcaccctgaaaatctagttcactatcattggccctacacgctcctctcctctccttgtctctttctatattcttctcccccctactttttaagtaaacgttcattaatattttccaatttaaattaaacaaaatatactaaaatataaacgaaattcatgcacctttttcccctaatgaaattgttattattatcatgaattgaatatggaataatatatatatatctatatatataaaaaagccacgcccaacttcctttctccttacgtcttctcactatacataacgtacatttttataaatatctatgtattttgatcagtctcatacaccaccaattatacattgtaaaacaaaaagaaaaacttagtcaagtgaattttgataattagtaggtaagatgtaatgattacgtgcatg

SEQ ID NO: 369978 - DNA, 507 bp, Cannabis indica
aactcaagcaccttctcccctggccaaattcatctggttcatcctcactttcagtaagttcaagcggttcaacctcatcaggaagattgatttgatattgcctctccatttgaacacctctctttccctggttcttcgatttcttagcatcagatttcagttttccccctctcttcgaccgagttttcgccatggcttcagcagagtgctgcacgacctaagcagagagaaaaaactttatccctgcagatttattataataaccctaatatttatactatcaacttatcataatattcccatcaaatctactaattaaacatgtgatgacatctttggctcttaattgagtcaccaaggtcgccaaacctaaaaatatttttattccataaatagctcatattatattcacacatgccatgtaattcttcgcaattagtaaagtacgcttatttatccacttataataaaattaaaatttatgctgaaatagataagtaggatcat

SEQ ID NO: 369979 - DNA, 334 bp, Cannabis indica
atcctgataaaataattcccacaaaagcatcattcgcaatggaggaagaagaattagctttgatagcttttgttccaggaaagatcgactaccataattgtttgatagtcgactctaaatgctcaaatcatatgaaaaaagatgaagagaagctgcaagacatgcagaatataaaggtggccgcgtatcgcgcacatcgataaaataataatcacgctgagattcagcccaaaagaagtttcactccaggatgtctaccatgtacgtgggatgaaagaaaaacttaaaatcagtggcacaacttactgcgataggccaccatgtcgtattcggc

SEQ ID NO: 369980 - DNA, 635 bp, Cannabis indica
catacacgatcatatctgcttcatattttacatctaaatttctagtgatgaactatacctttacaattgcttaacaaaatggttgaataaatacttcccattatcccacgtggccacgtggtctgactttcgactgacgacagaagctggtgtggtcttccgattttggtggtggctagaatggtggtgtggtcctccgatgtggtcctctgagattcgtggtggtgggaatggtagtgtatttttttttttttttttttaagtttttttgagagagagtttttgagctttttgaaaaaattaattgggatggtagtttaggtgagcataagaattagtaagataagatggtatagaatattttggaggtatttagtaattgggtgattttttaagtatagtaaatgaaattttccattatacacaaaagtgacccgctcattatagaactcctctctctatatatttttttgggtgattctacaatgcacccccataaaagggatgtattgatgtatccttaactaatttcaacactcagaaaaattttttagtctaattttttttcatattcatgtacattatagctatttaagatatcctacaaatttttgagaaatttggaataatttaca

SEQ ID NO: 369981 - DNA, 512 bp, Cannabis indica
actcgggacccgaaattggacatagacccgaacctagaccctgatagaggttcagacctggatacaaactcggacatagactcggacccgaactcaaacccacacctagaatcagacccaaagctagacccggacccggacccaaactcaaacccagaccaggatcagaaccaaggacttagacccagaacttaatccagactcatatcgggataggaacttgggactcggaccacaaacccacacccggagccttatctggacgtagattgaaatccagacccgaacccaaaatttagaccacgactcgaactctgacccgaactcaaacccaaactcgaacttagaatcgcaaatggaactacaactgaactaggactacaaacttgggactcacaccaaacctagaccaagccccaggacgcgaacccacacagtaactttgacctggacccagaatcaggatagggacctaggaaacagaactacgatagggacctagtacctgacca

SEQ ID NO: 369982 - DNA, 500 bp, Cannabis indica
gggtggaatcttcaaatgccacagcttgcgccaaaatccagaattgtcagcgccagagtgatcaggtttaattttctgcagcaaatggtaggcagattttacagaaaaagacccagtacgatctcccgaccaagaccaaaaatcagtatcaacatttggagacaacggaaggccaagaattaaactagcatctcggttattgaatagatcattaataacctcataatcccaaatccgagcctcaggagagaaaagagaactcacagtgttgttcaagagagcgggatgagttgaagttacaagtctatgttcattgtcaggcagccaaggtgaagagagaatgctagtagtttccccatttccaataatacgaacagccccgtgccgaaccacactttgagcagcccaaatactgcgccagacgaaactgggattatttcccaaatcggccgaaagatagtcacttgtaggaaaatacttggctttgaaaattcggccta

SEQ ID NO: 369983 - DNA, 852 bp, Cannabis indica
caacattaaggtgagactatcatcatgcttctcgcatttgttctgattctaggctcctatcatcctttcctcttgctcttcttttgtagagacttccatctatatttttttaaatttctaatgatgagaaagtatagttgaagactatttgaagtcactcccatttgtcaattacgagcttcaatcatggctttcaactcactcttcgaattagcatttacgtttaagtagttcaaatgctagtttgagtaggtatgcataacaatgttggcttgcatgtctctggaaaataaatttgtgtttatgcaatttcatttcatattttaattgaataatggatgaatttctccgtatctatatataatgttgaaaatatgaattaagttcattcatttgtatctttctccttataggtctaacttttagattagatagatattattaaaattgtaataatgaatgtatttgatattatgaatcattatatgttgaattacctcagtgaaccttaatgttatgtattcaataatattcatttagaattgaagattgtatgtgtcaagaattataagatacttttaaatctttttatacaaagatacatttaaattttgcatagaataaattacttgatgagtatggagatgttagtgctcatagtatacttgttcaagataactagccatatttaagattgttgggacatatatataaggaccttgtgaccttttgctattttattatactaattgattatagtacaatttacgatatatatattgagttatgttttaatttgttatgtctttgctagtgataaggtttggtttttagtgatgatattctttataa

SEQ ID NO: 369984 - DNA, 539 bp, Cannabis indica
taggacataaaacccaacaaacagtgcgtgacaagagtaaccctaacccagaggaaggaagtctggacgtattaagcaaaaactcaagagagtacattccccagaaacttcaaacacaaacccagaaaaacaaacagaaagtaaagcatgccataaacacaaacagtaaagtgagagatgcgagaaacttacaatgaagtgttagaactgggggtttgctgttgatcaaatgaggaaatgtagactgacaatagtaagcaaggaaatttgtaaagtgttcgaaggttttttcttggtctgaggatttttcctctctggaaaactcgaacaaagttggcaagaattggaaagtaaccaaatgaaggaaaggtggtagcttttataggcaaaagttcatgaggaataggcactatcacctaccaatcgaacggctggggaggcgcacgattcgaattcccaagaatcaacggttggattggttcgtaattaaggcggtagaaacgtttgagtatccgtctgacaccattaatgcgccatat

SEQ ID NO: 369985 - DNA, 508 bp, Cannabis indica
gggtccttgtttgagttcaggtctgaggctgggtccttgatctagacaccgactacgagtttggtccaaacccttggtccagatctggaccctaatctcgagtcctggtctgtttccatttcaggtggtggttcatgagctgggtcctaggttcaattttttgtttagggtcgggtactaggtcccggtcctagtttccttgcaaaggttcctatctcgattctctgtccaagtcccgatgctggtttgggtttgggtcccagtctaggtttgggtttaagtcctagtctcgcttaaggttttgaatctcggtctgggtttgtatctgggttcaggtttgggtttaggtcctggtcctaatcctaatcctagtatgattccaattccagttgcgattctgagtttgagtttgggtcaggattcgagtccttctccgagtttgggttcgagtgtgggttagggtccttggtctgggtctaggtcaaggtctgagtcccatgtttcgata

SEQ ID NO: 369986 - DNA, 598 bp, Cannabis indica
gatgttaatgaaacatacttgttagtaaatctagctcctggttaaatatttccaacaacgggtataagagccatggtaatgatttactttcatgaaatatgaattaaaacgatgatttgtgttgatttggatggtttcatgttggtttatgtgttttttgatgaatgtatgtgttgtacgaaatttttcagtgaaaaattatttttttttctgtctgaaaatattttatttggattccttgtgaaaaattaagcaactttcgtttttacggaactcaatttcgataaaaaatgagagagatatggtgttttgaaaaatcaggagcatatggtcgagcaccatgcgcgagcaccttcggacaaggtgatccgtgcgcggaaatcagacaacctttgtctgaagcgcacggtcagcctccttcagacaagggagacgcgggcgtgacaccctgcaaatggcgtttcctgaggctggtccgccgagatttctcggctgctgaccttgctgcatccctgctccgcgggcgtaatggaaaatttgcagcctttggaggctgcacgtgcagcctcctgggcagccacctccaaaacccgaattt

SEQ ID NO: 369987 - DNA, 314 bp, Cannabis indica
tttttgaagatttgaaaaaagttaggggtggtgacacacactcacgcgggcggacaccgagttacactcggtcagatgcgtgttcggacagcctcatgtctgagaaaacgctcggattgtcctgaagccctcatccgcgtgcggaatggctcttgcagcctccagcgccgaggaaactttgcctaccttccccttgtgcgcgcgcagatggtatgctgtgcataccatccgtacagctcacaaattttttcgtttcttcgatttttcatgctatttcatggaattaacttccgtttttttgtgtagttttgtat

SEQ ID NO: 369988 - DNA, 827 bp, Cannabis indica
aacaatggtgtattttttttttggttttgggtattctttggtgtgggttttgaagatatgtgtagattattgagtgaaattgggtttttgattggattgggtttaagaaatttgagaaaagatgaaaagattgaagtttgaagatgaaaaattgaatttttgagaggaaaagagtgtagggtcggctgagaggatttgaaatttgaatttggtttgtgtagggttgaatgagggggaaagtgtgaatttatagaatttttcgtcagcaagtcgcgacctggccacaggctagtcgcgacttgctaatcgaggaaaattgggcgtttctggaaaatcagcaagtcgcgactgaggtcgcgacttgagaaataggtcgcgactagttaatttttttttttttttttcgttttttttttttttttttttttttttttgtttttttacctttacaagtcttctcaatttcaaaatcaataaatacttttgtaatagatccttgacaactcataaactacctcttgcttcaaaaaaattgatacaaacaaattagtaaaaagtagaaagagaaaatcgaattagaataaaatttaattgatttaacattaactaaaacagtcttcgctaacggcactaaaaatttattattgattttccaacacgtaagtacacatattgtttgtaagtaataaactcacaagagtgagatcgatcttaaaaagactatagttaataaccaaacaattaaattactaattcttcttagagtcaataaaaataagaaaaaatgtttaatttctactaaaaataaaagaaaacaaataattaag

SEQ ID NO: 369989 - DNA, 694 bp, Cannabis indica
caccgacaaaggtggagtagaggtccgcaccagttcagacccacctctcggttggtcagacctatccgaactccctcctcgagactccattggctgtgaaacttttggagtggaagggtttgcaaccgtcagctcctcaaaaagatcgatgacctccccagcaggcgtcttttccttggaagaagttccctcaccgcctttagacttcttggccgggggagatgcgctggagctccaaccaatcctcttcctcaaagcatcgagcatcttctgagacatgtctgcacggaacaaaaagtaacatggttagggaaaacagacatcagaaacatgaggcataataatcaagaagctcaaaaacaagatgaagtagtatgcaaggtgattgtccgaacaagcctcaaaagtccatcatcacctgacatgcctcttatttcggacataatggctttcccttttccgagttcgggaggaggtggtcgagcaggagaaatgggctccctgatgcgaattgcatgttcgataggcctgggctgggcttgaagctttttcctcctatagagtggagtcacttgctcttcctcagcttcatcttcaggattcaagggctcctgagcatactgctttgcccttgcacctcccttcaacttagcttcacgcttaagttgaatgagttcattctcctgatgagctc

SEQ ID NO: 369990 - DNA, 580 bp, Cannabis indica
caatatccagagttattcaggttagatttcgaggacaaaattcttttaggggggaatagttgtaaagaccgcctagctttaatttggaaattagcagataattagggtttaattatggaaattatttataaatactaaattattaatttatagtgatttatttgaattcagaatgcatttaatatgtcatatatagaaatttcataattttgaatatttagtgcttggcaacattggaacacgtgtttggctattaaaatcatatcctagtatttttagtatagtggggcgatatagttagacatttggaatgttgggaatggttgggatttttgaatttcccaaaatacccctttagtgacctttggtggtttttagtatgaaggggcaaaatggtcattttcaccaagtagtgttttgtctttttgtgggataagttaatatgatttctatgatttattgggtgagcttttttaataaaattaagctattatctcatttattcaagaaaataagaaaattatcaaaagttacatttgcactctcaaactctttctcattttcgaaacccatagaacca

SEQ ID NO: 369991 - DNA, 672 bp, Cannabis indica
ttaataatatatttttggtaattttatatgtgcgtaggtagggatacacttgtaatttgacattagtttttatgcataagtaatctatcatgttagtcactcaatatatatcacacataaataatatagatgatactgagtaaatatagaccatatataaaaaatattaatttacttaaattttttttaagagtacgagtaatatggtgattttcttttttttttgaaagaagagtaatattaattgggatatttattttcaattttgttataaataatttaaaatttaaaataattaaatttaataaattttaattttaactgctactttgttataatatttaacagagcacaattagtttcataattataattattaatatttagatataatgcaaatttctgccttaaaattatattttaaatatgacatctgtagggcaatttgtaactaactcctaaatcttgatccactagaggcgaagccacctatgatcgagtttatttgcttgtttctgtttgtatgttgcttatgtggatatttgtaagtgtactggactggttataagtggaatttattcaacaatttccacctaatcctctaataccagttctgatgtctgatttgtttatctctgagagtcttagcttgataggtcctacttttagtct

SEQ ID NO: 369992 - DNA, 801 bp, Cannabis indica
tcccattggcgggtctgaatttgttgcctcatagtttcgaataatgggctattcggggtgggattgccatcatattcgatacctccatccataatgaaagctctcttttgcaattcaaagtatctttcttgcgctttcaaactaacaaatctatctttttcaaaattggactttgacgctggtgttggtggtttcgacgatgaagcacccgattgccctgttctagtacgtaagcgagaatgtcgttcatccaccaccattgttgcatatccatggaaaactcaaggttgaagatgatgaatagtggtaatttcggatttgggtgaaaaagggtaatttgtggtgtgattttttgaaggaaaaggaagatttatgagaaaaatttgtatttttggtgatatagatggaagatttgaagagattttgaagaaatttgatgattaatggtggaatgagggtgtgggggctgagaaaaggaagggggtcgggtgggatttgatttttaggttaaatgaggttgtatgcgatttgggaaatttattgggctgaaagggggtcccgtcgcgacgggcaaggtgccccgtcgcgacgggaattggcagaaaattttaatttttgttcgttactttcccagtcgcgacgggaaatgccccagtcgcgactactgaagcttgccccttttttttcgtagaaggcccaatcgcgatgagacactacgcccgtcgcgactactgtagcagtggccttcttctgcatgttttttttcacgattttcacggttttactttaaaactaacaaat

SEQ ID NO: 369993 - DNA, 637 bp, Cannabis indica
tagggcacaaaatccaacaaggatacgaacttggagttttcaaaatttgtcctttgctgggagagtggttctcatcaactaagtgttgatggccattcactcttactggtgccaagttatagtgctgcccaaaagagttgtgtgtgaaattgaatctatctgtcgtgatttcttgtggaatggtaaccctgttcttacatggacaacaattgttgcttggagcaccctttgtctttctaaatctttaggaggaatggggtttagaagaatttcagattggaatgtgacagccatgttcaagtatgtttgggccattgccaaaaaaaagataacttgtgagtgaagtgttggaattattttaccaggatctagatttactaccgtgtatgttattcaacatcctaaatatgaatttctaaaacaatttaaataaacacatataaagtttgagaaaccttacagtgggtgcatcagaattaaatgactccttccactcagatctttaaaccttgtatcctttctgtagcagagtatcaccaagatctgagcccgaaacttcttccttgtgtttggattcttcacactcttacatactatgattgatgaccaacttgatgttgttggaatatattttacc

SEQ ID NO: 369994 - DNA, 936 bp, Cannabis indica
ctaacagtgattaccagaattttaaattttatgtgcgtcaccgacaatgatagattggtctgtgccacattccagttccaagaagacactctggtgttgtgggacatggtgtccttgactcacgatgttactacaatgacctcggaaatgttgcaggaattgttcaatacgaaatactacaatgaggcaatgagaagtgcaaaaaggaaagaatttactcagccaactcagaaaaaaaaatagagtgttattgaatgcacaactcagtttgaccgcttggctagattggcctcgtgaatcgtgccaaatgattttagcaagaaagagaaatacttggacgggttgaattcgaaaataagacatgacttaatgatcactacggatgataataccacctatgctgatatggtgggtaaggcactgcgagttgagggcgcagtggagtgcaccctggagtctcaagagactcagcttgttggtggggctcctactcctcctacctcaggctttagtaggggaggcagtggctcgaccactgaacaaaaaagaaaggaacctacttcattcggtggctcaagtcagaataagaggttttgagggaaccagggctgaggcaatcgtcagggtagctccgaaacgcgatacacttacccaaaatgccccagttgtaaaaagcatcatttaggagagtgtagagggcaagggtgcttctagtgtggtatactaggacactattaaaaggattgcccccaactcaagaaggaagaacagaaggctgcagcgaaacccgctccagcaagggtgtttgcattaattcaggaagatgcacaaactagcccctcagtggtaacatatcagctctcagtcaacaactcttactactctatgttatttgactctggggctactcattcctatgtggcagccataatcttt

SEQ ID NO: 369995 - DNA, 523 bp, Cannabis indica
aatagtaattattatttattgttattgttgttacattgatatttttggggagttttgatttttttttccagtgtaattctatttagtaaataacctatcaattagaatataatttattagtcccaagtgtattgttggatagaggttctacactatataaaggaaaagtatgaggtgttgacatgacgctttaaaattattcaaaataactctatttattctctttttaattctctcatttaaattaataaaataacactctaaaatcacttaaaatagttttatttaatttttatttttttataaatattcattgattaattaactaaaaaattattattgttattattaataataacaataaaaaaatatctaataatagataatttttcaaactaataaaaaaaagataggtagcaattaaaaaaatattttttttattattattattaaaaataatatatatgtgtatagtaaaaaaaaattgtatttggaagcactagaaaaatacatctaactaatt

SEQ ID NO: 369996 - DNA, 610 bp, Cannabis indica
atcgagacccaagaacaggaccaggaccacggacctggacccaaacccaaaactgtaactggacaagggcgcagaatcggacataaacccacattcagattctgtgtgtgggttcgggtttgggtctgggtctgggttctggtttgagtccttgttcgagtctaggtccaggtctgggttcgggtgtggatgccgatctgggtctgggtttggtctaggtccgagttcaggtccctggtttgggtccaggtttgggtttgggtctggatctaggtccttatctaggacccaggtttcgatctttgtctgggtctagctctgagtccaggttcgtacgttgatgcctatctaggtcaaagtctgtgtttgggattgggtcccatatttaggtctaatccaattctcagttccgatctgggtacacgaccatgtctaagcttgagtttcggtctaggtttgggtcttgtgcttggtccgagttcgttctagatctgggtctaggtccctggtcagggtcctagtcttgttacaagatctggatccctatcacgggtctaggtttggttctggtcctgggttccaggtcaaagtttgggttcgggattgagac

SEQ ID NO: 369997 - DNA, 580 bp, Cannabis indica
aatactattctttttacaagagtgagagttccaaaaagtggaaagcttggtacgagtctcatcgaccacgtccttgtgaacatacaccatctagtgcatatccctatgatgaagaggaagaacaatcctacaactcttactatcagaatagtcttgatgattatagttggaagcctgagtacaactataatcccttatatgagtggagttgtgaagaggaagatccttggtttaatcacaaaagttctgatgattatagttggaagcctgagtacgactataatccattatatgagtggaattgtgaagaggaagatgcttggttttctcataactctcaacatctatacaacagttccctcaatgacactattgttgagttacaagcatctatggtgataaattgcgagatgatgaaagacttacttgctgagctgaaagaaattaagcaagaattgagcaagttatctggtcacctggtaagttcgcatgctaacgattttcctctacaacaggtgaatgaagcactaatctccaatactacctttcacaattttgatgaggtaagtgtcacctctac

SEQ ID NO: 369998 - DNA, 531 bp, Cannabis indica
attctctgcaaagagtaaatatgacaatatccacttgaaagtaagatcatctatattcaaaaatatggatgtacattcaggggtaaatatgagtttgttggaattattctatcaggatctagatttactaacaagtatgtttttaaacatcctaatatgaatttttaaaacgatgaaaataaacacataaaaggtatgagaaaccttacaatggttgtagcagaattaaatgactcgtcccactcagatctctaacccttgtatcatttctgtagcagggtttcaccaagatctgagcccgattcatcctcttgttgattggaacttcacagtcttacatactatgattgaggaccaacctgatatgtgtgggcatgaactcgatcactaattgctaattttgttttgtgaagaatggctttggtatttttgaaaattcaagagggagaagaagaaggaagaggtctcatcagaaagctaggtttttagctttggaggcattcattggatgatgagaccttagctatcctt

SEQ ID NO: 369999 - DNA, 503 bp, Cannabis indica
aaacttctaatttagattttacattgaaatcactaaagaaaactagttaagaacaagatacaaaaactccaatgcaaatttagcatgatgctcaactgaggacactgctatgtctgaagtttgaaaatggaagacaggctgagaattcaaggcaccttcattgtaataccctggaattaaggaaatggattagcaaagccctaactagttaattgagtattattgtagaattatattatattataatttattatatgcgaattaatatgagaaatgacatgttaagaccccgttggtgagttaggggcattttagtaattttgacccgagaagggtaaaactgtgaatttaatttatttatgtgcttatgaactatattattatatagtatatctggtgtgtcctttttcaggtgtgttctgacaagttggcgcggtatagtcacaatcgggtatttcgggctgaaccgggttcggggccgaaatataattttgggataaatt

SEQ ID NO: 370000 - DNA, 470 bp, Cannabis indica
ctatttcagagaatatagattttacatatattagttatgttagaagacaattaatacatacttatgttactacttaatcaagttttaaattattgttggtataagatatgtatctatacatttactatttaatccagttttgtatatttctagaagtgattatataatttactaatattatagtaaaatttgtgagtgatccaatataattaatatagttacattcctcaaagtgataaagaatcacaaaataattatttaaaaagtttcttgaagaagttttaaatataattgctatttgaagtagtcaaatatatttgtatgtacctagatgtataatttttatcaagttatgaaagtgacaagaaataacttattatatgtgcttattgtacatttaaatatataatatatcaagtcatgataattagactgttgaatagtttattaataaattagacgacttgtta

SEQ ID NO: 370001 - DNA, 865 bp, Cannabis indica
aagaggccccctccggacatctgtcaaccagaaaaccttagaaggatttcctggacaaaagtcgggtgcaaagaactcacagaaggcgacattgcgcgtaaaagaaaaagaaagggcagaaaatcgagaaaaacgaagtcttctctatgcccttgaaggccagtacacgaagagtgtatggtcctttgcaaaaaataacaacaagtacgtgacaagagtaaccctaacaccagagaaggtgaatctagacctgttacgtgaaaaactcaaaagaatacattcccagaaacttcaaataccaaacccagaaaaacaaacagataagtaaagcatgccataaacacgaacagtaaagcaagggatgcgagaaacttacagtgaagtgttgaaactgggggttctgttgtcgatcaaacaaaggaaatataggctgacagtggtgaatgaaggatagcagggaaatttgtagagtgttcgaaggttttttcttggtctggggattttgctctgaaaaactcgaacaaagttggcaagaaatggaaagtaaccaaatgaaggaaagatggtggcttttataggccaaagtgcatgaggaacaggcgctatcacctaccaatcgaacggctggggaggcgcacgattcgaattcccaagaatcaacggttggattgattcgtaattaaggcggtggaaacgcttgagtatccgtctgacaccattaatgcgccgtatcaatcaatgggcatgaaacgaatcgacatctgcaaaaagtgaatcgctgcattaaaggcgatcattaaatgcaccttcacgcgctcaaagctcgtgccaggaaaccgaggggtcaaccggaggcacttgaaca

SEQ ID NO: 370002 - DNA, 592 bp, Cannabis indica
atttgtttgatataatttttcaatatttttatattagggtgctagtttgttgttactagccaaagggtaatacctttggctagttattcttagaaattctgttgattttttagtttttagtattgctgagagttagagttatgaagtgtgtgttaatttctaattttatatattattttattttgaagattgtcattctaatataactgttcttttgttttggtgttgcaatttttcagtttcgccttgctgtaaagacaactagttaataatgggaaggtgtttcttcaatgtgatgtggtgctgtttgatgacgttatagctttattgtctaaatttccgggggcagttttgtcccatgtggctcgagatgagaattttgcagcgcatggtttggcaaagcatgcccttcggttagacaatgagctatcctggttcgaagaggtgccgtcaccgattgtggattgctgctttgataatcttgtgtgattttgatcaccgcgtcaaaaaaaaaactaatatatataagagatacatatacacgttttcatatccatttgtattttgtcaactgaccgagttcttttgcttt

SEQ ID NO: 370003 - DNA, 922 bp, Cannabis indica
tttataagatattgattatattttatgattctataatgctcagattgtatattaaaactaacatatattgaagcatttgtacaatacatataatgttacaacattgcccataataacattatctattaaaagcttttcaaataactgattccctacaatacgaaagttggtggcactatatatttatatctacatatatattcttaattaattaattcattgtttatattataatgtataccaaacatatagttcggtatatattttgaatcagtatatgaatgaaattttctttttctgctaaaattaatgaatgaaagttgtgtatatataccctaataattggataatttcttttggaatgaatggatcacaaaatgtgtatataatatatatttaatggaaatacactcatcatcatgtgtatataaaatatctacgtttgtaatgacattaaatcattacataatataagaatggtggccgtcattaaatgagaatggatcatctaaatacctttctctatattgaaatgtgagattgattttaatatgagcttaattatattttttattttgtctatctattgttttatttgaaaacagttgaataaattgctataatatacacaacaattaaggacatcactccaactacagaaagttggaagattgaaatgagagtgttagaaaaatttggaaagcggacaagtaagagttcaccaagagaggttattgcattaattaaactactgatatttaaaagcaaaaattaaaaaattcaattaacacatacattttgatttagggctgtctctatcgtcacgcgacacgagtaccttcaaaatcaatcctcaactccccgaggcagaagcactgaaggaatggtaatactcataaaatcaaatacacatactattata

SEQ ID NO: 370004 - DNA, 239 bp, Cannabis indica
aaaatatcggagtcgtgcaactacacacgcgcgcacgcacgaggcttgaccctcggacagcacgcgcgcagacaaagattttgtctgaattcctggggtccacacgcggaataggctgcatgcagcctcctgcaccagcatccctcacccatgcactctctaatgtgcgcgcggacaatatgcttggcatactgtccgtacaactcgcaattttttcgttttcttcaatttttcatgct

SEQ ID NO: 370005 - DNA, 558 bp, Cannabis indica
accatcagtacgggtaggtgggttacaacattgtaacattgccttgcctccccttaatttcctctcaccgtccctgttccagcttcctgggtagggaattttaagcacaagttccgaatggatgtgactgcgccaaagtctaccagggctggtcggccgaggatggcgttgtaagcggtcgggcagtccaccaccataaaagtgcagtacttgaatgtgctctggggggtgtccgggcacaaggtgactggaagtctcacttttcccattgggataagcgtcgttccattaaacaccgttgggtgagaggtctcggtctgttaggcctattgcagtgaaggcctccttgaagagtagattcacggaacttccgttgtcaatcaaggctctggccaccactttattagcgatgggggtctcaatgaccaacggatgagggtgagataagcgcaccgtcttggcgtcttcttccgtgaacgtgatgggttgatcaatcaatcggggcctttgagatgggagttcagtaacctcccaagcctcattgtgtttcacggcccc

SEQ ID NO: 370006 - DNA, 560 bp, Cannabis indica
gaaaaaaagataaaaatatctcacaaaaagatgatatttaaaatagagaaattaaattgtgcaagaaaataaagcttaaatttgaatcctgaattcgactatgttctgattagattttggaaaaagtcaaaacgtgaaagttctatgtctctcttttatcttttcggaacatcttgaatcgtccaatttcaagaaatatctagagagttatggccaaaatactatcattcaatgtagtagaaaacttaccttctcttctaatcctaagcagaataggttttctaattctaatgagaataggtttttttttcttcagcgctttttatcttattttatcattttttggccataaaagaagtggacttcaatagttttggggaagcaatttagagggaaataaacagtagaatatagagcacaaatttcagagatcgaagtcaatactaaaggcattctttagagggttttcagcattcttttcttcttctatttttttctattttcttaagttaatatgtgtgattttgcttccatgaacatgtgtagctaaacacttgatt

SEQ ID NO: 370007 - DNA, 726 bp, Cannabis indica
aagctcgttccaagctctatatgctgatctgtaaatgaaatgccaattatgtgattatttgaaatagaatttttggattaacccaatttatgaatttccaagaatggtgactaggattaccagtacttgccaaagaacacccggaggttttgaatctccaaatacttgggatattaggttagatagtagttagcatgtagagttaaccgcggtgccgctcatgtttgatattatgattgggattaaataaggaaccagattagggttattaccctaaagtgagcggttatatagcctagtgttattaccctagtgattaaatagattttaatataatgccatgctttatatgttgaaataaagaattatgtgttcaaggcatgattagggtagactcggtaattagaaccgagataaactattctaaggccttattataaatggacgtgtgagcgtaacacatgggtctatgctacatggacataaataggcgtgtgagagtaacacgtagatctatgtcaaatagacaataagtgcagtggcatcaaaaattatgtgacatttgattattatgtatattgttatttatactgtcttgctgggtgtcacgggctcacctttttaggcagcagaacacccgtgcggcaccttaacttctctaagccaaggtcagccttccaaccatccgagtaacaataggctcatttttcacgcgaccgtgtgcct

SEQ ID NO: 370008 - DNA, 969 bp, Cannabis indica
ttttagttttttttttttttccatgagttattggttcaatttgatgtgttttctctaaatttgtaggtttgtgcttaagagatgagtttgtgatggtttgagatctttgagctaatttatgactatgttcccatcattttttggaagagtttgtgaaatacaaaatgaaggagttctttcttagctttccaaaatatgtaatgtcatttcatttggaatccaaacacgagagttatgcatgttttatagaacaaggttgaagcagttaagaaaaataacaaaaaaagtgcttttggtgctgtagcgccgtaattatagagctatagtgccaaaactgaaaaaaaaaacaaaaaaacattattttcttgtaaattcaaaaccttaagaaatctcgtatggcgcccttgccccatgtcttaggcgccaaagcatcggccatacagaattcaaattaaaccaaattctaagcacgttatcttttctatctttcttgggctataaatagatttatatatttaaactctagacgattacatagggggaaatacaattttagaagagaaaaacacttctgagagatcaaaatagcaatttgaagctgcattcaagagttttcacatgttcttcttctttcttctttatttctcaagtgtggctagttttcttagtcattagggttagatggatctctaatcattacttttgtaaagccctaatctatagggacaccactgttgggaatattttaccaggatctagatttactaataggtatattgaattaacatcctaagtaagaatatctcaaaaacaatgaaatttaacacattagcgttttagaaaaccttacattggttacaacaaaatataatgactccttccattcatgatctctagcccttgattcctttctgttgcagagcattatcaagatctgaacctggatctctttctctccttcgggtttgg

SEQ ID NO: 370009 - DNA, 681 bp, Cannabis indica
agaatctcttcaaggcctccacctcagcatgccccccggctgtactcgtcaagggcgttagttatgcttggccacgtcggagtattttgcctatcctcatccgcagtgaccggggtcaacactatgccgtgcgacacagtgtattcctctgcctcggaaggaattccagagtcgtggctcggcgctggggccggagtgtctaccctgcgggttcgcttagaaggttccgccaccaccatcttgccctttcgcttgcgctcaagggcagccgggtcctccgcttcaccttcctcaacttccttctcctcgtccaccaagacgatggtgtctgaaggagcattggaggaggacctcccgggagtagttaactgggaggcagctggaggtagagaagcatccggactgtaggcctcagcaagagttgccaggagattgtccatgggccttgctgctgcaacaaagaaataagtgttaggaaattaatgaaaacaaactacacttagcaaaaaagtaataaaactagtcctaccctgactctctaattcggccctagcaaagtcctgaatcatagaactggcttcatcatccccgagaaagctgtccgagggaaggaactagctggaagataaatgggctgaatgatccaaagggataggcgctggaggtccagaacccatccgg

SEQ ID NO: 370010 - DNA, 682 bp, Cannabis indica
tttgggaagaacgctggtgatttctcgcaagtgacctacattctcccagttgagtcccaagattctcctcattttcatgagaaatttctcgttcatcagtttccagttgcctcccatcttcatttcggtgagagggttctggttgatcattctgattttcaaggggtatctcattttccctgggttattcttcccgaacattttcatgtctcctagttcgtgagccacgaggtcttcctcgtggtcttctcaccccaagttcaggttgattttgagcattcatccctgtgccgccctggccgcggctgcatcacgttctaattcagcgtttcgccgctgcgcctcttccagacaacgtcttaggcgacagttttctatttcataagtaccttctcccataggctgggcacctccacgattgggctcttcatcccttgtcccaggttctggccactcccacgctcagttctcttcgagcgtgttgtccgcgtactaggaccaacgttgggttgggttctccgtgaacgtgtggtccgaatgctggggccaccctcaggttgaatcctcctggagcgggtggtccgtcgagaccgtgggttggtaggccttctggagctcatgggctctttcccagaatgatgattagtttcctcatgtgtggtattaatattttctggatttt

SEQ ID NO: 370011 - DNA, 630 bp, Cannabis indica
agcccttaatgcctccatctctcgatccatccattcggcaacatgcgcctttgttcgtccaatgcgagatttactgcagcacgcagttcgtcctgatcatgattataattctgcatgagtccaagagcatcacggagattttgtaatttagtggcatctccgattgtcgtctaggcgttgggtccaggcgaaacagtcgtattatgaatgccttggttgggtgaagaactgttattcccagtctcttgcacactaggcgcaattgcatctataggaactatttcacaattccccatgcttgccggctatccaggattaacagcaggtggaacccttatgctccctaggttctgcgatgtaggatccagcgtttgtgaatttttcgaatcagtcaggcctctacgagtttgcaccatcgtattggcggttggatgttgaataaagagcgattcttgagttcagctctcaatgaaagcaccaaaatgttgactttgcttttagccaacgacaatgagtgttttacaagcgataaatgatttataataacaaatttacgataaagcaataaaaagacacaggaattttatagaggttcagtcccgagcagttcggtaatagcctaatccttgt

SEQ ID NO: 370012 - DNA, 1290 bp, Cannabis indica
gggatatacctagcagtcacagatcagtgagtgccgtactgatcagagaacaaaacagcgtgcaacatccagtctattacatcagtaaaagactcatcgaggctgaaggccaatatccgttgatagaaaagctcgcctactgcctcattctagcaacaagaaagctgagacctcactttcaaactcatcctgttcgggtgtacaccaaccaacaactacgataaatactgcaaaagccagatgcctctagacggttagtcaagtgggcagtagaattgggtcaatacaaaatcaacttccaaccccaaacagctatcaaaggccaagccttggccaactttgtggtggaatgcacaagaaaaactgaaagcatacgagaaagcgatctcgagtcaataccacagccgagtaatactgaaatcgaactgacctggaagctacatgtggatgggttagcaacagattaattatccggcagaggaatcgcccttgtcacacctgggggaaacacctgcatgcagcggtcaaattcagattcaaagcctctaacaacgaggccgaatacgaaccactaatcgctggacttaaactagcgatggagatgaaggccgagcgcattgagatctgtagtgattcacaactagtggtaaatcatgtatctggcaaatacgaggctcggggaaaaaaaatgatagcatatctgagtaaaatacaacgacagatgcgttagcccgattggcgagcagcaatataagtgacaaggcaaacctggtcccgatccagtttcttgaattgcctagcatcactggcacggaagaaatctaaatgatcgacacatctttgaacaagatgacgccaattgcagcctatctcaactctggggaactcccagataaccgaaatgaagctcggaaaatgagaagaaaggcagcacggtacatcatcgtagaagggacatgtacagaagaggattctcaatgccattactcagatgcgtcacaccaaatgaagctgcacgacttctatatgaagttcacgacggattctgcggaaatcatgcagccggacagagcttatcaaagaaaatcctaaggcaaggctacttctggccgacgatgattgaagattcgaaagcttatgtcaagaagtgcgacaaaatgccagagattttcaaagataccaagagctccgcccaagagctgacacaaatgcaaagtccgtggccctttgccatttggggaattgacctagtcggacagttacctaaaggtaaaggcggagtgcagtacg

SEQ ID NO: 370013 - DNA, 385 bp, Cannabis indica
aatctaggtcctggtaaaataaattccaacaaaaacatcaactaagagtgtttaggggtgttcatccaatccaatcctcactattttgctcatagtgcatccgatccgcactaagtgcggatttcatattttggatccaatccaatccgcgcaatagctcaaatccaatccaatcttactttgcattggtatttttttttataaaatatttaatatttatgaaaaataaaatatttttttcacataactagcaaaatagtaaaacacattattattatttcatgtctctaacaacaaattaaaataaataaaataacaaatttaaaagaagaaaaaaaattgtatgtagaaaaaaatattatatataagaatggagtatacattt

SEQ ID NO: 370014 - DNA, 658 bp, Cannabis indica
catacgatcccccatattcggtggcactacctgagatgccagtataggtgcaggacgagcctgtttctctctcaagtctcgaatctactccctttgctgcctaatcgtctcttgcatggcagcaaatagttgttcccagttctgagcgggtggaggttgctcttccccaccacctaccctgagttccagctcgcggtttaaacggccagatctccgttgcatgatccaatatcttgtaacccaaaaccttcaaccatttagaattcaaacaatatcaacatcaatatgcatatgctattcacacactacttcttctcatcatacactgtaattctctaaacaggtaatgttgggttttgtgccctaaataaaacccatttcaatataatcaaatttactagttaataaggatcagaaataaaattttatgttgcatggttcacatgatttatttcatgattataatttctattaagtccaaaacatatgtatttgttaatgattatagtgttgtcagcacagtggaatataatcttgaatatatgttcgaaagtttaattccctgatttgtcagttcactggatttagactggcatgataatcaacgataggtatgcttacaccttggataagtgttatgtgctttccagggcattgg

SEQ ID NO: 370015 - DNA, 813 bp, Cannabis indica
ctctctctctctctttcaaaccctcttagagcccagccagtgtatgatttttcttcaacaattcaaagggttttacagctagtttcaagtgaatcaaagtcatggtaaagcctctagcaacttcctccttaatttcttagattttaagttaatagtttttgcatgaatttatgttttttaactctatagttgctgctgttgtttgatgttgtttctgatgttaaaatatggttagaaataatgtttagagctggtttggtggctgtatatgaggtttgttcaaggtttgagcttaagggctcaaactttgctataacatggtggattttgtttctgtgcatgttgaggtgttttattgctttagatttgttatatgtggtctacaaaacagttctggaaggtttcatatgttttggggttgatttaagagagttatgaaatgttggaattttcctgcactgaaccggaattctggtttagggggacctgtaggaaccgaaattccagttggtccacaggaaacctcacagaaccggaattctggtttggaaccgctctactggttggggctgttttgtgaaccctagtttttcccatttttgtgatgtttagggtattgccatgttgtttatttatagggaaacttttagtttcaagtttaagtcatcggaaagtgatttagcgtgtcacttactatgttatgattgatgtgatttaggagcctgtacttcgccgagtagttgttccactcaggttgaccggcacacctgaattcggaaacaaggtaagattagtataacagtatgcatacgt

SEQ ID NO: 370016 - DNA, 518 bp, Cannabis indica
acctaaaaaaatagactaattagtttgttatttcataggcgtacatgatgataggttgtgtttgaaacaaaaacataaattgttgttctaatatacgaaaaataaactaataggtttattggtatatatcattatgttttgaatatagtttactctgtattgcaaaaaataaaatattattccaataaacagaaattagtagatttattaacatacataatggtaggctatataaaataaaatgaattgttgttccaatatacaaaaagaaaaataaattttgtttcaatatgctaaaataagctaatagatttattagtatatatgatgataggctatacgaaaaagttgttatgtaaacaaagaattaaattttatttcaatatgccaaataaacttatgagcaagggatttcaagtgagtaaaattttttatcatattcaaaattttgacaaatgcatatattgttattaaagtttactatacaagatatgttacagtcatgtactttgtataca

SEQ ID NO: 370017 - DNA, 793 bp, Cannabis indica
tttcaatccgggtattattggccttctatttttaaagatgctcatgcttttgttcaacaatgtgatcgctgccagcgagttggaaatatctccgccaggaatgaaatgcctcttaattgtatcttggaggtggagttgtttgacgtgtggggtatcgactttatgggacctttcccacaatcctttgggaatctctacattctagtggcggtggattatgtgtcaaagtgggtggaggcaattgctagtcccaagaatgatgctcgagtggttatgaagttccttcataaacatgtttttacaaggtttgggactcctagagctttgataagtgatgagggaacacactttgtgaacaaagtgttggctgccctcttggcaaaatatagtgtaaaacacaaaattgctactgcctatcacccacagactaacgggcaagctgaaatatctaatcgggaaattaaaggcatattggagaaggttgtaaatcccaacagaaaagattggtcccaacgcctcgatgatgcactttgggcgtataggacagcatataaaactcctctaggcatgtctccatatcgcctagtttatgggaaagcatgccatcttcccgtggagttagaacacaaggcgttttgggcactaaaaaatctcaatatggatatttcagcagctggagaagcaagaaagttacagctgaacgagttggatgaattgcgtttgttttcatatgagaatgctaaattgtataaggaaaagacaaagagatggcatgatgatagaatacaggaaa

SEQ ID NO: 370018 - DNA, 527 bp, Cannabis indica
taggttgttaatccaacatacttgttcgtaaatctagatcctggtaaaataatttccaacactactcatgttgcaccatatagtgaaaagccaactactattgagctaattgacgtgatagcagctaataccttgcaatttcagcaaagctttcatgaaactatgcagagccttcaacaatctctacaaaagttagagaatcttgcagagccaatggaaacatctatgagtgggtatgaaatttaaagtttacctagacatatagaaagtaaccccaatagagaatgtcaaggccataagacttcaaagtggtacacaacttgattcaccaccacaccaagaagttaatgatttgattccaagttgtggagtcaaaagttcatcccttgaaggatcatctctaccaaatattgaatctcctactttagttggtccaccatcactaaaaaagccatgcaaaccaattgtaccaacttatgtcactcctccaccttttccaagtagattgaaaaaatctaagaaagagg

SEQ ID NO: 370019 - DNA, 781 bp, Cannabis indica
ctgcagcatacatcccccccgtaccttcccttgtaaatccatttgcatctcaaagtacttgagatgggaaagaggatcttctctcccagtatacatcttccacgttggaattttgaacttgtgaggcagtggcaggagattgatctctggtgagaagggagtttcgcgagcttggtgtaactcaagatcattgttacgctgtccagccatgctgtgaaacatatttttcaattcgtcaagctcggcctgtacgaatgggctgacctactcgacattctggtcgacttggattacgtcagcgtctttctaagcagggatttgagtatgggctctaggctgcacgatctttttagtattctgctcgtctgttccccttcttctatttagatcattccttaggtcatgggtgttcccaacctatcgaacacagaagagcctggttaccttagggattgattcgcttggttgagaggtggaataacaccattattctggttggaaccgtcagctatggctccagctgatgaattaccggacaaggtctgcccgcctacctcttggcccacgagcggaactcataattggggattgggcggctgaccattagtgcctccatttctttatctcttcatttagcgaacatacgcctttgttcgtcaaacgcgagatttactgcagctcacagttcatcctgatcatgatgcagagggttgctatgactctgcataagtccgatcgtggcacaaagattttgtaattcggttgcgtctctgatggtcgt

SEQ ID NO: 370020 - DNA, 1070 bp, Cannabis indica
tttatcccattatatataatataaaaaatattaattttaaaaatataattttctaattaattttaaaaaaacattaaaaaatattaacaaaccttataaaattattaaattacttaagaaacctaattattcctaaacaaaaaatttcaaactttatttaataataaatacatattaaaaaatcaaaccaaaattattcaaaaatccaaataaataatttaaataaactaagattttaatgaagaaaaaaaatcaaacttatatatatttacaaacgtataatctaaaaaaataaagaaaaataattaaaaaaatttaataaaaatataaaataagttaaggaaaattgaagcataagtccccaaaaaatttactttgttgtagataagttttaaatctcgaaaaattgttgtgaaagtacccaagctcgccaagcttgtgagttcgtttattcccactccatttaggtaagtaacggtacacatgtacgccccaaatttattctcatattttttaacaaaaaaaattaattgcaaaaactaaaactaataactaaaataaattaaaaactaaaaataataattaaaaatataattaattaaattgttttgagagttaaaacaaaaacaaaatgtaggaaatttagctctgatacatgggaaaacctctgtaattctaacttcaagatcacacttaaaacaaacaaaaataaaatcaagaacaaaaaactagcaaacacattaaactagaaaaatataacacatatgaatttaaatagttgtcagatataataacacaagagatttatactggttccgctcctaagtttaatgtgaacttggttgttgaccgaggttttcggcaaccaataaaatattatatgattatagagctgtaagaaaattagagaaggatttttacgtggttggggcgttaacgagccttagtccacgagtctatcttatttatggatgtatttaatacagagaatgtatttggtgagtgtttcactcttataaataaagagaatgttcatggtgagtatttactcttcttgctcttatgcagcc

SEQ ID NO: 370021 - DNA, 705 bp, Cannabis indica
atcaaaatacatccaccagaccaggaacggacaagtttccgaacagatatgggtctctattctataaagtcttgccgtttggtctaaaaaacactggggctacttaccaaagattggtaaacaaaatgtttaaagatcagatctggcaaaatatggaagtatacgtggatgatatgctcgtaaaatctagaaagggtggggggcacatagaggacctggacgaatgcttcaaagtcctcaaaaaatacaacatgaaactaaatcccttaaaatgttccttcggagtcagctcgggaaagtttcaaggcttcatcgtcaatgcccgaggaattgaagctaatccagaaaatattcaagccctcctggatatgaactcgccaataaaaaccaaagcttaactggtcggatcaccgcgctcaacagattcatttcaaaatcaacagacaagtgtgtcccattcttcaacattgttcgaggaaacaagcagttcgagtggacagaggagtgtgaaaaaggtttccaatggctaaaggcacaacttggaaaacctcccgtactctcaaaacctctggacggtgaggaactgggaaaatacttagctgttacgcaacatgccgtgagtgtcgtgctaatcagagaagagaatgatatacagcaccctgtctattagatcagtaaaagactcattgaggccaaaggccgata

SEQ ID NO: 370022 - DNA, 511 bp, Cannabis indica
actctcaatcagaagaggagcatgagttacatcttcagatggttttgcaacagcttcgggaacacaagctttacgccaaattcaagaaatgtgaattcatgctatctcagatgtccttcttaaggcacatcgttagcaaagatggcatcaaggtggatctcgggaagatagaatccatcagggattggctgagaccgaagacagtgactgaagttagaagcttcttgggtttaaccgggtattatcgtaggttcgtggaaaggttttctaaaatttcgaagcccttaaccaaacttacgaagaagaaccagcggtttgtttggtcagataagtgcgaagctagttttcaggagctgaaacagaggttgattacaactccagtgctagctttgccttcagacaaagagaagttcgtggtttattgcgatgcatccagatagggtctgggttgtgtgctgatggaagccgatcgggttatcgtttatgcctccggtcagttaaaggattatga

SEQ ID NO: 370023 - DNA, 646 bp, Cannabis indica
tttataatatgtgtttgtatttttttagtatcttttttataattttttaaagttatgttttgtataataattagtatattgaataataaaaaatatgtaatattttaatttttatgtaatttaatatttttatacatttaaattttataatatgagtttgtattttatttctagtatattagtatcatttttataattctttaagttatgttttgtataataattagtattttgaataataaataatgtgtaatattttaatttgttgttttacttaaaataaattaatcgaattcttttgttatagtattataatcaatatttaggatgtatttgaaaattcttataaaagtaggttaaagaaagtatacctaattctaccgaaattttaactgtataacggctataattgaacgtttctaaaaaaatttaaagctattaataacaataaaacataattcaaaacaatataaaacaaccacaacaacgtttaacaatacaaaaatttaccatccatccgaccgcagtacatgtattcccagaaccttcttcactacggatgaatatttaagatattcaaactcatctaacatgcatattattccacccatcaatccgatcgtagtacaatatatcgcagaaccta

SEQ ID NO: 370024 - DNA, 510 bp, Cannabis indica
ggccctacatttggatttggttccctaagtcggggatccacatcctcgtccccgccttgggcaatactcttccctttgccagaactctggctggaagtattctcctttctgacctttgtcaaggcaaggttatagcattcccgtgtaattttttgattccctttgaagcaccctaccccattctttgttgggaacttgacggacaaatgaaaaattgatgtgacagctttcaagtcatataaggctggtcggcctaacatgacgttgaaggttgatggaacatcaattatcaaaaattgtgccatcacagtcatgctcctcggagcttgcccaacagtgaggggtaaacggattttccccaaagatgcaacactttggccggaaaaaccatacaccaattgggtacaggggattaaatccttaagttggagccccatattcttgtatgttgtcttaaacaagatgtttgaagaggctccattgtctgtcatggtccgggccactatttta

SEQ ID NO: 370025 - DNA, 746 bp, Cannabis indica
aattagtaatttttgtaaaacaatagatctaaaatagtatttacccaaaaatatttgcaatgtataaaatattaatgaagggagcagttataatgggtgggtcggtggcccgtgggtacttttgaatgctgaattaactgtcatccatatttttacaatttgtatttttattttattttctggtccaaaaaagaaaaaaacaaaaagacaaccgacttcaaccaaaaagcgaaacgacggcgtttggcggtgggtaattcacgtcattgctattactcatagatatacaaattattaaaaagtgcacaacttggctctactagtagtgctataatatgagtcaaaacactttgtagtaccatatcattgactcgttttgattaattaaaaaattatgttcttactttttaacactatgtttggtagggttgaatgaagagtggaaggaaagagatgaaggggtttggtgaaattatttgtttggcaaaaaaaaaaaagaggaagagaaagaaaaaatggagggagaccttctttctctagactcaaaattttcaatccttcttaaaccgaatgaattcaagaaaaaaataaaaatatatataatatcatatttgtcttagaaaaataataaatcattatattaagaaaaatagtattgtaattttagtaaggagttttttcatttttacacttcaaaataattttttttttgtcatttttacgaaattctacatagaaacccctat

SEQ ID NO: 370026 - DNA, 712 bp, Cannabis indica
taaattcccaaataataataaaataataaaaattagtgctaattgcctttactaatctaaattactaaagcggtcattacaatcaatcattaataattaattataataaaagttacatcgtctgccacaattagttatttaggccaaggatggaacatgtttgctacttctttaacatatctacacccttcgattgagattgggatttcagcatcctcttacagcatttatgaaattaaaaatcaggcatgtgaatcatcgtagtctttgtagtgaactttgattggacccccatgttcgtacagatacgctcgggccacaaggcccacaacattgtcgatattgttagagcagagatttactagttgatcaagggccctctgttcattgaaattgtataggagaggtagctcgttgagggaaacaaactccttagcataaatttttggtcgatcctcatcctcacgagcgtattgttgtggaacatacgcctgatcaaccacctctccttcttcctcttgttgggcaatatttttcttctgtttaagagatttgatttcagcttttaatttatcaatctccttctattgctgagccacaacatcagaaacttctcttttcttcctgccaaacagtttagatgccctataaggaacttgcaaataattaaataaaattagctatgattttttttgtataactaaggaaacaa

SEQ ID NO: 370027 - DNA, 593 bp, Cannabis indica
accagcggcaacagctttcaggaataggctcatcgactgcgaagccaactccacagaacgcggaacaagctcctcagaagggatcttctccgccttggatgtaaactcctcgcccacgaacttctcctgcatagccaagaagtcgcgagctcgaacagttggctcggttaggactttcttccccttgtcctgcgtggtcttggccaggttcttggaagaatctgcagcaagagtagccaccacatcgctcttcctcttctgggcgacaatgggcgatgtcgttgctgttccactcttcggcttgattttaaggacgggcgcggacttcaaaaaagtcatctctgcgagggtaaataaaagataagtataaataaaactcaaggcatcaatttataacaagagataaactaggcaagtttataaaaagtcatcttgttgtctctcagacggtttttggtatactggctctctttgaagacttgcgttatctggaatcagctggtgttctcgtagcttagcagttgtacacagtaatcgccagtcgcgatcttgtaccggaaggctcccaggatttcagctgtctctctgcgagt

SEQ ID NO: 370028 - DNA, 546 bp, Cannabis indica
attagcaacgagcatagtaagtttaaaaatcacgttaacatgcctaaaatagttagggtgttaaataaccccttcggattctatgccccaaaaggcttttggaatgctgtgtttcataatcattagactcatgagatttgaacgatcccacctctcaaattcccttttatcatcatgggaatttttcttagtaagaggtgcaagttgttcattccttagtgcatggtctaaatctatacaccccagaactttaagtaagttcccttttcaatccttgaaattggtccctttaatcataggaatagaattaatattagcagatattgaggcaacaaaagatgaactagctgaatatagaacaaatataaaacacgctcacataaatatgcataataaaataataaattcaaaaattagttaatcacatctcaagataccaaacacacattaatatcaagtctttggacagtgatattaactgtaagcagtactcttagtgtagcaatcaaacattgacaataaaactgtgtcaaacaatagattaat

SEQ ID NO: 370029 - DNA, 1211 bp, Cannabis indica
ttactgttctcagaagtaacccatcgactacttctacaaacttaacaagcctccttagatgtattccaattgtaaaataagtaacagttgtattgatagacatgaatagacttgtaactcaaccctaatttcttcaatctcttcttagattcgtagtacgttgatgggattttaatttttttagtattattggcgatggggctcaccgctaataataatttgaatgaaagaagcaagaaaactcccgcctagttattagcgacgggcaataatggtggagcctgccaatagtacttttttaataaaaaataataatacaagtagcattagcagcaaaatcttatttctgtagccaatactacccttattagcggtggattttgcacgccactaatacttctacaaatagtgtgtgtcaaatattattatatttatatgatggtataatcaatacgatattataatatcgaataagacttctatttattattaaattatatgaattattataattattcaaatttattaatattttatggattttatctattaatttttatatttggagacaaaaatgaataatatttgtgaatttttttaaatttcgtgatatttatatatatatatttttaatttattgacagtatcaaaaatatctctaatatttaaataatttaaagtactgattattttgaacgttattgatatttttcttccttagctgaaaattattgcataaaattatattattaggaatattgagtagtttatcgctaaaattaaaaaaaattgaattcctagttacaaacctaaagtattaagtaattatgcgcaaatattccttgtaataaaagaaatttgtgtgtgtgtatgtttgtctcatattactcatgtattttggtaatttgtggtatttgtattatatttagtagctattaaatattaatttgtgataaaattttgataattgaataaataatatatttagtttataataataataataataataataagatacacaaacactagttcaatggttgagatagaagaaagtgaacaacaaccatcattagttacatcattcaaaagagataaattctataaaccccttcctaagtctacctaattctatactagtactgtacatattttattttgttttgttttatttttttctttttctttggaagaggacacaactacatgat

SEQ ID NO: 370030 - DNA, 747 bp, Cannabis indica
aggatcatgttatctttttaaaaaattaaagtgttaacttttgaccatccaaattatagattaaatatatgtaatctcatattttttttgcttatggttatgtggtaataattaagctttctgtgtgtgattgaatggtaagttcaatcatttgatgaaagtaaacaaaaaaaatattattaaaaagaaattcaaaaattattaaaaaaagatattcaaaataatttggtgtatctcgctcaaacatctttattaaatatcgtggcgcgttctctttgcctcctagacacctcccatataattataataataataataataataataataataataataataataatacaattacttttttttaaaaaaaaaattattgtactaattcaaatcttcaacaacaataatattgaagtaacaaaaaagaggattacacgttaactagatgatattacatgatatgggtaaactatatataaattaataatctatatatcaatcaattgatattactagtaagagagttttaacataaaagtaaatagatttacaaagctgcatgcatgcacaaaataataaggtttgaaaaatcacctattgcccatatgatcagttataatcaggtctattttttccaactaataaattaacaagctacagttatacgaaaagctaactaattataagaccaaatgcaacttctatagcccacgccaccaaaaaaaaaaaaaaaccaaagtacttccg

SEQ ID NO: 370031 - DNA, 900 bp, Cannabis indica
gtaccaattttattattctgtatttaattaagaattcaattaaataataaattggtaatattaaaatacaaaattttatttggtatctaagcgagtcactaaactcttagtgagatctagagattattttattccttataatttgttttgtgtgagatgtctttgtttgtagaaggaagctccattactcgaccacctctgttgaatgattcgaattatccatattggaaggtcaggatgagagcattcatcaagtcacaagatgagaaggcttggagagctatacttacagtcttgttgcgacctactgaaaatggcaataaaggtaatactaaggtaaaacctgaacttaattggattactaaaaatgaaaaattatccggttataataataaggctttacaaactatttttaatagtgttggtgaaggatttattaaattaattttatcttgtgaatccgcaaaggacgcgtgagaaatccttcaaactcagtttaagggtactgctgatgtaaagagatcacattttaccatgttgcaaacaagatttgataaattaagaatgtcagaaactgaaactttatctgaattttatgaaagattgtttgcatttctaatgattttttttgctttgggtgaaaaaattagatgaatttgtttggttcgaaaaattatcgtgtgctttttgacatgtttgacaaaaaattgctagcaaaatgaaggttgcggttgagaaaagtaaaggaattgcctttaaagtttttgaaaaagatatatctgacaatgagagtgatgatgaaatggctttgttaagaagaaattttctaaattacatgaaaatttttggaaataaaagaatttctcaaaaactccaaaaggtaacgatgcatctaaatct

SEQ ID NO: 370032 - DNA, 819 bp, Cannabis indica
aagatgatgcatcttattccttgagagaaaaacctgagtgccttctacctaacctagccgccacctctctttctctcttcttcatcattgaaccgaatcccttgagtgatagagtagtgcccacacacatcaagtggtacctcaatcatagtgtggaagatcgtgaagaatccagtttcaacagaaggacattcagactatgatctttgtaatactctaagacaaaaaggatacaagggttagagatttgagtggaaggagacatattattctactgcacccaatgtaaggtttctcatactttagaggctcatatttaggatgttaaacaacatacttgttagtaaatctaagatcctggtaaaataattccaacattggatagggaccaagtttgccttgtcacttacattgctgcttcccaatcgagctaacgcgtctacagttgtattttcttctcttggaatttttctgagaccgtagcttttgaattgtgcgagcaggtcgtgtattttgctcagatatgctatcatcttttctccccgagcctcgtattcgctggatacatgatttaccaccatctgtgaatcactgcagatttcaatgtgttttgccttcatttccagggctagttttagccaagcgattagagcttcgtattcggcttcgttgttagatgccttgaatccgaacttgaccgtagcgtgcaggtgttgcccccgagcgtgatgagggaaatccctgcacgagatagttgatctgtagccgacccacccacatgtagtttccaggtcggtttatcttcattgttacttggct

SEQ ID NO: 370033 - DNA, 638 bp, Cannabis indica
caaaccaaacaaaaaaataaaatgaaaattatttcttttctattctatttcatttcattaccatctatatcccttaaatcagccgttgttaaggtacaaatcaaatagatattgtcatttgtcaatttttgtttgcattcgcttaacaacactattataaaccatttggcacgtaaaaatgttccaaaccatttcataacagaaccaatcaaactaactatatttcttcttaatattcaagtttattttatcactattgaatcatatttcagattaaagatacttattttcttttctttgacaatatctgaacttttaggtggtagaaaaaggctcatattacaccataaaattaaataatttgttctcaaaggagaaatgacactcattttctcccacataccaaacgcatgcatggataaggataagaaaggcctcttttaggatatcctgctcaattttgatgccaatctatttgttatgattgaattgaatatcttaaaaccatttactgacactcaaataaacacctttcggatttatctaaaaaaaagaaaataaataatcaaaccctttccacagacttttaaaattagttactaaagaaaaaagaaaaataaataagtcttcctaaaaag

SEQ ID NO: 370034 - DNA, 747 bp, Cannabis indica
aataatttttttaaatttaaaatgattttatattttttttgaatgaaatttcatataataaattaaaaataaatgacttggaccaattaaataatgccatgtgtgtgtctagttgtcatttaacagagaacttaacatgaggtacctcatttgcaacaaaatattgacaaaaggtatttttaccgccaataaaataagttaggtatttatctgtaattgagagttaaacttaggtatttacgccgcaaattactcttataaaatttatattttatttaattaagttaattataattaaccatacatttaattaatttttttcaattaaactatttaacaaaaaataactgacgaatataattaaatttaattttaaaataaaattaatgttaattaatattttataagaaaaaaatatactttaataaataaaaatgaaattagattcgtcttatataatttattaattatttttaattaatttttaaatttatcacaatcatttaataatgatttacaatccataatgtctcaaaataaattcttaaaaataccattagatccataatagaatcaaaggtatgacaattgatataataataactattattttaatttttttttaaaaaaaaatagagagacaaagataaaatattttcatttgtagttatataaatgataaaaatgaataaactatttttattaagtggcatttagtaactacttttattttttaaattttttaat

SEQ ID NO: 370035 - DNA, 668 bp, Cannabis indica
ccccttaagtaatttaaagaatgaaactttgtaattacttaatataaatgattctctttattcatgactaaagtttaaagtttacatgagtaatgtgagttacatcatttatttattaatagtagggtcgtaaatgctcaatgttccagtagttctttattagcgagccatcaagtcgagccaatttatagactccgactccaactactacttcgatgacatatggaccctcccaattcgggttgaacactcctactgatgcatctctcgtatttgcaaagactcgtcttaacaccaagtctccaacattaaatagtcttttcttgacttttttgtttaagtatcttgtgactcgaagttggtatgcggcgttggtgatttgcgacttagtttgtttttttctcaagtagatccaaggacattttaaaagttcacggttttcttcttgattataaaactctttgctgtgactcgatatgttcacttcaacaggcagcattgcttcagagccaaatgctagcgagaaaggagtgtgtcttgtggctgttttctcggtagttctatgggcccagagcacctgaggtagatcgtcaacccatctgcctttggcagcgtctaacttcttcttgatagtatcttttagggttttattaacggcttccacttgt

SEQ ID NO: 370036 - DNA, 562 bp, Cannabis indica
ttcgtaggtctttttcttatttttcagaatgaaacatgtctcagtaaaactgtcatatctctttaaatactcatccgattctcgcaatcttggtgtctatagaaagcttattaaatttcccataattcttatgaagaaaggttttactgaatcgaaatttatctatgtcaaaaattagtatttttacgctgtttgttgtaaatcgtttttcatattttctatataagttgtctcagtaaaatccaaatatctctctgaataatgatccgattctagcgatcttggtaccgttgaagagataattcaattttctaaatgttttatgaagaaaccattcaccaattattgattattctaagtcaaaattattgttttattgctgtagttcgaaatccatttgtttcaggatttctaaaaaaactgtttcggtataatatctatatctcttacgttataactccgattttaaagattttagtgtcattagaaagggaatttgattttctaaaacttttatgaagagagtattctctgatttggaatatttcagtatcaaaacttt

SEQ ID NO: 370037 - DNA, 907 bp, Cannabis indica
actgaatatgtaactttcacaggcaaaaaatgagctaattttgtgaatctgtccactatgatccataccgaatcgtacattcctgtggttttaggcaatccagttacaaagtccataccaatgtcctcccacttccactcaggaaggactaaaggttgcaataaccctaccggcctttgatgttcatctttgatttgctggcaggttaagcatttggacacatactccaccacatctcttttcatcctataccaccagaagtagggttttaaatcctgatacattttggtggttcccagatgcagtgaataaggtgtggtatgagcatcatctaatatctctttcttaagctcgtcaataccaggaacacaaacccaagctttatagaacaacattccattatttgagactaaaaagtcttttggtcgaccagccattacctcatctcgcaccttgactagctcagaatcttctagttgtgcctttctgattctctctaacagatcagattgaagtgtcaagttgtgtaaccttccaattacaaactcaatccctgcactaaccatgttagaggctagttgaggggctattaaaaccgtggtacaaacctgcccgggacctcttctactcaaagcatcagccacaacattagccttctcagggtgatacagaatctcacagtcgtagtctttaaccaattccacccacctcctctgcctcatgttcaaatccttctgggtgaaaaagtatttgagactcttatgatcagtaaaaatctaacatttttcaccgtaaagataatgccgccatatctttagggcaaaaaccacagcagcaagctataggtcatgagttgggtaccgctgctcataatctttcagttgacgagaggcataggctatgactc

SEQ ID NO: 370038 - DNA, 904 bp, Cannabis indica
tatatattggagtctcatatcaaatataaaaaaaaaacaataaaaataccttacatattaatatgtgagtatatatgtgagaacaaaggactttttagtaatttacttagttaaagctcaaagtattgtcacttttattataataatagatatataattaacacattttttttttttttggaaaatacattcaacataattcacatttcatcacatgattccaaatgaatttttacttttaaaattttttaaaataagtaaataaataaataagtgtaatacttttcaattaaggttatatgtgtaagaaaattttaaattataaagtcatatatgttataatttaaaattataagatgtttttctataaatattttataatttaagtaaaaaaatttaattgctaaatgatcattatttagtaaaagaatacaaaaaattaattaataattatgatttatttcattttaaaatatagttgattttttttttttgtaaataaaaccataagatctattaattaataaattcgttcaaaacaatagaacacacttcagaggaacagtctatttaccaactgaaggacacgacctgtatagaaacaagagtctcttgccaagcaatgagccaacttatttacagatcattttacaaaacacaaattgtgaaaggtataaaataccgactctgaaatcgcttggacacacaccaatctatctgtttccaacatgactctatcccacgaatgagtggcaatccaactcaatgcttctttaatgccatttatcttagtaatttcgggtttggaacacatccaatctttcccctcctttgaaatgcttctcccgtaaagcacccatgatgactttctgtagctacgacaaacccccaatgcccaaaaaga

SEQ ID NO: 370039 - DNA, 586 bp, Cannabis indica
gagagagagagagagaatgaatttgatggggtataaatagttgagtctggagtcaagaaatgcggcagggtttatagttagatttgtatctttgcttagcaatgtgttgtactcatgatgagatgccttttacctaataaatagtgtgaaaggagcaagttcatgaagtacaagaatgcaaatgcagtagttgggagtttttttttctccttttttctcttattgaacagcagagttttttttaagggagagtgacccaaacaattacaaagaacatgcgtaagggtcacttccagaccaatattaagtgtcaaccaacccaatagacatttgggcaaagttgtgcgcatgtattcctttgtcgatcattgacgtgcgaaattaaaggaaacaatagggaaggaatagctaacatttttttaagagcatcaataagagcttcatattccgaaaagatgttgtcttgagatttgatgtctttgacgagattcaaacagtctgtcttaggggtgttcactaagtatccgatctaattcaattcgtacaatcaaatcaaatccgcaaaatgcggatatctgcacttgcg

SEQ ID NO: 370040 - DNA, 829 bp, Cannabis indica
tatgaagatatctacatgactcaacctgttggttttgaggagcctggcaaggagcatatggtttgcaagctcaataagtctatttatggacttaaacaagcatcaagacagtggtatctcaagtttgatgcagttgtcactgcaaatggtttcatggagaataaagttgatcaatgtatatatatgaaggtcagtgggagcagcttcatcttcctggtactgtatgttgatgatattttgcttgcttctaatgataaaaatctgttgtctgagacaaagcaattgttatctgaccattttgatatgaaagaccttggtgaggcttcatatgtacttgggatacagatccttcgggatagaactaaaggtattcttcggttgtctcagagaacttacattgatcggattttgaaaagattcaatatgcatacttgttcacctggaaaggcaccaatagtgaaaggtgacaaattctcaaagggccaatgtccacaaaatgacaaagagagagatgaaatgaaagtggttccttatgcgtcagttgtgggtagcctgatgtacgctcaagtatgcacacgccctgatattgcttttgttgttggcgtgttgggtcgatacttgagtgatcttggacttagccattggaaagcggctaagaaggtcatgtgatatcttcagggtaccaaggatcatatgttgacctatcggcaagctgacactcttgatatagttgggtttagtgacgccgattatgcaggatgtgtggatgataagaaatccacatcaggctacatttttatgattgatggaggagctgtttcgtggaaaa

SEQ ID NO: 370041 - DNA, 663 bp, Cannabis indica
tatagtattcttagatagaaattctactgtataactaatgatatgtgtacgtaaatatgacccggaccgacacgacactcatgtatttacagctatagattcgagtatattatcttaaaaattttacataatagaccaaaaatttgaaaatacttcaacacgaacagttttttatttataaaaatacctcttcagtacagcaataaaccatttttttacagtttatttatagttgtagtatggttgtcttgaggttattttatagtttatttatagttatcgtgatgttaatttctcgttattttttagtagttttcttactttttgccgagaaacgtgtattttttacaattttaaaactttaaaaatatatttttataaataaaaaatttaggtcataaaattataaataaaacatataacaagggtatttttgaaaacgccccttatcttttcaaaacccatactgccagcttattaacccaactttgagaaattactcaagaaaattacactctatacccacattttattttttattttaattttacttttattttactattctttaatttatacccaattttataggtcatatccctattatgtgcattgataactctaattttgaataagttatatgaggttatatttagtactttg

SEQ ID NO: 370042 - DNA, 498 bp, Cannabis indica
aagtgcggatatccgcacttgtatggatttgattggatttggtgaaaattcaaaatccgcacttgtgcggattggatgttgattgacatataaaagtaaccgattcaatccaatcctcacatatttataaaaaaaaaaaattatacaaataatattttaagtggcgtttggttgggaagaatgaaaatataagaatgggaatgagaatatgcataggaatggaatggaatggaataaaatttaaaatgcataaaaaaaaattgataaaaaaatcattaaattttttctcttgttacattggaatagtctttccttcctttttaaaatggaatagtcattccgccaaaatgggggaaagagcattccattggaatgctccaaaactttaaaatgcaaccaaacaaaggaaaggaatgaaaattgtttcatttccattctatttatttcattacctccaaccaaatgctaccttaatgtaaagaaaatagtaaatttaaa

SEQ ID NO: 370043 - DNA, 1765 bp, Cannabis indica
cccccgagacggtcctcgtccagtcgcccctttaggcacgatcgtctgatagacgagaagggggaagtcaaggaagatgaggtagaggttgcatccgcccttgagcgcaagcggaagggtaagatggttaaaaccgagccttctaagcggacccggtgggggaacactccagctgttagtactgactctgggattcctcccgaagcggaggagtacactgtgccgcacagcaatgtgttgaccccggttcttgcggatgaggagaggcaaatgctccgagttgccaaagacaactacgctctagacgagtacagtccgggacacgttgaggtgaaggccttaaagacgattctgcgggaggagcagcagaacactttgcatgaggacgccttccgaaatccttgggacctgaacatggaccctttgacggattggttcaaccgctttgttgggcctaccctagctccctttgcctcggagatgaccatccagtttgtctcccacctgactcagttcccaaccaagatatatgcggcttgtgcctccttgaactccatttaccaggtccaagacatcagctctgctttggccgtgatgagtacttgtaatttattccctcctttgatatttttctaaggcatctgattttattcttatttcttttttcagattactgccgagaccggccgcctttccaagaccctgatcgatcatgggttcatcatgtccgaatttgggggcatagacgaggcgggacttgtctgccgaaaggagggcgttccaggaggaggctcaacaaagggaggcccttgcggaggcaaagtaccgggaggaggccaagcaaagggaggttgaggcggaggtgaggcgccaggaagagctgaaggcggagggcgaggctacagccagggccaagcgcgagcttcgggaagccaaggaggctatggacgagatggctgctaagttgaagtccttagaggagttgcatcaggcggacttgcagtcgacagccaacctgactgtggaggtgaaggagctaagggattttaaagatcagaccttgaaaaagcccaaaagagatgagctcctaaccccagtcgtctgcaagcattgcgtcaagcgctttgatgatggcgtctatatggcctaacagtcgaatggccagagcatcaaacttgacttctatcccaaacctgaggaagccctcgctaagttccaggagaaaaagaggaggcttgatgctttgctcaaagaacgccggggccctcgtcttcctcctcgtattgaataggccgagaagtacaaccaatttcaccattacaactacatttttctttcatcttttacatttacagtctcttttctttcagacaatttaaattattatcttctaaggggagacagctattatggcccgtccctaggcccttaatatttttttggacctgcttttgggtcaagatatttaaatatatatattttcactttgatatatattttgcttgattttgtttttacttttggcctgttttacatttgttcgtgtggtatgccttagtaccccctgagtggcatgaaaacattatttttaaggcacttagctttattcaaaatttagaggttgcctatactttacggtacaaattctcttaacaaagcctacgtttacatttttggattattggtaatactttcggaggtgatcagcattccaggccctaggcacaatggttccgtccaatctttttagcttataggttctaga

SEQ ID NO: 370044 - DNA, 589 bp, Cannabis indica
aaaataagaaatattaattttttaatatttaattaatgactattaatatcaaccattagatatttgatccaatggccaagaataaaatatacatatacatgggtaatacccattaagagcatacccaaatatatatatgtttaaattaagtgtatatgacattttcaaaaacaaaaaaaattgaatctatacaatttttttaaaatttgaataattaaaaaataagagaattaataaaaaaaatatatagagtaaattttttaattaaaataataataaagtaaaggattaagaagagaatagataaaagtatttagggtgatttagaccgccacctcactacatcatacttctcctttatatatatatagggcaagactatggtatgacctagtaaaagtttcctaccgatagggtactttttttaaccattgattttagatcgtatggttattataatataaggtgtatactcttacgataagactgcctgtatacaattaagactttatgcattataataatatttattaattatatatttattttaaaaataaaataatattaataatttataaaaattattatt

SEQ ID NO: 370045 - DNA, 512 bp, Cannabis indica
ttaaatttttacttttttttaaaaaaaaaaatagttataccaataagaaaatgacacgtgaataatgacttaatattatataacttattactgccaaaaattaaacttaagtatttatttacaactggaagtcaaacttaatatttacgccgtaaattactcttttattaaatatttagattataagaactaattatgaaaatttgttagaaaagaagaaaaacaaatggaagagtaaattaaaagaaaataaatgagcaaatgatttataaaaattaggataaatactattttggatcctgtattttgtaaaattattaattggactctttgttttgttaaatgacaaaatagaccctgtattttctaaaattgtacaaacaagaccctgaactgattttttatcaaaataaaacttgtataatccgatctagtgatgttattataaaactaattatattttctgtatcggttttttattgaaaattttcttaaagttagttatattaaaa

SEQ ID NO: 370046 - DNA, 514 bp, Cannabis indica
ggttgtcacgaggaggtgacctttggttgtcccttcgagggtttcaaaaaatgacggctgtaatcattacttttattgcatttatgatgccacgtcacaaaactcttcggtttctgtgtaggcgtggccatctttggccgttggattgggcgactctaggccttctaattgccacgtgtcgtgatcccaattaatgagggatttgggtatttaaaccctctgattcgaaccaaaaatcccattttccctcattttctttaacttccttaaacttccttgtttcttctctttcagagaaacctacaaaaaatacttccataaattgcccagctttttcgcctttctctgtgggtttttccttgattctagagtgctgtcaaggacgaatcgtgggagcaaatttatcagaagcaaaaggttagtttttcgaatcttctctgtgtttcgctgtcggtttgagtgagaacagtgtcttctgggttttattttttgtttttgatatgcatgagagagt

SEQ ID NO: 370047 - DNA, 813 bp, Cannabis indica
tacaatgcaaacccatcatttaaaaaaaatgaaaactttttaaaaggtcctcgaccaaacctttttgacgaaagaggggtgaactgttataactccctaaccaaacctttttgacgagagagtggtcgaatcgtgataacgctttgatcaaacctttatgacgagaaagggatcaaacaactgtaatttttagtttaaaacctatctgatgagaaaggaaaatcaaaagttacgactagcgcataaagcaatactaacggctcgcggtaagggaaaagtattaaacaaggcataaaagtgtcttgaaaagctgcctaaacctaacacatgggtagaagattttactactcataagaaataaaaaatatatacaagatgaaaaattcattaaaagtacatttgagtttgcttaaaataagatcatttctgatgatcgcgaggctgaataaaggatggctcacagattgagggccgggcagataagttgctcgcgcataaagtaggtaattaactacttagcgtaagaggaaaataagagcaatggaaacccctactaaactttatgcatgttatttgtttacattgtgaatgaaacgcaagcaaacatccacatactaaagttgaagcttaaaagtatgacacattaaaaagcaaagttggccatccaacttcgcaaatctgtctttacaaaaatgtgttgccaggggcaaaccattttcttggccaaaatgccattttatcaaaaaaaaaaaaacggagataaataaaaaccaaagtctaatttgttgggagacttggacagatcttccttct

SEQ ID NO: 370048 - DNA, 1195 bp, Cannabis indica
gcaaacccatcatttaaaaaaaagggcctcgaccaaacctttttgacggaagaggggtcgaactgttataactccctgaccaaacctttgcaacggaagaggggtcgaatcgttataacgccttgatcaaacctttctgacgagaaagagatcaaacaactgtaatttttgatttataatctatctgacgagaaaggaaaatcaaaagttatgactagcgcataaagctgaatactaacggctcgcgctaagggaaagtattaaacgagacatccaaatgtcttgaaaaaatacttaaacccaacacgtgggtagaaattttaactactcatgtaagcaatgaaaatatatataagatgacaagttcattaaaaatatatttgaatgtgcttaaaataagatcattctgatgatcgcgagatggaattgatgatggctcgcaaattgaggaacaggcagataagctgctcgcacgtaaagtaggaaattaactacttaacgtcggaggaaaggacaatcaatggaaacccctaataaactttatgcatgtgatagtttatattgtgaataaaacgcaagcaaacatccacataataaagtttacacttaaaagtgtgaggcattaaaaagcaaagttggtcgtccaaccttgcaaatttgtttttacaaaaaaaagtgccactaggggcaaaacctttgtctcggccaaagggtcgttcctaaaagaaaaaaggagataaaagtctacatgctgggagacttagacatatcttcttcttcttcctcgacctcactatcttcttcctccatcttggtcttctcgcaaagaactaaagtctcctcttccttctcctccaagaagctggtatccatgttagggttccaaatccagacccgatatacatcgcaaaaaccaactttatcgcaccgttctatggtctcaatttctttctcaacaagtttttcagtaagcttcttctcaaactcatcggcttggactttgatggtcttctcagcctcctccttcgtcttctcggcttcctctttagccttctcggcttccttctttactttctctgcttcctcctttgccttcttggtttcttgcttgaggcggggtaatctcctgttgggcgctatctcgttgctcacacacaagcttgcattggggatactaatttgtgagtctcgccct

SEQ ID NO: 370049 - DNA, 886 bp, Cannabis indica
ttgcaagtgggcatcttgaacttggctggaatagggaggtcaattaatcatttgggagaaggcagaccctctcctcctttcgaggtccaaatcagtgggttttggtgcggtaaggtccttgaccaatcgagttaactcgtccaaccgagcctggatcaccggatctgtggctggttgaggttgagcaatattggcaccaacattcgcttggtccccttggtctggctcaggtgggttcactatgttggaaccgcgattgtctctatttctgttgagggcgtctcgcaggtctctaccccttcgggggcctacccgttcaaaaactgacccagttcttggcctccctccagcgttctgactatcagcccttccatcagccgggggtggtacttggtcattcctacccctttggggtggattttcaggttgatgttgcctattaggggcatacggccctctagcttgataaccccccatctcatgatttggctggttgttagcccgactttcagcttcatcatctccatgaccatcagggtagtctggatggtagtcactgttgacctcagggtcttctcttctccctctggacctactatttcttgggcgatcattgccatctcgtggttggccacgttgatcacggggttgccattccctacgctggggtgtccttccactatttctgctacgatcaccattattgtttctagagtttcctccaccactccgccttagacggacattgtgggagtcatcgcgtcccatatgatggccgggtaagacttgctcatcaaccgggggtggtcgattattattgcggggaaccctgttggaggggtgacttctagtcctttcttggttccttgggcgctcttcaggtcca

SEQ ID NO: 370050 - DNA, 897 bp, Cannabis indica
cttggtgattttaatgttggtagctgctgtgcatgtttgttgttatttctgtagtttaaatatgtttatttaaggtgatctaaactagttttgttgttagttggtgggatttaaccttgtgtaaagctttagactcaaaatcttgaatttcaatggtgaaatgttgaaatagcttgttgtgcttgtggtatttgattgctgttgttttcagaggcttgtttatgtatatttgagtagattcaagcaggttttggtgcatgtgaatggggtttaaccaagcttgagttttgaactcaaagttggagctttaatggcattttttgtattgtgcatgaagctttgttttcttgctttggatatgttctttgggatgtatagagcaggtctggaaagtttgatatggtttgaggttgttttggttcagatatgaatttttttatggtttcctgcacagaactagaattccggttcagtatggcctgtaggaacccgaattccggttggtgtcctgggttcctcccagaaccggaattctagttgtagaaccaatctgccggtgggggaaaaattgggaattctagttcttccaatttttgtgttgcttagggtattgtgatgctttttatcgataggaaaactttaagtttctagtttaagtccccgggaagtgatttagcgtgttacttatcagtgttgtgattattatggtttaggagcctgtaattcgccgagcagttcgttccactcaggttgaccggcacacctaaattcggaatcaaggtaagattagtataacagtatgcatatgtatttacatgtttagcgtgcatgttaggaagcttggtagattacattagatatgtatgttggcttcgtaccatccgacagtatcacatc

SEQ ID NO: 370051 - DNA, 517 bp, Cannabis indica
atgggaccatcttatataaaatactatgatagaacactttgaaattgaatcaaatagtatctcatctacttttctactttgtttttcagatttagtcacgttcttaaaaaaatagtattggttgaaacaaatactttcttatcttaatgatcataggatggtccacccctaatctttttagaatagctatcaaacatgcaaactttagttaacaattcttgattttgtttagttaatgattaggacatccctgaatctagtaatggtgtatactgagtttacgaccattccatcattctgagattttcttgggatcagacttagatggaacaacataaaatgtcatttttaatctctgaggcattttcctagaaggactcaggcaggtgctagtaactaatcatagacctttcattttcatcaaaatgcaaaccgaatttctgggaaggtaagtttggatacaatttaaagttcaacttaatgatctttaaactgtataaccaaatatttttccacc

SEQ ID NO: 370052 - DNA, 709 bp, Cannabis indica
agaccaaaactgagactggaactcgagcccagacacagtcgtgtacccagaccggaaatgagacccggacctagacctaaatttgggactcgatcccaaacacagacttggacctagatagggatccggatacgaacctagactcggacaaggacccagactgggatccaaatgctggacctagatccggaccgagatcctgaccaagaccctaacttggacctgcactcaagacccaaacttggacctggacccgaacctagacccagatcggggtcccgacctggagacaaaccaggacgctgactcggacccgaactcaaacccacacctagaatcagacccaaagctagacccggacccagaccaaaactcgaacccagaccaggatcaaaaccaaggacatagacacagaactgaatccagactcagatcgggattggaacttaggactcggacccaacctagaccaagacccaggacgcgaacccacacccggagcctgatttggacctagactgaaatacggactcgaacccaaactcagaccaagactcgaactccgacccgaactcaaaccaaaactcgaactcagaattgctaatggaactaaaaccgaacaaggactaggaccaggaccagtacctaaaccgaaacccgaacccagatcaaaacatagacatagacctaaacccgaaccgagactagg

SEQ ID NO: 370053 - DNA, 669 bp, Cannabis indica
aaagtccttaaggaaaataatgagggaaaaagtaaactacagaatacttaccacactcaaggaatggctgagatcctgaacttgaaagacagagttcaaggatgcacaagcagcgaaccgtttaggcgcgcaccgggttagctgggagacgaactcatcggtcatctccgcgacaaaaggagccaaggtaggcctgaggaaatgattgaaccagtccgtcaaggggtcctggtttagatccaacgggttctggtaattcagatcgttaagggaattttgcatctcatcccgcaaaatcctcctcatggcctccagttcagcatgcccccaggagtactcgtccatggcataattgtacttggctatccaaagctcctgcctcgcctcatctctgggaaccggagtcagcactatgttgggaggcactgtaaattcctccgcctcgggagggatcccggaatcatggctcggggtcggagtgtccactctctgcggccgcttagatgtctcctcaactaccatcttgcctttgcatttgcggatcagagcaacctcttgctcttcttcaccttcttcaacttcctcaggaagagcccattgctcttcttgaccttctttagcttcctcaggaagtacctcctcctcatccactaagtcaatagtgtctgg

SEQ ID NO: 370054 - DNA, 521 bp, Cannabis indica
ttaccaacttgtgtccaattggaaaaaagacatgttccagttaacccaacatgccccttatgtctcactacagttgaaactatttgttcatgcgttagttgggtgtgttcatgctcgtgcttgctggaacaggacaagtgtggatgttgggagcaatatggatgatgatttcagcaattggctactggagctgcaatgccaaggaagagaaggcgagttggaggaggcggctatggtcagctgggccatttggcgtgccaaaaatgactttgtttggcagcaaaaaagttggactgctgcaaatgtggttacatcagcaagaatgctacttgatcagttcaaagacgctaaaaaaagaaagggtctttctttgtcttcgttgttcgacggaggccgtttggttgagcatcagagtgcaccttcttcaggaaagatcaatgttaatgttgatcgcgccttatttgagcatgaaggcaggtttgggtgggttgtgtggctcgcgactgccatggcaatgtcgt

SEQ ID NO: 370055 - DNA, 799 bp, Cannabis indica
cgttaagctgaattcgctaagtgttgatcattctgcacggctcgttgaatattccattctagatgtgccagcgaggcatcttgctcggcatatcgtttcgagcagatgctccaagtggagtccacgtgtcaccattctcgtgatgccacgtcagagttccaaatttgggataacatttgctccccaagtctgtacgggatatgccgagcaaatatgccgaccaggaatactcagcagattaaagaacgactatgttcgaagaaaattcgaaactcaagaagtcataaagttttcttgagttagggcaaaaaagttcatgaaacttggaataagtaagatggaagacaaacacaatgcagttcaaaataagctctactgcagaaagttaacataaggacgtggaaaagaagagtcgcagaagtttctaaccctagggtttcctaagcattctttctacagcatagttacattcaaagcacaaacatgcaaaggaaagaataaaggaaatcagaaacttactcaaagattcgaatgtccgagttcaagcaagccagcaatcgtctgtaggcacttcgacaactttaaagccaaaaaactctatcttttcgctttgaagtttacttaacaatgaagggtgataaaatgagtaatgcgccagtactttgagtatttataggcaaaaaggttaactgcatacaaaggaaccttagacgcctcgacttcccgcctcaaaagcgaatatggaaaatctaaagtaatcgagtgcaaccgtcaaccgtggagagagaaattcgaattt

SEQ ID NO: 370056 - DNA, 570 bp, Cannabis indica
aaggaggagtgcagcagtggcagcggttgattacttcactaagtggacagaagctgaaccactcgcaaccattacatcaaagaaagttgaagacttcttgtgaagaacataatctgccggttcggactgctgtacaagatagtttcagacaacggcaaacagttcgacagctaatcattcactgacttttgtgcgaaccatggtatcatcaaaagtttctcagctgtggcccatcctcaagtaaatggtcaagttgaagcagtcaacaagtccctgaaggatacactgaagaaaaaactcgaagatgccaaaggaaattagccaaaagagcttccttaagttctatggtcatatcggacaactgagaaaacgacaaccgaacagacacaattcgtaatggcgtatggatatgaagctatgctgcctgtagaactcgagccaccatcccacagaagattgatgtacaattaagataccaatctcgtactcctagccgaatcactcgatgaaatccaaaaaagacgagccactgcaaacttgaagttgatggcccatcaaaaaaaagtggct

SEQ ID NO: 370057 - DNA, 531 bp, Cannabis indica
acaaaccgcagtgacaagcatcggacgtcctacttttttacaacccccatggacactacccaccgggctttcaaccatacgggtacatattccagaccggtcccaaccgaggagatgatacaacatgcggcagccttgacagccatgccagacgctgaaaaatcagctccaaagattgtaactgcggagacgctcaagttagtgggattgtaccctcttgagcataactcaactgccgcaagcacaatcgatggacctgatgctcctgctattcccattgacagggggaatccttctcatgggaactttactacagccgactcttccatccacatatctttaccacccactacttcgaggagggacactggagtgattgttggtgttgatagcaatcccgaggatactacaatgctcaatgattatagctctgaaggttcctttctctcctttttttaatatatacttattcactttttttggacatacccatatgataacattatgatgttgtgtgtattgtgatattaa

SEQ ID NO: 370058 - DNA, 507 bp, Cannabis indica
ttttttttcgtaattttctgtttagatcattgcagttcttcttttccaatcaattttcgccggaatttatggttgtattattctcgttttggtttcattctggttgcgttgcacatttgatcgatggaggtatcttcatcttctccattcattacgtgtggcttaaggtgtagaccaggtggtatttttgtaattttttcattgtgagttgtataaatgttgaatgggccggcccatagtaattttgtaatattttttcctttttggaattttcctgtttttttccctaaaaattacagatcagtttatttttttgttaaataataattgttgaccgagattttcgataactaattaaataaataaaaaattagagttagaaaagaaaagagaatactatgaattttacgtggttgtgacgttgataaatcttagttcacgaactagagatagaaaagatgaaattctctatctaaaaagacagtaattttataaaaatagtatttt

SEQ ID NO: 370059 - DNA, 727 bp, Cannabis indica
tccttatgtcatgggtttctcccaacctttcgaacacataagagcctggttgctttagcgattgatttgcttggttgacgggtggaatggcaccattagtctgctcgcctaccgctgggcccacaagcagaagtcgtgactggggagttgggcagctgaccattagtagtctaggaagtattcatctttggatcctcttccatttctcccaagggaatgacgttcggtgattgttgaccgatagtttggtaggctcttcgtattagcacggtggcttgccgacttcgatcttcaatctctgcatggtgagccctcaatgcatccatctctttatctctccattcagcgaacataggcctttgttcctcgaacgcgagatttactgcagcacgcagttcgtcctgatgatgatgcacagtgttgttatgacactacatgagttcgagcgcgtcatagagattttgtagttcagtggcgtctccgatggttgtctggtcgttggttcctggcggaacattcatattatggatgccctggttgggtccaggaactgttattcccagtctcttgaacacgaggcgcaattccagtaatatgaactgtttcaccattccccacgcttcccgtctgtccaggattaacaacaggtggaacccttgaactttctgggttctgtgatgtaggatccagcgtctgtgaattttctaggtcagacagacctctacga

SEQ ID NO: 370060 - DNA, 432 bp, Cannabis indica
aagaaaaccacgcgtctggtcgacgctactgatcctcaagttgctcggcttgccactctgcgcagcgccgaataggattcggccgtcccgatggaggaggatcgcgagggggacgctgaggtccaggaggttgaggagctggacgatgcgcacctgggcagtccttccgcagccgagggagaggaagaggttgaacccccaaacttcggcgagtacaacgagtgtgggcagccagtaattgctgattgagacgttttggttgagggcgtggactacgtcagtgaggagctttctgcggcggttcctcataggaggcagggtgccttgggcgccaggtgggtaagtcctccgtctaagatttcggaggcacgccttcaaactctcgaccaggacgggtgcctgggcgagctggactgctacattcccacccac

SEQ ID NO: 370061 - DNA, 895 bp, Cannabis indica
aaaagtttttgagtttttatagtaaacttactactattattatgaagacaatatcatgagttttgaattttcattttcttataatcaatgtatgcatgtggtacattatttaagaaaattttgaaccaaaaacaaatgggattggtttgaattttgtgtttggagttgacaaaagtaccaagtgtgaaatattcattatcttattattatgattatgattatctatccacatcatatatatgtattatgtatatgtatataataaggtttcacacttaaggttataaagtttgagtttctacactaataataagtcctttaaaatgaaaaagtgtaatttggattattgataagcttttcaaagcaatgacccaaaattccaaataagtaggagaagtgtaataaatatactatttgtcaacatttattatttgaaactcttcacacatgtgtggactatggacaaaatcaactcagtcacacaaacacactacaaataatagtccagctttctttcataatacttatctatttttagttttacatacaaaaattgaatcatttaccaattttttaaccatggtgtgatgtggtagtgatatgtaaaaaatcattacttaataatacttaaaaggtgttacatactagtccaaatttagatcttgaacctaacctcgaatctcatctcaagacttggactctagactaagccttgaacctaactcagactcaaactcaaaacttgagggaaatttacaaaaatattggaatttaggttaacttttacaaaaatactgtcacacggaaatcttttcaaaaatactgtgtttttataaaacactagtaaaacacaaagcagaacaactcaaaacaacagtagaacactagtaaaaca

SEQ ID NO: 370062 - DNA, 650 bp, Cannabis indica
taaggtaaaatctagagtgatcgtcttaagaatttgacgataactcatatccacccctgaatgtacattcatattttcgaatatagatgatcttactttcaagtggatataggcatatattctttttgtaaagaatcatcttgtcaaaaccactatgaacaagatgtaaatgccatagatttataaaatatagttttggtcttttgatgacttaggtttagttataataaagagttcttagaatatccaagtggatcttgattacaaaatacaaaactcatattccatacattaatataccgtttagatccattgacagaaaatagatattaataacttgtgaaagtcataatgtattgtccagtgtattctacaaaactgaaatataaaatttcaatttggaatttaaaatttaaagtcaaagacttaaatttataccaaatatacaatgaattttattctagcttggactaccactactaatctaactctaagtctaatttgcctaaagtaagcatgtacaagtaggagatctctaagattgatgatttatatcatttcaggataaaatgtcgggaatatagtcttctgcgccattcaatttcataagagaaattagaataacatcataagcagatgatttataaacc

SEQ ID NO: 370063 - DNA, 581 bp, Cannabis indica
cataggcaataatgtcagcttcagcatacttagacggaagcctgatctctctcctagttcgatctcgagccaattggtaatcgtctaaggtctcaagtccatcatcaggatctgcttcagattcttccgagtttcctactgttatttcttggtcaggaactgctctttccaactggatttgagtactgatttgatcattaccttgcttgcctgaaaaatcagaaaacacaccttcctcgtttcttttaaatggaaaatcattttcattaaaaatcacatctctactagttacaattttgttggtttcaagagaatagagtctatagccttttactccattaggatagcccagaaatatatatttaattgatcttttctcaagtttgtcttgcacattgtgcttaagctgcacaaccaaatatccttaagtgtgacagagatggtggcttaccagtccacaattcttcaggagttttcaactctattttcctatttggacttctgttaattaaataacaggcagcatgcaatgcttctccccaaaaatgtttctttaaccctgattctaataataaacatct

SEQ ID NO: 370064 - DNA, 518 bp, Cannabis indica
accaagtcctcgggaaataccagaccaaaagcttgaaaatggaaaagtatttagagaaagttcggaagaacttggaaagattccattacttcaaaattgagcaaattttagagaataaaactccaacgccgatgccatagcaacactggcctcacagaatgatctggatgaactaaagccggttccggttgaaatgctgagcgagccaagtatatgtgaaattaaagaggtcgagatgatagatagctctccaacatggatgaagcctattatcaactatttactcgacgagcaacttccaaatgacgaaaatgaggcgtgaaaactattgtatacagtgcctcgctacacaatgatcgaaggcaaactataaagaagagggtattcaatgcccctacttcagtgttttcctcccgcagaagcaaacgaaatcattagagaaattcatgaaggcttctctaggcatcatgtgggttagcaaagtctatctaaaaagatcattaggcaaggatattact

SEQ ID NO: 370065 - DNA, 719 bp, Cannabis indica
tgaaattttagattatttaattttaattaaaagatcaaatattacatttttttattaaatttgaatgatcttactttgatattaaaatattatctttaaaaataatcttgttcaaatttcaaaatttgctaaccatatcatcttttttcaatttttttctttaaaatatattgtattaattaaaattataagattaggaatatgttactttaacattttatcttattagatatttttttattaaaaattatattttggcaaaaataacataaaatttttgaaaggttggttagtttaagtttgaattgaaattttagggtttcaaaccataaatttttcaaacttatttttttaataaaattgaaaatattctaaccatataaaaatattttatttttcaaatagtttattttgtaatttttaaatttattaaattataagacttagaatataatattaggagtatctaaatttaaatttcaagatattatattatattatcttattagaagtttaaataaatttaaattttgaataaacttgaaattggaaaaattggttagctattttttattttaagttagaatttaggaaatttaggagtttgttaagtttttattttgtttttcaaatatctctaacaactttaatttaaattctagttaacctatttattttaaatttaaatttttttaaaaaaaaaattaaaattgagatat

SEQ ID NO: 370066 - DNA, 941 bp, Cannabis indica
actttgcttttcgagccacaaaccaaaccctccccacggcccaaaacctagcctttcgaaaaatcattaattctccgggttgtagccgttgtggaaacttcgaagaatcggtgtcacatgcgctgttctactgtcagagtgttcgaagagtctggaaaggtacgcaatttcacccttacattttttcttgctcttcagaaattttgtttcatgatttagctcatgagatttacacttcttttcccaaagaagatgtagatctttttctgtgtattgcttggtttatttggtttaacaggaacaaagccctcaaaagtcaaccaaccgatcaagctcacgcaattgtcagtttggctcagagtttcttggcagattataactcagtttcttcagcctctaccctctcggtcgacccagtttggcagctgctaccacaacatgggctcctccagcacacggtacccttaagctaaatgtagatgcagcagttcctaagaatggcggaagatcgggttttggtggagtaatcaggaatagcgaaggttcggtagtcgcagctcttgcccagccctatgtcggaggcggttctgttgccaccttagaagccaaggctctcctctcccttcttcgctggtgtattgaagaacattttacggttcaggtagtagaatcggattgtaaagctgtcactgacgccattagccaccccaaggaagatctttcggtgttcggagacctcattcagcaaatcagagaaactttgtcccttttccctgcagcccggatatctcacatcaatcgcaacgccaactctttggccgacaaattggcgcactgggcttcaagtctagacgaagtagcaatttggataggcgatgacccctgcaacctagtggatttcctctccttttagcgggctccctttctctcaaaaaaaaaaa

SEQ ID NO: 370067 - DNA, 1041 bp, Cannabis indica
tttcatcatatgtggttgcttcattggcggtgatcaccagatcatgcctgatcttcacattcaaaccggccaaatacttctctttcttgctaaagtcagttggcacgattcccacggcgagcttggccagacagtcaaacttggtagtatactgagtaatcgacatcccttcagtttgcaccaactcagtgaattctttttgcttagcactgcggatagcttcattatagtacttagagttaaacaactccttgaattctcccaggtcataactatgacgtcctgagtgagggttatcaactcccaccacacgagagcatcctcctggaactggaaagtggcacaggtcactcgatcattaccaaccactcccataaagtttagaattcgttcaatcactgtgagccattgctcagccttcatcacatcgggacctcccagaaacactggaggtgcttgcttgcggaatctttcgtacaacgactccatacggttgccaacaacaggttgttctgctggcaccgcttgaactacaacggcctgagcaacttgctgaggaggcacggcaggaggaccctgctgcctcaacctactggcggattcgatcttgcatttttgcagacctctgctcccaatctggaggagcttgtcgtggatttatagggcgaccaccctgagctctgctacggccacggccgcgaccacggggattttcatttccttaaccgcctccggtctcaaccatgttaccctgacttcttgtattttatggagtgtccattttacaggacttagcctgcgaacccataagccaggcaggttagacagcgatcataaatctcaataccgctcttaaggacttaaaggcaacacacttaaaataaataattaaaatctaatatgcttcctaacatgctttaataatcatttaaaatactaaatgagtgcgggcttactgaactgtgaactaagctttctctgatgaagattgtacatgtcttagcaggcttcggtagacaaacctggcagctgtgataccaa

SEQ ID NO: 370068 - DNA, 544 bp, Cannabis indica
ataggcccatggtccccctactatttgagaccatactgcttgtaagactcagataattgattttagttaatcaattataattctaaaattagactatgtctagtttatgaattttcactaagcaatggattaattgtgaagaaaagagattctttgtcttagttattaattaagagactttattaattctaattaataaatatattaaatggcaattttatttgataattaattttaattattaaataaatagttttggcatttaagtggttagaattagaaaaatagcatttttgagaaaataaaagaaagattgtcaaaagtggaaaaattcccaagtggggccgaacactatggccaaccacttgagtggtaatttccacttaatatttccattattttaatgcctaataaatcctaacctatacctaggtggttgccttaaatagatagtgatggctcacacttaaaagatgatgaaaattcacctttagtcaaattttcctgatcctactattctattgaattcgaaccagcccctctc

SEQ ID NO: 370069 - DNA, 656 bp, Cannabis indica
accgaactcgcggtgccacgagaccatatctacgtgattgaggaaaggaacggagtcttcaagaagccgcccccgatcaggggaaaccgtgacaaaagagaccccaagaaattctgtaagtaccataaagatattggtcacactactctggaatgttgggtcttgcaggatgaaatcgaagagctgattcgaagaggaaagttcgacaaatacaaaaagaacgaggaaggtcatccccgagcggatgacaaagaagaaaaccagaacgcgagtggttcgagaacacctcgcaatatattaacaatcattggagggccccatatcgcaggagactcccgcaaatctcaagagcgatatgccaaggaagctaaagagaagccgctcaccaatgtaaacaatctcagtgaacggccagagaaattatttaaaagagaatgcgacgacatcacgtttatggagagtgatgcgagatgggtccatcacccgcattccgacgcactagtcattgttgccaatattggcggagacaatgtccaccgtatactcgtggacaacggaagttcagtgaatcttttgaatttccaagcctttaaacaaatggggttgcatgagaaggatctgcaacctgtaacgtcaagtatatacggttttaccgg

SEQ ID NO: 370070 - DNA, 952 bp, Cannabis indica
caatgttgtataaaggtgacttaaggaccatggacatatctttcgaagctccaaacacttgattattattatctcatcaatggaataatctagtttattaattctacttttactccatagtctccattataaattggaattacacttgctaacaatataaaattatattttatagaattattactagtagtccaatgatataatcaatataagtagttagtcccctaattattagttcataattaaagttggtcaaaatttctattttatccttctaattatctcttaattccttatgtaccattaatttaatgtgaataattaatctataatccaattatagatttggatccaattgttagcactcctagaattaatactataaggaaactaatattcattcatttagaaaaagcttaaatttcattattgtataacatgttccaagttgctcatgtaatatatattaagctcctgaaactaaatttataagaatcatcttttctgaaaaactttaacgagtgaatcaaagaactcaataaacacaaataggagttcatgtatattcaggattcaaactgatctattattgatcatcgatgtgatatgaataactctttcatgataaacatcacgttgatgaaaaatgttattacatatcgatctactcatgtataatcaaattatacataacaccttcactactgtctatccacatatgtgattcgaatcaaaatcacacacactagagtatagtgtatagtttactgtacttagtatttctatattaaagatccttttactttaatacaataccgactagttttattcatattatataaattttttttgaaataaagattgtaactttattaaagcaaatcaactattaacatagcatccaaaccagtagggacaaaccccctacgggaaagacggtcaggacatgaac

SEQ ID NO: 370071 - DNA, 993 bp, Cannabis indica
taaaaaataatcataaaaatcattaaaaataaaatactattaaattaaattagtttgattaaaaatacaacactttattaaccaatgacataattatttgtttaacattttactattttttaatgtcatttgtttttttttctattttaaatttattacaaagttatttctcaattaaaaaaaaataatctcaatataaaaataattaaaataaagatatatttattacttcaaaaaaaaaatatattatataaaactagttttattttagattttatatatacatttataagtattttatataattcccaagcttattactacttcatactagttttaaagaataaaaatattgctaaagtagaatataaaattaatttatcctaaataagtatgtatatttactttttttttattgtgtatatatatttttaaattaattaacaagtgatttgtgttgcattatttaagtttatttatttatttattgaggttgttatattttttaacgcacattttcgttaaccaaatttgagccgaatagtgataatctcacgtagaaaaatgaaagcagtaaaataagagagatgaacacaagggatttttttacgtggttttgcagttaaaattttgcatagtccacgagtcaatctttttagatttctaatagcttttcagggcccttttcgtatgattttttcgtccattttttgagctaacttcccaccatttataattacatagtaggcaattaattacagatttaactgtaatctttacaacgtttatcccctgaaattgtggggtttgattacatatcacgaagtataaatgcggttattatttgaatatcacacagttgtgatttatctgcttttactgggtcaaaatgatcgtgtgtttaaacatgtcttaaatcatagcgttctgggatgtctcgataggaactcgattctaatgaccttgatagcgagctggagctttttcccctat

SEQ ID NO: 370072 - DNA, 851 bp, Cannabis indica
gtgtcattgttattgttgtccttaaatttgttgttatggtgatcttgatcaggtcttataatccgcaacaaatggtatcagagcttgtgtagctcaagaagatcaagaattggttgatcacagattcaaggttcaagaatggcaatggctaagttcgaagtcgataagttcaatggagaaaatgacttcgggctttggagaatcaaaatgaaagccttgctggtgcatcaaggcatctcagaggccattgacacttctgcaattgcagaaatcgaagacaaaaagaaagtgaaagagatacagatcaaggctcacagtgccatattgctttctttgggagatgaggttcttcgagaagtgtctgatgaagaaacagccattggtctctgggataaattggcaaagatctacttgaagaaatctttggccaataaactgtacctgaaaaagaaactctacacaatcaagatggatgaatcaaaggagctaagaaaacaccttgatgaattcaacaagatcatactcgaattgaacaacattggtgtcaagatcgatgaagaagatcaaggtatcattcttttaagctctctacctaaatcttttgagcattttgttgacactatattgtatggaaaagatacactaaccatgtcagaagtaaagtctgctctgaattctaaagagattcaaaagaaatcagaggacagaattgaatcacatggtgaagggttgttctccaaaggaagacctgaaagaagagagtcaaaagactacaagaacagaggtggatacaggccaaattccaagtcaaaattcaagactggaaagaagtgttactattgtaacaagga

SEQ ID NO: 370073 - DNA, 752 bp, Cannabis indica
tgatatatatttatagaaaattacctaatatattaattttttaacttttattccgttagttttaataggagtttttatgtataattcagtaaaattgcaaaaaaaattaaaaaataaaaactattttgaaagtgtaaaaataaaaagaccctacatttatttataatatactagtatattattacgtgcgatgcacgtatgctatgttttatattaagtattatattatgagttcggaaggaaataaatgaatcaaaaatgaataatatttaatttagagagatttgaataataaatttaaatttaacttttatgtccagtataagagtttaaattaaactacaaatgttagtaaaaacatattggaaacaataataataaggttataatatatgttgcatttgttcccattcaaatattacaaaattaagaataactaacacttgaaggaacattctcactaccaagaagaaatcttagatatggagtcaaaaacagagcaaaatcaaaattaatgtgtacaagtattcctaagaagctaccagcctaccagaagtcatgaattttgacaatgctaactgaaatctcatctgctcattataaagccaccgtcactcaaaatatcacaacaaaagtaacaaagaagtattaaaggtgtaatttttaccaaaaaatgagaattaacaactgatgattgtattctgttcctcgaacacccctattgtcagagcagattgtcctatataaggagc

SEQ ID NO: 370074 - DNA, 636 bp, Cannabis indica
aaattaaatacatatattccacaatttatttaccacacacttaatataatttattcacgtaataatgtatattgtcacattttatctacccaaattatattatcaaataatataacagtgcacatatatttaggggtgttcattggaccacatccaatatttttaggtctatccagatctaatccaattatatattagatgttatattttaccatctgatctattctaaataatttaagtcatccaatcgatccaacatctaaaggatgttggatttgatcgattctatcccacagatatatttcatgtatatctattactttaattcgtgttcatccaatgttttaagcctagtatctattggattggatcggatccatccaatattttagatccagtatttattggatttgttgaaagttttcttcttcgacatgataaagaaaatgaaagaaaagagtaaaagaaaaaagagaagaaacttagaaagaaagaataagaaagatttgattcattacaaaactaagctcaaggagctcgattatatagagggcaataaagagagagagagagagagagagagagagagagagagagagagagagagagagaagagagagagagagagagagagag

SEQ ID NO: 370075 - DNA, 1072 bp, Cannabis indica
aatgataattatattagaagatattaaaatagaatatctcattaaatgcagatctgatagagtgtatttataacttgctgactgtaaagtcttaagcgaggtaaggatatacaaactattgtctcacgcgttgacaagaaaccattttatgtcagaagtacaaagcgaggcattaacctcattacatacgaagagaggtagacgagacatgttgactgttaaaagacttaacatataatatacattatacaaactaagcataacagttgaatgaacttaaacaacgaaaagcgaggcatccgtttcgctatacgaaggcacactcctgatacctccactaatcagcttcaaacatctttcaatgatacccactgttctatcaagtcagctctctcagaaagaagctgacattcaaatgatgttgactgctgaagttcaccttgtcaccaagaactacgattgtcagatggagcgttatgtcttcaatcgcagaaacgacaagatttacattataaaccttgaaaagacatgggaaaagctctagctcgctgccatggttatggttgctatgttcccagggagatgtcccatcacggtacactttgcagcgtatttaatccacatatgtattgacccggtaaaagcgaataaatcacagctgtgtgattttcaaataataaccgcatttattttacatgggacgtaatcaaatcccataatttcaggggattattgttgtaggatatcagtctgatttgtaattaactgttctcctatgtaactataaataggggtaggatacactaaaaaagggacggaaaatcctttagagaaaaagctctagtttttgtattaaaaatctaataagataaactcatggactatgcagaattttaattgcaaaatcacgtaaaaaagctttatgttatttctttttcttttactatcattatatttgtgcaaatccatcacgaaataggctttaatttagttaacgaaaatttacgtaaacagtttggtgctttcattgagagtcttcgtgaaaaaaagctcagaaaaaaaaaaccctcct

SEQ ID NO: 370076 - DNA, 1048 bp, Cannabis indica
gttactggtcttactctccccttacccgtaaccctcctctctctctctctccctctttggtattcaatttttgatttggtgaaaactagcttaatttaaagcttgattattgggaaattgtgctgaaagcttggagcttgtttgtgcaaggaattgaggtagtttttactgatttttatttgagttcttgctgatttttagctgttgtaaaagcatgttaaagtgatgaagttcttgaattgcatgttaggagaattgatgtttaatcttgatgattttgagtatgaattgcttaatattgttgtggtcttcattgttgagctttagatggaatgattagggtgttttcttattagaattcaggtctttatttgatgtttgttgctgaaaataaatgggggtttcatgagtcgaagctcaagttcttgaccttgagtttttgttggtttaggcatgattttgattattgtgcaatctaaattttgagagtttgttgttgatgtttaatgcatgaaattgtgttttgactctctatttaatgattgaaaacctatgtgatggttctaagttttggcgtggatttggatgtgttttgggcgtaattttcgtagctaaaaactaagtttttgggtttttaaacccagtggtcacgactatcataggtttggtcgcgaccatgataatggcagtttgttaatttttttcagtttttatttttgccataacttttgactcgagactctgtttgggacgttcttcatactgttggaaagctcgtttcgagctctatgtgattattgaattttaaatgccatgaacagggattaacccttattgtgtaaaaactcagtattgtgactaggattactggcacctggttaggagcacccgggaatttggaatctctactattatgggacatcaggtaagacagtggttagtatgtagagtacgtgcggtggcgcttatgttgaaaatgatatatgtgagtaaatagtaaccaggattagggttattatcctaacatgagcggtttaatagcctaggg

SEQ ID NO: 370077 - DNA, 606 bp, Cannabis indica
atattatccagttgacctccgagcataacgttttgaggtacgggctctatccaaaggactttactcctaagtctatgacggggaagaagaggaaatctggtgctggccggaccgaacgagctcattaggagaatgaactcattcaacttaagcgggaagctaagttgaatggagctgcaagggccaagtagtatgctcacgagctgttgaatcctaatgatgaggctgacgaagagcaggtgactccactgaaaaggaagaagaaactcccggcatgcccaggcctgctgaacatgcgagtcgcataagggagcccatttcacctgttcatccatcccctcccgtgttcggaaaagggaaacctgttatgtctgaaataagatcgatgtcaggtgatgatggacttctgagtcttgtttgggtagtcaccttgcatattactttgtcttgtgtttgagcttcttgattttcatgccttaggttcctgatgtctgttttctaaccatgttgtttttcattctgtaaagacatgtctcggcagatgattgatgctttgaggaagagaataggcggaagctctagtgcctctctgttgggttttatgcc

SEQ ID NO: 370078 - DNA, 544 bp, Cannabis indica
gaatatccttcaggatttgactgctgaaaggcagatataccaggaggatgctgagcgccgggaggcccttgccaaggccagtgaggaagaggctaggcggagggaggcacaagcggaggcgatgatccgggaggaggccttcggagggataggctagagtccaagcaccaggaggagctgagggcggagggcgaggccgctgccaaggccaagcgtgagcttcgggaggctagggaagccttggatgaaatggctgccaagggtaagtccttataggaagttcaccaggcagacttggagtctagggccaacttggccgtggagctgaaggagctcaaggacttcagagaccaagccttaaagaaggctaagaaagatgagctcctttctcccgtctcctgcagccggtgcgtcaagcgtttcgacgatggcgtctacatggcctggtctacaaatggccagaacatcaagctcgacttctaccccaaacccgcagaaatgattgccaaattcagggagaagaagagaaacttgatgccatgct

SEQ ID NO: 370079 - DNA, 540 bp, Cannabis indica
aaaataaatgttttacatctacatgaacaaccttctaatacacatccaatttaattcaaaaagttatgagtcaagcacacagttaagattttaatccattgcacaagtgaataacagtggttcaatcaatcttccaacttagctatcaacacacgacactaaacaaaaactaacgaaaaacgaaacgaaaagaactgaaataaactgaaaaaaaattaagtctctccccccaaactaaagatgcacattgtccccaatgtgtaaaagtaaaactggatgagagaaacttacctgacccccattagaaggggtttggcagaggtggctgatcataggggttgaaacgtggtcgcatggcaaaatagttgggtttgtccacaccaacattcatcctcgtgattagtgtgttcaactgggccacctgctacacatcaaaaacactcctttgggccatgtaattttgcatgtgcatgttctgctgaatcagataattcacctgatcctgagtgtattgcatggctgggtcgagaggcccagcaa

SEQ ID NO: 370080 - DNA, 946 bp, Cannabis indica
atcaacatggctctcatcagtataaccaaagcagacaaataataagcataacaaaacatattcctttttattttctaaaaaattcggcagcataacagctgtattttgaataaatccaaaaatcataacctgcataaatatttgtacacaaaaatatatttggcacttagtgccccagaacaatctagaaaatatgcagattaagttttcaatttttcaaaaaatttgcaaatcctaaaatttttgaatatgtctaatgttatacaacacatataaaaatcaagtccaataatcaagttgagtccctacctctcccaagttgttaaactttgtccaaaagacaatcttaagctctcaagtcccgagctccaattatttagtccaatcttacatattactgtcaccaatacaatcaaatggttaaataactatcatcgcattctacattcaaaatcgagtccaacgacatataatatgactgtatttaaaatttgggattctgaagcctcacctaagtagtgtacattaacaatcagtggcggtaaaaatcggtgtaccggaaacgtcaccgaaaataggggtagtgtatatcaaaacgaccacctcaacgagtagatcacactcatgccaagcgtttgtcaaaacagtacacgatatcgccagaaagtcaccgaaaaggggcggaactataaaaatatcaccgaaaaaagtagcgagtcgggcaaaatagtttagtgtaggttgttctcctagacgagctgagtttagtggtgaagacgtctcgtcaaacggacactggaggtgaccaaaaaatccgttcaaagtttgaacccccaaactttgacttgtgatcccgagctaacggcggcgaaagaagcggcgccgcttgggggtgacggcaccatgggtttcgttttgtccgacgcgtggggctgggcggtggcca

SEQ ID NO: 370081 - DNA, 916 bp, Cannabis indica
ggccattaattattcaagacaaagaaaagtgatatcatatgaataagagttgctattggcaacaatagtatttagcattttttataagtgatactctattgattggtaatattacttaaaaattattttcttaagctagctatatgagatatgatattaagtttttccaatgacagtataacattgagaagggtcaatgtcttttaggatttgtctgtgaattatgaagagaatagaataggggtgtttctcaaactgcataaatcgcccgcactgcaccacaccgcagaaaaaatacgctttaaaatccttcacggtgtggttacggtttgtagttttttcaaatcacgcggtgtggttcagtttgcgatttttgaaacttaataattatggttcaaaccgtatgcactatatactataagattattaaattttcaatataaatttaattttttttttcaatataaaaatacatttttttgtctttaatactagatatacattcaaaatttaggaaatatccacttattttttttagtaagaattatcttctttaaaagaatgagtaacaattaaaatgaagaagaagcttccacaaataaacgaagagtcataataattatctcaacgtttaacaaaaattaaatttaatacaaaaaaaaagtcttacaacaaaatcaaaagttgagaacatttttaaagaattacgaataaactcaacgaccactaaacatcctaactttactacaacttgggataccttgctagtcttcaaccaacttaacatttctttaatacttagggccagggacggaggtactttagcctacgtgtaggcttaagccctcactcaaatatatacatcaaattttttcacatctagatatatacatatattaattcacttcactcaatt

SEQ ID NO: 370082 - DNA, 573 bp, Cannabis indica
tttcatagtgggaaatattttagagaaaataaattatcgggattgagcggggttatggaaattgaccattttacccctagctttaaaaatacctaagttgtaatcttaagggcattttagtcattagtaaattggttaaatgagggttaggtggcagccttgggtgatgacacctattttattttaatataattgaatgaaaaggggttttactttgaaaagaaattaaaattagagaaatcatttctcctttctctctcttggtgttcggccctcacaaaccagaaggaaaactcaatttttcttcataattttctgtgttttcaaccaaggattcaaggaaaaataactaaggtaaccctagctcctttcttttttaagttcatgaagttgtattttggtttcaagaagtgattttgggttataggggctgttagggtttgaggtttgcttagttcgaattttagggtttgtttggcttaattttagttcatggtagctggtttagagattgattgttagttttatgcaattttaagctttgagttcaagctttgagctttaatggcaagt

SEQ ID NO: 370083 - DNA, 916 bp, Cannabis indica
gaaatgaaccaagtcttttcttgccaagtgggggtggaatatcttgaatggaagccaatctctgtgttgtagggtgcttgcttcaaaataccgttagaggaaaagagtttcttaattgcaattctaagggttctgactcctggttttggaaaaaacgtcattaaaactaagaacatcttaaggaaaggtgcgtgtaagatggtggtggatggtagggatactcgaatctgggaggatccttggattccccacctaaaggatttcagacctaaacctcgctgtttaaacgatggaggacacacttatgtggctgatctgctctcaaatggccggtgggatgttcataaacttaatagcctatttgatcctatgactgtgtcggctattttgagaggaggagttccgttcgaattgggacaggataagtgggtttggactcttgaaaaggatggtcttttctcctgcaaatctgcctatctttctcaagcgttagagagagctccccagtgtgttgtggctccttctttgtggaataaactctggaacagtaaagtgctggaacgacacaaggttctctggtggtgcattctctccaatgctctccctattagatctattattaagaagaggtttcatattgaagaggtgagatgcccaatgtgtgggagggaggaagaaactatggaacatctattccttacctgtgatatagctctccatgtctggcgatcgtctccttggggtatttaccccactcaagataacggaattcgtgtttgggattgggtcaaattcatctgggatctgtctcacaagggattaaatggggatgaggttttcctatatgcttcaattgtggtcgacatttatggcgtactagaaatgaaaaaggtgcacaataatatactttgaactt

SEQ ID NO: 370084 - DNA, 414 bp, Cannabis indica
ttcatatttagggtgttaatagacatacttgtgagtagatctaagatcctggtaaaataaatttccaacaatattatcccaatttctacactctgacatggaattattcgatggtgacacgtggaatcgactccaggtatctgctcgctagacacaagccaaacaggacacttcgtacattcgctcgaatgaagtcctctagaccgagcagtgggcaatccacacagaacgccaacacttagcgaatttagctttcgcatcgtgagtcatcaagaaaatccctataactttgggattagattacagagatatggcaagctgtccaaatcccatgatcagtatattttgtatttactatgcaatctttctacttatatcaattgaacgagaaggaaaatacttcctctccaagct

SEQ ID NO: 370085 - DNA, 1144 bp, Cannabis indica
tgaggtctgtagtgactcgcaatcggtagtaaatcatgttttaggagagtacgaggcccggggagagacaatgatagcttagctaagcaaaatacaggatttgcttgcacaattcaagggttacacccagaggaaattccaaaagaagaaaacacaactgctcatgcactagcccgacttgcgagaagcaccataacagataaggaaaatctagtccctattcaattcttagaagaacccagcatcaattatgcggaagaaatcgaaatgatagacacagctctaaactggatgacactaatagaagcctacctcaatactagagaacttccaaaggacagaaacaaagctcgaaagatgatgaggaaagttgtacggtacatcatcgtggaaggtgtaatgtatagaagaggattctccatgccattacttagatgtgtaacaataaaagaagccgcacgacctctgtctgaagtacattgatggattatgtggcaaccacccaagcaggaaaaaagctctatcaaagaaaatactaaggcaaggatatttctggccaaccatgatggaagatcaaaaggcctatgtaaagaaaatgtgataaaatgcaagagaatttttcaaagagcccccgtgcaccgcccaataagctaatacagatgcaaagtccttggtcttttgctatatagggaatagacctgatcagacagttgcccaaaagtaagggcggggtacaatatgcagttgttgcagtggatgatttcacaaagtggacagagacggaacccttagcaacgatcatgtctaaaagagtgttggacttcatggtgaaaaacatcatatgtcggttcagacttccacacaagattgtttcagacaatggaaaacagtttgatagccagatgtttactaattttgtgtgacacatggaattataaaaagtttctccatagtggcacaccctcaaacaaatggtcaggtcgaggtagtcaacaagacactcaaagacaccatgaaaatgtggctcaaagaagccaaaaggaattagctagaggaattacttgaagtattgtggtcataccgaacaatggagaaaactttaaccagctagacaccattcgctatggcttatggttatgaagca

SEQ ID NO: 370086 - DNA, 560 bp, Cannabis indica
gtaaaaataggaccctgagcttaatttttgacagtttttttttcatcaatgtaaccaacttgaagacaattcctaacacgaacagatatagaaaatgtaatatttttgtcatagcacatttagattgaattattattaaattttattttgacaaaaaatcaattcagggtactatttgtactattttggaaaatacagggtccattttgtcaattaacaaaacagaaggtccaattagtaacttttgcaaaacacaagatccaaaataatatttacccatcttataatcttatatctatatctaaaatttttccaaataatctatgttttcttattttttttcacctttctaataattaacactttattttagttgtataattctaacaattacaaataaaatacggtaataataacaattttaaattgggatgagagaaaaaagaaataaaggatcatttcgtatcaggaggtttaaaaaccattatccctcattaattaggatggagacacgtggcaagagaatgcttaaggtctcacaatccaacggttatccataa

SEQ ID NO: 370087 - DNA, 545 bp, Cannabis indica
tatatatatataattaactaaaaaaaggcaaaaaatattacaaaaatacaacataaacaggtttttaaaatatttttgctgatgagattttgtttttctaaaaaaagtaggaatacaaatggtttttcttacaaaaatatttatattatgttgttgcaagttttatgttgcttaagtatcttaacaaattaatttcttaaaaaaaattttttaaaaaagttgatcataattagtaaaaatattaaaaaatatatttgttattaaaataataaaaaaaatttatttaaaaaaaggataattacataagatactattttttgtaaaaaaaaattatatttttaccgttaaaaaaattttttttacatttttacggttttctatagaattaacacgaaaacaagaacaaagctacataaaagtaacatgaaaataacatacagataacaaaaaataacatacagataacaaaaaatcaacaaccaattaacaagaatacaacataaaaagaccctatattctgtaaataaaatcaaaaaaattagtaa

SEQ ID NO: 370088 - DNA, 648 bp, Cannabis indica
cctgaaaaattaaaatgtgttattgggtattataataatattgatatataattaaatttttacaggctaattaattatagagcatcacttaataaaaaaaatattggttgcactggtatcgaataacaattgctaaacaaaaacatgagtcttaataattgccacaacaccacacgtatatgcagtaaaaagtgcaataatttttaatttttttttactaaaaagagtccaataattttataataataaatttttatttattacttatacatatattaaacaacaataaaaatttgaatataatactaaatattatataaagtgttagaaaacataaaaactaatttctatataaaaaaaactatatatttattttaagtcatcaattaaatttttgaatatttattgaaaatatttaaattttaataattataactactttttatataattatgtataaaatattataaaaaaaattaatgtaaaaaataattgaaaacatatctaatagtggtgagcgtattaattgtaagaaaaaaaaatacaaacacacaaatttgaagttcttataaaaaaaaaaaatagaatcgaattatttaaaaaaaaaacaagtagacatatatgacacacaaattataatacaacatg

SEQ ID NO: 370089 - DNA, 797 bp, Cannabis indica
tctttcctagatattctttttgcaccaattgggactcccagataagtgaagggcagtgattggtgctgaaagccaaatattgccataattctcctaacatgatcttcaagcatattacatgtgtacatagcagattttgaagcatttggattcaatccagatgtctcagagaatagcttgaggccttgtagtaaataataaacactcctgaaatccccattgcagaaagtaatacatcatcagcaaaggctaggtgatttagggaggtggttgcacatctgtcatggaagtagaagtcttctttgactcctattctccccattattcgagtgacgtattccatcccaacacaaataaaaagggcgatatcggatcaccctgtctaagacctcttttgagtcaaaatatccatgtaaagtaccattaaacatcagtgaaaaccgaggagttctcacacagttcatgactagtttaataaacttagatggaaataagagtccctgcaacattttttcaagaaagtcccattctatagtgtcatatgccttctgtagatctaacttgataatacaagaaggtttattattctttctcccataatgtctcaacaaatcctgacaaatcattatgttatgccctatgaatctccctttaataaagcctccttggttcatggagactaaatttgggagaatgagtttgattctagaacacaaaagctttgttgcaatcttataaataacattgcaacaagctattggtctaaaatctttaactgtgttaggacatttcatttt

SEQ ID NO: 370090 - DNA, 493 bp, Cannabis indica
atcaaggttttgagattatttgaaatgcattttttgttttatattagtgcaagtgggagtttgttgggtttgtaccctaaataaaacccatttcaatataatcagatttactaattaataaagatcataaataacattttatgatgaatggttcacacaatttatttcatgattataaattctattaagtctgccacattcttgaagtattgatgcaaaggcatcaatgccccttgttgggcatagaaacccgaccaagcgcacatcccccttttagggtttgtggctcgattattgtgggcgggaatgtagcagtccaattcgcccagttatctaccctggtcgagagtccgcaggcacgcctcagtaaccctggacggagggcttacccacctagcgcccaacgcaccttgccttctgtgaggaaccgcagcagtaagctcctcaccgacttagtccacgccctcaaccaggacgtctccgtcagcatcaa

SEQ ID NO: 370091 - DNA, 752 bp, Cannabis indica
ttttactttcggcttgtttttctatctgtccgtgtggtatgctttagtacccccctaagtggcatgaaaactttgtttttaaggcactcagttttatttaaaatacagaggttgcatacacttagacggcacaaatcctttaaagaaagcctaagctacacatttggactattggtaatattttcagaggtgatcggcgttccaggcccttggcacaatggttccatccatcctttttagcttataagttttgaagccgatttcgtcctcgatttcatatggcccttcccaatttggcccaagtacccccactccgggttcttgggtggctgggaagactcttcttaagaccatatcaccaatagtgaattttctttttttaactttggagttaaaatatttggtcaccttcttttgataagctgccattcgtatttgtgactcgtcccggagttctttaacttgatccagcgcttcgtgtataaagcttggtttgtagctggatcgtaagtcgttcttctgtgggacgggaataacgtttctaccggaaccattgcttcacaaccgtacgcaattgagaaaggcgagtggccggttgtggttctgggggtcgtccggtaggcccataacactcttggcaattcttcgggccaattgtttttgcaggccagcagctttttcttcatggtgacctttagaattttgttgactgcttctgcttgtccgtttgtttgcggccttgccaccgcgga

SEQ ID NO: 370092 - DNA, 652 bp, Cannabis indica
aacattaaatgttatttctgatctatattaataagtaaatctgattatgttgaaatgagttttatttagggcataaaacccaacaccaacatcaaagaccatgtcaccatggaagtatatagtgcgtctttggagttggctcagggaaattcctcggattcatggttaatcaacgaggaatagaggataaccccgcaaagatcagggtgttggtagagatgccatcaccaactaagccaaaagaagtccaaagcctcacaggtaaagtcgccgctctaaatcgctttatatcacgatcttctgttaaatgcaaagagttttttcagattttaaaaggcaataaggagttccaatggaccgaaaaatgcgaggatgcttttcaagccttaaaaacacatttggggcaacccccaatcctatcaaagcccatgaccggcgaggtcctatccatttacctagcagtgtcagagtatgcaattagttcggtactaatacacgaagatcaaggacgacagtacccggtgtactatgtcagttaacacttgctggatgccgagacccgctatcctcaaatggaaaaattggcgttcgcactggtaatatcatcaagaaagttgcgaccttatttccaggctcacagtgttgaagtttt

SEQ ID NO: 370093 - DNA, 546 bp, Cannabis indica
caggccgccagcacacttgaattcagaaagaaggtaagaactgtgtatgatatgtgatatcaatatctaagtgtatgtatatgttatgtgtatatgcatgcttaaagtgttagttgcactaccaacacttgtacagttaaggtatagagtgcattggtatagtgaatattatttgagattacattacagtgacaccagcacaagtacaggaaagtactaagtgtgtgtggtatattactcagtggtactcagggtattaaacaaaccctaccaacactcgtacagtgaggtatgtagtgtatgtgttatagtggctataccctagtattgaacgttcttagtcatccgttgagccttgtaaatgggtgtatgggcgcctattatatgatatataataggctataccctaaaccctaaatacaagtcgaaaattatatgatatattatatgcttttcttactgagtctgtcgactcacacttctacttccatgtgtaggtaaaggaaaggcgaaagctgaacaggagtgaacctgagctaggatgag

SEQ ID NO: 370094 - DNA, 235 bp, Cannabis indica
cttgtacaattagcaagatacatcaatgctcctattgcactaagatatggtacttctggaccaaggagctcttcatgttcttctctaggtcgaaaaggatctttttctacatcaagtgacctaactaccattgggctactcaatgggtgtgatttatccatataaaaccgtctcaaaatcttttcagtataagttgactgatgaatgaaaattccacattttaaatgctcaattt

SEQ ID NO: 370095 - DNA, 637 bp, Cannabis indica
tgtaatgaaaaaaaattaataataaaaaataattagtggatttcaaattatatatcatcaagtataaataaataagagttaaatatttaatgaattatcgaattaaattacataaatgaacaatatacatatatatatatatattttagaacaatgaataaataaaatagtatatcttaatatatatataagaaatttttaattagtcgagattcaaaaattctagaaagttgaagagagagacaatgagacattttgtaaagaaaaataaagaaagtgattagtatgagaaaaatcaagatagatttttaaaaaatgtagaggaaatttttgagagattaccagtcagagttgtgatttgcagtgtttgaaccaatttgtaacccaccattattgatagtgtaagtccgaggcgagttcactaatcttgaatcacctaattatcataggccaagccatttgctcgcttatttttgttcaaatctcaagcatcttcgcaccatctgataatcgtgcgattggctaaccatctggatagtgtggatcgaaaactcgctaggattaatatggctctgataccatgatgagaatcatgaggttcatctcaaaaccaattggtgataagtggagtagctca

SEQ ID NO: 370096 - DNA, 625 bp, Cannabis indica
tagtattaaactcgaggcgtgaagagaatgatgtattgtagttgatgatccttctgaagatagttccaatatcccgagccggtcaggtatcttgaagaaccccctggatggttcgtttatgactgatgatgctgtgtcgagtgggtctgcttactctcatacccctgtggaggagaatgttgaatctcctccacaggagccatgagaggcttagcgtggaactgtagagggttagggcagacctctaccgttcgggaactgaagtccctgctctggtcatgctcacctgattttgtttttctgaccgagcttaaagtgaacgccaatcctgtggtacgtattcttaagtcccttcccttttactttaatatttgtgttccatctattggaaatgtgggaggtattattttggcttcgaaagaggggtttagttttgagtatatctctagctcgtgcaatcatatctcggggatagtgtattcagatccccttctcatccgtggctcctatcgtgtgtttatggtcctccctacatgcatgcgaagaaaaagttctggtctgagtttctgaacgtgggagatagattttgttgggaattattatacgaggatcttagatctactca

SEQ ID NO: 370097 - DNA, 677 bp, Cannabis indica
ctttttctctaactagatgacagtcaatctctatatgtttggttctctcatgaaaaatcagatttgctgcaatgtgttgggctgacttgttatcaaagtagagtaaagcaggtccttcatgttcaatctgtagctctttgaggatagaaagaaggcaaaccacttcacaagtggtgttagccattgctctatactcaacctctgcagagccagttgttgcttttctaagagatgatggatgttccaacaaaaatgcaaaatccagttgttgacctcctcgtatctggacatgttgcccaatctgaatcggtataggcatgtaacttcacttcagaatcagcagcaaagaaaattccttgtccaggagtccccttaacgtattgaagaactatttgtgctgcatgtagatgagtgactctaggtgtgcataagaactggcttagcttgtttactgagtaggaaatatcaggcattgtgatggtcaaatattgtagctttcccactattcttctatataatgttggatcggccaacttctctttctcatcaagcccaagtttgagatttgcttccattggtgtactcactggtttggaacctagataacctagatcttccaacaattgaagtacgtaaggtctttgtgaaacaaagatccctttctcagatctagcaac

SEQ ID NO: 370098 - DNA, 527 bp, Cannabis indica
ttggaggagttttgggctgttacaaagaactctctaaaccttaaaaaaacgtgtgcaagtatagtgctgaaaaaaaaaacagtaactagtaactagttactattttttcagctttggctcattcttctccaaagtgttccaaatcattcccacttgattttgaaccatttatacatcttataaatgaataaatcaagtcttcaacagctatatattcaataactatcattcattcacattcataaacaattagtaacatcttttactaatttaagagtgaaaaaaagatgagagttacacattcaagtgatcatcaatttaaaggatttgcaactcctattttgtgatcattcaatacattttgtaactccataatgtatgttacaatttgaaaaaattaatactttgtcacaattatttataatttaattatttaatctaaatattatattatataaaataatataacactacctattgctacctttattttttttaacctttatcagttatcaaaaaaaaaaaaa

SEQ ID NO: 370099 - DNA, 783 bp, Cannabis indica
gtttgaagatccagatggtgcaaagacgcctgagatccaaacaaaaataagtgagcaaatggcaaggcctatgataaggtgattcaagattggtgagcaaaaatagccaccatcttgaggggggatattggagaacattgtcccacatggattaaatgtaaaagtattgagtcatatataagaacatgagctactccactcattgttaattggttttgagatggaaccccatgattctaacacatctcaatgttttgccacataatatgtccacctcaccaagcatcctttgaagttttaccttcatgtaaaatctattttatttggatcgggaaaatcgtacggttttatgaaaccatgtgctatagttcaaattcgtgacaattaaattcaattttttttattatttttgtatttgtaataatgagaaaagaaggcccggagatgctcttatgtccatcaacttgagaagtctctgcctccacctcatttctccgcaaacttttattaactgtctcttcaaacttttataaatacataataatgctctataggttacgtgtcatttgttattattatcataaattaatagacataatgtcaaaacaccttagttatcattataagtaaatacatataatgccaaaatatttatatgcaaaatatacatatttttttaataatttttataaatactatttatctttgggctatttacaaaaatatggaaaaataaagataagttttgatatatatatggcataaaaacttaattacactaaa

SEQ ID NO: 370100 - DNA, 567 bp, Cannabis indica
gagcggaccgcgcctactcatgtctttcttcggagagcccaggccttcgcctcttatgaccgggcggacctcgacgtcgggggcctggttacgacggagaattgccggaaggcaaaactcatcctgccgcaccaatccgtggaggactctaacctttcccgggttatctgtcccaatgtgagggtgcctgccgcggagaagaccttccgggacgagatcatcgccactgccgagaagaagtaccaggactatctctaccggaaggctcaggagaaagcctactctaaggctcaagcagcttccgggaggccacttcgcgtggggagcccggtcgagaggagaagccaggcgatcgctgggaagccccttcatatcggggactcggcggagagaagggctcccaggccaaagccttcggctcaggagccgaacactggggctccgggcgccagcacttccagctctagtggtaagtctcctttagcagttcattacgtcccttctgttggagaatatgccagtcttaggcctgtagggttcgatgagcgtctttataggtttaggatg

SEQ ID NO: 370101 - DNA, 602 bp, Cannabis indica
aattttaattataagatcaaatacatacatatttaattaataaaatatgaaatgatcttattttgacattaaaatagtaataaaatttaaagataatctagataatttttaattgctaactataaatatcaatttttaaaatatttgttgttttagatatattttattaatttaaattataagattagataaatattatttatatggtattttattttattagaaatttatttcattaaatttatattttgttaaattaacatagatttttgaatagttagttatatataattttaattgatattttaggattttctaagtgttgactgaggttttcggtaactaaatatttaatataatgatagcttaggaagaattaatgcatatgttttaacgtggttcgggcattaatgagtctctgttattaataggtgggcgtctcttacagagaatgttctgtgttcttttttgatccctttcttaagttttttgaggggtatttatagcgattggtaggaagagaaaaggtcttaattgtctttaagtcccttccatgggcacgcacaagttcccaagtgtataaaatagggcatgcataacct

SEQ ID NO: 370102 - DNA, 526 bp, Cannabis indica
atgcaacataaaatgatttctgatctttattaattagtaaatttgattatattgaaatgatttttatttagggtacaaaacccaacacctttatgtaattaatataacatacaaataataagaaataaataaagtataattaacactagatatttttacgtagttttacaattaaatctgcatactctacgagtcaatcttattaaaaatattttctgaatatcagatacaatatacaattgattatatctatttttctctctagaattctccttctctttttctatgggatctgcccctatttataggaatatatattggcagttatttatatttaaattcaaattataactgttgatgaaacgtgagaattgatcacgtttcatttaaatcgtatgttagataatactagataaccacttaactgcatgttattcttatcctcaaagatggtcaatgctgatttagaaaatagcatctcgcttaactcgtcgataattaatgctgatttggacaatcatatctt

SEQ ID NO: 370103 - DNA, 605 bp, Cannabis indica
attaatttttataaaaaaaatataatattgattaaattaaatggaattaatatatttctaaagttaaatatcataattcattacagaatttattccaaaaaaaatatatcataattcattaaaattataccaaaatcaaagattattagaggaaaataaaggatacaattttgaaaaaaaaaataaagataaaacaagggagaaactagatcagattataggctatagccgcggaccagatcgatgttgtggccatcataattccaacgagttgtgcacctccgatcctgagtaagagcgaaattgatgaacgcagtgagcaccgaagcctttagctttcgcctaaaagccatggtcaggcaaacaacatcccttgagcaagtatatcgctaaacaaaaccatagtgattcaattactgaataaagacttgaacaccaacaaaaaaactacaataaactcaacaaacccatctacgagcgaaagagatactccgtgatatccttacaatttattattcagtatatcaaaatattacatgtatatgtcaaggcttgataaaataacacaaatgggctcgtttggaacgccgtattaggtcgtattg

SEQ ID NO: 370104 - DNA, 572 bp, Cannabis indica
gggcataaaacccaacactggcctcttcccaattggcacaaccaccttctgcaaaattcgtaagtgattgttttcattaggctcagtttgataatccgtatcttttcattctaagttttctgactaatgttttgttttttacagccctctcgaaaagaccattccctactcccgagatggtcaatcggcacaggctcctactgactcttccccacggccttaggtcgtgcgacttccttctaaatgaggtcaattttagatctgtggatatcctcactaacaaggagtatacttgtgattataagtttcccaagtattcttcttggcagcaggttctcgttccaaagggggataaggcctgggatcgggtggcttgggcataataccttcaaaacacagtccctcgggaagttggtgaaggagcatcctgaggtaatcaatgtggttggtcacccacaatacttagggctgaacgtaacacattagttgctttttgagatagccgccttaatttttatatttggaattcccttctcgtagaccgaatgactcataggtttgacagctggtac

SEQ ID NO: 370105 - DNA, 762 bp, Cannabis indica
actactaaaaaactccaaattcctgtcagttttacactatcggccaaagaattctcgacagtccataaaaccgtcgcctatacaagcgtcgcggatactgagtaaaattgacgatggtcgaaaactgtcgggaaaatagtatgagccacggtttaaaaccgtcgcctatagtaaacactataggcgacaattaaaaaccgtggcctatactataggctacggttcaaaaccgtggcctatagtataggccacagtttaaaaccgtggcctataatgttgtaggcacaggtaaaaaccgtggcctttagtataagccacagttttaaatcatagcctatactataggccactgtttttaaccatggcatataatgttttaagcacagatttaaaccgtggcatataatgttttcaatctattataaatttcgtatttttcaacgacgggttttgccagtcattggattgtaaaaaaaaaaataaaaaaataattaggataaagtatatatattgtcattagtgaaagttaaacagatcctgttttacatagtaaaattttccctacattaattaatttttactgtatattgtcactaattagttaggataaagtataaacaaaaatagaaactgatcattgtaaaagcccttgtcgcactgcttgtgctcgaacatattcaatccactgatcacgcaaaatattcatctcgtcatttgagtacggatcgctcttaccctgcaaaaaaaaaaaaactgaaagaa

SEQ ID NO: 370106 - DNA, 624 bp, Cannabis indica
aagtctagaaatctgattttgtgtagtctaagagtatttgattgtcttccaatgttccttaattggattattctgataccaactcattactcccactcaacagcaagtgtctggtataatgcataataaagcatatatgagacctctcactgtggattctaaggaattctttctttggcctttatcatttctggaatagatgaaacttctccttagataaatgaaatctatgtctagaagtcaagaagcttctatacattgccattagaaaaatgcaccagcatcttactaaagtaagttgcttgtactacagtaagtaaattataagatataccataagccataggtttgaataatgttaaacctataatactaggaacaggaagttttgttatgtccattgaatagacttattttcaatatttcctttcttgtccttgtaatagaaaacttttggttgctccatatgaatggttttaaccatagttctcttggctttacttagttccttattctgactatccattatttgtttaaactaacaatggatattatcacaagtgtcttccaagtcataacagggtgagttccttaaatccctcccactacgacaagatactgtga

SEQ ID NO: 370107 - DNA, 600 bp, Cannabis indica
aaggcatcaaaaccacccagattgcacaaattcaaaaatcaccattagagctcaagctttgagttctaaactcaaacttgagcaaacttagctagcatgcaatcaaatccatctaaacttacataaacaagcttagaataacctctggaaacacaaacaacttccacaacatcacagcaacaaaacataaccatttccttcaaaaatcacatattttacatagaaaaaccaaagctttactcaacctaactatcatgcttcaaaacaacttaaataaccctaatctaacaagctttaaacctctgaaattaagaacaaattcacagcagcaacaacaactaacaatcatgcatgcatcaactatttcatcataaattcaacatatttttaaagaaacaaagaagaggagctaacctagcttgaagagtgcttagattggaagagaaatagcttgaaaatcaaaggaaaaattcaactccttgcacacacatacccagccgagagagagaggaaaagagagagtgtttttgggaaaatttctatttttggctaagtgttgatttttttgaaaaagagaaataaaagctacttaacataaat

SEQ ID NO: 370108 - DNA, 559 bp, Cannabis indica
atctcaatagttcaggaggaatttttaacagccaaaaaagtttagggggcacgatttagtacatgtcaaagttcgggagggaaaattactagttagcctaggatttatgtttataaataagagttgaacattttcatatgcacttacatattaaattatttatatttaatattgaataatttatatataaataccacaaagttccttatcatgcatgaggttatgacttctattgtacggagttgctagtacggttcacttatgcccgttattcggtacaagcaatctcgattcagattgctgatgtagtatgacatctaagtgaatgtgttgtatatcatatagattatatctaacaagaaccgatatataattaagttatctttatcaaagatgtcctttagggctgcacataggttgggttgggcaggttaaggctattttatcaatccaacccaactagattagcttatagaatttcaactcattcatattctttttagggataattgcggcaaaagtccccaaaaacctgaggttgatgccgattagtcctcaa

SEQ ID NO: 370109 - DNA, 814 bp, Cannabis indica
tcctctgatcaatggccgaaccactacctcccctgctaaagcctgatgcaggaggggtaggagccccgccactcattcgagtccaaactgactccgacatacatcaaactgtgccctcagctcgcagtgctttttacaccatctcagcataggtggtcttgtcgtctgtagtgataattaggtcatgcttgatcttcacatttagtccatccaaatacttttcatttttactgaagtcggatggcacgattcctgaggccaaccttgccaaccgatcaaactgcgttgtgtattctgtcacactcatattttccttctgggtcaggtgagtgaactctttccttttggcacttctaacagcctcattataatactttgcgttaaaaagctcctggaacttttcccaggtcattgtggtgacgtcgtgtatcatggacaccatgtcccaccagaccaacgcatcctattgaaactgaaatatgggacacaccactctgtcgttcccggtgacccataaaattcaatattctcataatcactgttagccactgctcggccttcatgacgtccggacctcccagaaaaaccagaggtgcctgcttgcagaacctttcatacaggggttctattctattcgccgctactactcgttcggcctggacaacaggggcaggtgccactggaacttctggcacaggcactgcaggagcaccctgctgtctcaactctgaatttcattatcttgctcctctattctggcttgcatttcagcaaacctaatttcccaattctgggcttcctgattggcttgggc

SEQ ID NO: 370110 - DNA, 974 bp, Cannabis indica
atatatttatattaataattaataattaataaatatattatatataagttcaatatatatatgttatattcatatattaagtatatataataagtaccatggtagaaaaatgtgcagcaaatacaccaatgttaaatgcgagacaaatcaatccaactactttgcgtcgtagatctcctttagtaaggagagtagtcaatacaatcattagcccatagccgaaaacattcagtaacagaagaatattcacagtctgaatctacattaatcaattatatttaattaataattatttttattaatctttactgtaattattaacaaaataaaaaaggaaaattaaaacaaaagagctttgacacgtgtacagcaaaaaacattatagcctctactagagtatgtttctaatataatttttgtgaattcactaggaaaatttgattatatatgcatactaatgggggaaattatttccctaaacttatgcatttcaaaattataaaatgtgtcatattccacaaatatcaaatattatgagttgagggaaaaaaatgaagtatatgtacgcataaaaaatcgaatttcccattcaatattgttaaaataaaatattaattcaaaatattaatagtggatgaataacttaaattttttgggagcgtaaaagataaacaagccaatgtagaaggtcttgatgacacgaccaaatgagttaataataatgagcagcagaacaccaacctgaagcaatgcatagtacatctataacgttgaacttagcagtgctatgagatatggcagtgattgaaacccttcggctgatttacttttgtaaatcttgtgaaatgttggtctacagtaaatataatccaaatttaaatatattaatactaataataatctcgtgcatttataaaataataaatatagttaagcgattttcttacactcgagcaacgaacgcaatgaaagat

SEQ ID NO: 370111 - DNA, 672 bp, Cannabis indica
gaatttaagattcataaaaaataaaaagttaaattaaattaccacaaaaaataattaaaattctcttcatattaattttttttaaaaaaaataaaaacaaaataaaactatagtgaacgtcggagttatcactcgtgccggaaaagtcaccagagtttgctgtcggcaccgaaaaagtcgtgggagtagctgttggtgccggaaaagtcgtcggagttattgccggcgccgaaaaagtcattagaatcagcattgtcgccgtaaaaaacacaggaaaaatcaccaagaaactcaagaaatcgatttcttgatgaagaaacaggtttcttggtgattttttcggtaaatttacctatgacaatgccaatttcgacgactattctggagtttgatgtcggtgccggaaaagttaccagagtagttgctgttgtctgaaaaattgccagagttattgccagcatcaaaaaaatcgtcagaattggcattgtcaccagcaaaatcactagaaaaattaccaagaaagtggtttcttcattaagaaaccagattcttcaccaagaaagtggttttttcattaaggaactagtttcgttacacaacaataataaagattatgaaaataaaataaaaatgatatacattgaaagtaattgaaaccagtttcatcaatca

SEQ ID NO: 370112 - DNA, 701 bp, Cannabis indica
tgggcttcctgcccaactacacgacgttctacaaccggtttttgcatcttccttggggactgtttaatttcttgaagaaccaagaaacaacccaccatatcccgaagctccgctgaagcagaatatcgtgcattggctgccactggcagcgagattacttggctgcaatatttgcttcaagactttcatataccacaaatgcaacctgccttcatcttttgtgacaatcactcagcgatacatatcgccaacaacccacattttcacgaaagaataaaacacattgagctcgactgccatttcatccgtgacaagatcaaccgctctaaaattcaactaagtcctatcaacaccaccttacaactagctgacgttttcacaaagtctcttgcttcaatcaccttacattctcacattcgcaaaatgtctgtccacgatgtgtacagtccatcttgaggggggggggtattaagtataagtctactgtgtatttgttatctactgttacatcagttaggcctactgttagttggttagactttgtttattttacagttgttaccgttatgatagttgctatttttgtggtcttagtcggttaagtaagtcttgtatatatagcacttcgggtcctttgtatttcttaatctgtatcaagtcttgtatatatagcacttcgggtcctctgtatttcttaatct

SEQ ID NO: 370113 - DNA, 710 bp, Cannabis indica
cagaggaatttttgtttcacctctcacaagttcataccaaatctgagctggaaatgattttttgcattatgtggtttatttggtatgatcgaaacaatattcttcatggtttatcacctcaaacattaattgaaatccattccaaggcattagcttatcttcacaacttccaaaatgcttctgctaaaatcaactcggctgcaagttctcaagctactgatgctggtcatagtgctactggtgtatcatctctttctactgacgtagtagatatttctacttctgctggtgttgtagacatacaaactgctactggtgcacacctttcctctactggtgcgaaagtttctcattcggttggtgttgcagcccaaattaagcggcaacctcctcctgtgcattgcctcaaaatgaacattgatgcagcttttgattcttcccaaaaaagaattgctttaggcataattattcgagattcttctggatgtgtcaaggctgcaaagtcaaaattagtgcgcggtttttataagcctcatggaaggtaaggccatgtttcatggtctactttttgctaggagtctgaacctactattgaattttattgaaacagattctcagcttcttgctgatgtgattaacaaattcaagacctattatgtctaattttcatgatttggttgtggatgttcattatcatttatccaatctcc

SEQ ID NO: 370114 - DNA, 518 bp, Cannabis indica
agcagaacacaaatgaaaaactacgccatgcgagggtcttcgccaaaatcattcagtagaaatcaaatgtgactaaaaactctaccaaaaaactctaccctaacatgtaagtgaacatcaaaagtaaaaggtaccgaaaaaaattacgtaagggtcgtgaactggaagttgatgatgatcgacggtggaatgtggattggcaacgacggacaaataacaacaagaaatctacggtttctgaaatttttctcaaaggagtttcttaggacgaaatggcgaaatagtgaaagtaacccaaagaaggaaaagtactggcttttatagactagaaggggtgcaaggccgctgtgatcagacaccatcgtgcggtaggaatcgtaatcgattcgtattctacaaatccaacggttgagataaatgggtgccacgacggttgaaaacgtttgagtaattttctgacactccgattaaatgcgccagtttctcaatagacgggaagtgaatcgttgcctacaaaa

SEQ ID NO: 370115 - DNA, 1158 bp, Cannabis indica
cctatcctgattctgggtccaggtttggtgagcatgtgggtttgggtcccggtaagtcctactctcggttcgggtttaggtctctatctttgttttgatctgcgaccgggtttgggtttaggtcctgatcctggtcctagtcctagttcgattctaggtccatttgcgattctgagttcgagtttgggtttgagttcgggtctgagttcgagtcatggtctgagtttgggttcgtgtccgaattttagtctaggtccagctcaggctctgggtgtgggttcgcgtcctgggtcttggtctaggttgggtccgagtcccagttccaatcactatctgagtctttattcagttataggtcttagtccttggttctgatcctagtctaggttcgagtttgggttcgggtccgggtatagcattgggtctgattccaggtgtggatttgagtttggatctgagtctttgtctgggtttgtgtccaggtcttgaccccgatctgggtctaggttcgggtccatgtccatgtccaagtttgtgtcctgaatacgggtcaaagtttgggtctgggtcaggatcttcgtccatatctaggtccatcaattttatcccactctgggtcttggtccgagtccatgttcgtatccggatccctatttaggtcaaagtctttgattgggatcgggtcccagatttaggtctaggttcttgtttggctctaggtctaggtccgggtcctggtcacggtcctagtcttgttctagggtcctggttcggcaattcttgttcaggttctaattttggctcccaggtctaggtctgggttcgggtttggttcttcgtctgggtttttctcctagtctgggtcccagatgtagacaccgactactggtctgttgcaggcccagttactcgaatcctaagtcaagatctggatcactgtcacgggtctcggtcttgttctgtttcaggtctcaggtccaatttctgagtttgggttcgggatcgagactagggtgcggttctatgtcctgaccctagttctgtgtcccttgactggttccatgtttgggtttgagttcaagttcgggttggggtccgaagtccaggtttgggttggcatccgggtccggctcccaattcgggtataggtcttatttg

SEQ ID NO: 370116 - DNA, 869 bp, Cannabis indica
aattgaattagcaacataattaacttttaaaatatatgaaatttatttcttcaataatattttaaagttaattttaaaaaaacacttagttaattggcatatgtgttaggctatttttagcctatgttgtgggtcacttcttatagttgttttccttctttgttattctttttagaataaaattacgcttgttttctttagtttcaggtttcacacttggaatatatcaattgatcaaatttagaaaaacaacaatctatagaatagagaaaattttacaagaaattaaagctgaaacttcaagcctaaatttgactatgttctgttcagattttggaaaaagtcaaaacatagaagctttagatttcttttttcttctttccaacgcatcttgaatcaactcatttggagttcatatgtgaaagttatgcacattttgctgaaagatgctgaagttgtcaaatttgcttcagtagtcgcgaccaccattttccatggtcgagaccatttttcatggtcgcgactaggaggccaggcagagagcatggattttccaatttgcctatggtcgtgactatgggctaaagacgagatttttgggcaattttgtaatttcaccatttgaagatatctgcattattttctatataagggttgtgtgttttagaggcaagagaagcagaaattaaaccctagagatgaaggagaaggcaaaggaagaaattgtggcgactcggagcaagatcaccaactagttctttcttcccctttttatgctttatgttaatttctgtttcaatttttatggatgtgaacatgagttttttcaaactaaattcccaatttagggatatgatgaatgttagatg

SEQ ID NO: 370117 - DNA, 720 bp, Cannabis indica
ataaaataactgcaaaaaccaaacccatgcacaaacaacctctacagcaactatttcctcaattttccataaaaatcataattttgagctaaaattccaaacttgcttagaatccactaattatgcattacaacctgctctattctactccatgaatcatatttaaacctaggaaaacaacaatacacaacaacaatagccacagccataatttcatcaaacatgcaaataatcactttcttaaaactcaaggaaaccaaagaaaaagctacaaggaattacctagagtttaagcacctcaaaatctagaagattcttgctggaaatgcagaaaaataacttaaatcccagctgctcaagaagtggccgaaaaagagaggaagagagaaaagcaatttcttgaattttccaattttctatcttttgaataaaatgatgaatagatgcctaactcctttcttattcagccaacaacatcaaataaaacatattcacattacactaagtccactaaaggacaaaatatggggcaaaatgaccattttgcccctccacactaaaataacataaaagggtactaaagggtattttgggaaattctaaattctcgactaatcccgacattcccaatgtctaataaactgtcccaatatactaacatgctaagttgtgattctactgagccaaacaccgagttccatgttgtcgggcaccggaaat

SEQ ID NO: 370118 - DNA, 700 bp, Cannabis indica
aaaaattaaaaaaaatatatattttacataaaataaaataagaaaatgcggtgaaaagaaaatagctacttttgtacatattaattgttttgaacaattgtacacacattcaaagtcatactttcaaagtcattcttggcgaaaaagttacatgtatacatgacaatattataaaggggcatatacaagatgtaattaattgatccaatcagaaccgatagccaaatattaaatatgtaattgtgatcagattggattggatgctatttttgaatatccaattagattgaaccggatgttgaatgttgtgtctaaaaatctaatacatcaaacatctaattaaactaattagtattttcatttagtttagatgagtaattagattgtataatgttatacgtaacatatatatctattctatataaattgtgcatatataacataatttttggtttatcagaaattcatgggtactttttatttatattaaaaataaaatgttttattattaaaataaaatggtttatgagatcattcatgagtcacttttatttatatataataaaataaataaaataaatcctattaaatccaaaaaaatacgatggttttgtctatgtacatctacgattgagttttctttaattatttattgtatctttcctattacaatttggtacattcccatggtatcacacat

SEQ ID NO: 370119 - DNA, 522 bp, Cannabis indica
tttcactatgttatggcttgattgtgaagaaatagggttttagggtactttattaattaagagactctgtggagtctaattaataaatattataaataaaaattttatttgataattattttaattattaaataaatagttttggcatttatagggttgaaagtgcaaaaagtggtatttgtgaaaaatagataaatagttgagaaaaatagtaaaaatctaattgggcccactaatggccgcccaggtccatttttgctccatttttatcatttttttattccaaataaatcaattctaaccctaagtgaagtagtataaaaagaaaagaaagtctcattatccaactaatgcttcaaaggcaataaacctagttttctttctttctaggtttatgagacttcttcttctcattttcttctctaattttcaaaatcctcagtgttcttcacaaatcaaattcgagcctttagtgattgagtgtgtgcccatccatagcaagttagtcctcaatcatagtgt

SEQ ID NO: 370120 - DNA, 740 bp, Cannabis indica
ttagtttttaatttgttcattttgttaaacttaatttattaaattataagatttgaaatataatattagaattacctcaatttttaaattaagatatgatgttatatcatctttattagttatctcattaatttaaattaaatttgaataaactagatatttaaaaattagttggatatttgaatttacgatattttaggaattcgttagattttaatattttttaaatattttctaacaacttaatttgaattaaagtaaagaagaattttttaaatattttattttaaaatagaaatatattaaccaactttcgagatattgttacattgtttgtttgtttgtttgtttgtttgtttgtttatttaattatttaattcaaactttttaacaaatctattatttatttaatttaaattgctatgattaacttgttgatagatccaatgatctaattttaatcatagtctaattgtcaatagatcaaataaataatttattataggtaattttataatttcttttatctgtgataaacctagtaattgttgggttttatgccctaaataaaatccatttcaatataatcagatttactagctgataaagatcagaaataacattttatattgcatggttcacgtgatttatttcatgattatatttaaatgtacaaattctattaagtccagaacatatgtatttgtttatgattatagtgctgtcagcacagtggaata

SEQ ID NO: 370121 - DNA, 723 bp, Cannabis indica
ttttcacgatttcactctacatcgctaagtgtcgctaaatcgctcgacattaccaaatgtcgttaaattacactcaagttttcacgatgattagcgatatttaacaatgtgctatgtattttctatgtattttctagtctcatatcgcaaatacatcgctaaactttaccctaacctcgcatttggtctattattacaaatacatcgctaaatattgtaaaaaagtgaaaaactggaagaagaaaaaatgctaaaaatgagcgatgggttgagaactctagcgggtggggatttcagggggtttcagggtagttgagctcgtgaattttggggcttcagggtggagacgacgagacttagttagagtgagaaagtgagagagttagaaaaggcttttttgaaatgtaagagtatttttaggaggaaaaaatattaaaagtatatatacctacttctaattgggtaatggggtgatatattaaaagaccatattttacatttaaacatgttaagctaaatttgtgacattttgtttttattttgagttttagtatgagtatttttatgtttatataataaatattcaaaactcacaactaacaataaagtaatcactggttttcaggatgctatttcggactgtcatctcattgatttagagcttcgaggttatcaatttacatgggaacgcagccgaggcactaaccgagcagtggagattcg

SEQ ID NO: 370122 - DNA, 581 bp, Cannabis indica
accaactttaatcagatttgtgaatattgagtctcacatgggtcttgtgttcataagtttcgataaaaatttcacctagaaatctatattgtattattgtccacacactcttgagaacataactcgggtgtgttagatctaattaataaaagtaaaagtagacgtagctccattaccatcgcgacatgggggtgaactactataaatctctggtgtcacactactacaaaataaatttttagtgtcagttcgaatgacctttcttttaaaaaccgacactaaagaccacccaaatctttggcctcggattataactgacacccatagtgacttttagtatcgattagtatactgacactaaaattatatcttagaccaaaaaaactttaaaaagtatacatacagattgagtataagtgtcagtttataactgagactaacagagctttggtctcagttataaactgtcacttacaatgcattaatttaaaatagaaaagcccatttcaaaaccctaccctaataatataaaaccaaattaaaaaccctacccacatctcaaaactactctctctctctct

SEQ ID NO: 370123 - DNA, 602 bp, Cannabis indica
tttgtagcaatatagacccatatctgttcaaaaacttgtacgttcttggtctggtggatgcattttgatttgattgtagcctgagtaagcgtccgtgaagcttaatattctgtgcgctgctgttgcatctacgagctgatcgattcttggaagtgaaaaacagtctttagggcatacagacccgccatttcttgttcggcttgggccctaatacgggattcgcgacccaagccgggtagaaggcttcaattatgaagttgttgttgcgcagcttttgaacttcttcctttagggctactgctcgttctttgtccaaaaggcttcatttttgttaatttagctggaagttgggatcgatatttagaacatgtgaaataatagaaggatcaattccaaccatatcggcatgtgactaggcaaaaacgtctaggtttgctctcattaattttatcaattttgattttacttagagcaacaaacctttcttgtttttagttttctggtcgggatatctggatcgatctcaatctcttctaattcttctacaggtccaacattgctgcttggatccccaagtcgaggatccacatcttcatccccgc

SEQ ID NO: 370124 - DNA, 551 bp, Cannabis indica
taagtatcatagtggactgtccatatgtacacttatgtacatgtaacaaaaatattttagttttggacaaatgaataaaatatttaatgtaataaaaataatttattttatatatattttttgtaaagtagctttgttttttactatttgttttttatacttttttagttttcgaaaatatacatataaattcacatttatctaaagattaaaaaaattatttcgtttcatacataaatttattaaattaagcatgtacattttcattgttttgatacaaaatatattattttcatacttgtatcaactaatgatttaaaaaagagatattggcggcaatattatttaaattacacatttagtaacctcacttttattttgtttattatacatttatctaaaaacttcagttaagtatcacaatagtaaattttaagtggtaaatttacacgtggtaaattttaagtagtctacgtaatattaattattaaaaataattttaaatatttaaaaattttaaaacaaaaaataattaaaaataatttattttt

SEQ ID NO: 370125 - DNA, 782 bp, Cannabis indica
tgggcagtacgaaatcaacttccaacctcgaacagctatcaaaggccaagccttggccgactttgtggtggaatgcacaggcaaaactgaaagcataccagaaagctatttcgggccaataccacagccaagtaatattgaaaacaaactgacctggaagctacatgtggatgggtcggcaacagatcaagtatctggtgcaggaattgcccttgtcacaactggggcaacacctgcacgcagcggtcaaattcagattcaaagcctctaacaacgaggccgaatacgaagccctaatcgctggacttaaactaacaaaggaaatgaaggccgaggataattgagatctacagtgattcacagctagtgctaaatcatgtatccggcgaatacgaggctcgggaagaaaaaattatagcatatctgagcaaaatacatgatctgctcgcacaattcaaaagctacagcctcagacaaattccaagagaagaaaatacaacgatagatgcattagcccgattggcgagcagaaatataaagtgacaaggcaaaacctggtccctatccagttccttgaatagcctagcataactggcacggaagaaatcaaaatgatcgacacatctccaaactggtataacgccaatagcagcctatctacaactcaggggaactcccagataccgaaaatgaagctcgaaaaatagagagaaaggcagcacaatacatcatagtagaagggaatcatgtacagaagaggatctcaatgccatactcagatg

SEQ ID NO: 370126 - DNA, 366 bp, Cannabis indica
gagtctacaaggcaatattatcctaaataatataggaccatgggcctataaaattaagctcccaattagtagatctaaaatttactaagtaaattttctaacttattaattttttgttactctactaaagaattggaatcgcactctgaattacatagaatgctctatatactaaatatagatacactataaattatctattatttcaatctatataattaatgattttaattagtaaacgggtctgttaagaaaaaactaacggacttacaaaaatagtgagctatgggactattactgtcaatttttgaggttggagacttatctgcatcaagttaaagtttttgaggacttatgccacaattt

SEQ ID NO: 370127 - DNA, 888 bp, Cannabis indica
tattccgctaccatcaatgtaaatactcaatcatactgtggaagactgtggcaaacaaaattgaaggagagaagatccaagttcagatcttgataatgctttgcaacaaaaaggaatcaagggctaaatatctgaacggaacgagtcattattattccgctaccatcaatgtaaggatttcttaatctcttatgtatttatttcatcgtattaggaaattcatatttagggtgttagattatagtttataatcaaacatacatgttagtagatttagatcctggtaaaataatttctaacaacatagaatacatgaaaaggtaattataagataaatgaataaattacttatagaagtataattaataaatatatgaaaatttcttatccatatggagatggtataattttgtaaggtcgtacaagagaattaagattatacaatatgaataaaataagtcggcagtgtattaaagtaaggaatctttaatatagaactatcaagtacagtttactatacactatactctagtgtgtgtaattttgattcagatcacatatgtgaataaacatgtagtaaaagtgttgtgtataatttgattatacatgattggaccgaatgaaataacatattttattaacatgtcgtttaccatgagagagttattcatatcacaacgatgatcattagtagatcagtttgaatcttgggtatacatgaactcctatatgtgttcattaagttctttgagccactcgtaaaagtttcttagagaagacgattcttacaatttctgttttgggagcttaataacatgagtgactaggaacatgttgtacaataatggaatccaagctttctgaaaggatcaaatattagttctctta

SEQ ID NO: 370128 - DNA, 1315 bp, Cannabis indica
gtgcatgaagagtctttcaaatagcctaacaaataaaaatcacactaatcaataatttaaagaatcaatttaagaatattaataaattaattaatcatatttataagataaatatggactcatcaccacacgtgtcactgaaaccttttagtgacacttcaatgcgtgtcactaatgaggctgactggaaaggcagtttttagtgacaatccacacgtgtcactgaaacctattttactcgtttttttgcgcgtcactatagggttatagtgtcaagttttgccagactaaaaaggtaacagccacacacaaggagtgtcactatatcctatttttcttgtttctttttcttttttatttaatatttttagagttatagtgacacaccaaaagtgccactatattaaatattttttaaaaaaatataaaataattaattatttaattcaaaatttataatttatattaattatatacaaatacaattaaatataacgataataattttaattaactaaatgtaaaatttataaattaggccattataataattcacatcaacaaaattaataaatattacatattagttcattatactaataaatccataactataaaattatataataactattggtctattaaaacaaaaaataactaacatcaataagtttgaataaccgataacatctcacttgccctattaaaataaaaaaaaacaactaacgtcggtaagtttgaataaccgataacatctcactcgcccaatgctctttcacttcatcaatttcttcttttatatactttgcatcacttaactacaaaatttaaagataaataatatattaattaaagttatcattatatgcattcttaataataataataataataataataataataataataataataataataataatgtatgacatatttatatagttttgtatgttatgtacctcgaccaaaaatgtttgcgattcgaagcttgaattaaatctttcatcattttcattcaataatatccacattcggtgtcttccaattgatatggacactaacgaattttctttaaattaataaagatcttaataaaatataattaatatttaaaataaagaatacgtacagttgggcgtcgaacttttagcttcggtggaatttcttttcttatcgccctgtagtaagtttgaaatgccaatatgaccgtttctctaatatcaggtcgattactcaagtgtgagtttttaggatccatgaaacataaccaataagagtcgggcaccaataatatcaacatccaatgctc

SEQ ID NO: 370129 - DNA, 675 bp, Cannabis indica
atatccatttatatatatatatacatacacacgaaaataaaaaacgtgagtaccatcttagaatcaaacaaaataataataaaataacataacatcttcctttcatacatatatatatacacacaaataaaaactaggaatcaaacaaaataataataaaataacataacatctttctttcatacatatatatatacacacaaatagaaactaggaatcaaacaaaagtactaataaaataaaataaactcttaccaataggaaagtcaatctctatcacaccaatcacaccatcaacaccaatcacaccaagagcactagttcttctcttttcttatgcacggcagtcgagagagaaaactagggttcccaatgttaacacttttctcttaaatagattaatagtaatgggtttttgccttttactaaattacccttatttctttcatttccaatgaccatttcaaatatatactcaaagcccacaaataaaatcgtggaaattgaccacgtcttcatcttattaatgttattattattattattataatgatataagcacacgtattcacattatcatccttaatgaaaattttcttaatggaaagttctaaatatatcttaatggaaaaaaaattccaaggctacctttatcaaaattgatactaccattat

SEQ ID NO: 370130 - DNA, 554 bp, Cannabis indica
ttagtgaaaatctagatagttattttctatttgcttgaagtatttttttagttagattttattaaatacaaaactaatataaagttgattttattcatgaaacttaaatatttgataattttcttgatatttaattaaatagaaaaattatatttatgttgaaattaatttatttaattttagaccaacataaattagaataatagttccagttttattttattttatatgaattttgaaaaatgtatctttatacattggatttcgaattcagttatatatttattgaaaatgaaatttaagttgaaaattaattatttaattttggaccaacttaaattaagtaattttcataatatttattggaaaattaatactaaggatggaaaataatttattttattattcagatcttcctcaagtataattttataactattaaattaaaatttaaatttagagttatctaaattaaaaattttaattagataaataaataaatagattaaaataagtatcaaataaaaatacaattctttaaaataatgagcttt

SEQ ID NO: 370131 - DNA, 421 bp, Cannabis indica
catggcaatgatgaagctgaaagtcggggcaacaaccaaccaaatcctgaggtgggaggttatcaagtcagagggtcgtatgtccctaataggaaacatcaacctgagaatcctccacaaaggggtataagtgaccaagtaccactccctgtcgatggaagggctaacagtcaaaatgcaggaggaaggccaagaactgggtcagtttttgaacgtgtagggccccgagggggtagagaccttcgagattccctcaacagaaatagggagaactacagttccaacatagtaaatctacctgagccggtttaaagaaaccaagcgaatgctgctattaatactattctgttggaatttattttaccaggttcttagatctactcacaagtatgttgttcaacatcctaaatatgaacttcta

SEQ ID NO: 370132 - DNA, 601 bp, Cannabis indica
cgctcataatgtctggatggaaacgctcaggctcttcatccgagtcgtatccaggcatcttcccatactccccatcttgatatctcctgaatttgtcctccaactcaatgattcgcaattagataggatcctcttgcttctgattgagttgttgacgtaggttaggttttttctggttcaattgctcacgaagatccaaccattgtggatcatagttacttacagacctcgtccttgagtaactttaagttctagttgtgcctgtactctctcgatcattactacgacaagttctatctcctcctcaagagcgactatgatctcgtgttcttgtatgtcccgagctagaacttgcctcatcacgtatcgtccttctcctttgggaatgggctgatacatgccctctgctagggtttgtattagccccttccctatcagtgcgagaaggatattgacattatctcggggtcaacccacctgccctagtttgagtcccaagatctcactcgttaccacaagggatttcctgttcccttgtctggggttgccttctactcgcattcctgcgagaggattctggtaaatcacaatttacattccc

SEQ ID NO: 370133 - DNA, 578 bp, Cannabis indica
ttgctttgcatttggattagcagtctttttcttattagttgttttaacagctttaagaagcttcttgctattcttccaattcttcttgttgctgggtttcgaagcagaggaaaagtttgcctcagccttggccgtactattagcagtgccagaactaggagctttagttcctccttactgtggtcctccaataaaattttcaaatgtctgaaggttgttgatcaactcgtgaaattcaaactccaacttgttcatgacataatttgatgtaaaaggcagaaaagctagagtcaaactattcaagatcaaaatcacttgagttgtctgatctataacagctccatgattctcaggctcttggaagtaactagtcatttggagcaggtgatcaggcacattttgatgaggtttcatccgtgcattcataaaattcttggtcgcctcaaagggagattgaattgacgtcatcccaaacacttcagtcaactggttcatgatatctgcagccgtgagagtattggcaaaccttgttttcaaggtgccgaccatgctagacagcataaagtatcgagctttgt

SEQ ID NO: 370134 - DNA, 786 bp, Cannabis indica
ccgctaatagtaatagcggcggagtaattgcggcggggttcgtcgctactagtattagcggcgggcattagcggcggactgcccgccgctaataatttcaaaaaaaaaaaaaaattaggccacaattagcggcggacagtggagtctgccgctaataccctctccgccgctaataactccgccgctaattatgataattgttgtagtgaattgaatgaaaaatacttctgtttctttattgatattgaataaaatggattacatcgaaatggagttttatttaaggcataaaacccaacacaaagctgcccaatgcttgggccggccctggctgccaataaatgcagatttggtcagtgatgtaattaccgtaataatagtgaatattctgattgatatcagaaattatggtgaaaattgtaattaatcaatatcactaattttattaggggcccaatttataagattggaacatggcctctaaaatattaaagacggccttatgtctagcaccacttataaacgatatttttgattggttagcgatatttttttaaaattattaaattaaattatataaaatttaatatttaattgcactaataataatacataatactaagatggtgctaattacggctagtttttagcatttttcaatttggctaattagtaatttttctccctaaactttgacatgtactaaatcgtgccccctgaacttttttgggcgttaaaaattcccctgaactattgagattgttaaatttaaggacttttgtctaa

SEQ ID NO: 370135 - DNA, 537 bp, Cannabis indica
tactagtatataacttacacattcttattgtaggctttgagaaaggcacaatctgaacgagattgccagaatatatcaaggcaccactcagctcgtagaggcatggtgactctccgagaggatgtgataatgaattacatgtttttagatattctaatttatactttaattttacattttggaatgaaggacacatacaatgcgaagacgatgttgctaccactgcaacatcaatagttatcaaatttgacacgatacttgtactagttagctttagacttttaattttaggcaatacttattttgtgtactgtttttattagtaaggacttagcatattttgtaatgtatactttaactttgttataatataattagaatgtcttttgtacttagttttgttatataattaaaataatatttatttcaaagaaaatatttatttttataattagtttataattgtttaaaaaaaattaatatataattaatcattaaataaaaaattaatatatatttaaaatatttaaataataa

SEQ ID NO: 370136 - DNA, 968 bp, Cannabis indica
tttcatattattaatctgtttgtaatgactacatttaattttttataattattttaggattttttttgtttgggttgtttgttgctatctcatattaatagaaatgatattacactacataaatcttttagttgggtttcttgccaagctctagctgattagaattggagattgtttccatctgttaaaaaataacttcaaaatcaaaaatgaaactcaaataatataacaaccatgacagcaaacatggttaatcaagttaaaaaaataaaaatcaatttctagactcttaaataataaaaattgaacagaaaaataaaatcagtttcatcaataacataataaaaaaaatacaatgcaaaaaattataatctaaaaacaataccaactttaaaaaccagtttcctcaacattaaaagaaactaaatattacattataagatatagaaaaaaattagtttcatcagcataatgaaaaaaatataaatctaaaaatcataccaactttaaaaccagttttatcaacattaaaataaactaatttttttattaaaagcataacaaaattaatttcatcaataacataatagaaaaaaaaaaaacaaaagtaaaaaattataatctaaaaacgataccaactttaaaaactaatttcattaacattaaaataaactaattatttcattaaaagaatctgaaataaaaactaattttatcaacaacataatgaaaaaaatacaatgcaaaaaattataatttaaaaacgataccaactttaaaaactagcatcaaacatataaatttatatcagtacctaagaaccaaacttctaacgtcattctttattttggcattcaatcttttatttgctttctcaaaaattaaaattgatttaagcatacaaaatggggtaaagataacaaagagaatcagaaactaaaaacagtttcatcatcaacataatgaag

SEQ ID NO: 370137 - DNA, 595 bp, Cannabis indica
aataacataaatgctatgaggtacatatcctcatttgtctattttaatattttatcatatatattttaatttaataaacaatatagaaaattatgagatgccacgtaggactttctttaaggtagggtggttgagttgcctcaggcccttcagcctaagaagcctccgagtcttttctttccttaacattagtctattagggactcgtttggcacagtttttgaaaaagttaaaagttgcattttcaaaaagccattataaaaatatgtttggtaaacagttaaaaaacaactttttgaagaattttttgaaaagctaaagctgctttaacccaacttttagaaaaagatgttttaattaaaaggataaatagtatcataagtacccaaagttttaggtttgtaagcggcataaacccaatgattttttttagtggcataagtaccctatgttaataaaactgtaatttttttccagtttcatcagtacagactctgttattgtcttaaacaggacacatataagacccaaattttagattatttggtctggacgaaaaatatgtagtatcagttacttccaaatctttttttaa

SEQ ID NO: 370138 - DNA, 697 bp, Cannabis indica
caatcaattatttcagattgcctatgcaattattgacagtgagaatcacgactcttggaagtatttcttgcagaatttaagggaagcgatttgggaggtcaataacttagtatttgtatcggataggcatcaaagcattgaacatacaatcaaggtcattttcctcaaagcatgccaatgtgcatgatataaacatattactatgaatgttgcccacaagttcaagactgatgtatgtcacatgcaaatatagttggttgcttacatatggtcaaagagggaatgtgacagacattttcaagtacttcaacgaatggaccctgccattactgcttatgttgagagtacaggattggaaaagtaggctcgtccttattgtccagacgataggtacaacataatgacaagcaacgctactaaaagcctcaacaacgtgacaaaagaattctagaattatccaataagtactccagttgagttcataaggttcacactacaaaattggttcgttgatcgtcttgaaaaggcaagtaagtgcgctacccttttggcaataacttttgaggaaaatttggtagcgcagcacaaggatggtaggttcaaaagtgtccaacataatggtgcacatttgtttaacatttgtagaggttctgagggtcggagaggtggtgatgtgaacttagttgagaaaatatgc

SEQ ID NO: 370139 - DNA, 564 bp, Cannabis indica
acgaaatttttggtttaacgataccttttagatttttacgttaattttaacataatatcctattaattaatataatattctttattaattttatatatatatttaaaaattaaaattatgtagatattttatataaagaaattttaattttaatttaaaataattaaaatattatagatatttttaatcatatttttaaatttattagtttaactttgaattaaaattaaaaaaattatgtaaataatttatataaagaaatttaaatttaaaatattataaatatttttaaccatatttgtaacaccctaactaatttagacgtgttagcgtgatttttaatatactgtgtagcttgttgctaatcaacgagattaacgaaaaacatgattaattaaaattttcttatttaattagaaacttaaagtaatacatttataaaatttcgagatctcgttatagaatacatttacaaaagtttgctattcataaacaaaagttttgtcgtctagcgactatacagcaaaaagccttgatgtcttaaagatcgtacgctccaggcct

SEQ ID NO: 370140 - DNA, 714 bp, Cannabis indica
acacaaaatttcaaaagcaggaattgaggtggacaaggctaaagtttcaagaatagagaatttgccacctccagtttctttgaaaggagtaaggagtttcttaggacatgctggtttctaccgacggtttattaaggacttctcaaagatctccaaaccattgtccagtttacttgttaatggcgttccgtttgagtttggagaagattgtttaaaggcattccaggttctaaaggaaaaattgatttcagcaccaatagttacttcaccaaattgggagttgcctttcgagttgatgtgtgatgcaattaattatgcaatcagagctgtcttgggtcaaagggttgacagggtgtttcacacaatctactatgctagcagaaccttgaatgatgctcaattaaattatgccactacagagaaagagatgctgacaattgcttttgcttgtgataagttccgaccctatctaattgggaataaggttattgtctataaagatcactcagtgatcaaataccttatgaccaagaaggatgcaaagccaagattgattcagtgggtacttctacttcaagagtttgacttagagataaaggacaaaaagggcactaaaaatctggtagcagatcacctgtcaagactagagttggaagagagccagaatacgaaagaggtacagataaatgagcaatttcctaatgaacaactctt

SEQ ID NO: 370141 - DNA, 1255 bp, Cannabis indica
aatccagtgaactgaaaaatcagggaattaaacttttaaacatataatcatgattatattctactgtcctgacgacactatgatcatgaacaaatacatatgttctggacttaatagaatttatacattaaacaatcataaaataaatcatgtgaaccatgcaacataaaatgcagtttctgatctttattaattagtaaatctgattatattgaaatgaattttatttagggcacaaaacccaacacccttctcatgtcctctatctcttgaggatcaatgggagactattctagatggataccaggtctataaggcatcactgcccctttggtatttgtcattgagaatctctccagcaccttatcaatgtaagttgttttagagagagcaaggaatttgttcttccagtttttgatgatctgaataccaagaacataaatagcttcactcaaatctttcatttcaaattgagtgtcaagccattccttgatgtcagtcattttcttgatattgttgccaataatcaaaatctcatcaacataaaggaccaggaatactaccacttgattatccttgagtcggtaattttcactaagttatggcttgattgtgaaacaaaaggattttagggtttatttgttaattaagagactttgtggagtctaattaataaataatacaaataaaaaattttatttgataactaattataattattaaataaatagtttcagcatttataggattttagaattgaaaaatatgacatttgtgaaataacagataaatagttgagaagaataaatataattagtgttgggcccacatatatagccatatttttgctattattttatcactttttattccatataattcaatcttaaccctaagggcctgtttggttggaggtaatgaaaacaattgaataggaataggaataagaataggaatggtaatggaatggaataagaataggaataggattcgattgtttggttagatttatggaatcaataattgaatatatattcttatgtttggttgactatataatgaaatggaatggaataaattaatttttaacaaaaataccattatttttaaaacatgattaaaaaattaaattaaatatattcaacttatatatttttttttagaaaaaattgatatatatttaaaaaaaaactgatatgcattaaaaaaaataatatttatttaaaaatctgatatatatatatacatataaaaa

SEQ ID NO: 370142 - DNA, 676 bp, Cannabis indica
cagattgataccgaaaatgtctagctacataaaatacttagtttgctgatcgtctaatgaaacataattgaatattctgtaaataagaaagtaacgttttacaatcgttaataatcaaaccaaaaacaaagaccatttgtagattactacgaattgcttgaacagtgagcaatgaacatgctatcagtttcaatctctacattttttcactttttgtgtttggcccaactaagacctttttatacccttgcatggcttcaataactctcgctagacaaagacttccatgatactcaaccttgatgttcagaagtctatcagaactatttcgagctacaaatctcaaatccataggaagttttcttatcaaataaggcaacatcaatcttgatgttcagcaagagttgcacttgctgatataagacatattttaaaggaaaaaattatcattatatatttaattttaaaaaataaaataaaaataaatagaagtcattacaaaatagtggcattccttaaaaaattagtaatattcctttcttctatttattatttaatcaagtttcccttttttgagtttaataaattaaagtaaactgagaatgactactttgctattaatctcagtgcttaaataaattaaaaaaaaaaaaaaaaaaaaaaaagaaagaaaaaa

SEQ ID NO: 370143 - DNA, 601 bp, Cannabis indica
accttaagtaatttaggtaatcttgtttactttagtgataccactactcttcttgacgttcttttatacgttaccccagtaatgcccccgctttaagcctccattgggcccttattcccatagaatgatggctcttatatacgagtgcatcactttagctggttctcggactgtcgactcgccaccacggaccaatccaagtgttttcaatgtactttgctctgactcgcacgcttcatggagaaatttcctaaattaaatcaccccaagtgaaggacactcaaccatgaagttccctcatggtgagctacaaatcaagatgcttcttgctaacataggtagtcacacgtctacataatctcaaaattagtacacaatcgccgccttcaattcacttaggattttagacaatactcataaattgccccacctttgcttatgctagatcacttttaaacaaaagattttgttatttgaatcaattagatcgatgcctccattaactactgatgtcctatattccacttgggattaccagcaaatttaactcatattatcatttttttctaccctgtaatatgaactaccactaaataacata

SEQ ID NO: 370144 - DNA, 536 bp, Cannabis indica
cgacttcctttaattgaagcaagaacctggtgtttccagggtaagtagttgtgctcatcgatcttgatagactgtgagtgattgaacgatacgggttgtgaacgaggaagaagagcagtgttcgatcttgatgctccaccattgccaccattgccgctggtagctgaatccattgaagagtgatcaaggctctgataccatgtcaaggttaaacaatagagagagaatgagagagaaacgttgaaacagaattgtgtgttgtattgattaatgacagagtatagagatacaagccatttatatatacaattgagaaataaggggaatcagtctaactaaacactaacaattgtaactaactgtattaaccaccttaactaactttatcaccttaaccagtggctcaccatcttggacaactcgaccataaatcttgaacaactcgatataagtggcttttttttggtctcactatccctaatcacaaatgactctttttcttctactttttcgtatcggtacttttggatttttgg

SEQ ID NO: 370145 - DNA, 561 bp, Cannabis indica
atgacaagaaggaccttgacgtcggggggttggtcacgacggagaattgccagaaagccaagctgatcctggggcatcagtcggtggaggactccaacctttccaaggttatatgcccgaacataacggttccggccgcggagaagacattccgggaggagatcattaccacggcaaaagacaagtaccgagagtacctctttcggaaggcccaggggaaggcctacactaaggcccaggcaactgctgggaggccccttcgtattgggagtccggttgagaggagggcccaggcggctgccgggaggccccttcgtattggaagtccggtggggaggagggcccccaggaccaaggcctactgtctaggtgccgtacgggggctcctgacgccagcacttccggtcctggtaagtcccctttaacgatacattacgtccttcctgttcatgaatacgctagccttaggcctgtagggtttgatgaacgtctccttaggtttaggatgccctctactcggtggggggatcatgcagaggagtattacttctccaacttagg

SEQ ID NO: 370146 - DNA, 543 bp, Cannabis indica
aatgaaaaacaaagaagagcaaaatttataaattgcattctgttcaggagacggatccaagtagagcttatggggtttgtagccctcattgaaaaaataaattcatttaaaatttaaatattttattatagttaataattaaatacaaaaataataaaaaatggtcatcgcaaatatattttttttataataagccctcttaaattaaataaatttactaagagtagttatatttttttgtttaaagtaaatataaatacttttatgggggcgtttggtatgaggtgttcaaaataatttgattatagggaatattatgaaggagaatatgattatagaaaaatatgtaaactgtgtttggttctgtagggtaatatgtaatcacattcccgttaattgaattatactgtttggttgagtacatgaatcttatatattatttaaaaaaattaaaattaaaatatttttatattgtatctatagaatgttaattatgcataaaaataaaataattattcattaaagaaatatatttattaatta

SEQ ID NO: 370147 - DNA, 1229 bp, Cannabis indica
aatttcctttatgctttatctttgcatgtttacattttcaaatgcaccttcgacttttgctgtagaaaatatccaggaaaccgtaggtccagaacttctgtgattcttctttgtcatgtcttcatgcgattttacagtccatatgcttgttttctgaactgcataacgtctgtctttcatcttgcttattctaagcttcatgaacttttttcccctaactcgagaaaatttctgacttcttgagttctgacttgtctttgaacattctcgttctttaatctgttgagtactcctggtcgacatatttgcttgtttatcgttcgatattctgaccaaacactcatcttgtgtgttgtcttttgtagatgaactcaggtgagtcttgggagaacggacatcggatcgaccaggacttgcttcaacttttgcacgaggatcatcctcgtctttgttttatcccaccttcctctagtgaaggacattatccaaaccctgtacccagccatagaatgatggctcgtacaaagaaaacaacgcgtctggctgacgcatctgaccctcaagtggctcggcatgccactttgcccagtgccgaacaagatccagctgtccagatggagggggatcatgaaggggacgctgaggtccagcatatcgaggagcaagacgatatacgtcctgaaagttcctccaaggcggaggaagaggtagaggttgaacccccaaactacgaggagtacaatgaggctggggagccagtcgatgctgatggagatgtcttggtagaaagtatggattacgtcagtgaggaccttgctgctgcggttcctcatagaaggcaaggtgccttgggtgccaggtgggtaagccctccatccagggttactaaggcgtgccttcggactctcgaccaggacagattcctgggcaaactggattactacattcccgttcacaacaatcgtgccacaaaccctggaaaggggatgtgcgccaggtcgggtgcccatggtcagcaaggggcattgatgcctttgcatcgatacttcaagaatgtggcggacttcttcagcctctgcccggcccagttcactcctaagggcattaaatatctgtctgtcctctttgttctctacgcttcgcagaaatggggtatgccttctcctcacgaagtttcctggttctttgatttgaagtccaccccaagcaaggcaggtcagggtacttct

SEQ ID NO: 370148 - DNA, 568 bp, Cannabis indica
tggagataactaactctccgccaggtagtagggttccaaaccctgattcataactatcatgcggtctatccaatttactaaaaattttggctgccacatacgaatgagtggccccagagtcaaataacacagagaaataagagttgttgacagagagctgacttgttaccattgaagggctggcttttgaatcagcctgagttatcgcgaacaccctagctggagtgggattcgctgcagttttcggtgcctcagttctaagctgggggcaatcccttttgtaatgccctgacatgccacactgaaagcatccctgccctttacactcccccagatggtgcttttgacaactagggcactttgggtaagtgtctcgggttttggtgccactctggcgattgccccgaccctagttcccccagaacctcttgttctgacctaagccacttgttgcagtggatgcctttcttttctggtccatggccaaaccactacctcccctgctaaaacctgatgcaggagggaagagccccgccaacaactaaagtcccaccagactctgtcatgc

SEQ ID NO: 370149 - DNA, 876 bp, Cannabis indica
agtaaaaaaaaataaaaagttaaaaatttaagtatatggtgtaaaaactccaattaaaaatgacaaaaaataataatatatatcattgtaattttgtacataaaaaagctaattatttcatataattactaaaaaaacaaaatctttatttttttttacgtattcatgtttttcacagtactaatattcctcctaatattgcgactcacatatatataacctattcctaattaatatctaattatatatttgcttttccaaatccctaattatatctattcctaaataatgggtaatcccaaccaaattaacaattaataataacaatgggtcaatatatttatatatatcttttttatcaacatttaaaatatatatatatatcagagtcgtgatgatctaatatgagggattaggtaattgtgaacttcatttttgagaaatcgaagggttaggtaattggggattcatggagaatagaggagaggttagttaggtgattgaagaatgaaatatctgtaaaaaagaagtaaaataaatatttagaaacccttaatttatgcgactgcattatgtttaattgatgcgactgcattgtttttaagagactttcacggacaaattttcagcaactattattctagtcgctgttattgaaatgcctctagaaaacgtcgattcttgtagtgcctatataacctaattaacactaataagccttctcaacatttaaaaacctacggatctagtaaagcattgttatttttgtgaccaagttttagaatttcataacccttttcatcattgatgagatgagaaaagggttacgaaattctgaaacttggtgacaaaaattaattggagacctctacaacc

SEQ ID NO: 370150 - DNA, 1124 bp, Cannabis indica
gatcgaggacgaggagcaaagttgatcgatgatggactgagcaaggcggttacgtggtgggcggagagatgcatggtcgcgccggattgcagaattacatcggagaggtggagttgacaacgatcccttactttgtattcactggtttgcagaaatatatatatatatacatatatatatatatatcttttatgggttaagttcttcaaatatatatggttcagagtgtggatgaagcttcaaattgttgagaatacatggaggtcatgactccaaggatagtggttgttgtttaacaaaaaaaaaaaaaaaaagaagacgatggaaaagtagaaggcggcacattataaatgacatggagactctctttgccctatgaagtttgggcctaggcttgaagctaattttttttaaaaaataaataaatgtgggcttgaaatgttttatattttgtatgtttttgctgtgcttgttttttagtcttctttttatttttaccacctcgaggacaaggtgattttgaagggttggggagtgttacatgaaagggtatagggactaattagtaattgttagtgttatctagttagtataaaaatgtagagtaatttgcggcaaaaatacccaagtttaactcggagttgcagataaatacctaacaaaagtttttggcggtaaaaataccttctgttaaggttttggaacttccgtaggtacctccccgttaagtaccaaataagcgtccaactgtcattctcttattggtccacatcattaatttgtattttttaattaaaaattcatttaaaaatttaagaattaaataaaaagtattttaaaatcaaacaaaaataataatatatattaataatttataattgaattaataatcattaattaaatccctaaactaatgccacatgacatctgggtaaacttgacataataaattataattaaaaaaaaagtatctaaacctcaaacgccaaatctcacacttcttcgttcttcttctctcttttttttttttttttttttttttttgtaggtttagatccactcaaaccaatcggtcgactcaaatgcaggagagacaaacagacgaatcgatcgattcaaacgca

SEQ ID NO: 370151 - DNA, 580 bp, Cannabis indica
ttcttaaatttttcttaattttcctttttttttttttgaaaatctgccctggaaaacgacaccgacgactaaaattcatgaaaccaattccaaaatgatctaaatgaataaattaagagatccatattgatttcaagcattgaaaacacgtaaaatgtagactttaatttcataaaaattctttccggtccgatcgtgttcttaagagaatttttcagttttcataaaatcgatctaaaatattatatgattatagtaatgaacagaggattcgaaataaataccgaaaatgaaaacggaaaaattatagaccgaaaaataaaactttaacgtatatatatgtactcgtatacaatgtatatatactgcgtaaaattatcattaatgtatggaagagagtattacatacaattttatgcaataaaaatatgaaagcattgagtattatatataaatatatatacatgaaaattatatgtatatacacagtatatgaatataaacatgattgtgtatatatatatgaacatatagattatgaaatatgaatataaaagtgtatatatatataaatatgaat

SEQ ID NO: 370152 - DNA, 1144 bp, Cannabis indica
ttctattaagcacgtaattaaattaatttcatcgttttacccttctcgggtcaaaattactaaaatgcccctggctcaccaacggggtcttaacatattaaaattcatataatttcacatatattgaactatataataatataattccatcaattactcataattatctagttagggctttgctaattctttttcttaattccgggtattacatgcataaagttccaggcttcaccggtttaccgttaaagatgcctaatttgtaacgacggcatccttcggggaaccctggtggtggagccggccatacaccagttttgctaaattgtgcttcaagttgcatcaacctgaactcgttccgatttcgttctttttcgaaagctctatcggcgtccagaactttctgcatttgaggagtaattatgccaacatcatgctcctgcttaggctcttcaggagttaagattaggaatttgcccttgttctttctaggcgccatatttagaacttaagagaaatttgcctttaatttttaagtgtaagagagaagtagaagacaagagcacttacgaattagaaagggatttgcttttatagagcagtatacatgttgggaatgtagaaaaatttaatggccattaaatgtgtaactgtacaggtgaaacgcatgaaatggtgtatttgtcgacagaatatcgatactatgtcgatgatatgtcgacaacatgcatatttaatgaaaccgcatactattttgtcgatactatgtcgacgttatgtcgatagcttatcgatgatacacgtgtcagacatgcaacgtggcagttgggaagggttgttgggaacgtaggtaaaatttattaacattaaatgtgtaaccgtaaaaaatgaaacgcatgcaatgtgtatttgtcgagtgaatatcgatacaatgtcgatagcttgtcgatagttgaatggattaattaccattgtacacgtgtctgacatgcaaattgcattggggagtctatgtcgacattatgtcgatagtgtgtcgattatatatcgataagaactgccaacctattttttggtaattttatgtcgacagtatgtcgattatttgtcgatgaaacatggtatactttctgttgttgttttt

SEQ ID NO: 370153 - DNA, 568 bp, Cannabis indica
ctattagctagccttaacttctgcattgtccggagtatataatgtgttttatgtctccatgttcagaaaatatgtatcagactcgacccatattctgagttgtgatgatgttaaacttcaaacaaatttattatattggaaaaacatgttttggactagaaaaaaatggaagtactatgaaatgagacaattccacgagttgagaaagtgctatagaaaaagaccaagatagaaacaataatttgagagttagaatcatcaataagggggtaatatcttgaatggtttaaataaaatttgaggacgaaatttctataaggagggaatgattgtaatatcccgataagtctaatggtaaatattacttagggtttatatttacattatgggttaattagataataagtgggattatgatcctactaatttatttcagcataaaatttaaattttattataagtgtataaataatcgtaatttattaattacgaagatttatatagcatgtgtgaatgtaatatgagttatatgtggaataaaaatatttcaggttcagcgactttggag

SEQ ID NO: 370154 - DNA, 635 bp, Cannabis indica
tctacgatatggtgtgtgttttagagccaaattgtaagttttattttagtgtattcataccgtggggtttgataaaaaatcctaaattatcttacgggagtgttaagtagtgttttagaataaacactcattgatttattattgttatgacatagggctcaagattatcaatcgttctccaagcaggtcggccaacatacctgaaccataacttgaggtaagaaaagtataatgtaccacatggcatgacaaaatctgaaattatcgattgtttgataaggcaatggtaatgtaatgatactatggacataatatatgggctcacctgattaggtgatgcaatattcttggcgacgtatcgagcgtaggtaagggcgtcagtgatatgaaatttcctggttatggtatagattgaaatcattattgggtttcttcctagcgacgtatcgggcgtaggtacgggcgtcagtgacgtatgataagtaccgggcgtaggtatgagctcgtctaattagacgaggcgatatattagcgccaagttgtggcacgggctcacctgattaggtggcacaatgatattatatatgatattgtattatgacacgggcttgcctgattaggcaatgcaaatatgt

SEQ ID NO: 370155 - DNA, 883 bp, Cannabis indica
gaattttaaacatttttacgaatttttcgattttatttacaacaaatacggtatttttatgttgtatttatattaaattgttgttcattttattgttatatgtatgttattttttattgttgttttgatgttatttagatattatttttatgttacttttatgtagttttcttgttattttcatgttgttttcacgaaaaactgtaaaattgtaaaaaaaaagttctattaactgtaaaaatgtaattttcttacccaaaaaaaatagtgcgttataattattctttttgggtaattctacaatagtcaccctaaaattaggcttatgtgtagatactttaaattttaaaaggcaattggttgtaatatgtatgtccacggtatttttatataccttagcacattgaatctttaatcttgttttattaagaaattaactgagagagagagagaggagagagagagagaatgatgtgatttgattcaattccttttcttttgctgatttttgttttagcagtatttttcttttcatttgatttgcaagcatcggtattatttactttttattgttgctttcttgtaaatttgagtttactggttatcattatgaagatgtaaaataattataggaagatgagattattcaaaggaacaccaagaaagatgaaattcaacaacgcccacaaagcaaattattttaattctttttactttgttttttattgaaaattcttcatgcttttttactgagagataatgatccatatttattgggcacactagtgtacctactagaatcctctgcaacacttctaataaaatctgccaataaacatatcctaaaatggatctattactaaggctgaagaagaaagagtcc

SEQ ID NO: 370156 - DNA, 1011 bp, Cannabis indica
gctaacgggagggacataatgtattgctaaaggggacttaccagagccggaagtgctgacgtcaggatcccctgtattcggcacctggacgataggccttggccggggagccctcttctcaaccagactcccaatacgaagggatcccccgggagccgcttggctcctcctctcgaccgggctcccaacgcgaaggggcctcccgaaagccgcctgggccttaggtataagccttctcctgggccttccggtagaggtagtcctgatacttcttctctgcggtggtaatgatctcatcccggaaggtcttttctgcggccaggaccctcacatttgggcagaggaccttagaaaggttggagtcctccaccgactggtgcgccaggatcagcttggccttccggcagttctccgtcgtgaccaatcccccgacgtcgagatttgccctatcgtaagtcgcaaaggtctttgcccgctgaagaaagatctgagtaggcgcggtccgctcgtacggagggatcctaacccactccgtaaggagctccgcgtgctccacagcccagaacccgaaggaaaagaaaaagcgacggtggtattccttgacatgtgtttgctggttataagggaccacaccctcattcgaagggtgggcccggatgccgtaaaaacaatcaggtaagcttgtggaataagttggtatggcgcaaggccgacaaatacaaggaaattaatgaaataatcttgaagggaaagcatagccccggccatcagatgtgtctggctccaagccccgaagcctccataattgtggttaggcgtctctgcatctcggggcggtcggtgatacgtcccgaacgtcgcgggtttgataccagccacctccacaatattctctagctggtgggggcaagttaaagtagagtgaagctcagccgcttcccatctcgtagcacgaggtctatacccctcctgggcaacgggacccgaccatgacttcttccaaggtggcca

SEQ ID NO: 370157 - DNA, 523 bp, Cannabis indica
acgaggatatggtcgatatcgatgcttctataatatgtcacgccctaaacattgatctaaactttcgcccgtttaacaaaaagaagatcattgtacaaagaacgagcacaagcatgaaaagaagaggtagaaaagcttacttactacctaatcttagcaacaaggaagttaaggccttatttccaggctcatcctattcacgtatacattgaccaaccattacgccaagtattgcaaaaaccaacacttctggacggttgctcaaatgggcagtagaattgggtcactacaaaataatctttcaaccccgaacaacagtcaaaggacaggccttcacagactttgtagttgagtgcacaggcaaagaagaaagcaacttaaaggataacccgaagccagtacatgaatccttaccgaacaacaatgaagatagacctacctagaaattgcacgtggacgggtcaacttttgatcaaatgtctggtgcagggattgcccttgtcacacctggggggaaacatct

SEQ ID NO: 370158 - DNA, 719 bp, Cannabis indica
aaaatttttaaatccctccccccaaactaaagattcccactgtccccaatgtgatattatattcaaggtgagaaggacttacctgaacccccattagaaggggtttggcggtggtggctaatcgtacggataaagcgaggagggtatgcgaagtagtttgggtcctcgaccccaggacgccaccaataaatcaaatgactgaactgccttacttgatgttcatcaaattcactcctttgcaccatgtaactctggatatgattgttttgttgggtaatgtagttgagttgagcatggatatgttgcatccccgcatcaagaggagtgggagtgggcaccacttgaggcatttcttcgttaggattctcctcttcttcggggacatgaacttcttgctgttgattacgacgaggaagtggtggttgaccatgtggatgtggtggcttaaggttgcgcaccattgtccaatcaatattccgttgtgactgtacttaattatcgtaaggatattggggcacaacattagcaacacacaattcagttataacttccgctaggccaattccagcatgtgtagttcctgcgaccatgttatcaaagctctgcagaattatacccccaactggcacagtaatccccttcattatggcataaacaacactgagcctatccaatgggaaatccgataaatgtttactaggcataagcctagcactcac

SEQ ID NO: 370159 - DNA, 489 bp, Cannabis indica
ggcgaggccgggagtttcttctttctgattcaccttctcttcctcagcttcatctttaggattcaagtgctcctgagcatattgtttggcccttgcacctcccttcaacttaacctcgcgcttaagttggatgagttcattctccttatgaggtcgttcgatccggccaacaccagatttcctcttcttccccgccacggacttaggagtaaagtcctcgagatagagcccttacctcacaaagttatcctcggaggtcagctggataatgtttcggtcttccaccggcagccgggcaagtttttgtgctctatccctaagagctagagtgaggggaggacggtgatatgtcaaaatttgttggaaccgagtctaggtaattctcgtgtccttcaccatgaactactcatcaacaaaacgccctatctttctgatggccttatcgtccgtgccggtcaaccacttgaagcctggttgagagaaatagaa

SEQ ID NO: 370160 - DNA, 504 bp, Cannabis indica
gactccctttactatgatataccatccagcattccttctcattttcctagcttcatttcagttatctgggagtttcccaaactcgaggtaggttgctattggggtcatccagtttggggatgtatcaatcattttgatttattccgtgccaatgatgctaggctctttgaggagctggataggaaccaagttcgccttgtcacttggaatttgtatgagaccgtagcttttgaattgtttgagcagatcatgtattttgctagaatatgctatcatcttttctccccgagcctcgtattctccagatacatgatttaccaccagctgtgaatcactgcagatttcgatgtgtccggccatcatctcctgggctagccttagcccaacgattagagcttcgtacttggcttcgttgttagatgctttgaatccgaacttgactgcagcgttcaggtgttgccccccaggcgtgacaagggcaattcctgcaccagatagttgatc

SEQ ID NO: 370161 - DNA, 527 bp, Cannabis indica
aacatattacaaatattgattccgattattttttatttattccgttacatttctctattaatttattatgattttgaatattgtatagtaaacgtgccattaatggcatcccttacaaaattggttgggaaagttctgcctttcttttctcccttattttatcaagttctcccttttctaattttaataatgtgactaaataaatgtgagggaatgattaccttaccattgcttcccattactcattagtaacatgccattagggttttatgattttggcgtttggggaacgggattgggaacgggctgggaatgggaatgggcatgggtcgaggaatgggaatgggcatggtgatggagattgggaatgggaatgggccgtggaatgggaatgggaatgggaatgggaatgagattgggaatgagaatgggaatgggaatgggaatggcaaagagaatgggaatgggaatgcgaatggcaaagggaatgggaatgggaaagcgaatgggaatgggaatgggaatgg

SEQ ID NO: 370162 - DNA, 524 bp, Cannabis indica
ttattattttatttttcttctaaactttgcttattagtagataatagtagagcaaaccacatgaccttacatttagactgaacaattgatgatcttatcttcaataagttaacttataccacactatgtctttgttcaaactataattttttttaacaattatttaaacataattgatgaaaataagatatatgattataacgtacagattttaacgggagattacgtgcctgtggcacgtactctataatatatatattaaaaaaatgctacaaacccttctactaataaaaagtagataatttatatatatataggacaagattatggtaagacctaacaaaagttccctaccggtaggaaactttttttgaccattgattttagatcatgtggttattatgatgtaaggtgtatactcttacgataggactgcttgtatacgattaaaactttatacatattataataatatttaatgatatttattttaaaaaatatattaataattaaaattttattaa

SEQ ID NO: 370163 - DNA, 670 bp, Cannabis indica
ttttcaaactgttggtcttatggacagggaaatatttaacaaaaaatgttttggtcatttcttcccatgttccaatagacctagatctcaaagaatacaaccaacttttagctttatccttcaaagagaaggagaaaaactttaagcgtgcaacatcattgatggttgcgcggtcatagaaagtgtcaacaacttcctcaaattctctaatatgcacatatggattttcattttccattccatgaaaagtcgacaaaagttgaataatgccgggtttgacaccaagatttggcatattaggtggaaatataaagcatgatggtatggaagtttgggtaggatgaaggtaatcattaagtgttctttgttgtgcttcattattattattcatggcgaaaggattactgattattgtgtgatcgggagaaggagtagtggatggattggaagaattttcactagaagtggtttcgtcagaagaagagttactcatccactctagttcgaaatttttaaatatttttttattgaattttttttaaatagtaaagagcacaaaaatacaatattacaatgactaacacaaatatattcccatgctagttggaaaggttgccaaggtaccgcttcgtcccaaccttgcctagacagaactgaggttcacaggtaa

SEQ ID NO: 370164 - DNA, 635 bp, Cannabis indica
tccagggtgtgtgagtgccttttttaggggtcatagagttccatttggtccatccactattgcatgcttattgaaagttgagtccatcaggaaaccaacatatgggaaacacttcaatccagatcaaactttgatgggtagagtgctaactggcagggatgactatatttgggagaaacaggaaatcttggtcactcatctgactccattctatagggttcttcatcgggtagccttgtacaattggttccctaattctcatttgtcagctgttacacttgagattggcaagttcttgtatgttgtaggaactcatgtgtccattgatctaccatcggtcatatttgaaaggatacttgaagcctcagaaactactggcacttgtaacaagctaccatttccaagtcttgttcaacgagttcttatataatgctcaccctcctcttacaacacatgattatcaagttcaaaatcatgttctcagtaaaagctttctctctgtggtcaataggaagccctcatcaaccactccctctgtatcaaaagtgagtaaaggcaagtctcctatgtttaaagggctttcggattccagctggcaggtacaaatgttttctgagtttcaatcttttgccaaa

SEQ ID NO: 370165 - DNA, 600 bp, Cannabis indica
aaatttttccgtgaaaataatttatttggattccttgtaaaaaattatgaaattttggtttttacagaacttgattccgataaaaattgaaaaagttatggtattttgatttttcgggttcaagaggtgtcgagtgggtgctcgtgtgcaccaggcactcgaacaaggagctccatccgcgcacgtcttggggacaaaattgtgtctgagacatggtgcactcggtcagctcccctccttcgtacagggactcgcgcgcattcatcctgcaaatgccgagatcctcagtgctgggaggctgtacattccaattgcgctcgcatagcctcctcatgagcagccaagtggttttccacaaaaagtgtgattttttgtgattttttttacaaatttcaaaatttttgttttcaaaacctttaatattaaaaaaatattatttttaatatttaaacttaaatatcaattttgtaaattaataatatttaattttaatagattattattaatttctgatattttgaggtttaaattttaaaattgattattttatttttaaattatggtcaaattttaaaaaatttgttaatttctttaatattt

SEQ ID NO: 370166 - DNA, 875 bp, Cannabis indica
aagaagaaactcaagactaatccaccctcggcctcatcaagttccagttcagaagaagaggatccaatggaagtttcttcagacaaatcagtgtctcttcattctgagaaggacagtgaggacacagaactcgagccagagcctcctcgatcaaaatctgcttctgcagcaaaggcctctgctgctgccaaaggcaagcagcccatggaagatccttcttctggtaatgtcccttcctctctttctggctgtcctcgattttattatcgtgacaatgaacgtgactggaatttatatgcaaaccgtaagtttgaaagtgagaggaactatgatttgcatgctcatcgtgtttatggtattgtaaagtttattcaatttcatcaatgggaaaacactctcactggtttcattggatacattgcaaacattgttaaggatttttatgctaatctcactgatgatttccttgatgagaattctagactttatcgaagagtttatgttaggggtcattggttctctttttctgaaaaggatattgctcaagctttgcaattgcccgagaatgtctccaatgcagtgatgtccatggatcgtgagttgatgcactctgaactcacgggtgctcgttcagagttgaaaccaggggagagtcttcgaatcactcacctcacttttgctcatgcttctcttatgcggtttgccttaagcaattgggttcctaattcaaacaagaccgtagtatctcaagatgtggcttcactcttataccgcatcacttctggaacttcaattgatttggcctcccacattctgaaccagattgtctccttccgaagaggtaaaaagccaacctttaaacttgtgtttccaaa

SEQ ID NO: 370167 - DNA, 635 bp, Cannabis indica
ctaaaaaaggccgaagatttgtgcagattgaccttttgaccagaggcggcttcaaagacatgtaataaggagagaacacgagatgcttcttcctccgttgcttgacaatacacataactatcgtccgcaaacaacaaatgggagatagtgggcgcactcctagcaactttacaccccgtgagaagatgactggcttcataatgtttaatcaaagaggacaagccttcggcacaaacaataaaaagataaggagataagggacaaccttgtcgaatgcctctagtaggaatgattggccccagcttcactcccccgtgcacaacatggtaacaaactgagttgacacaacccatcattagcccaatccaacgttcactgaaccccataacccgaaggactgcttccaagaaactccactccacgcggtcgtaggctttactcatatctaacttgagtgccatatagcctttcctacccttggttttccttttcaaatagtgcatgacttcaaaggccaccataacattatcagagatcaaccgcccggaaacaaaagcactttgagtttcagagatagcataatcaaggacgctctacatacggttggctatgacctttgaggcaattttgtagag

SEQ ID NO: 370168 - DNA, 619 bp, Cannabis indica
atattatcactatgttatttattttagttcgctatgtcatttatgtacatccacataaaatttatgtataataaatatatatttatgttattgctaataatataaaataactcagttaaaaaaaaattgatctcacggactaaatatatatatcgtaatattttatttataatattggtatttaaatttatttattaattcaaaaatattattcaaattaatataatggaaggtaataattcaatcctactattttttaagatatgaacatttggaataacattcaagacattaccattctcttactagtattaacctattccaaacagccctaagtattttatttaattaattaagtatttttattcttaaaaagaaaatataaagtgtagttagtggggtttgaacctttaccctctaacctatttaccaactaccttaaccattacgttactattatgtctataaatatcatcttttaatacaaatatatgttgtaactaattaaaatacatatacatttttttctcgattttttttcagggggcagctacaatgtgggtccgcccctgtatttaagtgtaaattactttaataataattctattttttttttaaa

SEQ ID NO: 370169 - DNA, 506 bp, Cannabis indica
aaactccactatcaatcctaagtagaaagagaaccatgaagaatattattaggagaacctttaaactcctccatcaagcatcaacaaacatatcagatttaacatattattttaatagacttaatacaaaatagaaatattgtatattaattagaaattagaatagttatataaaaaattagttagaaaaagagaaatttgttatataatgaaagcttttgtcaaataatctttttaaaattaagtagcacataattaatacattaaaataaaaatgaaaagtaataacaaattttatatcagtgaactaatgactttttgttgtagcaatgaactaattattttaaaaataaaagaaaaagagaaaatatgattgtttatatctagtcatcaacaatatcaaattataagtgtgataaatatatttagggtgattctacaatgcacctcttaaaaggaatgtactgatgcactcttaacttatttcggcattcaaaaaaattttt

SEQ ID NO: 370170 - DNA, 886 bp, Cannabis indica
atttctaaggggatagatcttaaatctgtcctccatgttcctaaacttacttgcaatctcttatctgtcagcaaattatctaaagattctaattgttgtgtggttttcgatgaatctcattgtgtttttcaggaccagagttcggggaagacgattggcagtgctaggatgattaatggactctattatttcgaagataaggcttctgaaaataaaattgctcaaggatttagtagcattagttctctttctgtttatgatcaaataatggtttggcattatagattaggccatcctagtttttcttatttaaaacatttgtttccagcactatttaaacggttaaatcctttgtcttttcaatgtgaaagttgtttattggccaaaagccaacgtaaaccttacattaaatctttttatcatccttcaaaaccattttatctgtttcatagtgatgtctggggaccttctaaggttaccactaattctgggaaaaaatggtttgttacttttatagacgaccacactcgtctttgttgggtttatttaatgagggaaaagtctgaggttgaacaaatttttaccgatttttacaaaatgattgaaaatcagtttcaaacaaaaatcagtattttaagaactgataatggaacagaatactttaatcacatcttgggaaatttttttaaaagaaaaaggtattttgcatcaatctacatgtcctgatactcccgaacaaaatggaatagcagaaagaaagaataaacacttgttagaagtagctcgtgccatgatgttttatatgaatgttccaaaatatttatggggggacgctgttcttactgcatcttatttgataaatagaatgcctactaaagttttacat

SEQ ID NO: 370171 - DNA, 795 bp, Cannabis indica
aagatcatacaatatgaataaactaagtcagtagtgtataaaagtatagaatttttaatatggaattaccaagtactgtttattatgcactatactctagtgagtgtgattttgattcggatcacatatatatgtagatagacatgtagtaaatgtaatgcgtataatttaattatacatgactggaccgatatgtaataacatctttcattaacatatcgtttatcatgaaagagttattcatatcacaacgataaccattagtagattagtttgaatcttgagtatacatggattcatatttgtgttcattgattttttgattcactcgttaaagtttcttagaaatgatgattcttacagcttctgttttgggagcttgataacatgagtaactagaaacaagttatacaataatagaatctaagatttctgagaggattgaatactaatttccttatagtgttaattctaagagtgttacagttagatccaaatctataattggattatagattaactgttcgcattaaattaatggtacataagtaattcaagagacaattagaagggtaaaacagtaattttgatcaactataattatgaactaacaattagagggcgaactacttatattgattatatcaatagactacaagtaagaattctgtaaatataattttatattgtcaaatagtataatttcatatttatagtggagtaataatgaagttaataaactagatcattctattgaagagttcaataatagtcaagtgtttattagagcttcga

SEQ ID NO: 370172 - DNA, 686 bp, Cannabis indica
gttatgcgtgttgttatcgatgtgatttaggagcctataattcgctgagcagttgttccactcaggttgaccagcacacttgaattcggaattgaggtaagattagtataatatcatacatatgttattacatgtttagcgtacatgttgttattgcctgttagattacattgatagcagtaatagtatacatagagttgtactgacgacagatagatgtatgttggctaagatactgatcgatactgtcacatcaatatggctagagtatgactagcatattgaatataggctgacattatgggcgatattattctcttatgaacgttctagactaagtaccgtgtgggacacggggattagggttatgatctggtgtatgggcgccagattataacctgggttatttgtatgtttatgttatgcttttcttattgggtctgtcgactcacagtgctatgtttatgtgtaggtaagggcaaggctaaagttgaggatccgtgagtacgagcagatgaagattgtacatgtcggggcggtcaggcctggagcgtatgatttttggggacattgaggattttgctatatagtcgctgggcgaaaaacttttgtatatgtgtatagcaaacttttaaaaagtattttgtaaacaggatcccggagttttatatgtgtaatactttaag

SEQ ID NO: 370173 - DNA, 130 bp, Cannabis indica
gaaacgatacgtacacttgcgtgtgcaaaatatcgcaacaagtttttggcgccgttgctggggagattaaattttgttctaatttggttttcttttcaatttgagtactaactctgtttgtcttgagatc

SEQ ID NO: 370174 - DNA, 534 bp, Cannabis indica
cgccacaggctgcccaagctactcaggaagcgcagaattgggaaaacaggtttgcagaaatgcaagccagaatcgaggaacaagataatgaaatccagtgattgaaacagcacgatgctcctgcagtgcttgctccagaaattccagtggcacatgcccctgctgtctaggccaaaccagtgattgcagtgaatcggatggaacctctgtatgaaaggttccgtaaacaagcacctctagttttttctgggaggtccggatgttatgaaagccgagcaatggctaacagtgattactagaatcttgaatttcatgggcgtcacggggaacgatagagtggtctgtgccacttttcaattccaagaagatgccttagtttggtgggacatggtgtccatgatacatgatgttactacaatgacctgggaaaagtttcaggaacttttcaatgcgaagtattataatgaggcagtcagaagtgccaagagaaaagagttcattcacttgaccgagaagggaaacatgagtgttaca

SEQ ID NO: 370175 - DNA, 602 bp, Cannabis indica
aacgtttccatcgccttaattacgaatcaatccaaccattggttcttacgaattcgaatcgtgtgcctccccagccgttcgattggtaggtgatggaacctgttcctcatgcacttttgcctctaaaagccaccacctttccttcatttggttactttccatttttcgccaactttgttcgaattttccagagagaaaaaatcctcagaccaagaaaaaacctttgaacactttgcaaatttctttgctaaccttcactcactactgtcaatctacattcccttgtttgatcaacaacaaaacccccagttctaacacttcattgtaagtttctcgcatccctcactttttatggcatgctttactatctgtttgtttttctgggtttgtgtttgaagtttctgggaatgtattctcttgagtttttatgtagtaggtttagatttccctctctggggttagggttacacttgttacacactgtttgttatattttgtgaaggaccatacattcttcgtgtgatggccttcgagggctcagagaagacttcgtttttctcgattttctgcccttctttcttttcttttcatgcgcgatgtca

SEQ ID NO: 370176 - DNA, 724 bp, Cannabis indica
actgggactagcacccgaactcgaacccggaccaagactgagtacgaaacttggagtcgaacccgaattgggacccaaactcgaaccaagactccggacccaaacctgaacctggaccaagaccaagaccaagacctaggaaccggacatagatgggggacctaggccccagaacccagacccaaatcgaaattcgggactcaaacccgaactaggacttgacctggacccgagaatctgaagtcagacccagacccagacccaaaacctacatcgaacccaaactaggataggaacctggacacgaacatagatcaaacccgaacccggacccaaacccaaaatcggacccttactcgggacctgaactcagacacagacctagaatcatacacaaacctagacctagacccggacctgaactcgaacccaaacttggatcgaagcccaggacttagacccagaactgaacccaactcagatcgagaatggaacttgggactcagacccagacccggacctagacccgaacccacacccggagcttgatccggacctacaccgaaatccgaacctgaacccaaactgggaccaagactcgaaccccgacatgaacttgaatccaaactcaaactgagaatttcaactagaattggaacttaactacgactaggacaaggacctaaacccgaacccgacccagataaaatcaagacaaagaccc

SEQ ID NO: 370177 - DNA, 661 bp, Cannabis indica
actgcgattccacgagcttggaatgccgaaagcctaaaattctattatcaatagtactcgcattgcctaatttgtattcgccttgtacttatacttagtcattttttattaaaaaaaaaacctaagtatagggggtatataccgtaatgtactattgattatatgaagaaaattcttggaaattcttcaagtaattcttcaagtttaaatttcaatttaaaattttccaagtcttatgaaattttctacttattacaccaggttgtaattaaagtcgaaatattatagatattaaagcgcgagtacccgtgtactgcgaaaatgctaaaaacagatatccccgcgaggatatagagttgttcaaaatgaaatgcaaatttgtctaagtacagagtgcgagtacccctgtaccgcataaacaaaaaaaaaactaaaaaagaaatataatttaacacaagcaaatattaaaggaaaagtcaagcattgggagcagcaggaacagatccatccgcgactttgctgaccgccacgttctcaacttcctcaacctttgcgacctcagtctcctcgagaagattccccccaccaccttgagttggcatgggcgacatagcacgaaaagcctcagccatttcagcggcttctgctccaaggattgaaa

SEQ ID NO: 370178 - DNA, 764 bp, Cannabis indica
atataatatgactatatttaaaatttgaggttccaaagcctcacctaagcagtgcacattaactatcggtggtggtaaaaatcaatgtaccgaaaacgtcatcgaaaataggagtagtatatatcaaaatgactacctcgacgagtagatcacacccatgacgaccgtttgtcaaaacaatacacgatgtcgtcgaaatgacactggaaaggggcagagctacaaaaatgtcactgaaaaaagtagcgagttgggcaaaatagcttagtgtggattgttctcctcgtcgagctgagtctagtggtgaagacagctcgtcaaacggacaccggagatgacccaaaaattcgttcaaagtttgaactgccaaactttaacttgcgatctcgagctaacaacggcgacactacaagaaaaatgagcattactgaggacaaatttcgttggtaaaaacccctgttttcgtcagtattgagcatcaatgaggacatttcgttggtaaaaagtcgttgggaatacttcgttgggaaaaacgattattaacaacgactttttaagtcgttgggaataaaaattaatcccaacgacaatgtccttgggaataatatttgtttttttttttttaaattctgagtgcatcaacaacgacattgtcgttattgataataatatcaataacgacaatgtcgttattgaagatcttctacgaaaaaaataaaaaattatattaaattatttgtaattaattatttatatatattatt

SEQ ID NO: 370179 - DNA, 596 bp, Cannabis indica
aaataaataatactataggtttatggattttttttatttttttttacaatttatatggtttttttatgtcatatttttgtaaaaaaaaaacggaaattccacatttttaaaacaacaataagctttgccgaaaaagtcgtcggcaccggaaaagctactggaaaagtcgacagcaccggaaaagttagtgtcgctgtaaaagttgccggaaaaatcaccggaaaagtcactttcgtcagaaagtcacttgaaaagtcacaagaagtaaatgtctcagatatgactaaaaatataaccggttctgtaaataaaaactaataactcaaaccggttataattgaaatataaccggttctataacataataaataaaaataaataacataaaaataactcaaattagttataattaaaatagaaccggttccataacagtgttataatgaataaaaaccaataacacgaaataactcaaaaattggttataactaaaatagaaccgattatataacataatgaatacgaacaagtaacacataataattcaaaccgattacaattaaaaaataaagtgaaaatcagttcctaaaacccta

SEQ ID NO: 370180 - DNA, 816 bp, Cannabis indica
actaatgaacataaagacaatatttcaaaaacttaatttaatttttctttcctttgtgaaatataactatacgtcaaacttgtattaatattccacattttttaatttccgtctgtcgttcattatataccatagcacattaaaataatataccacaatcttaatatacaattgggacggtgcccggtaacatggaactcggtgtttggctcagtaaaatcacaacttattatattagtagattgggacggtttattagacattaggaatgttgggattggccgggaatttagaatttcccaaaatacccctttagtgttatttatgtattttagtgtggaggggaaaattggtcattttgccccattattagtttgtcctttagtggacttagtaagtggaataatatgtgttttattatgtttttttggctgaagtgaatggtttatgtgcatttattttcattttccaaagtttaaaaaattagaaagttagaaaaaattcaaaggaaaagccatttcctctctagcttctctctctctttcggcctctttgtgcagcaaggaactttggatttttccttgtgatttcaactctttttggtgttcaaatcaagctaggttagcttctaatcatttcttcttaaagtttgttgaattttgatgaaaaatggtgtaatgcatgcttagtttaggttgttgttgttgctgtgattttgttgttgtttgcagagatttatacatgtttatttgagttgaattaagctgcttgtgatgcatgatagttaggttgattagagttatggtttttctatgc

SEQ ID NO: 370181 - DNA, 518 bp, Cannabis indica
agatagtggcaagctatccaaatcccacaatctatgtattctaaatatgtaatatgtgttcttaccaactatagacattgtaagcaaaagggaaaccttccctcaagcatttagccctataaatagtgatccattctcactaatagaggggtcgagagaattagtcgagagaataacttcatagaaatctaagagagtatacttagagatttcattgtgagagcttcaagagaggaaacactgtattctttgttcttgagttaatacaatccaaggggagtaggctattactgaactaatggggccaaacctctttaaaatcttgtgttcttactacttattagtgcatactttactttaattatattttctatcgcttactatttgactcattgtcgttggctaaaagcgaggtcaatattttgatgctttcatcgagagcaataaccctagtttgctcttttctttaagtttaatcagacacttaagatggtggtgcaaactcgcagaggcgtggt

SEQ ID NO: 370182 - DNA, 519 bp, Cannabis indica
taaacctgattatatgaaatggattttatttagggcacaaaaaccaacaataaaccccaaaggaacccctacacaacctctcaatctccttagtaacacattgaggtaacacaaatatgctcatctagtagtttcgaagtccaagtaacacagagtgaattaactgaatttttccagcaaacgaaagatgcttacttgcccaattatgaagtctctaagtgatcttcttgatgattatgccacaatcctcggctttccacttagtttgtctcaagggaatcccaagatatttcatcgggaaactgccttcaacaagttttaattcttcaagaatgctgtgtttattcaacggattgactccaccaagaaaaatttgagacatgtcatgatttatgtgcaaccccgaagccttactaaactcctcaagaacctgttttagagctgctattgactgttgagaaccattactaaagatgatgagatcatccgcaaagcaaagattgataagccttagctttt

SEQ ID NO: 370183 - DNA, 550 bp, Cannabis indica
ggttctcttctgggttctggtcctactctgagccccagatctagacaccgactactggtctgttccaggccctgttacccgaatcccgagtcaagctttggatcactgtcactggtcttggcctggttttggttcaggtcccaggtcccatttctgagtttgggttaggtatcgagactggggtgcggttctatgtcccgaccctagttttgtgtccctagtctggttccatgtttaggtctgagttcaagtttaggttcgtgtccccagtccagttttgggtttggatccgggtccggctcccaattcgagtctaggtctgatttggagtccgggtcctcgtctggttacggctctggatctaggtccaatttcagttatgattccaagtacaagtcctggttccagtcccagtcaacttccggttttggttccaattttgggtcacagggtttgggactgggttcaggtgtgggtgtgggttggggtccttgtcagggttcgggttcagggctgggtcccaaatccagacaccgactacgggttttgt

SEQ ID NO: 370184 - DNA, 867 bp, Cannabis indica
gaaccaagtcccaaacccaaaaaatgacccgtacccgtaccttgtgaccctaaattgcaaccaaaacaagaagttgaccgggactcgaactaggacttggactttgtatcataactgaaattagacctagatccaaaaccgtaagcagaccaggacccggactccaaataaaacgtagacccgaatcaggagccggacccggatcccaacccaaacctggacttaggacccgcacccgaaccttacacagaacaagggtcggaacctagaactgcaccccagtctcgatgctgaacccaaactaaaaaacgggacttgggacctgaactagaacaacaacgagacccgtgacagtgatccagatctagactcaggattcggtaaacggggcctggaatagaccagtagtcggtgtctagatctgcgactcaaactaggaccaaaaccaagacgatgaaccaaacccgaacccagacctagacttggtaccaaaaattagaacctgaacaagaatcgtggaaccaggaccgtataaagatactaggaccgtgaccaggactcggacccagagctagaattgaacacagacctaaccttagaaccaaactgagattggaactcgggccaagacacggttgtgtcccaagaccgaaactgagacctggacctggacctaaatctgggacccgatccaaaacacagactttgacgtagattgggacccggatacgaactaggactcggacctagacccagactgggatcgaaatgattgacttagatctggaccgagatcctgatccaaccaaaactttgacccgcactcaggacccgaacgtggccttggagccaaacctagacccagat

SEQ ID NO: 370185 - DNA, 608 bp, Cannabis indica
tttaatatggaaagtttttagtaattacacagtgtaattacattcaaatctcataggggccatgagaattggagagtgtaattggaacccttcaattacttccaattacacagttacagtgtaattacatagtcagacaaacatgcaaaattgtgtaattacctccaattacacacaaatccaattacattgtggctttccaaatgcacccctccaactttacctttttctcttcatctcactaacccactcacaaatctcattctcttcactcatttcctaattaaataatactaatttttcatataaagtacactagaagctcatataattttaggccagttccgctctgaatttttttttttcttttttcatgagatcaaagatcttctctttttcttctttcgcaaagatcatcaatctcttcctcttctcttcctgattattgttatttttaatgatagatttgtttgtattgtcgagttcctaagtggttagattgcatcagttcacatatgcagtggacatttaaagaagcagtaagagctcgctggagctggatttgtttttattttttggtttttatttttggttttaataatattcat

SEQ ID NO: 370186 - DNA, 407 bp, Cannabis indica
atatttagagaaaaaaaatgttaaagactactttcataattaggacttgccaatgaaatattaaaaaaaggttgctattaattaaatcatacaaatattaatatattatgaacattgaaatattttaggagacaattatcgcatgagtgtcactaatatcttattgtagggatatacatatagtaagcatatttaatttatttttgaattttttttaacaatttacaaataaaaaaaaatataaaattgaaataaaactcaaatgcaagttaatgtttaaatcttatattattctaaattttatgaaaaataattgaaatgcttggtgtaagcataaaattacaaaggaaaaaaaaaaaaaaatacaaaaaaggaaaaaaattacaaaaatacttgggccggcccat

SEQ ID NO: 370187 - DNA, 523 bp, Cannabis indica
agtcgctatctccttgcttcaaaacttccaccacaaactatgtgatgaacaagctagagttcaacatgactcaattgtcgaacaagttgaacatgtttgagaaccttaataaggataagtccaaggaaagggaatcaaacattgttgaagtgaaattcgactctccttcttcttctgataagaaaagggagtggaacagtaaggacaacaacggtggaaagcccaaaggtaagaagtcacccaaggctaagaagaacaaagccaatccaaagtccaaggacaagaaggctaaaggcaagtgtttccattatggtgtaatgggacactgaagagaaactgtaacaagtatctctccaagcttaagaaaggtaaatgtgatttatttgttcttgaagctaactcagtggaggatgataaatccttatggattgttgattctggagccactaatcacatttgttcttctatgcagatacttgaatcgtcaagggagcttgtcgatgggactatgcatgtaggggaa

SEQ ID NO: 370188 - DNA, 709 bp, Cannabis indica
ggaggatattatgagctacattccaaagaaatattttgattttacttgggatacgaagctgccatattttattcaacttactttcatcacggatcagagaatagtaactatcgttttgagcctccataataacacggtatcctaacttaacaaaataattaccagaggaggtgaaataccataaagctttattaggaatatctctacaactcagagataaatctagaatgagattataatcaactttccaaaatattttcttgagataatcttcattccagcaccaatatttaatgaaatcagtcacactccatagagggccaagaccattaaggcttgtgaaaggctgaaaattagctaatcgcgaaagccaaggatcagtacgaggatgaatttgagtgccatgaccaacccactatctgtgtaacaccctactagtgtaggcgtgttaacgtgatttttaacttaactatgcagctcgttgctaatcgacgagtttattgaaaatggcaattaattaaaatattagttaactaattataaataccaaaatcgaatacttatattaagccgggatcccgtttataaaagtgtttacaaaagttttactgtgcatatacaaaagtttgttgcctagtgattatataaaataagccttgatgcccaaagaccgtacgctccaagcataaccctcaagatttcatgtccg

SEQ ID NO: 370189 - DNA, 505 bp, Cannabis indica
taaggttggaaaaataaaaacttttggcattataaccccatcgtgaatggggcatccaaaacttatgcaactaaccgtcaaattccacgagccttatgctagcataatcttgaacataaggaacatgatgaataatcgatggagacatacaagttccgaaagtgctggcatcgggagctctagagttgggaacctagaaagggaacttagggcggataggtgcctgttctttcccagcttcctcccgaaggatcctccctaaagtagcttgggcgttgatataggccaactcatgttccttcttgaatttatacttcttatatttgttttctgcggaggagatgatgtcctctcggagcgccttctcggtctcagggttgcgaatatgagggcagagaaccttggacaagttgaagtcatccaccgactagccttcaaaaatcaaattggccatcctgcagttaacggtctgttggaaattattgtaccaggatcttagatctac

SEQ ID NO: 370190 - DNA, 940 bp, Cannabis indica
gccttgcccttacctacacttaaagatagcattgtgagtcgacatactcagtaagaaaagcataacataaaacatataaatatcccgggttataatcaggcgcccatacactcaaccataaccctaactgagtcaggaatgttctcgacaaagtatgattaactgcgaatccagcctatactcagtactctagtcatactgatgtggtagcagataactcatactatagcctagcatatatctgttggcatctcagtgcaactctatgtacacctcactgtggcctgatatgctaatctgatggctatagatttgcctaacatatatttattggtatctcggtgcaactctatgtacacctccccgataccctaatatgttattctgacgagaactgagatgtacgctaaacatgtataaacatatgcataacattatactaattttacctcaattttgaattcaggcgtgccgatcaacctaagtggaacaactgctcggcgaattataggctcctaaatcacatcgataacaacacgcataagtgactcgctaaatcacaaccgggactaaggtttacaaccacaaccctatctactgcacttaatataataatatcccaaactagcagggaaatcaactaattagaaacctgaaactgacacgaaacggcaagctgaaaaaccagttttctccctgctgcaaaatttgggtaaccggttttaaaagcagtgtaaaaccgattacccagaaaaccacaaaattcaaactctaaccaaatcgtttccaaactcaaccaaactttccagacctgcatattataccccaataaacatattccaaggacaaacaacaatcaaagctcataatcaattttcaccattaatgcttcaagcttgagttctaaaactcaaagcttgcaaaaaccttcaacaactac

SEQ ID NO: 370191 - DNA, 613 bp, Cannabis indica
actaaaaccaactaaaatagatatctatggaagactccaattgagtgacatcattaaatctgtgaaccggcaaaatgtatctagtgacagtgacttttatagagttctaaaccaatgtaaagtgggcgataagataaatttttattgtgctaactcatattaatctaattatcttcttataatgatagttctacaacaaagttggaaaatttttaagggaattcaattataactccaaaaggtttagagtgtataatatttttctcattttaagatatttattttaactcattaactagttgattaagcaagtcaaaatgtcaaagcatatcatgagtaccgtgaactgtaaaacaacaatttatttttaaaacttatacatatttgcttatacctgtagcatatagtagaatatgcttgtgtctttggtgacttatttatttgaaaaatgagccaagccttatgcttaaaaattatttagatttaaaatgtgctttttaaactatgatttttcatagggatgaaactagtttcatcaggttcacaggttcgatactagttttacatgttttgagagttctataatggggttgttctattttatgatgttatt

SEQ ID NO: 370192 - DNA, 594 bp, Cannabis indica
cgaaaagacattgcccgagtctcccgaagacagaaaggtgatgaattcaactctgactgtgaagaccgggagccttgtgccaggcacattttggaagcggagctccccaaaaatttcaagatgcccaaaatggtagcttatactgggaactcggaccctagcgatcacctatcacggttcaactgcatcatgacagtcatgagagtcagcaatgacgccaagtgtttatgcttcctgcttacgttaagcggatccgcggaagaatggttcaagaaactggagccaggattcgtggactgctggactaagctgcaaaccagtttccggaggcagtttgtcgccgtaagaaaagtcaacctagaggtcagtgccttgactaacatcaagcagctgcctacgaaaacattgaagaatttcataaagaggttcaaggaagaagcctcaaagaccaagaaagtggatgacggacaacagcttgcccttcttcaagcagggatccgtacagggactccgttctggaacgagttatagcaagaaggagcctccaaccttcaagacttctagaaaagagtccaaaaatacatcaacttagaa

SEQ ID NO: 370193 - DNA, 946 bp, Cannabis indica
gtaaagggttttatttagggcacaaaacccaacatcgactggctccccagcctcgttgtactccccgtagtttgggggttcaacatctgcctcttcctccacctcgaaggaactaccaggcgtacatcgtcctgctcctcgatctgctggacctcagcgtccccttcatgatccccctccatctggacggcttgatcctattcggcgctgggcaaagtggcgtgccgagccacttgagggtcagatgcgtcagccagacacgtggttttctttgtacgagccatcattctatggctgagtacaggagtttgaaaatgtccttcgctagaggaaggtgggctagaacgaagacgaggatgatcctcgtgcagaagttgaagcaggtcctggtcgatccgatgtccgttttcccaagactcacctgagttcatctgcaaaagacaacacgcaagatgagtgtttggtcagaatatcgaatgataaacaagcaaatatgccaaccaggagtactcaacagattaaagaacgagaatgttcaaaaagaagtcaaaactcaagaattcaaaaaatttctcgagttaggggaaaaaagttcctgaagcttagaataagcaagatgaaagacagacattacacagttcagaaacaagcattatgactgtaaaatagcacgaaaacatgataaagaagaatcgcagaagtttctggacctagggtttcctagacatcttctacagcaaagtcgaaggtgcattcgaaatataaacatgcaaagataagcataaaggaaatcagaaacttactcgagagtcagatgtctgggttcgagcaacgtcaatccaacaagcagtttgtatgaaggcatttcggcaactttgaagcaaagaatctctcttttcgctctgaagcttacttagcaaagaagggtgatgaaaatgagtttatg

SEQ ID NO: 370194 - DNA, 627 bp, Cannabis indica
atcatgattatattccactgtgctgacaacactataatcacgaacaaatacatatgttctggacttaatagaatttatacattaaacaatcatgaaataaatcatgtgaaccatgcaacataaaaagtgatttctgatctttattaattagtaaatctgattatattgaaataggttttatttagggcacaaaacccaacaaagagatccaggagcggtgagacgaccccgtccagagaaagggcgccgaccgaagcagttattgacctcttcgaggagccaaccgtcgtggacccttctgccccaaaaatgactaagtccaaagactctcgaggaaggagctcgaacaggcctgaacagccaaagggtagatccgagctagtcaggagcgaagccgaacagatcagggcccctgccccacctccagcgctgcatccggagactaagagaggcaaagatatgctcacccactacataaccaagtcagtccctgaggtgaatgagcagctggtcggagctgacaatgagctttcgctggagctggtgatgagaggagtcctgaagtagttcacaagggtaagtcttccttgatagtttccttttgtccttctttacttagctcagatt

SEQ ID NO: 370195 - DNA, 505 bp, Cannabis indica
ctttgacaatgattagtagaagatgattccactagactctcaattttaactgattttatagttgggattgtgagaatgatgaatttgaatttcttcctcctgaatctcttaaaacttctttctctcaatgaaagcatcaaactgttgacataatttttcgtaaacttaatcttagaagataattaattagagaataaattcaaaaaaaataagagacaaaataataaatgaacactagatatttttttcgtggttttgtagttaaaatctacctactccacgaatctattatttttgagttttagttgtgtttacaatttggcagagtttatgtcaatcagaaattgcctcccctttttcctttgagtcaatccctatttgtaagaatatgatagtggtactgcttacttaaccttatcttagtgaaaagttacaattaatggtagttaatgcccatgtttcacatataatagaatatttagataaatataaataattatttata

SEQ ID NO: 370196 - DNA, 1029 bp, Cannabis indica
aagaacacaaagttttttacgtgattttgcagtttaaattctgtatagtccacgagtctatcttattagatatttttgatacaattctagggctttttctctgaaggattttccttcccttttttattgtaacctgatcctatttatagttacataggagggcagttaattacaaatcaaactaatatcttacaacaataatcccctaaaattatgggattttattacgtccgacgtaaactaaatgcagttattatttaaaaatcacaaagctgtgattggtctacttttatcgagtcaatgcatgtgtactaaatacattgtaaagtgtattgctctgggacatctcgctggaaaaatagcaacaataaccctgttagcgagctagagcttttcccatgtcttttcaaggttgataatgtaaatctcgtcgtttctgtgcttgaagacataatgctccatcaatcgtagttcttggtgacaagataaacctcagcagtcaacatcatttgaatgtcaacttctatctgagagatctgacttgacagaatagtgagtctcattgaaagatgtatgaagctgattagtgaaggtgccaggagtatgccttcttataacgagatggatacctcgctattcgtcgttcaagttcatccaactattatgcttagtttgtataatgtatattatacgctaagtgttctaacagttaacatgtgtcacttacttttcttcatgcgtagcgaggttggtgactcgctttgtattaatgatgtcatccttgtgatcatatcttcatatacgaaataattttctcgtcaatacgtgaattaatagtttgtacatctatgtctcgctcaagacttttcagccaacgagttatagatatactctaccagttcagtatttaatgagttattctattttaacattttttaatataattactattatatttgttgatttgtattctcccaagttgacatgtgtccttctctgaagtgtcacccgaattttgagtataacaat

SEQ ID NO: 370197 - DNA, 504 bp, Cannabis indica
gggttgggatccgggtccagctcccaattcgggtctagctcttatttggagtccggttcctggtctggttacggttctctatcaatgtccaatttcagttatgattccaagtccaagtcctagttccagtcccggtcaacttccagttttggttccaattttgtttccaatttcgggtcacagggtacgggtttggctccacttttgggtttgggactcgttttaggtccgggtgtttttttgggtccttgttagtgttcgggtcccaaatccagacaccggctacgtgttttgtccaagacctaggtccagatctggatcccaatctcgggtccgtgtttggttccatttctggtgccgagtcacgagctaggtcctaggttcaagttcggttctgggtcgtgtactaggtcccgatcctaattctgtttcccaggtccctatcctgattctgggtccaggtccttgttattgtggggtttgggtccttgtctaggttcgggt

SEQ ID NO: 370198 - DNA, 537 bp, Cannabis indica
aaaaataagataaataattaagcaaaaaagatagatatttactaaattcaaattaaaattacactaatatcatgaattaaattaaaaaatattaaattaattcatgaaaaagcatgaaaaaacgaagaaaaacgaaaattttgggagctgtacggacagtatcatactgtccgcgcgcgcgcgtccctgggtgacagccgagagacctcggcggaacaggggaatttgcagcctctttgcgcacgcgtagggttcagacatgagatccgcgcgcgcatgaagggttcaggcagcaatcttgtctgaatccgcgcgcgcgtgagtgtgcacagcccccttatcttttttcgaatcttcaaaaaatcataactaattcaaattaaatcgaaattgagttctgtaaaaagtaacttgcttaattgtttccatactatccaataaaataattccagaaacagatatacaattatttttcacgaaaatttacaaacaccaatcaatcatcaaataacactcaatacaacatgataccatcca

SEQ ID NO: 370199 - DNA, 981 bp, Cannabis indica
ggtacgtattctgaaagcttttcatttttattttcatatctctgtgccgcccagaggcaatgcggggggaataattttagcctggaaggttggtttttgttttgaatgtatagcttcctctcgtaatcatatttcgggcttagtctattcggaccccccaacccacccttggcttctctcgtgtgtgtatggtcctccctacaaccatgcaaagaagcaattttggagcgacatcatggcgttgggggatagatttggaggtccttggttgatatttggtgataccaattttgtccttaatccctctgagagggaggggtcgctgggtcgtgacccctttatcccgttcatatctaacctggtagagtctcggggcctaatcaatatgcacattaaaggagacatgatgacctgggacaaccaccggtcgggcgagggccatgtgaagtcggctttggataaaggcattattaatgaagcttggcttcatcttttccccaaagccattctctgctcgatccagaccagtacttctgatcatagaccgctatgtctcgatacggttgggactgtgcccaagttcaagaagtgcttcaagtttgaggaaagttggacgagggatgaaagaagtaatcttgttgtggccaacgcttgggattctgtgcgccatctttgggctcctgcccgagtttttaaaaagataggagctactagagtggcgctccttcattggaagagaacgcaatttgggaaaattgatgaggtaatcaaagatttggaggttaaacttgatagaattcagatgttgcctgctggttctagagattggagtttagaatgtgatatcaaacggagcctaaatgaagcaagaaccaggaaagctgtttactggaaacaaagggcgagaattgattggcttaaggatggagacaaatgctccaaatttttctttctctcggctgctattagaggaagaagaaa

SEQ ID NO: 370200 - DNA, 523 bp, Cannabis indica
aagtttactttcattttgtgattaaaaaattagaaaataaaagtgttaccaaacggcacctataaaaaactgaaattttaacagtaaaacctattgaacttagtagggttgagcattggtcggtttggttggttattttatataaaaatcaaaaattcagttttcggtctggattggtgcaatccaaaaaccgaccgaccaatccaaaaaaaaatgatctaatttattctataaatacattattctacattttacaactacaagcatacacattaattgttcaaaaactaattaattatcttattcttttaactttaatataaataaaaacataatatattatttttatatattattagtaactataatacatgcaaactcctaaattctaaattcagtacatttcaattaatcctaatttttgacggtgcttttcaaatgcagttcatgccaagaccttggtgaatggatcagctaagttgtcctctgtgtccactttctcaactagtacatcccctcttgc

SEQ ID NO: 370201 - DNA, 749 bp, Cannabis indica
tttaattaatatactatcataaaaatttaaaataatttactttgtctaatatatatacatactgatcaagcatatatcgattcttcaatataggtacccaacaagtttctctatcaagttgttgtctccctaccgaccagccgacaacttgcccttaaggaaaatacttctctgtacaatcttaatgtatcgacgaggtatacttttatgatgatctgtcttgctacatgttacaattttgattgcatgtcatacaacccaaaatttgggataacaattatattgtgcaattgttgatcttaaaatataagggtagcaattcgatcattctgtacatctgaaaaatctcatagttattcaaagttatcatatactatctaatttgaatgagatcagcgataatcgagatcatttagattattttttttgtgcaaaactttttatctatttatcatgcataattttctttgacaaagaaccataactttttatttgaatattatttattaatgcatgtattattttattgttcactataataaattaaaaccttataattgttatagtatattccataagttattgttttaaaaaaaaacttattaaattaatttaaaagtttaatttaataataaataatgaaaaaaactcatgtctttacaagggtagcaattcgatcgtttatagtacatttgtaagttaccttataattaaagttgtcataaacaataaaatttggatgagatcga

SEQ ID NO: 370202 - DNA, 582 bp, Cannabis indica
aaaattgttagaaattatattttcattctgttacagttaaagtttaagttttcccgcttttatctttctagtaatcccagattagagagattagtgttttattaatggttttcgtagtgtgcctaattgttagggcatcacagtttggtatcagagcgctaaggttcttaaacttcctgtaaatcggttgaacatgtacaatcattgtcagagacaagctcggcttgtggtgtagtaagtgttgagagtaaatgcttaactgcttatgtgattatgtatttaccgctttccattttaggcaatatgtgagcatttagtatgtgatatgaaactatttttagtgcattaaattgataaatgtttatttatatgaaatgaaatagttgagttagggtttaagggcaataagtgcataagtgtggcattggtgtttgacttgtcgatgttattaattacagggttatttgtgaaaatggacccgccacaattatttagaccacatggcgggcaagtagagcctgctgtagaccaaaccaatccaccaacaccgcctgtgcctccgtagaatctgggggataatgc

SEQ ID NO: 370203 - DNA, 525 bp, Cannabis indica
ttatatccttaatttgtttgtaatttttgtttttagaaataaatagaccaaaatttgttcaaatcaaaaataccaaccctatcaataatactaaattttggaatgtaaagtaaatgaaatatcaaacgactagagaaaaaaataatcaaattatcaaacacaagaaaaaaaaaaacaatcaaattatcaaaccactagaaaaataattattcatatgaacatttaattcatttttttttttcttattgcagtaagttttttccattgaaaaattagtggtaaacttcatgggtgacggagtaaaatcttctaatttaagtatagtggtatagaaaggaaattaacgagttttaaagggaatcatcctatatattatttttttaatttttttttatttttacgatttaagtttgggttgctacagtggttgttatgtaaatttgggttgcgatttaggttgctacgttagttgctatgtgaattttcataaaaaatgaaaaaaaaaaaaaaaaaaaccaaaacttt

SEQ ID NO: 370204 - DNA, 917 bp, Cannabis indica
gtcagattattcaagtttaaaatggtagaccaaaacattgtatgctatgtggggatgataatgagcaaattgactatttattttttgaatgttcttttagccaaaggtttgttcaaatgttgaaagctcttcttgggtggaatgtgaatcgcaaccatctatcacgattagttaagtcgattaggagagctcccatatcaaagttttggaagttggtattttcgacgttttgggctgctacggtttactcaatttggcaggcacagaacattgctttgtggcaagaccaagtgagcaagccaaagttactcatacaggatattaatcggaatgtaaaacatagaatatatagacttactccaaaataaaataaaataaataaatagcataaataaagattggtttgatactttgtaaaagattctttttgtatgtaaaatatagtatttaatccattaaaaaaatagtatataaatgtgtaaaattataaagatattacacaaattataacacttgtaaataagtgtataaatgagcttaataaagagaattgttttttttttctctattatttaattaagtgaatgttaattggaggagtgttacggtcattctcctgttacaacctcttagtcaacttttatcctgaaaacatatgtcgaaatatattgattttgcaaaaaaaaattcacatgggtgttcgttatgcttacaacatcttcctataaatttttgaaaattttcgaataatttacagtgctgaaaatacgtttgaagttttttgaacgcacgtggtaagttggaatatcaggaactctgttttcggtacggtaaactatttagaattttccaagaatttataggaatgatactgtaactataacgaataccgctatgaaaaaagatttaaaaaaaaa

SEQ ID NO: 370205 - DNA, 618 bp, Cannabis indica
gaataattgcggcaaaagtccccaagaacttagagttgatgcagattaatccccagcctcaaaaattggcggtaaggtcaccattttcgttagtctgttggtccctctttctaatagacccgtttactaattaaaaatacaggtgtcaataaattattgatccaaatcatatttttaatttaaaataaaaaactaaaataaattatttaaaaactaaaacaatttaaataatttaaaaaattaaaaaactttaataattccttttaattttctcttttcttttattaaaattaaaaactttatccaaaaattaaaactaaaacatataattaatcccaaaccccacccacccgattttccttcttcttcttcttccaaccatagctttcttcttctcctccaatttctcttcaacaagaactacatctatggttggcattccaactagcataaatttctctgaatctgaaccttccaagccccgccaatcttcctcactcaaaacgactatgcatgcttcactctcgatctccaaggccacaacagattcgacattttgaaatcattcgtgtaaagcccgcttagttaatttggaaattagcagttatttatgttaat

SEQ ID NO: 370206 - DNA, 692 bp, Cannabis indica
tcacttgtttttttacaagtatacttttttatctgttcggggtcttgggttcgaccaaaacttttatacgcactggatggtaaattagcaacatgttagtaatttcaactcaatttgaattttaaaataaatatctttattcatttagtgatcgaaaatgtgtttgttaccgtagtaacttacatcggagctattgatctaatatgatcttttagcttaacatgaaataaaacaaattgcagaaattagaaattgtactttaaatggtggtcattcgacttgagtactttttcatttttgttgaaacctttgagcgtagtccgcctagcaggccattcacttaaaagtaaatgttctttcagtacttagtatggtcgtccgacctggtactttattggtagtattttcttaaatgttccccattccaataccgtggtactagaacaagttgcattttctcatcatacttacctaatttgtatgctccggattcgaggacttcgaccacctaatacggtccttcctagttaggttctagtacacctgccgtattatctttgttgtttagaaatacccttcttaggatcatatctcgcacaaggaatttctgagccttcacttgtttattgaaataccgagctactttttgttgatgggctgtcaactttaagtttgctgtggttcgcttctct

SEQ ID NO: 370207 - DNA, 654 bp, Cannabis indica
agtccaaacatttgtacactttaatgactaatgagtttgaaatgagtttaaaataggtgaaccttactttcttttctaggactccaaataaaacaactagatcatggcacattcatttcacagtctaaatatagtcaagtctatgttagataagtttggattctcttcaggtcaagcatgctagacacaccaataggcaccacgtaccaaattgtcacgagattgaagtctggtgaccctgtagtaccacactctatacagaagtatgataggtggcttactgtatctctacagcaaagtcgtcctgatatatcctttagtgtaggtttatgtgtcaggtatcaagctaatcctaaacagtctcatctctctgcagtcaaaagaattttcaaatatctagctgggaaaacagttaactatggtctttggtaatagttgtgacacgaatacctctttggtaggatatagtgactctgatttagggtcagggtgtatagatgataggaaaagcacttcagggggtttgcttttacattgggaataacctagtctcgtggtatagcaaaaaacagcagtccatctcctttcactgcagaagcagaatatattgcaagacgggcagctgctgcactcaattgatatggctgaataaaa

SEQ ID NO: 370208 - DNA, 883 bp, Cannabis indica
ccagatctatgtctcgggtttcgatcccggtctaggtctgggtctgagtcaaagttcgtatacagatcccaatctaggatcgagtttgtgtctgagatcgggtcccagatttagctctgggtcaaggcccgagttcctgtctcagtttgggtctggggctaggtctgagttcatttttaagtctgggtccgggtccttgtcaggttctagttttgggtgctgggtctaggtctgggttcgggtttaggtcctggtccgggtttgaaatctagtctgagtcccacatctagatacctactacgggtctgttccaagccctatttcccggatctcgagtccagatctagatccctgtcacgggtccaagtctggttctggtttaggtcccaggtttgagtttggattcgggatcgagactggggtgcggttctaggtcctgaccccagtttgtgtcccaagtctggttccatgtttgggtctaagttcgggtcccgagtccatgtttgggttgggatctagttgttggttccggttcaggtctaggtttgagctagagtctaggtgctggttcggttatggttctgggtctacatccatgtacggttacggttacaagtccaagtcctggttttggtcgcattttcgggtccccgtctacttccaatttcagaccaagacccttgaacaagactaggaccgagattggggtccaattctcggtctcgatcccagttctgggtcccgagtcatgttcaatgtttgggtctgagtttaggtctaggtttaggtcccgagtcccggttcgggtttggattcaggtttcggacccaatcccaggctgggtttgtgtccgagtctggatcctggtctggttacagttttg

SEQ ID NO: 370209 - DNA, 626 bp, Cannabis indica
ttttttttatgtaaatttttctatattttatagttgattatgtagtattataattttaataatttttaaattgtatgtatatttattgattatttaaattttacattaacgatagtaaaatttcatgagttcgccgcaaaatataaattaaaaataaattttgaaatataatttactttgatagtttattaaaaataaaatatatattattatttaagcgttttaatttgttcttttcttcttcttattttgacatatttaaaaacaatatatatttatttaatttgataatatattaatataaaactatttaaaatcaatacaaaaataaataaataaataaaatatcatcatttaagaatgaggactttatgtttttaataaaaatttggtgaccaatttgccaaaaaataaatttaaaaactaccttaccaaaacatgtatagtttaaaataaaatataaataaatttaaaaaatattgataatatttttttaaaaaaatattcttattatttaataattcattatatttatgctgaaattttaggccgttttattgttttattattttagtacatggagtcataagctctcttataattcaaaaagtgttgaatttaactca

SEQ ID NO: 370210 - DNA, 576 bp, Cannabis indica
agcagggctgtcacattttggaggcagtaatttaattttaaaacttggaccctaataaaaaaaaaaaaaattacacttactatgagattttaaaagttcttatgttaaatatgatacttttaaatttaaccaatttatatggtattttttttattattatttttagatctttttatggcatttaatatgccatatatatgtaaattaggtttacaaatctcatatttaacgtttttatttgtttaggtagtttactatagtatttgtcaccggtgccgaaaaaatcatcggagtttgctgcaggtgtcaaaaaaatcaccggagtagctgtcggtgctagaaaagttgacagagttgctgccgatgctggaaaatttgtcgaaattggtattgtcgtgggaaaaattactggaaaaatcaccagaaccagtttcttggtgatttttttggtggcaatgctaattctgataacttttttgacaatggcaactactccagcaacttgtccggcaccgacaacaaacttcagaaatgtcaccagaattggcatagtcgctgaaaaaattaccaagaaat

SEQ ID NO: 370211 - DNA, 519 bp, Cannabis indica
aattaacttaaggtatttaatccatggaaaaaaataatatgatattttaaatgtataaaatcaaaaacttattaaagtatttatgccgaaaataatctattattatatatactaacatcaagagtatagtacttgttatattatttaaataatataatatatagattaaatgtgtataataaagtaattgtaatatatgacaatatatattatttattattattttgtaatatatgaaagagttacttgtcactatgagtaacttccatatttatcaccaatattaagtatgtaaaaggtattacacatcttaatttaaaattcttaatgctataagagttatggtgtgtccatgagttacatttgagtccataacatccatagggggttatgagtttgaatttcaaatggttatatcctaaacactatataaagaggtttcaggtgctcatattgagatgaaccaagttttctatcaaaaaggcacattgctaaaaaactctaaggcttgataatttc

SEQ ID NO: 370212 - DNA, 658 bp, Cannabis indica
aacatgcaaaattatgaaattttgtaaatgacatgtaaaatgcattctgaattcaaattaatcatcgtaaattaataattcaaagttgataaacaatttccataattaaaccctaattatctgctaatttccaaattaaagctaagcggtctttacatctacatttgggatggtgattactctagggtagaacaatgatttttggagaagtataaaaacctattcggagtctctaactctaccagtaaggttgaatattaaagtgacccagaagactactacagaaatattcagacttgggaaagttctatacagattttagcattattctagacataaattaactactagtgttacttggtgataacacagatgtagttacgaaagagtaaagaatccaaaatcctaagaggagtaaacatatagatagaaatttcacatggattttgtgactaaggaatgtaatattggagaaggttgatactgaatacaacctgtaagatcctatcacaaagataatgtcatatactacacttgatctggatatcaaggggatgagattaattaaaatgcacttttaattttatattagtgcagttggggctttatacatcaaataaaacttattttaatataattttatttactaattaataaa

SEQ ID NO: 370213 - DNA, 581 bp, Cannabis indica
ataaaagttatttctgccgtgtgatagtattttcgtaaaaattgggctaaaagtcagtatttttgtaaatttctcttttttcttattcaaaaatttctattaggcgcgacattcaattgtagtgccaatagactcttttaggcacgacatgatgtgcctaaacgtatattggcacgaaaaatagagcttctatgcacgatttttgtcctaccaatagattttcttttatttatatagtgaataaataaatctaattatattgaaataaattttatttaaagcataaaattttaacacaaataagattggaaaatcctcaatgttcctcacacattgctagtcaaactaggggttattgctcttttatgcggtgtaacggtggaagtctaatgactaaagcacctgttggtgcatcaaattggggaaaattgtccgaatcaatgagaagaagtggctgtctcgaccctctactttctctctttggccaaattagctttcgttttcaagggccagtttggcacagctgtgctgtgggaaaaaatactgtagctaagctgtggaaaaaacagctgtagcagaac

SEQ ID NO: 370214 - DNA, 530 bp, Cannabis indica
agcagataagtacctaagtcgtatttttggcggtaaaaataccttccgtcaatagtgttgaacttccgtaagtatctgaccgttaagtgacaggtcagtatccacgtgtcactcgtttattagtccatgtcattaattaatttatttattgtttaataattatttaaatgtttaaaaataattttaaaattataaaaataaaacaaaaaataaatataatcaatttttatctttaattatgtatacatttaaaaattgaataaaaattatttttaaaataaaaaattacaaaattatcaaaaacaccttaaaatttaggggtcttttcaatattatacctaaaattgattttatttataaaaatacctttaagaaaattatttgcacaaataccgattgccacgtcagcataaataccgaaatataaaataattacagaaaattgaaaaaaataaaaaaatctcgcttccagaaattttagtgttttgcaaattttaaaaaaagcaaccttttggttgcttttgatgtaa

SEQ ID NO: 370215 - DNA, 543 bp, Cannabis indica
caaatattaagtattaataatagacttaattccccacttacatctagtgtagcttttcaattaaatagacttgaaaactaaccccaccatgttaattttcaaaaagtcccaaccattgaatgagctgctttgggatcatcaactttgtgggtgttgagattcagagcccacaatatcattcacttttttatttttatttatttatttaattaaatagtggagaataagaaaaaaaaaagttttgtgacaaatggataagtagaatcaagaatgtcttggttaataaactacatctagttatataatgtattaatgtgcactaaaaagggtacaacttttttaattgtaatcaatatatataaaatgttaattatttatttggtcaaaagcttagtgcatgtttggcatcataactaaaaaactgtcttttgtttttaaaaacagaaaattgtttttaaaaataatttggcttgtttggccttgttttttaaaaacagttttcagaaacaaagttacaaaaataagaattttaaaaacaacaaa

SEQ ID NO: 370216 - DNA, 701 bp, Cannabis indica
tgattgatgcgtacgtcgatgggcgaccgatctctagttcctcgagctttgccaccaggctgggctcggtgtagcgggccggcgggcgggtgtcgtgccccttagcggtcacctcgcgtgggtctagatcctgtcccttcgacaactgaggcagacgtttctgcgcgtcatcggaagctccttcgtcgacggactcgacgtaagcgcgcaggaagccatggaaagtgatggtgcgcccagacgcggtgaaggtagcggtggtgacatcgccgtcgggcaggtttaccggcgagaccggggtagcgtcaatagtcaccgaaagggtttcgcccttggcgtcggccatttgagaggccagggtacgcatccagaccagctcgtaaagcctaaactcgtccccggtcaggccagtttcagctggggtgcggaagtgttcgccagcaggccggatggcctcatgggcttcctgagcgtttttcaccttagaggcgtagatgcgcggcttgtccggaatgtggtcggaaccatagagctcggcagcctggttgcgagccgcgtgaatggcctcctgagcagggccaccgagtcggtacgcatgtaggtgatgtagccgccttcgtagagattttggggcgaccgacatggtgcgctgggaggtgaagccgagcttgcgacctgcttcctgctgcaaggtcgtggtc

SEQ ID NO: 370217 - DNA, 789 bp, Cannabis indica
ggtggaataattttggaccttttaacatattctgccactcgttggtcttgggtctcgagtgcggtcgaatcttgcgccccggcttgtgtttcttcgacctcatccaaccccatttccattgtggagacctcaccctcacaattttccttccagtagtcgacctcccaattccgaggatacaaaatttgaagcacaaccatctgaaagaaagccaaataaacatttaacaaacaaaatcgcacaggaatcgcaaaaaactcgcataaaatcgcagatactgacaaattaacaagtattaataaatcgcacaacatcgcatacatatcgccaaaaatatcagaatagcaaaaaaacaggacaaatcgcacacatatcgcataaaactcgcataacatcgcataaaataactgttctaacactaatattatacatcgcacaaaagtcgccaaaacatcgcataacatcgtataagaaaacagattaacaaacaaaatcatgcagaaatcgcatacatatcgcattaaaatcgcttaaaatcgtataaaatcacagtttcacaatttaaataccaaaaaaacaaagaaactaagattgacatacccttttctcaaatagtgcagccacgtcaggttgcttcacatcatgtctcgtaacggaatcgggagtactccaattcaacattcgagggaatctagtccctctgcactgcccatacttcttccccaaatcttgcatcacctcgaaggcccagtattgcagcgccggggcatatccatagacattgtactt

SEQ ID NO: 370218 - DNA, 624 bp, Cannabis indica
ataattacttgagtaaacttgctattgcataaaatttggtaataggaattgaatcatgttagaccataatgatagatacaattgaaaaaatatccctaatttcacatctattgttaaacctcttatttgtttgcttatttatttttgcttagtttatttagtttcaaaatttatctattcgattgccaaatagaaacaagaattcaattgattggtacttagctacagtcctcgtggaaacgatctcacctacctgagtataacttgttaaaacgatacatatacttgcatgctaaaataccataacaagtttttgacattgttgctggggactgtttcagttaatatcaatatagttgaattctattctaatttggtttctttttatttaattttactaatattttactgatgtgtttgacctgcaagataaatccagatgttataccttgtggattttttccaacaacacaatgagtcattctattttgcttgtgggagattgaaagagcttggagagagatgttatcctaatttctcaagtaggtgtttttcttggttcttttataacggacttgatgataaaacaagaagctatattgattatggagcagagataactgg

SEQ ID NO: 370219 - DNA, 620 bp, Cannabis indica
catttcttaccttcccgaaagcctacccctccaaggtttttggggaggcaaaccttatcccaagaagctctatgaagcttgctcctattccctaaaattccccagagaaagtcacgacaacttttatcaatagctgccgttaccttagaaggaagaatgaaaatactcatccaataattccgaataccaagcatcaccgagtgaatcagttgcgccctacctgcaaaagataggtttctactagcccaacagtttaggttcttgttcagtttgtccaaaataactccacaatcagcagccttccatttagttggtctaagattgacccccagatacttcacagggaaactgccttcttcaatttgaacaatttcaaggatctttgttttgacctcttcacaaacccctccagagtaaatgtgggactttgatgtattagctgataaacctgtgtcattgcaaaacttagtgaaggttgtatgaacaagcttcaccgagttaacattacctttgcaaaagataacaagatcgtctataaaacacaagtttgtcagtctaatatgcttacacagaggatgaaacccaaagcccttttgactagagtaatagcacaaaatcta

SEQ ID NO: 370220 - DNA, 837 bp, Cannabis indica
tttttttttttgtaaaaaactctataaaacagctattgagagtgttctttaactaactacaatatccacagagaatacaatgtgactttcttcggtccgactcaattagccagggttattttacaagcagtcttgcaaaaaggtcatctcatttacaatggtaaatttgataattcattcttaaaaattatttatagtttttgagtatgccacattaaaatagattgaaatttaatactctgattaattaaatcttaaaatattctccccatacattccctctttctctcagtcctcttcttctaactctcaccaaacccaactgatacccaggggccggctcaagcattgggcaacttgaaccattacacaaggctcctatttttttaaggctcaattttttctttgaaagaaaatgcctatttttgtctcttttttcctattaaatatatataaataaaaaatttataattgaaaatttattaatgaatcttaaaaaaaagctagtaatagaattataattttaatgtacacgatttttttttaaagagcccaattttaaaattttgtacaaggcccccaaaatgcttgagtcggccctgctgatacccacgatcaccgcaccacctccgacgaaatttactctgaaggcaaaatataagacaaaatcgatgaggatatcgcgaaaccacaaaaagaaatcgtaaaacccaaagccccaaaatctatgagctcaaccaccccaaaactccgaaaatccctacccattgttggagttctcaactcgcttgttttctgtatttttttttctggttttttgacaatgtcacaaaacat

SEQ ID NO: 370221 - DNA, 752 bp, Cannabis indica
aggacttggactttgaatcataattgaaattggacctagatcaagaatcgtaaccggatcaggacccagcctccaaatcagacgtagacccgaactgggagccggacccggatcccaacccaaacatggactcaggacacgaacccgaaccttaactcagacccaaacatggaaccagactaggtacaaagaaccagggtggggacctagaaccgaaccctagtctcgttcctgaacccaaactcaaaaatgggccctaggagctaaaccagaacaacactgagacctgtgacagtgatccagatctagactcgggattccggtaacggggcctgaaatagaccagtagtcagtgtttagatctgggactcatactaggaccaaaatccagatgatgaacaaaacccgaacacagacctatacttgggaccaaaaattagaacctcaacaagattcgccgaaccaggaccctaaaaagagactaggtccgtgaccaggacccggacccagacctagaaccaaacacaaaccaagccacagacccaaacagagattggaactcgggcccagacagggtcgtgtacctagaccagaactgagacctggacctggacctaaatctgggacccgatcccaaacacacacttggacctatatagggatccggatacgaaccagatttcggaccaatacccagactggaatcggaatgcttgacctagatcttgaccgagatcctgacccagacccaa

SEQ ID NO: 370222 - DNA, 520 bp, Cannabis indica
atgatgacttgttaaaacgtatttttctagaattgaagcattcattgataaaaacctcttatacttagaattgttgttacagttacacatatttgagctgcctccagccatcactcgtcatcgctggtctaagccacctccaccacatcaccacctccatctcttctcccttccacgctcaacagctcttcccaccctctgagctctgttatttctcctttcgcttgagacgaaaatgcaggtttcaaactcatactcatggtttctctttgttatttctttactttttctaattgcaaggtcacatccatggtttctctatgattctttttcttattcaatttgtctacaacatttcagatttgaggtaatctaaccttttctttatttgtgaaaattttaggtaacatttgaatcttttgtttaattcagatttttgtatattcatgtgattgtatatatgtgttcagttcaataatagcgtaaattttgttttatattgtgtttgtctcatctgttt

SEQ ID NO: 370223 - DNA, 825 bp, Cannabis indica
ataacttaatttaaaaaaaaaaattattttattttttaataaaacataaaatccatatagtaattcaaaacaaaaatatttcatattattacaaataaaaaattaaaagagtagcctttaaaaattcagtctatcattggaaaatgtcaagagtgatataacacatcacaacatacatgaaagatgagttgtcaaagtgttttgtgacagcatcattgtgccagccaaaagaatgtatgtgcacaactttcaagacacttttctttcattattttccaagcttataattttcttctcttttaagctaatttttaaataaaaaataatggagtagaagctgtatttttcttacttaatatgagtatatgactgtattggagtctgtacatcagtacatggacccatattcatttttatatgtaccaaaaatatgtacatacgtttacatttgaccttttcctccaaaaataaatacattacaggaaccatcgaggcttcctcacttcctaataatgtcttaaatgtaatgttcttttggggcttgtttggtacgccgtattgtattatattatggtagtattatttaatacaatacaatatttagtattgacttgtattaattgatcgtgtaaagttataatatattttcaatacacttgaccccaacattaactacgggttcggattcaggtcggagtcccgggtcttgggttggggtctgggttcgggttgggtaactaggtttgggtatgggttctgggtttgggttggggtcccaggtcgaggtcggggtctgggttcgggttggggtccgagtttgggttc

SEQ ID NO: 370224 - DNA, 483 bp, Cannabis indica
atagtatttacccttattattattattattattattatgtttgaggtatgactgtttgagtattactattttagttagtgtattgtgattagttattatattaaattatataagatttgatagtgtcttctaattaattagcaatattcatataaattatatagttaaaagagtattaaatactatcaatatattttagcatttgtcatattatctctattatatatagagaattactaaaagatattattagtgtctaacatcctctttagtgtcatacttctattagcataattaagtatcagatcttatgtaacttaaaaaaataacttttagagaatgccgctatactaatcataaaagactacttacccaacaacgatatactatgacattaaaaaaaatagagtaatttgcggcaaaaccccctcaactatcaatttacttgcaaaaaaccatccaacctcatattttggtgggaaa

SEQ ID NO: 370225 - DNA, 1002 bp, Cannabis indica
tacccaataaccgacgccatagggttatatatcagacccttgggcatcgtcttcctcatttcacaccttgctgaacacgaagaacagccacccacagcagccccaaacccacgaaaaaaccctcgccaaccaccactaaaacaacctcattctccctcatttcttaaccattttaccccatttttgtcttaaaatcttctattttctatacctaaacctatactgtaaaaaagtttagtttttttcccctctatataccaaaccgaacctattataaaaaaaggtggtggtataactccggccaccgattttagcggagaaaacgttgagtctcaacgtccattaaggtataaatatgctttctattcattttatttatgtacattggtattatttcgtttttgtaaatttttttagattttttttattttattaatattatattgtgtgtgctataggtggccggatttttgtcgcaatttgtcgccggattgcgtttataaggtaaatatttatttacttgatatataatatatatgtatatattttgtattttattattgaatatgtgtttatatatatgttgtgtgtatatatattgtgtatatactatttgtgtattttgtgtatttgtattgtatatatatttgttgtgaatgagaatgagaggtagtaggaatttaattagtttagagttaaagtttttaaaataatggtagtgtgatatttaattgattatatatgtatatatatgtatatgttattttttaaaaaaattaactatggaaattagtaactagtaacttgctactttgtttaataactagtaagtaatttaataattaaaattttaatttggttgtatattgcattatgttataggttgtgtgctaatatttgagagtcgatcgacatatttcggtgttgatcggatttgcaataggtatatccatccgctaaccttttgttagtatttaaaatttttgggaacgtccaattaca

SEQ ID NO: 370226 - DNA, 720 bp, Cannabis indica
tttttaaattttttaaataatttaaaggttttgaaaaatagaatcaaatatttaattgtacaaatagtatttcttttattatttaaattcagtttttagaatcataaattaattatttatagttttaaaaagactagtggatgccaaatataattaagtacaatgcaaattgttatataaaataaattaggtcggcaatagtaacactcatactaaagttatattgttccctatctatttaatggtatttagcatgtgcaaaaattataatttatttttttttcttatatgatagtgtttaataccgcagagtacttacattaacttctttaaaataaagagctttttaaaaatttaaacaactgcactaaaaatacgttatagcagatgttctaaactctttcattttaaattttctttaaaattattcatgctctacatttttagaatactatttattgctacaaacatattttattaattgttttgagttttaataattattttttatgaagatatatgtgtatatatattaataatattatacatttgaaatgaataaaatatattaaaattttaaaaagtaaacttttggttattattttagagaagttgatgtatggtttaatataaagtatgctgtaaaataaattttgataatgtagatagagtagagaagttgttggtaggggtgtgttagacttttatttgggcttacat

SEQ ID NO: 370227 - DNA, 815 bp, Cannabis indica
agaatgaagaataaataattagaattataggaaagtaattaataaaaaaaaaaaaaaaacattgacaggatagacaaattaaaaaaaataaataaataacttaaattgtcagattgatttgggcggcgacaagcggtattttataaggaggatactggcggctgtaattgttatatattgtattattaaccaaaaaaatataacaataaaagtattttattttataattttatttgaaaaaaaatgttaaagggtactattagtgtttagcatctttttatatgtcaatattattattgatctaactaagtatcgggtcctatataatttaatataatagcttttagaaagtatcgctaaccaatcacaatgcgacatgtcaaaaaggtactaagcactactggtggctaatagcaatgctatttattttattatatttcttttttttttaattaaatgtcaattaaatttactaaatgctaactcaaaaacacgtggctatatatttttttcacttatttaatacgtagtctaaaaataatatatatttttgagttgatatttaaccgccaaaaaataatataattataataaaattataaaataaattactttttgctattatttttttattaaaattataaataacaagtataaatgtagaaggaattgtatgataaatataaagaaacttacaaaaatactggaatttgagttaacttttacaaaaatactgtcacacggaatttttttaaaaaatactgtgtttttataaaacaccagtaaaacacaaagcaggacaactcaaaacaaca

SEQ ID NO: 370228 - DNA, 637 bp, Cannabis indica
aactttgtcaagtattttccattgtttagatttgataaccacaaaccttggaaaatcaaacataattagtgcttaatgaatacttttgtagttggggtgaattaattaacttgatatgaaagattgtctttttatagatggattatatatatgtatagagagttgagagagatgtactactaccaatttaaaagaattatttattgaatattattaataaatgaccaagacctctaccattttatgtgtgaatatatagaatatttgttttttgacacaatatatatattgaatcatttatatattcaatattatatattttgttctttggacatagagagtttgtcattaatttattaataattactgagaaaacgccatgaacagagtaggtataatatttgattatgcaataatattaatattaattatatgaaagtttcaagcttatcattatatatatatatattaatataagcgtacaacattgacacatttaacactatttaattaaataaatagttaattatgtatctattttatttgtctgtccatttacatattttgtgtttatgagatatacctaattaaataattaattttatgatacagttgatcctaaccttaattatctttt

SEQ ID NO: 370229 - DNA, 574 bp, Cannabis indica
tgttgtgttatttgatgattgatttatttttgcaaaatttttataaaaaataattgaattttcgttctggaattagttttgttggatagtttgggaacaattaagcaattcaattttttacagaacttgatttcgatttaatttgaattagttatgattttttgaagttttgaaaaaagataggggtggtgacaccccatatgcgcgcagatccgagtgatcactcggtcacgcgcgcctcaaacaagaggttgtctgagatttctctgtcggatgcctcgttttttgtctgaattataggcacggcgtgtagatgaggctgcttgcagcttctctaactgatttttctcagccgtgcatccgaggtagcgcgcgcggatggtatgcaacacataccatctgtaccatttacaattttttcaattgtcttcattttttcatgctttttcatagaattaatttcagattttttgtgtaattttgtatttaaatttttgtttttcatatttcaaatctaattatcagaattaaattaattagtattttttaaattaatttaagatattagtgaaat

SEQ ID NO: 370230 - DNA, 579 bp, Cannabis indica
cccgtgctgcaacaaggtgaccagatggtttcgggcaacaattctgaaaccatatttattgtcgctatcaaagagtgttgcatctacattaatcttgatagtgtttctgctggtttagtccatgactcaacgccatcaccgatgttttccagacagattgatgacaacgaaattttatcctgagctttattccagtgatcaagagctacttgtgcagaagtaagcacgtcattaacagaggattgtttctttttctaaacaaccttgttcttagcctttcagattgcccagctatacattgcaataagataaatgatatcaactttagcttgcttaaaaatagtctccaaccaattgccgaaagatctgtcaggatcaaaaactactggtgttgcacattggctccaacaatcaaatgcgaactgacaagagatgagtatatggttgatggataaaatattttgattatgttgagaaatataggttttattttagaatgaatatagtaaagattttaattgggaaatttgattttctatgcttagaaaatcaaaaaatttgatttctaaaccaataatt

SEQ ID NO: 370231 - DNA, 1054 bp, Cannabis indica
atctcaacgcgaagctcctccagattcttcttatcagcatcatgtgaaagacaagaacgaatctttgttaaaagaattgtggcaagtgtattatcagccataattttctttcctgaactcatagaagaagacatgtcgctataagaaagtatgcctggctaaacttctatttatagtggagcaagaagaatatttgagaaaaggataaaattaaaacgtcagcagacaaatctgtcaggaataaatacatatatacctgagacgtgagaatagattgatttgatggaacaagagaattattataaaaaaaaaaaaagggaaaataatatataaatatattacaaacatatacttataaaaagaaaataactattatatatattacatagattaaaaaaaaacgaagaataagtgatataaagtggagcaaactacgtacagctgttacaaaaaataaagcatggtacatagttatatatattacatagattacaaacaaaagaaaaaaaaaaaaagagagaacactgctacaaagtacaacaactacgtatagctaataaacaaaaaaaaaaaaaaacaatagcatgatgcatgtataattttttaacaaaaaaaaacaaaagtacatagataattcattctattatcttcagagaacatgggaacttcatacgtgttgtcaaatggagtaccccgattattaaggatgggagatgttagcgagacagaatgtctagcatctaaatattgacgaaaccatatttggatttcagtctttaacatctctacatccctattaaattgatcacaaaggacatgcacgtgtctgtcatgctcgttgaggacacgcctcatctcagcatcttttctagaaataatagtcgacgcctgcagtagttcgtttttgagaaactgtgttctcaaagacagttgttcaacacgatcagttagtccatccagttaacgtatattatcatggcactccatagcccgttctcgagtgacatcctctgaattagagagagagagagagagagagagagagagagagaga

SEQ ID NO: 370232 - DNA, 785 bp, Cannabis indica
agggtggacactccggccccgagtcatgactccgggatcccctccgaggcggaggaatacgcagtgcctctcggcattgtgttgactccgattcctggagacgaggagaggcagaatcttcagatagccaagcacaactatgcccttgatgaataaacccgggggcatgccgaagtggaggccttgaagagggtcctacgggaggagcagcaaaacgtcctcaatgcggaggacttctggaatccgtgggacctgaatatggatccgctgacggactggtttaatcgcttcctggggcccaccttggctccttttgccgcggagatgaccagcgagtatgtctcccacatgactcaattcccgcccaaacggtacgctgcttgtgcatccttgaactccgtctaccaagttcaagacatcagcaatgccatggctgcggtaagctcttgattcatttctttcctcaatattttgtctaaggcatttgatctcactcttttctccttttctagatttctgcatagaccagtcgcctctcctcggggcatagacgaggtcgtgaggattctgcaggacctgtccgctgagaggcgggcgatctaagaggagactgagcgaaaggaggccctcgctaaggcgaagctcgaggaggaggccaaacagagggaagcccaggcggaggcgatgctccgagaggaggtcctgcggagggataggctggaggcgaggcaccgagaggcgctgagggcagagggcgaggccactgccaaggccaagcgcgagct

SEQ ID NO: 370233 - DNA, 509 bp, Cannabis indica
aatgaagccgaatatgaggctttaatcgcaggtttgaagcttgctctcgagatgagaatcgagtatctacaggctttcagcgattcccaaatcgtagtatgccaggtgaatggagaatatctggccagaggcgggagattggtgaagtatttagccatagtatgcgaactgatgcaaaaattcaagaaagtagtcgtgtctcgagtaccgcatgctcataattcacacgcagacgcattggctcgcttggcctcgactagagaagctgaattgctcgatgtaattccggtggatgtattggctcacctaacaataaatcaagaagcgatcatggaaatagataccgcccaagaagtcacctggatgactccaatagtcgcatatctagaaaggggtatcttgcctgaagacaagatggaagcaagaaatctgcgacagcgagctacccgatatgtcgtatatgatggaaggttatatcgcagaagttttagtcagccgttactcaagtg

SEQ ID NO: 370234 - DNA, 588 bp, Cannabis indica
tattttattttagggtgttttttttttggatgaatcagaagtattcattgcacaaaacttttatttacatcctaaaagcactaactttggcctcaataaatctatacaattatttacagacaatcaaaccattctctatctttgattttcactttttgtggcaatacaagtatagtgctagttttgacaatcttttgaagccgctggaccaattcctctacctttagcaccttcttttgccaaatgagatcattccttgccttccaaatcaagtatacaagtgctgctatacttgaagctttgacattcttcttgagtttagtttgcttggctttccttattgttttgagcacaacctgcagagtatcagctcgagccttccactgaagccagttcttcacttgcaccagacattgctgggaaaaatcacacctgaaaaacaggtgctcggttgtttcatcggcgccaaaaacttgttgtgaaaaattgtgtatgcaagtatacgcaatcgtaataagtaataaagtgataaattgagtatcgtctctacagggattaaaaattagaaattaatttataaaactaatt

SEQ ID NO: 370235 - DNA, 726 bp, Cannabis indica
ggacattgtccatcattacgtatagatcagcctgataatgtaacctcctggatacaactctttcttgaggcaattctccttgtgttacgtatttgatgatggggtccattcaactcagctcttgcccattagtagctaccgtttctttggtattaatgcttggctctgtaaggtgctcaacaggtactacccctagcctttctatttcgcagtccgaagctagcttagccaagcaatctgcctgagcattcttctcttgtgggattctttccactttgtattctttaaattcatggagcagttccctgacaattgccacataagcagccatttattctccacgtgtttggtactctcccgatacttggttgaccactaattgagaattaatgaagatttctaccctcgaagccttagccctgtgattagggcttcatattcaacttcattgttggaggccgaaaacgtgaagcgtagggcaacctggagccagagcccatttggcaatatcattgctattccggtgcaagctacactttcattcgatgccctgtcaacatatactttccacgacggcatcttcttattggaattttataccctaaataaaacccatttcaatctaatctgatttgttatcaataaaagtttagaagtcatttatgtttacatgtagttttcatgtttatggtttaatgtatgcaatttttgttaagtccagaacat

SEQ ID NO: 370236 - DNA, 525 bp, Cannabis indica
cttcgggactacataggaagatttaacaaagagaaagtttccattccctattgcaacgtagatactgctattacaaccttctacaaaacacttcagatggagtccgatctttacaaagagctcactaagtacccgtgtcgtaccatggaagatgttttggcaaaggcatggacttaaataaaattggaagaagatgaagccaattgacctgcccaagtattcacattagatcatcgagattcaaggagtaagggccagtttggcacagctgtgctgtggaaaaaagcagctgtagttgtgctgtgagaaaaagcagctgtagcaaaactgtggaaaaaagttgagctgagtgtttggtaaattataaattttaaagtactgtgagttgttaagatctattataatgataatgataatgttataatctagtttattataatcacaaatatgtaagaacttattttatataatattttattttttatatatattaattttttttttttcaaatataaatttaatatg

SEQ ID NO: 370237 - DNA, 666 bp, Cannabis indica
ttttcatattgttctgattaaatcatgagcaaaatattcttgcttattattcttagtattattattgaaattttataataaaaaaaaattatagagatataataaaaaaactgagcaactaatattaaacaaaaaaaatattataattataattttaatataaataatatacatgtaatattatatataaaaaattaaatatacagtatttaagttttttaatttcttaattactaaacctatttttaacaattaattttgtttttcaaaaatacctattttagtgtcagtttaaaacagacatttatatcaattagtttcggttttaaactgacactaaaagaaaaaatatatatgtatattttaaaatgtcagttttaaaacgacactaaaactcattcgtctctgtttataaccgacacttaaactctgactttttgtaactgtggaataggtgtcggttctttgaactgacactaaaggtataaatgttagtttaaaactgacaccaaaaatacagtttgtagtagtgggtatggtggtaacttaattttggggtgaattaagattgataaatgagataaagagaagatggattgtgagaataatgatttgtgttgatgagaatgaaatggaagtggagggtgttgaaaatattttaccagg

SEQ ID NO: 370238 - DNA, 504 bp, Cannabis indica
cttcacttggattagtcctttgagatattatttgaagcttgtgattttttcgtatatttacattcatgtattgctctagaaaaataaagagaaatgctaggactaactctaatgaatgttgtccatatcatattatgtggcaagagagaagagaatagtaataaaaaataaaatctaaaatgagtactatcgcccttttatatttttaattaaaaaattgtgattgtctagtaaaaaaaattatgattgactattttagttgtcccaattagagatgatttaatagttcttttaaggtattaagtagtctagagatatttttattagtataattaaatatcaatattttaattacttacaatacaccatatcaatatagtattagacattttaaaggtttcttaacaacaatactcaaaaagtaaatattgtagccttttttgggagtattgttgttaagcactagtgatgcttaatatatcttatatagatgatactttaacg

SEQ ID NO: 370239 - DNA, 550 bp, Cannabis indica
aaatatggcttgtagcttacgcatggaacaagacggaatgtgatagacattttgaggtgctgaaatagatggatcctgcgattgctacatacgtcgagcaaatagggtttaaaaagtgggctcgtccttattgtccaagcgatcggtacaacataatgacaaacaacgctgtcgaaagcttcaacaaggtgacagaagaattcagaaaatatctagtaactattttggttaacttcatcaggttcacacttcaaaattggtttgcttctcgtctcgaaaaggctagtaagtgcgctactcctttggctactacttttgaaaataatttaaaggatcaacacaaagatagtatgttcaggagtatccttcgtaatggtgcccaattatttaaccttggtacgagtcctcaaggtgagagaggtggtgatgttgacttagtggagagaacatgcacttgcggacttttccaaacgctcaaaatccctcgtccccatgcatgtgccacagcagttagtcagaatgtgagcgtgtacgcactttgctctccata

SEQ ID NO: 370240 - DNA, 572 bp, Cannabis indica
cctcaaactaaagagttgttcatgaggaaattcttcgtttatttgcacctcttttgcattccgggtttcttctaattctagtcttgacagatgatctgctactaagttttcagtccccttcttatcctttatctctatgtcaaattcttagagtagaagcatccacggaatcagtcttggctttgcatccttcttggtcataaagtacttgattgctgagtggcctgtgtaaactattaccttatttccaattagataaggccggaacttatcacacgcaaacacaattgccaacatctctttctccgttgtggcataatttaattgagcatcattcagggttctactagcatagtagattgtatgaaacaccatgtcaaccctttgacccaagaccgctccgattgcgtagtcacttgcgtcacacatcaactcgaagggcaactcccactttggtgaagtgactattggtgctgaaatcaatttctccttaaggacttggaatgccttcaaacattcttccccaaactcaaaaggaaccccattacaagtagattggacaacggttttga

SEQ ID NO: 370241 - DNA, 535 bp, Cannabis indica
taattaaaataatgtatacaaaattgtaaaatgcccaaagaaaaaatggataagtgtgggtgcttgtttggtataattgtgcttatggtataatgtagcctaaatgacttctcatctacccgttttacctaagccatgctattataaccgaaaaagaccttttgattccgagcaagaattgtcaacattagtggagaaaggtatgtcactcaagcttattgaacatgggttagcggaatgtcagagagtgtagaatgactgtgatatgattgtcaaaagaggtgttttgtgtccatatgaattgcttacttctgaattgtgcatccaagttaattcttagagttattgagttgaaattctggttattgatttgcttgaagttgtgcaggtggtagtggtagttcaatcattggaaggtttagttatctattgcattgtttaattttagtttgagttttagctttactcgggggcgagtaaagattcagttgggggaatttgttaggctattttagcctaagtttcgggtcacatt

SEQ ID NO: 370242 - DNA, 633 bp, Cannabis indica
ttcataatattttttataattaaattattttgaacacctaataccaattgccctttatattattatttattaaactaaaatgtacaaaatccaatattcagtaccaataataatatatcaccctttttagatttggcttataatactctctaatgtgtataatttaataaaataatttttatgaaatatcgataattaatcgtaaagcgctacctatactagttagtgtcaagcaccactagtgtcttttagcatgcacgcatgcatagttattttataagagaaattctaaaagacacttaccaaacatcacaagaggtgacatactgctatattggtacgatttaatattagatcttatatattttgatttaatatataatataaaaaatattactacttacaacgcaccacatcgacattaattttgggcaccttaaagtacctaaaaacataaaatgctcttatcttaatacacatatatgcatggtttactattaatgatattacaacatttttttctaattgctggacagtaagaaagtgtcattttaaagtattacgaattgcacgtatatttagttatattttttatttttattttaattatatatttttaattgtataattagt

SEQ ID NO: 370243 - DNA, 475 bp, Cannabis indica
aataccggagctccccaaggtgacacactaggtcgcgaaaaccctatgtcaagcaacccctggagttgaattttcaactctttaagttctgctggagccattttgtaaggggccttagaaactggttctgctccatgtgccaaatcaatgataaacaatcaatttctctctgcggtggtaaacccggaagttcatccggaaaaacatctaaaagtttctgaaccaccttgatgtcttctggccgtacagagtcaggccgagtggtatccaataccctaaccaaaaaccctagacatccctctcgtaacaattccctggctgtcagtactgaaattatcgggattcgagatccctgaatcgaaccgacaaagacaaacgattcctcgccttctggttggaagattaccgtcttcctcttacaatcgatactggctgagtacttggacaagaaatccattcccagtataatatcaaa

SEQ ID NO: 370244 - DNA, 877 bp, Cannabis indica
aaatgttaattagaggggaagcttagtttagaagaaaaaaaaaaagaagtagtagtgtacatgtttcaaatggccaagtttaatttttttatataattgaatatataatgaaggctaattgtgtaattcaattagtgaaagcccaaaaagtcattctcacttttatataggttatagatatatatagggtaatactatggtaggaactagcaaaagttccttaccggtaggaaacttttttttaactgttgattttagatcttgtggttattatgatgtaaggtatatactcttactataggactgcttgtatacaattaaaactttatccatattataataatatttaataatatatttattttaaaaaataaaataatattaataattaaaaaatttattaattcatctcaaaaaaaattattaattttaattttttaattattattattattttctaaaattaatttaaattatttttatatagatatttattttcaaaaattcttttgatgtgggatcgcttgaatgattttagatgctctttaattggaaccgtactaacttgcttctcttaaactcaattattttggcagaaaaaataatatcaaaccaaattaattaatttttttttaataactggcgtctcaaaagagcagccaaataacaagataaaaaccactgaaaaacagtcaataacaccagaattatgcacagcctaaaggcaaaacaaagaaaagactaggtgtaaaaaataaaaaaaaaaaaaaaaaaaaactatcagtaaattatgaaaaagcaaaagaaaatgagtttagaaaaaataattcttttttagaaaataaataccaatataaaaataattcaaaagtacttt

SEQ ID NO: 370245 - DNA, 398 bp, Cannabis indica
cgcatcttttgttgggatccttccgggagctatccttgtacaagggaggtggtctccggtagtgcgtattctgcctagtagcaaagtacacacgctcttgggagtccgtcagctccgtgtactgggtgtactggggagtgtaccccctcttttggcgtttctcctccgtccgggtgctgcctttagaggatcgtttactcctcgagccctgggaggggcccgccaggctagcggttggagcggagtgcgagggagcttgtccatttatccctgagggatttccaaaatgggatgatgcgggcgccaagacctggccctatctatatccgggagtagcagagaactgtatgccgctcatcggtggagccgcggtcgggacagtacccgagggcggtgct

SEQ ID NO: 370246 - DNA, 572 bp, Cannabis indica
tgatgtctcttttttataacgacctctaacaatttcaatatcaccgacaccacataaacatccaataatatctatatataatataaaataataaaaagatagaatattataaagaagaatagttaaataaatttattaaatatcaataaaagttaataattaaatgaatacttgagagtattgtgttatcattaacacgtaaatgaatcaaatttcgagttatgaattgaaacccattgatcaaaatgttaactatttttccttctagtctctctactgaagttaattgtaaccaaaaataaaattttatagtaatttaaaagtggtctgtactcacctgtggttgtcacaatttttaaattttacagagtacaaagaaccttccctcaatagcttcttaaacttagaaaccaaatttttttgtattgttgcatgcattaaactttcctgtagaatatatgctagatacattaagtatttaataattgataaataattaaaaaaaactaataaaggaaaaatatgaataaaataataatcaccttctcatcaataaaaatcatatcaagact

SEQ ID NO: 370247 - DNA, 559 bp, Cannabis indica
atattttagacttaatatttcttagatcggatcgattccatttaatattttagatttagtatgtattggattagactggatccatccaatccaaaaaaaaagagtaaaattataatgttaaatttcatatatacatatagattttacgtataacaatataaaatttaattactcattcaaactaaatagaagtactaattagttcgattagatgttggatgtattgaatttttggacaactcatccaccaaacgatccgatccaattggatatttaaaaataacatccaatctgatctaatcataattaaaaaaaaaaggttaggcggtcggttgtaattggatcgatcggttcttattggattggattgatttatgcacacccctacttacacacataaataattttaaaaacacatttaaaatcaaatttatatattagttccaattgtaatacacacattaaaactttaagcaacaatcctacaaatgtaaaattcataaacattgatcgatatataaataaaattattattattaatattacattttttttttgt

SEQ ID NO: 370248 - DNA, 658 bp, Cannabis indica
ttgtaatcacaagtatactcgttagtagcgagaaggtcaacagacctcagattggcttcattcaaaagaaactcagtcaatcaaagattgaaagtaagatccagtaaaagcctacgccgctcaaccatctcaggagttggagttggtttttttgagaccgctgtcaacagaataaaataaaataagtcagcgaggccaaaattatgaacatggagtaattcaaaaccaagtttgagataaacatttatgtacatattatgcaaaaaacagctgtgttgatggggaaaggccacttgtccagaagaaatcttccttaaaggcggtcttgtttggtaatcctacaatgatcctactattgggctttgtgccctaaataaaactttatttcaatgtaatcttttctattcaaatatcaataaagaaacagatttaatttcattacttgtttaatgtgttatttggttcatgtgatcatctatttactaatttgatttataaattcatccaaacccttatcacacttatattcttatttattgtgttgtcacatagtggaaagtaatcaagattgtgtgattaaatgtattcctagatttataagtacacagggtttaactgatatgataatctacaacgtagttgtgacagtcagtagtcc

SEQ ID NO: 370249 - DNA, 376 bp, Cannabis indica
aaaatcacgtaatacgcctatggtagttagggtgttacatttcgggtctgaaaagtaagcattttctcgtctattggtgtcttttggaggggttttaaaattgattttcattgtttcaggttcccggggtgtccaagttcaaattcagtcaattggtgaaagacgggacaaactggcgaaaaatcggaaaaatctgctcaagaggcatcagtagtcgcgaccaccattgagccaggtcgcgacccttttctgtggtcgcgactctggtcgcgacttcgagaatttggcagaacctctgattttcgaggtttgcctgtagtcgcgactagcttaaaggcttgtcgcgactaggtacggacgtcgtggttttgaccta

SEQ ID NO: 370250 - DNA, 590 bp, Cannabis indica
gggtgtaatccgaaaaaagattcaaaagttgttgttaatgtagttgaagttaccgaattttgagggtcgaattcttcagaaaaaatcctgtcttccacaatggaatttgattagtgatttactcataataaatgaagattttggttatccccaaatttggatataatcaacatgttctttttttttttcttaattagaaattaaaggaatatacacgaaacacaaacaatctactaaatctgctaaattaatttcattcaattttggatttgctcataatgaacaaattatatccggtcttgtttctagttttctagttattttagatacaatttttaaatattggatcttttgttatttaaatcacgtatctccgtcacttatagtgatttatcattcaatgaatgattgaaaaagaatcgactaatcaaattatatataatgtttgttactttgtatattagcaaaatagtcaaaattgtacttattctttctacccacccgggagattccttcaataatcctatagcattatttcagtagcaattctcttgacaattctagagccttttctcttgttttacaagcct

SEQ ID NO: 370251 - DNA, 385 bp, Cannabis indica
ctcataatgaacaaattatatccggtcttgtttctagttttctagttattttagatacaatttttaaatattggatcttttgttatttaaatcacgtatctccgtcacttatagtgatttatcattcaatgaatgattgaaaaagaatcgactaatcaaattatatataatgtttgttactttgtatattagcaaaatagtcaaaattgtacttattctttctacccacccgggagattcctccaataatcctatagcattatttcagtagcaattctcttgacaattctagagccttttctcttgttttacaagccttttgatatcccactgaaaccccaaactcatgtagcaagtcctccattatgtcattcggtgcatgctt

SEQ ID NO: 370252 - DNA, 527 bp, Cannabis indica
gtccagaaccagctatcatttccaaggccagcaggaataccccctttcagaatggctgaaatagtttcttgatcaaacaacctgttaagtttttggttattccatccaccattatccaaaagaagctcagctaccttcatctccctattcatatcccatccaataggttggggagaaaatccctttaagtgcgcaatccaaggatccaactagatgttagtatccgtgccatcggccacccgcttgcaggcaccttttcggatgattgctcttgctttagtcacattcttccagaaccacgagtccgaggctttcgactcgcagtcaagaaaagacttgcctttaaggtatttggcttcaagtatgcgacaacataaggactgttgtcctgtaagaaggttccacccccacttggctaggaaagcctgattcatttctttagattttcggaagcccaagccccctagaaacttggggaggcaaagtttgtcccaggcttttaggtgaagaccatgattacctttctc

SEQ ID NO: 370253 - DNA, 692 bp, Cannabis indica
catatttattatgaaattcaaattatacatcataatattttaaattaatatctattaaatttagttaacttaaataatttttatttctatatagttaattttaaaaaataaaaaaaaattaatgtaattgattaatcacaaaattaatttatgtcacataattaaaattgctacaatataaggaaaaaaattatattttagctatgtaaaatgaaaaataaacaaaagtttaaagtcgttattacgtgtctcacttgtagttatcactatgtttaaggtcgtttttatcaccgtatctcacttgtagttgtcactacattcaacgctattatcatcagtaccgcatctcacttataatcgccactatcaatcccgttgtaattaccgtatctcatttgtagttcccactatgttcaaattcattattatcattgtatctcacttgtagtcgtcactacactcaaagtcacaatcctcagtatcaaattttacttatagtcgccactacatttaatattgatgtcattagcaaagaacattattaaaattaatagaagaaagaaattaataaaactgtttgaatcaatttttttgattatatataaatatttgaaaaaatatatttttctttcacaaatatatttaggacttatatttatttatttaaataaatatataatttaacaaaatac

SEQ ID NO: 370254 - DNA, 523 bp, Cannabis indica
aaaaagaggcagcagccatggttaaaccattttaaatttggatgttattttttgatttgaatatgagctaaactattaaggcttgagtgactatgaactcctatgttggttatggttaattttaaagcttactttagtatttttgcctttgttcattcaagtgagttctaatttctctttgattgttgtttcttggccattaataacaattttctaagctagatcttgttccagaagggctagatctagtagttcaacttgaatggaacaagagaaattctagattgaggtttttctttgtaagtggaataggaatatttcatttaccttgcataacttaagaattgatgcataattagtattctctaatctggtttgatataggaatatgtaaatctagatggttgaacttaaattgtgagttttggaaaattctcataaacgcataaaaattttgttatcactggcaggaatgctaaagtaatgctgtagcaactgggaaaaaccagcataggatgaatta

SEQ ID NO: 370255 - DNA, 575 bp, Cannabis indica
ttttatttagggcatgaaatcccaacatctttgtagctcaaagatatgggataggcataagtgtcattgtgctgatggaacctatcatacttagtgtgagtgtgatcaagcttgccacagtggtagtaatagttttggataccctcatacaaaaacttgagccattttgtgatagccaactttctaaaacagatattcattcctctatgaagagttttagtagtgtcaaggagaactctgattctcataaacggaataatagagtcataaagagaagaaagttgaacctcaatgagatcacgtatagcataagttataaacagggccagactgtacgacctatgtccaaagggaataaagtggatttgcatccaaagagggatgtacctgagctgagtggggagaatggtgtcaaagccatcaaggatggcaaagagcatcagggatcgatcaaagtgccaaggttgaacctcaacaacccttcttctatccccttcacatccaaagcacaccaggaaaaggccagagttatagtaaaaaaaaagtaaaagaaagcgagctattcaagcttcctt

SEQ ID NO: 370256 - DNA, 581 bp, Cannabis indica
attaataatattctttaaaaattattttcttaagttatataagacttaatacttaattacactaataacactatgatgtcgagaaatgtgttagacaccaataatatttttttagcaattctcttccaataataattaaaactttatcattatttcctcgataatatatgtcatgccaggttggcaacctaatataataatttgttttagaggattgttataccaaatgagggactagccattggtacatgtgaatatagcaaactttatctattactttcacttgaagtgtgtgaacttatatttagataacgaatattgatgatccttatgctattagcctttggaaagagacatgaaagttgttaaaaatacttattgaaaatatttatgggctgtggatttgcagaggtgatcattttaatgagattgtgtttgagtttgagaagttgggggaatgatagaagcctggtggctatggatagtgaaattccgtattttaatattcccagtttgattatttaattaaatgattaattaaatgcggaataataaaaactggtactgaaaacagttttctg

SEQ ID NO: 370257 - DNA, 623 bp, Cannabis indica
aaccctattgaagatagtataaaacggattgatactggtcttctcttcatcaaaactaatgcctccaaagctaataacctagcttttgatgagacctcttccttcttctttcttcttcaattctaaacacttagtctttctttaccaaataatattcagccattagtgattgagtaagtgcccacacacatcaagttgctcctcaatcatagtatgtaagactgaagaatccaatcaacaagaaggagaatcgggctcagatcttggtgatactctggtacaaaaaggatacaagtgttagagatctgggtggaaggagtcatttaatttcgctgcacccactctaaggtttctcataacttttatgtgtttaaattacattgttttagaaattcatatttaggatgttaaacaacatacatggtagtatatctagatcctggtaaaataattccaacagttggaattgagaaatgtgaaactataaatttgaattttctgacttcatggatcttagttattgtggaaaactagacagacagtcaaaacaaaatcaaaatttgataagcaaaacctagcacaccaggccatttgtcaatctgggcgttgggtgcttatttcgg

SEQ ID NO: 370258 - DNA, 873 bp, Cannabis indica
atagacctaatccaccttttggagataactaaccctccgccaggtaatagggttccaaaccctaattcataactatcgtgtggtctatccaatttactaaagattatggctgccacgtaagaatgagttgccccagagtcaaacagcatagagaaataagagttattgaccgagagctaacttgttactactgaagggttggcttctgcatcatcctgagttatggcaaacacccttgctgcagtgggtttcgctgcagtctttggtgcttcgattctaagttagggacaatccctcttgtaatgccctggcatgccacactgaaagcacccctgccctttacactcccccagatcgtgccctttacaactggggcactctggataagtgtatcgggtttcagtaccactctagcgattgcctcgaccctggttcccctagaacctcttattctgaccagagccactggtcgcagtagatgcctttttttttctgatccatggccgaaccactacctcccctgctaaaacctgatgtaggaggggtaggagccccgccaacaaccggagccccaccaaactcaatcatacatcccactgcaccctcagctcccagtgcttcatccaccattttcgcataagtggttttgtcgtcagtagtgatcattagattgtgtctgatttttgtatttaacccatctaggtacttctccttcttactgaaatcggttggcacaattcccgaggccaatcctgctaagcgatcaaactgagtcgtgtactcagtaacactcatgttttctttctgagtcaaatgggtgaattcttttctcttggcacttctgaccgcttcattatagtacttggcattaaa

SEQ ID NO: 370259 - DNA, 1594 bp, Cannabis indica
tttagtgctaattgcctttttactaatccaaattactaaaagcggtcattacaggagtagacgatcagaatgtcacgatgatcgtgcagcttggagcccgtgctacaaattctcgctacaaaaagatgcagacgtgattcaaattgaccagaatgctgagtaagttagcccagccgtacaggcacagctaaacgaactaaaaaatatgttccaaggcatggctggacaaagaaacaatgatctcgagctggaccgagtcacgcggaacttcttttttctcccgagatacaatcttctagcgcccgccctactaaagtttaaaatgccaacataggaaaatctacacaggaagagaagatcccctttcccacttcaagttatttacaaaatgacaaatggtatttacgaaggggtacgaggggatgtgtgttgcagaatctttcctgctaccctgttagaagctgcccagcaatggtatttcaagttggcccatggaaggttcagttcatggaaagccttctcttcggaattccatgcacatttctcctcctctcgccaactcccattgcatctaggagacctggttgaagtcaagcaaagaccaaacgaacctctcttcgcatacatcagcagattcatgacggaggcgacgaaagtttcacgggttactgaagatggaaagttatccgcgatactggggggcattgaagtcctctgtgaactttggaaggatataaggaagaatggcccggtagactcaatgagtgattttcttaaccgtgtcgaaggcttcatcaagctcgaagaagccattcaacgagcggaaggtgagcaaaagcctggcaagtcaaaggctccttctactggaacatccgcccaacttccccactacccaagtaattcaagctcaagtggtaaacgttccaacaacaaccacaagcaagggaatgggaagaaaggaaaattcaccggcaaatccgaacaagctccccgagagaatcaagcaaagtacactgcgttcactatcttgactgaagatgcagaaagtatttacatggcaactcagtcgctggccccatataagaagcccgggcccatgaagaaagatgtcagcaagagggacatgacaaagttttgtggattccacggagtctatgaccatgacactaatgaatacaaaaacctgaagcaggaaattgaattccttataaggagaaacagcccacacttgcagaagtatgtcaagaccgatcagggtcaaaggaagtacaataacctagagttactacctccaccagtagatgggcatctgcaagtcatcattggaggcccgcatattgttggagattcgggcaaagctcaggagaggtatgcccaaacaatgcagcacgaacaagaggaaattatcctggctgtggaagaaaggaagcccaaagttccacgagcaggagagcctaccataactttcaacgatgaaagcgctatgaaagttaaaattctgcacaacgacccactagtcgtggaagtccagatagccaataaaatggtggctagaaccatgattgataatggagcctcttccaataccttgttc

SEQ ID NO: 370260 - DNA, 793 bp, Cannabis indica
aagaggatgggcggaagctctagggcggagaggggtcttttgagaagagaccttctggagaggttattgacctttctgaggagctgactgctgcaaatccttctactcccaaatctgccaagtctaaggagtctgggccaccaacaactaggtccaaactggtcaggagggtccctgagcgggtgcaggaaccaactccacctgtgcccgtcctgcctgaggccaaaaagggcaaggagatgctggctcactacatgaaccggttggttcctgaggtcagtgagcaactggctggtgctgacaacgactcatctctgcatgtgttggtgggcggagtcttgaacgagctcaccagggtaagtctttttggacgcttccctttttacttttcacacttagctccatatgctgacttttttcctttgtgcaggccggtttgaagttggcttacacttactcccgggctaaatctgctacttccaagagtgcggctctgtccgacaccttgagggcggaggcggactctgccaagaaggaagctgaagaggccagggcggagactggagctgtttgtcgtgagttgggtgaggccaacaagaagttgtttgttgctgagaagaagatctccgtgctgacaaaggacctcgaggctgctgatcgctttgaggaaaccatcgagatcttatctgctgaagttaacagtcttcaggatgagaggagttctctgtggcaagttcttcttcggctaaaggaggagagggacgcccaggtgaccgaggcggaccgtttgaag

SEQ ID NO: 370261 - DNA, 642 bp, Cannabis indica
ggatgtatcaacttttcagttagcaatattataaagggaacattagtgagactgggacacaatcttgtggctcaaggtttctagatgcttttagaggagccactagggttattggttaagcgggaaattgattctgaattgaagtggtaatgggagtaaaacctgtatctaaaattatgaattggatggtaactgtagaattgaaaggagtgaagattcagttgtaggaaaggttgggcttgaaattactagtctaagtattttattctggaataaaccagttttatttgtgaagaataagtatcctttgataaggacagatgttatgttgaacaatttagggaaggatcattttctctagggtctgtcttcgatatggttattaccagttgaagactcgtaccgatgactttgtaattgttttcattaagggtattgtgatttcttcggatccaagggaggcatatgagagacacccttggatgatgttgtaatgtctctagaagcataagttttatgctaaatgtaagaaatgcgagttttgcagatcccaaatttgtaatgaaggttagagattttctagaattaacaggatactacaaatatttgttggggttgtcaacgcccttagtggaatcaaat

SEQ ID NO: 370262 - DNA, 715 bp, Cannabis indica
aaaaattaaaatcggaacaaacatgaccgaaaaaactaaaatttccacgtgtttataaatatacgtatataatgtatatattacataaaatattataaatatgaaggagagtattataatcaatattatgcaataaaacgtatatataatacatatataaatatatatacatatatataccgaaaaatatatacatagaaccatatataatatatataaatgaataaatagaatatatatatgtataagaattattggatttgaagtatatatgtataatatatatgatataatgaataattaaatgaaaatttatatataaagatatatataaatcaaccaaatatgaatatttatatgtatgaacactgtatatgtatatatatatatatgaaactcaaacaaaattaaggcatagataaaactgctttgatactaattgttagacatttattatgtataaactgaaacatatgtatgtgtataacatgcggaataaatgaacatataaactatatgattataagatcaaaatacttccagtcattgaatctttgagcattagtcccacataagcttgatatgcaaaagaaactgattgatgtgggtaatcgggcttcctcgctctctcaactctctttagatagaatttgctgctatgaacagaatgagtgaggagcttggagaccgagaccctatatttataggtgagata

SEQ ID NO: 370263 - DNA, 555 bp, Cannabis indica
aaataaaacaaggcttgctcaagtgttttcggttgactcctcggtttcctggcacgagctttgagcgcaagagggcgcatttaatgatggcttttaatgcagcgatttactttttgcaggggtcgattcgtttcacgcccattgattgatacgacgcattaatggtgtcagacggatactcaaacgtttccaccgccttaattgcgagtcaatctggtccgttgatctttgagaattcgaatcgtgtgtttcccccaccgttcgattggtaggtgatagtgcctgctcctcatgcagttttgcctataaaatccaccacctttccttcatttcggttacttcccatttcttgccaactttgctcaaatttctcagagagaaaaattctcagaccaaaaaacactgtcaaacactttgcgatttttcccagttcatcttcgttcgttactgtcaatccttcttgtcttcgtttgatttacagcaggacccccagtctcaacactttactgtaagtctcttgcacccctcgctttattgttaatgtgcatggcatgc

SEQ ID NO: 370264 - DNA, 622 bp, Cannabis indica
tggaatggctattccattttaaaaggaaggaatgaccattccaatgtaacaagaaaaaaatttaattattttttatcaatttttttatccatttcaaattttattccattccattcctattctcattcccattcccattcctattcccatattttcattcctcccaaccaaacgcctcctctgtaatgtaaataaaagaaaagaaaaagaaataattaaaatgataaatatcattaaagtcaaaacaaaaactccaccattcaagcaattaaataaattgtaattaaggacttacaagaaaaaaacgtaattaacaaattaatgaccaaaaaagcaaaccataaccgccttagtccagaattccgccacacacttcccctccggcagttgggaagggctggaactagaaaaaataatagtctcaactctcaacactccattgtttgatggccatcactattacaacgtaaaataaaactacaaaatatataagggaaatttgaaattatatgcatattagagactaaaaattggtatcctaatctaaaactatacataatttgtaaaaatgggataacttttacttaaacccaattttaccccctcatttctaaactactct

SEQ ID NO: 370265 - DNA, 863 bp, Cannabis indica
tttataataaaaaaataacaaaatttaaaagttagcataatatcctatatctattcaaaatatcatgattataataatcttattttaaatttaaataaggtcaatttatttaaaaaaaatagaataatttaaaaaatattaatatctaaccttaaatttaaaaataagataaaataatcaaattttaaaaataagataattaattaagtaaaacagatagatttttacctaattcaaattcaaattaacactaatatcttatattaattttaaaaaatccaattaatttaattctgataattagatttgaaatatgaaaagtaaaaatcaaaatacaaaactaccccaaaaatcataaattaattccataaaatagcatgaaaaatcgaagaacatcgaaaaaaaaaatgtgagttgtacggatggtatgcgttgcatactcatccgtgcacgcccacagagtgcacagccaagaaaactcggcaccaggggctgctggcatgaaaattcacaaactagacatagtctaattttaaaattataattgattaatcaaaatcaattaactgagtcttacaagtagtattgtctcaactcgtatggggaccatgggcctatatatccgagcttccaataagtagaccaagaacttaccaagtaaattcactgacttatatgttccaccatataaatacgctatcaattatccattgttataatcccaaattgatcaatgatcctctatagatgatttacattgtatagggattaaattaccgttacacccttcaatgtattttatccttaaaacacttaggtggcgtttggttggaggtaatgaaatggaatggaatggaaaggaa

SEQ ID NO: 370266 - DNA, 620 bp, Cannabis indica
aataaaaatattacttgatttaagttgatctaaaattaattaacaaattaatttttaactttaatttaattttcaaaattttgaaatatctacatttaaataataaatgtatttcgaaaatttatgtgtgcaatgattattaaaataaaataaaatatctactaaaaattattttaatttaagttaatttgaaattaacaaattcccaacataaatataatttttatttaattaaatttattagaatagaaataaataattgagtatcttgaataaaataaacttaattattaattttaatttaagttataagagaaatattctaaattaagttgacctaaaattaattaataaattcatttttaacttaaatatattttcttgtttattaaatttattaaaatagaaataaataattgagtatcttgaataaatcaacttaaaattgtaattctaaattaagttctaagaaaaatatcttaattaagttactctaaaattaattaacagattaatttttaacttaaacatatttttctacttaaataaatattagaaaatataaattagttactgaaaatcactatctataattttttctttaaactaagtgtattttt

SEQ ID NO: 370267 - DNA, 737 bp, Cannabis indica
tgggtccacgtctagaaatggttccatgttcgggtcttggtacgattaaaagatcgagacaccgactacgggttgtgtccaagctttaggttgtgggtcaagatccggatcccaatcttgggtccagatcttgttccgattcagatcctaggtcctagttcgtgtccgtgtccaagtctgggtctgggaccgagaccggggtcgggtcttgggtcccagtcccaatcttgggtctcgattctagttctaatttcgggtttgggtcaccaatctaggtctgggacttgggtacaagtctgaatctccaatcccggtctggaatctacgttcgggtctaggtccaagtctgtgtctgggttcgagttcgtgtccagagtcctgatctgagttttgatttgggtccatctcccggtctgggtctgggtctgggtcctcgtcagattccagttccaggaccgagaccgagtccttgtcccctgatcttgttcttgggtgtcggttcacaaggtacgggtccaggtctgggtccgggtttaggttcgagtccgagttagggtttaagtccgggtatgggtcccagatccaaacatcgactatgggtcaggtccaagacacgggtccagatcaggatcccggtctcgggtcccaatctagttccacttcgggtcccaggtgctggtccgggtcctagttcagggtccgggtctagggtcacgtctttggtctcgatgccagtt

SEQ ID NO: 370268 - DNA, 876 bp, Cannabis indica
agagagaaagcaaatataaatgttaaatattggtaaaaaaaaaaagtcacttagtataaaaaatccctaaaaataaacaactagaaaattcgtattcagtttctctttctctttttatcttcttcttcttttcttcttttatattttatattattttataacatgttatcagcacgagtctatgtccaagctccaaggtaagtattttgttaaagttcttgaattatttcaaggtcatgatacactaaatatatatttatatatatactcatctgactgaaacaatttcaagaatcttttttttttatttttaatctatttatatatctatattatttatgtatgtgtatatatttttattctcatatagttattcttaaatttatttatatatattatatgctcatattatttatctatgatatgatagagaaggcgaccgattttgtgcctagattttaaacggattgctatccattgtatggccggtgggtccagtggtatcttaaaatatgttttaattttttttatttatttgaccggttgttgtaggtttgtttaccggttgttaatttaatttttttaattaaaaaataaaaaggtacaatgaatttactgtttgtggtagttaaggtacgaaaaggtacaacaaagttactgtttgaggtagttaatagtacaaacgtactgcaaatagtgagtccatgttgtcggagtgagattattttcatcttttcattccttcatattttctatatgtttgtgcgagggtagttgagtacattatatcacgtagcgtgtacatttattatttctgcatgatgttgaataaaacttgtgtacaaaatatcacgtaccgggtgttgagattttatg

SEQ ID NO: 370269 - DNA, 998 bp, Cannabis indica
agagattcattatcttgctgacaaaagttgttgatttcacctcgcaagttggctgactttgctggaggaaagaacttggacagaaattttgtagccaagtcattccatgtggcaatggagttgggtggcaaggaaattaacaaactttttgctctctccctgagtgagaaaggaaacagtctcaatcggatggcgtcatcactaaccccatttactttgaaagtctggcacaactctatgaagtttgatagatgcagattgggatcttcagaagagagtccaccaaactggactgaagactgcaccatttggagtaaggcaggcttgatttcaaagttgttagcctccactgccggtggcctgatacatgactgagcccctgtgagagtagggagaatataatctctcaagctacgaccattagcttgatcttcaatggcacctccattattaccgttgttgcctctattattagcattattagcattttcagccatgatctctagtgtttcagcagttgctaaaactctttcttgcctcttgttctttctgtttctcctacaagttttctcaatttcaagatcaactggtaatatgactgcttgtccttgacggctcatacacttaggattcctgaaatagataaagaaaatattgcaagaaaaagattagtaattagcaagaaaaataaaccaaagtagaagttagtataattttgtgtaatattaatctttatacaattccccggcaacggcgccaaaaacttgttacgaaaattatgaacagtacgcaagtatacacaatcaagtagtaaactcccacaggtgaggtcgaaccacagggaattggattaactaccactaaattatacttatgattctatctggtaaatcaatactttttatgaattcaataaaataattcaaaaacttaaaataacaaaagaatattaatcaagaagagaaaatagggagaagaatcctgttgttaagttacca

SEQ ID NO: 370270 - DNA, 623 bp, Cannabis indica
aacataaaatgttatttctgatctttattaataagtaaatctgattatttgaaatgggttttatttagggcacaaaacccaacaggaacgaggtaagataacatgaaaatttatatatatatatatgaatatatgcttgttttaactatttacactactaacactaattgtttatgtgattttaagggtgttagtatagtgtaggatatcggtatggttacggtgttaccaacacgagtatcagggggtacgtcgtgcatgtggtacaacacttagtaatttccgagattacattaatggctctaccaacacaagtacagagttggtactttggtgcatttggtatagaggtcatacttcctttaagaacgttcttagtcatttggtgagctcgttgttgagctcagggcggcttaagtaataagccggtccagcattgcttatatatatgttttgcatatcttactgagtctgttgactcatcagtatgctaccttgtgtaggtaaaggaaaagctaagctggaggaacagtgagatggagcttggcaatgattgtacatattgcagcagtgcaacctggagggtctcggtctttcaatattttgaaatataatttagttgc

SEQ ID NO: 370271 - DNA, 577 bp, Cannabis indica
tttttttatatccctttatatataatatatatttgttaataatataaatataataaaggttaccactaacgaaagaaaaaaagaaagtcaatacacagtacactgtacacatgcatgcaatgcttgttaaattaaaaactaaactaagtcaattatttatggttagttttagcctaattttatgggtttttattttgaaaaattttaattggttggacttttaaatttccaaccgttacttacattacacatcatttatttttatttttatttttctgaattgggaatatgaaactattatatatagttgtggagattgttttaattttacacactctttatatattttattatttttgctcataatatatttgctctcatattttattattctttctccttcaaattatcaattggtttgcaatttgcatagaagaggccaagaaaaaatacatatatatatataacaggtacacatatacattttttaaatataattttgattaattgttgttaatttctaggaaaatttacaattaaacacgtttttctcaatttaatatcaataataacgtgg

SEQ ID NO: 370272 - DNA, 1146 bp, Cannabis indica
tttgaattttttatttataaaaatatcttcttagtaaaaataatatattattttttttggttgttttataatttatttataattgtattatagttattatgatgttttttttttattgtttttttgttattttataatttatttataattgttataaaattgattttttgttatttttatttttttttatattttactgagcaaaatttatttttatagttttaaaaattttacaagcctatttttgtaattaaaaatttgaaattgtaaaattataaataaaacataaaaaaaaaattccatttttttttttgattcaaatagaagtaggcaatttggattggaaagctaggtagaatagtattaagtaaccaatgactttttttgtttttattttggataaaagtttacaattttactatcacacgatttttttttacaaaaatattgtctttttataaaataatcgtaaaataataatatagaacaattaaaacaatagtggaacaattaaatactgtgaaaagcgcctactggttgttgcagcaggctactcgtgatgctgttgctgttaatgaccaagctttatttaagtttttgtggcagctggacactccccccgaaagtccaacattttctttggcgtgttcttgtgggatgcctccttactaaggttcaacttggcactaaaaatgtaaatgttgatttgtattgtcctttttgtaactctgcgttggaaactattagtcatgtgctgattgagtgccggtttgcaaaatcctgctggtgtgtttcaagcgttcctgctggtgttgataatgttgatttcaatacctggttctttgatctttctagaacagcgtctacagctgtggtgaaggaggcagcggtcattagttggagactttggtctgcccgtaatgaactgctatggaataaaaaaatttgttctgctatggatgtagtccgatcggctagagtgttgcttgactaatatatttctgctcaatctcagaaaacgggtgcattattaattgacaatattaataatgtcgacgagcagtggaggaaaccagtatttcatatggtcaagataaatgttgatggggctatttttcagaatcaaaacaagtttggctttgggtg

SEQ ID NO: 370273 - DNA, 624 bp, Cannabis indica
atagttatttttctgttactgttatatttttttttgtacagttattgtttagtttatgtgcattttttatggtgtatacatttaatttattccacataatttttttgttgtatatatgtgcattagttttattatttttatgttatttttttttttttggttattttttaagtggttttcagaatatttttttgttcaacggtcattttttaattattttttttattcatgtgtatttttttatggtgtagatttttagtttcttcctaataatttttttttggtttgtgtgtgtgttgctttgtagtttcgatagacatatctagtttttttaatacattttattaaaatacaatgattagttttttttttttaatttgacactatgtacaacagtagatattaacttattgattatatattatcgattatattatataccccattttaaaatcataaaattttattatttttattattaatgtaattatttatttaacttttaaaaaataaattatcattttaactgtcactaacatataaagagaaggagagaaaaaaaaaagttgaaagtatgaagttgtaacaataaatttcatgaaaaaaaaaaataatgtagtagta

SEQ ID NO: 370274 - DNA, 759 bp, Cannabis indica
taaaattgtgtcacgtgtacactgtgtacatgtgcacattccaacctggcacttaacaaccaaaaatggatggaaagggctaactgctaacggactaatggtttaggtagttttaccaccaaaattttagattagggggttagttgcaaaaacctgtctactttaggaggttttgccgcaaataacccctttttttttgccaaaaatactgagagactatttggtaatgtttttaatttttagtttttagaactgtgtttttataagtaagaacagaaaataattttttatcattataaaaatttaatagtgttaggttttttaaaactattgttagattttttttttactaaaaacatcaatattctacaccataccataacataaatccatccaaccctggaccgaacaccgaacccaagcccggaccccagacctgaacccaatcctagaccccaaacccaagcccggatctgatcccgaacctaacccctactcagacccggacttgggccggggtctagggtccagtgtcggggtatgggtcttcgtccgttttaggttgtttttagtattatttttaggttagtttttagtatgtttttaatttaattctactcttgtttggagtaattttacgctttttatcttttatttttgtatatttaaaatagaataagattagaaaatatcaaaggaataagatggaaaaaagatgaaaaagatctcacaaaaagataatctataaaatagagaaaa

SEQ ID NO: 370275 - DNA, 877 bp, Cannabis indica
gctggttttgatgtttgggattggtttcgtgcaagtttgagctttgagttcaaagctttgatctccaatggcatgttgagtttcattgcgtttttttgtgaaatactggctggaatatattgtgtataccctaattaggtgttctggaaagtatggttgcatttggtggaggattgagcatgaaatggaaaatttggggtgaactagtgcaaaccggctagccggttttgccagtacctataaaaccggctagcgggttttggcagggttcccaaatgcttcattttctcgattttcgtccatttcactgtcgtagttgggtgttttcctttttctagagttagagtaaaccctagagagaataacaaaacctagggtatgggtctggctttcccggattagggttttgatcgtatgatttaccctgtttcattatatgattagggcatccattttgcactagactttccgttcaagtcggacagcacacttgaatctggaaagaaggtaagagctgtgtataatgtgtaatatgaatatctgcgtctatatacgtgttaagtgtatatgcatgcttatggtttagttgcactaccaacacttgtacagtatggtacagagtgcatttgatatagtgaatattgtttatgagtacagtacagtgataccagcacaagtacgggaaagtacagggtgtttgtggtatatcactcagtggtactcagggtacgaaagaaaccctacaaactctcgtatagcaaggtacgtagtgtatgtggtatagtggatgtaccctagtatggaacattcttactcatctgttaagccttgtaaataggtgtatgggcgcctaaatacaagtcgggaattatatgat

SEQ ID NO: 370276 - DNA, 507 bp, Cannabis indica
ctagttccatttgcgattctgagttcgagtttggatttgagtttgggtcgttgttcgagtcctagtctgagtttgggttcgggttcggatttcagtctaggtccagatcaagctccaagtgtgggttcgcatacctcatcttggtctaggttgggtccgagtccaaagttccaatcccgatctgagtctagattcagtttttggtctaagtccttggttctaatcctggtctgggttcgagcttgggtccgggtcacggtctagcgttcggtctgattctatgtgtcggtgattgagttcgggtccgagtctgtgtttgggtttgtgtccaggtctagaccccgatctgggtctaggttcgggtccaggtccaagttcaggtcccgagtccggctccaagtttttgtctgggtcaggatctcggtccaaatctaggtccagcatttcgaccccagtctggttcttggtccgagtccaggttcgtatccggatccctatctaggtcca

SEQ ID NO: 370277 - DNA, 590 bp, Cannabis indica
agtttagttgtataagtaatataatttaaatgttatattctcattttgcttgattcaacccatccattattgaatcaacgtgttaattgagactttttttaattttctttgacattggttgcagcggaattaaatgactcattccgctcagatctctaacccttgtatcatttttgtaccagagtataatcaagatccgagcccgatactccttcagttatttaaattcttcacagtcttacacagtatgattgaggacaaacttgctatgggtgggcatgcactcaatcactaaggctcgaatttttatggtgaagaacgctaagaatttcgaaatagtagagagaaaaaaagaagaagaaatctcaaaatactagttgtgtgacaaaatgaaaactaggtttagaagcattagcaacattagttggaccgtgagacctttcttttctttttatactaattcacatagggttaggaatgaattattcggaataaaaaataataaaataatatcaaaaataggacttagtggtcggcccctatgtgggtccatcactagttaaaatttttgccatttttctcaaccattt

SEQ ID NO: 370278 - DNA, 641 bp, Cannabis indica
acaccaagaagttaatgatttgatttaactaaaggagtcaacaattcatccctcgaagagtcatctccaccaaaaggtgaatctcctactttagttggtccaccatcactgaaaaagtcgtacaaaccaattgtaccaacttattgaaaaaatcaaagaaagaggagcccatcaaggagatccctaaaactattctaaaaattgaggtaaaaattccatgtcttgaggaaatcaaagaagagcctccttgtgctaacattcttaaggagttgtgtccaaatgagaaaattttgaatggtggtgagaaagtaagtgtggggaagaaggttaaagtagttctccaaagaaagttgttgcctgagacaagtacaattccatgcacaattagtaaaaccaggtttgatcattacatgatagatttaggagaaattattaataataagtcttattctaattttacttatttaaatcttggtccattaagagaaactcaggttctaattcaattgactaatcagactaatgcttatcctttagggatagttgaagatatttttgtgcagagtaatagacttgtcattccaaatgattcctacataattgagatggaagatgagggtgatcccaattctacatcaact

SEQ ID NO: 370279 - DNA, 517 bp, Cannabis indica
aaattagacatatagtcatatataaaatatatattcattatttattataaacggtctgatccgatttaaccattaattatttattacgaaccgcaaccgaaccattacgctgtaaacggttcggattgaccaaaccactaaaacggtttctccggttatggtttacagtggttcggattgtcgtggtccggatttaaaccacgattttccggtttatatgaacagccctacttattagagcatctctaatgggggttgcccattagagtggtcttgccacgcacgcaatgtggttcactttttaagactaattttatgtaaaatcttgcttaagataaacaatgggcacttgacattttttttattaaaaaaaatgtgataaattttatgtaaatgagagagaaaataaaaataataatatttttaagatgatgtgtgtattttgacaactataaatactattcctatgggagatcacctccaataaaaattgtccataaagtagtctttaacacat

SEQ ID NO: 370280 - DNA, 858 bp, Cannabis indica
tttttttacttttttactaaaatttaaaattagagaaaagtccttaaatctaacaatcttaatagtttagggagaatttttaacgatcgaaaaaggtcaggggacatgatttagtacatgtcaaagtttgggggggaaaattactaattagcctatttatttttgtatagatttgatgtgttttctccaagtgtgtaggtttgtgctgaaaagatattttatgatggactgagatctttgagaccatttttgacaatgatttcatcattttatcgaagagcttatgaaacccaaaatgacagagctcgttaccagctttccaaaacatgttaaattatctcatttggagtctgaacgcaaaagttatgcatgatttactgagcaaggtcgaagtagaaaaaattagtgttgtgcgctatagcgccgagggtctgcgctatagcgcccggccggaaaaaaaagattttttacgaaaaaaaagataatttcagcacgggttcagaattttttctcttcggcgctatagcgtggggcacctatcatttttttaaaaaaattcctaattctgttaattctatttttgacatatttaattgacaaaaatattttattatttattattattttcaactggtatgttcaatttagtttccttacattgtgtatccaaacttggaaggaaagttatctaactttcctatttttggaaaaaaatgtaaaaatggtaagtttggttactcatttcttttttatctaactagttggtatattctgatcttgtgtgagtttcccattttcttagatcatatttcttgaagagaaaatcggagctgaactttccttttctataaaaggaaa

SEQ ID NO: 370281 - DNA, 674 bp, Cannabis indica
ttagaacaacttaaattagatatcttcaggatttattttattatattttatatttcgaaattatatattatatatatttagtttttcgaaattatatttggatcaactaaaattaataatattattaaaatataatgattaaaataagtgattaatttttctcaaaaaaaaagtgattaattaaaaatatattaattttaaaaaatgagctttaatcaaagagatattcaatctccattgttggttctacatagttcttgttttagtgagattcatccctaatagatggacgttcttagcaatttaacgtcgtagaatctcgaaagataagtattattataagtcttttattcttaataatgtccatctcaatagtggctgctaagggttgggcttacaaagtatgaaacaatggtagaagctcatgaaataggaatgaccttgactctcgcataaaacgaagcaacgtcagattctctttttgatcgaataaaaggtttctagaatggttttcattttagatgagctgactactctattcaatggatgatatctttgactctcgcctaatatgggatactgtatcagtttgttggaaatcttggaaaataattgaatatgtgttatttttggtatttttccaaacatgtttccttacttgttattttctaaat

SEQ ID NO: 370282 - DNA, 396 bp, Cannabis indica
agagagagagagagaaataagcaagaatttgtattgatttcactcaactaaattgtgcttcgtacaagagctgtttaaatagggagaaataagaaagagatgagttagctagggatactaattaaccatctaacaaactaagttaaccaagatgaataattacctaaagttaatcctaatacaccagctatctaaatgttaaaggctagtgatatattactcaggtagagatttaatttttattttgttcgctgtatgaaatttctatttttgttagctttctgttttaagtggaatttgattttcatgacgtgttagtatttttgaatttaaacaaggctaacttgtaatttttccccctgaactttaacatgtagtaaatcatgtcccctgaac

SEQ ID NO: 370283 - DNA, 446 bp, Cannabis indica
ccattgttgcgctgtgtcagtgagggttccacggaaaattcgacacctaaggtcatccctgattccttgaaggtccatttggattttgaagttctccacatgagttagtgggtcttcactacccgtgtacttgcaagtgggcatcttgaactttgctggaatagggaggtcattaatcatttgggagaaggcagaccctctcctcctttccagatccaagtcagtgggttttggtgcggtaaggtccttgaccaatcaggttaactcgtccaaccgagcctgatcaccggatatgtggctgtttgagcaatattggcaccaacattcgcttggtccctttggtctgggctcagatgggttcactatgttggaaccacgattgtctctatttctgttgagggcgtcccgcaggtctctaccccctcgggggcctacccgttcaaaaa

SEQ ID NO: 370284 - DNA, 554 bp, Cannabis indica
gtatttttcattttgtaacaatggaagaaagcaactgtcaatcaagtaaactattatttatacttagcaatatattttactcccaattatttatttccttaattcaactagcaaaaaatttacatttgaatgtaaattttactttaaaagatgaggcaaccgtctatcaagtaaattttttatataacaaaatccaattttattatttgaaaaggcaaccagcagctaattccacaatcgcaactatgtaacttttaaaaaagaggcaaccatccatcaagtaaacttttaaggagtcacatgtaaattgcaatacatgatcataattatgtaacctttaaagaagaggcaattgtcgatcaagtaaatttttaaggcaacaataaccaacttaattgtttcaaatgggaagcagcgacaaattctaaaagagtaagtatgaggcaactgtctatctagtaaatttttatagtaacaaaaacataattaattatttaaaatagaaacaaacaataaattctgaaagagtaactatggcttctttaaagaggagg

SEQ ID NO: 370285 - DNA, 767 bp, Cannabis indica
ctagttaaaaccaaaaaattgtcgttagataagctattttttaatatataaagatatccttcacacatatatagtaaaaataaattaaaaaaatagtgaaatgtatgtttttattattattagtttatttattaaattatttattttttaaggataattattagtttattaattactaaataatgaatatattgttagaggggataggccatcaacttaggatttttgattgatgtgagaacaactaaatttaacctaacatcatagattcataatctgctttcgtttgcctaatttttagtagtttcgcttccatgaaaaaaagactagaaaagagactattaaaatactcaatatatttaaattgttgtataaataatgattaaaatgtttaacaatttttaaatactattttcttttaaaggtaattgggatcctcgatattaaactgcacttttatttgtaaatttaggtgtcatttgtataatgttctactaaattaagtactattttcaaattattgtgcactttttgctaattaaagaattaattaaaaaacataaataataaaaaaaaaattataaaacaaaattgaacttaaatatgtaaatatgtaaagacatttttttggttttttaattaatatgtattttttcatacaattaaattgattttattacattaattttgtgcctctaattagtcttttttttaaggaaatatttcttctcagctcgtctcattttgtttagtaaatttcttgtaag

SEQ ID NO: 370286 - DNA, 625 bp, Cannabis indica
ctaaatttctggggggcagttttgtcccatagagttcgctctaagattttagtggcatatggttggcaaagcatgctctgcatttagacgatgagctatcctggttcgaggaggttctaacgtcggtggcagacgtgagcatcgtaaattcatgaatgattctaatgactttgtcaaaaaaaaaaaatatagatagattgagacaaataaaaatgacaaaaacaattattatttatagtatatttatatataaacaaagaaccgaacaaacaaatcatctaaaaatattataacattctcaccaaatttatttttaatataaatatatataataaaatatataattatacactattagatgatcttttatttatttatttttattttattttttttaaaaaaaaaactttctaatatattaattatataagattaatttaatcaattatgaagaatgaaaaaaaatataaattttgagacaaaaaaccctaaataacaaaagaaataatttatctacagtgtatatgtcatgtctcacttcactttataaacaatataagattattaacaaaaataaaattagtgaatatttatgcttttagcacattaacataaacttctcaca

SEQ ID NO: 370287 - DNA, 684 bp, Cannabis indica
gtcttttgcctcctaatggcctcgaggaagttgagaccctacttccaagctcacccaatcaaggtgttgaccaatcacccacttcggcaagtcctacaaaagccagaggcatccggaaggctcctcaaatgggcaatggagttaagtcaatttgacttacactacgttccccgtatttccataaagggactagcagacttcatcaccgagtgtaatgaagccgaagcaaccgcgaacgtaccaacaccgtcagtcccggcatggaaagtatttgtagacggagcctccaacgaaaatggatctggagcgggggttgcgatgatatcttcgagtggacttcgactctaaacagctctacggttcgacttctcggcttcaaacaatgagcccgagtacgaagccttgatagcagggctgagattagcaaaggttgtgggggctaaaagattagaagtctacagcgactcccaactagtagtgaaccaggtgtcgggagagtatcagacgcgcggagaaagaatggccgcgtatgtagcgatagtccgggaactgctccacgagttcacggattataaaatagaaagaattccaagggaaaagaacgctcacgcggactgtctggctaagttagcttcagacagtgagattgaggaactgggggtagtacccgtggaacgcttggca

SEQ ID NO: 370288 - DNA, 785 bp, Cannabis indica
aatagtctataggattagtggtacctttatatttcagagactcggataaacgaaatcctttaggtaaacgagcttgtcgcacttccgtggtaaagggagatgtcccatgcagcttgtatatgtgctttctctgctgttcgattatcttcaaagcttgtagaagcataccctgatggatacctccagctaaggcggtgttgccttcggtcgtcgcaggtgcacttactactgcggtgatatcttcagggataacaactccagtagtcgcagctagtgcagtaggtgggttggtgtggttgtttatgccttgatcgcccaggcgggatcacgaggctcttcctcgttctggggcgtctgggaacgcgccctaaaaatagcgttaaggtggtcgcataggttgcccctgtgaacttggtatcttcctcctcgcggtgtctccactgaacctgacctggtgtacctgcttggagttcgactttgtgaagacgaagagccgaactcaacgtcactctactcgtttcgcggttgggggtctgctgcgagggttacgtcgctgtggatcttcttccggttgcaacccacggttgaagttcctcgcggattgatccctcgacatcggctaattttaatcaagcccttcttgatctattcttcgttccctgtgagcacggttagtttgacgtctagagtttgttacttgaggattatccgagcgggtagtgggcactcgaggaggatgccatcaacgacaggtgtgataggtgggaactgttgggttttatgcc

SEQ ID NO: 370289 - DNA, 735 bp, Cannabis indica
tggaacttgggactcggacccaacctagacagagacccaggacgcgaacccacacctagagcctgatctggacctagactaaaatccggacccgaacccaaactcacacacggactcgaactccgacccaagctcaaacccaaacttgaactcagaatcgcaaatggaactagaaccgaacaaggactaggaccagggccaggaactaaacccaaaccagaacctagattaaaacccagacagagacctaaacccgaaccgagactaagactcgaacctgaacctagactgggacccaaacccacacaataatcagcacctggacccaacatcatgatagggacctgggaaacagaactaggagagggacctagtacccgacccagactcgaacttgaacctaggacccagctcgtgacccgccaccagaaatggaacaagattgggaccccagatagagatctggatctgaacccagggcttggacaaaacctgtattcggtatttggatttggtgcacatcctggacccaaaccctgacaaggacccgaaaccagacccaaaccataactgaaattagacctcgatccagaaccgtaacaggacgaggacccagactctaaatcagacctagacttgaattgggagccggagccggatcccaaccaaaacctggactcgggagccaaacccgaacctgaactctgaccaaaacatggaaccagattagggaca

SEQ ID NO: 370290 - DNA, 540 bp, Cannabis indica
cctcgggaattgtgccaaccaatgtcagtaaggaaaaaaagtacttggatggattaaatccgaagataagacatgatcttatgattactactgatgataacaccacctatgctgatagggtgggcaaggcactaccagctgagggcgtagaggagtgcactcaggagtttcgagggactcaggtcgttggtggggctcctactcctcctacctctggtttagtaggggtggtagtaggtcgagcattgatcagaaaagaaaggcaccaactgcatccagtggctcaagtaagaacaagaggtgagggaaccagggtcgaggctgttggattatattttaccaggatctagatttactaacaagtatgtttaacatcctaatatgaatttctaaaacaatgtaatttaaacacatataaagtttgagaaaccttacaatggttgcagcggaattaaatgactccttccactcagatctataacccttgtatcttttctgtagcagagtatcatcaagatctgagcccgaactaccttcctt

SEQ ID NO: 370291 - DNA, 924 bp, Cannabis indica
ctcatctaaaatgacaaatattctagcaaccttttattcgatcgaaaagagaattaagacgttgtccccattaaggcgagagtcaaggtcacttcctatttcatgaacttctaccattgtttcatactaagtcttactcttagcagccaccattagggtgatcgttactaagaataaaacacttacaaaaaatacttatattttgagattctacgacgttaaattgctaatgaacgttcatccattagggatgattactcactaaaacaagaactatgtagaaccaacaatggagatcgaatgtttctagattaaagctcattatttaacataaatttttatttaatcatttattgtagtctatatattttaataataaaaattacttaatttaagttgatccagaattaattaaaaattaattttcaactttaaattaatttttgaaaatcctttatataaaaaatatatattaatttcgaaaaaatattaaaatataataaaataaatacttaaaaaatatctaatttaagttgttctaaaataacaaaattttcaagttaaattattttccaaaatttaattaaataaaaaattaagtatcttgaactaatcaccttaatttgaaaaatattcaattttatgttgatccaaaattaacaaattttcaacttaaaaaaatatttaaagaatatctgaataactaattttctaaaaaattctacttaattattaatttaaaaaatattcaaatttaagttggtccaaaattagttataataactgattttcgattaaatatatttttatgaaatattaaataagtaagtatctagaagaatccaattaattataactgcttaatttaattaaatacagaaaaaaacatatagtttatcttgaaaaaatttcattaaactaagt

SEQ ID NO: 370292 - DNA, 860 bp, Cannabis indica
tgatattttctaaagcttgatttaagaaattgttatgcattcataattataaattaactttatttgataatgctagtttcttcacttttatacttactaatataccattttgtcattggcacataccctttaaatttctaaaaaacactattaaatcatcactgtacattacattcttattattattactagacacattaacatgtctgacactatattaatatagtgtattataagtagacaggttaggttagtacttaaagcacacttattttaaggatccaaataaaatattattatttaaaaaatatgcatatatttttttaatatttttaaaaatattatttattttctcttaaaaaaagaatattatttatttttataataaaagcttaaaattattttttctaaaactcattttaactcaaaaccgacccttataagtataccgttgataatttactatttgacatggttttaactcaaaaccgacccttattaaattttctcattagtcttatcttttgacatggttttttagtttctcttgtccgtcttgtcttttgacatggttctatagtttctctctttggttttggtttattagtttctggcattagttactggttcttggttctgggttcgttcgggtgtccatggcgtcgagtagttatcagcgaatagaggcagcagagaaaatggcagggaattttatgccgaaatagcaggtgcaacctgaaatagatgaatttattggcataaaagaagctttaagctgaattgaccgtcatttgtggggacaactgactttggaaactaatagccaaattactttgtcatcctcttttggtctattagtt

SEQ ID NO: 370293 - DNA, 667 bp, Cannabis indica
gggcataaaacccaacaattgtgtatgtatagatttttcaaacataatagatttttgtttttgttagatggatgcgtagatttgtgagaaagttggcgtagaattttgattagaaaagaataaaaagtgatggggtaaaattaatggtagaataattataaaagaggtaaacctaataaatttttttaaaaaatagtaaaaattaaacacatcaaataagaaaaagtatgttgtataatttcgtcaaacaacaatgtatcaataagccccggcattaaaacatcaaacaatcaaatttgattagtacagcgcccacatttcattttttatttttttacaaataaaagaaagatatataatatatggtgtctgcacatttgataccatgtgttttatctaaatacaagttttgtaccctgtatttttaataatgctttatttggtatcttgtattttataatcatacgtatttggtaccctaaattcaaattttttttgataaaatttaatcaatataatcaattttctaaaattttatgaattctgaattcaaattttctttatttgatttacatataattgagaactgtttggttaaattataaaactatattgattaaattttattttagggtactaaatatgtacatttaaaatatgaggtacc

SEQ ID NO: 370294 - DNA, 645 bp, Cannabis indica
aactacttggggctgaacctctataaaattcttgtgtctttattcgctttattatattatactcgtattaaactacttgtcgcttacaaattagactcattgtcattggcgaaaagcgaggtcaacattttggtgctttcattgagagcagaatcaaggatcgctctttatttcaaatctaatcactagtacgatggtggtacagacttgtagaggcgtggttgatccggtgaatccacaggcggtggatcttgcactgccgaacccagggaacacaagggttccgccaaccgtaaatcccggacagccctcaaccgtgggtcacggtgtcacgattcctatgagtgaaattacgcctggtgtgcaagagactgggaatacatgttcagcagccaacaagggcattcatagcacggtcgttccgtctgctaccaatgttcaaacaaccattggagatgacactgaaatccagaacctccgtgctgctcttggagtcatgcagggtcatactaacaccttgcaccatgatcaggaggaactccgtgtcgtggtgaatctcgcgtttgaagagcagaggcgcatgttcgccgaatggagagataaggagatggaaacgttaagggctcagcaagcagtcattgacga

SEQ ID NO: 370295 - DNA, 478 bp, Cannabis indica
attgtctcaaaggaacctcagacgcctcagcttcccgccttaaaaatgaatatgggaaatcaaaagtaatcgagtgcaaccgtcagccgtggagagagaaaatcggattttgaaatatcaattgtcagagcatttattagccaaaaacaaaagggacacccagtcagcctcacatcgagtcttggacggtcgtgctcgacatgtgtccccatccgaaggcagaataagctcggataaagtctacactcaacttcggaagtcccgtgagacttgagaaggcaaatgttatctcaatttttgcactctgacgtggcatcacgagaatggtgacacgtggagtccacttggaacatctgctcgggaagacaggccgagcaggatgcctcgctggcatatccgaagcaagatattcagcaatctgcgcagagcaactaacagttagcgaattcagctttcgcatcatgagtcatcagcacaa

SEQ ID NO: 370296 - DNA, 702 bp, Cannabis indica
gtatggttcaaattaataaatatgataaatgacaatattatttaataacagttataattaaataatatataaatattaaagaaattaacaaatttttaaaatatgaccataattaaaaaataaaataatcaattattaaatttaaatctcaaaatatcaaaaattaataataatctattaaaaattaaatattattaatttaaaatgtatatttaagtttaaatacattaaaaataatatgttattttgaaattacggtttgaaaattgtaaaaatttgaaattggggaaatatcccacaaaaattggatttttggggttgcctgcccagtaggaggctgcatgtagcctccttatgtgagcggagagtggtgatgcagtgtgagacgccgaggaaactcagcatttggagccttaggacacgggtgcacgcaacatctcatgtcttatgatatgggcatgacatgccttcagacacaagttgtgtcctccaaacacttggtgcttgcgagcaccatggtcgacaccattcaaccccgaaatttcaaaattccataactttcttatttttgattagaatcgagttccgtaaaaactaaaattgcttaatttttcacaaggaatccaaataaaatattttcagaatgaaaataaaattattttcacggaaaatttcgtaaaacacattcaatcatcagatatg

SEQ ID NO: 370297 - DNA, 569 bp, Cannabis indica
acatgtgcaataaaatattttaatcttattttggatattgtaaaaactattcaaaatcttctaaaaattaaagataaccttagataactacatcgtatacgatcatcaaaatatggattaaaaagttctcttaaatgttgaaatagatagtgagtatcgaaatactcctttaagatagtgtactataggctttcctaaaataagtattagatcgacaatccgacttttacatcttcttcgtcttcatcaaaattaggtagataggttctttcggggaagaaataacatttatatttataatttttttttataaacaaccggttatgttatatttataatttttgttattgtactttattgcacaatggtatttgaaggtatgtgacaaaaaaaaattattactaatgataaataataaattaaatatttaacatataactaatagcaatattataatcaaaatatgtcttaaaatcacttattaatatttaatagaactattataaataaaagataaaaaaaacacttattatttgctaaagggaaatttgattttctatacttagaaa

SEQ ID NO: 370298 - DNA, 676 bp, Cannabis indica
aacttaattttacccttcccgttttaaacacctgaccctctattttcctctctcatttctcttgctctctgaactcactcaaagaactcaaacccacaactcaccatccacaccattggtcgcttctttccaggaccaccacgaccattgaaccaaggatccacgaacccaatgaccatcccagacctaacgacttctccatcaactacagcttcaccatcggtaatgttgttaaaggaataaattgtatgattaatgtttgttatctttgagtagatggtaaatttaggattataaatgaccagatttgagttttgggcaaaaaaattaatttttttgtcaggcccgatggtggtccgatgccttcctgttgttaaaatgagtaaaggttgaagacgaaggtccgatggtagtttgatggtagctcgatgtgatatgctctgatggtggtctgatggtggcccaatgccttcttgatgagcttaataaatggagcttaacatttataaatatagagtatggtctcatgatagtccgatggttgcttgatgctactttttttatgtacaaaaatatatatataaaaaaaatgagtagcatcaggctaccattggactctcatcggaccaccatcaaatatagatgagaatgaggagtatagacggaaaagttagaa

SEQ ID NO: 370299 - DNA, 384 bp, Cannabis indica
ttttcaatttctttcatagcaagatatgatacttggtcattcaaggtcaggttcactcaatttaaccaaggcctgcaaacagaattttatcttggcccactacctccataatcctagcctagcccattgaaatattttgacggaaagagaggataataagagttactattgtgatgaaggaaattagactctatactctttttatactttcttttttaaagtttattatttttactttttttttttataaaaactgtaccaatttcgtcctttcactttaaaatactctccatataactccattatatcagggtattttaggtacagtaaagataaaagaggtacgtttcaattgaaaataaattaaaataaatttaattattt

SEQ ID NO: 370300 - DNA, 616 bp, Cannabis indica
gcataaacccacaggtagtgcctatttcttgtctattgttgatgattattctcggaaggtttgggtttatctgttaaagcgtaagaatgtggcttttctaaaaatttgtacattggaaattacttgttgaaaacataactaaccggaaattgaaaaaccataaggacagataatggcctagaattttgtaatgatgagtttacaggttactatcaagacaatggaatccaaaggcataggacagtgaggaaaactcctcagcaaaaatggtgttgctgaaaggatgaatagaaccatattgaacaaagcacggtgcatgcttttcaatgccaggctcgcaaatggattttggggcgaagtacttgtaactgcaacatacctaatcaacagaagtccctctaatgcaattgaaggtaaaacccttgaagaaaggaggactggtaaaccatctgacttgtctaatttgaaagtttttggatgtgcagcttatgcacatcaaagtgtaggcaagttagagcctaggactctaaaatgtgtgtttctaggttaccccgatggagtaaaaggctatagattatggataaaagggaaaggaggtttcaaaactctcattagt

SEQ ID NO: 370301 - DNA, 629 bp, Cannabis indica
tgaatcttgttttatatctttattttttttttttcaagttgcctaatgagtagttatttatctacataatgccctttaagatattcatttcttcattcatgatatattgtaccgcaattttaattttgtgcattccacagtttaatttgtgtctcaaattaatattgtaattgaacacttattatacatagtgtaattactaaaaactattgatcttattattctaataagtcatcttaagaatggaccaacaaactcttaaaatggcaaatagttcaatatccatgtagtttagtaattataaataatttttaaataatatgacttattagaattttattaatgacttgtggattattaatgatcagttatggattatcaataaccattaatcttaagggttgttgtgaatcacaattaatctaatacttgaagtggaagtttaaaaaaattatatgaagaatctttctcaaaaactatatgtttatgtatccataaagatattaaatagactattttattcctttttgcatgtaagtttaatacactttagtatttctcttgaatgttattagagttagtctcacattgctaatgtgtagaaataaattgtgatatataatatgaat

SEQ ID NO: 370302 - DNA, 504 bp, Cannabis indica
aaacggccaaaggctggtgctgctactgcttctgctgctacaagttcaagttctgctgtagcagaactcctggaagtaaagtccgaacttcagaatgtgtataatcgccttggagcaatggaagaagtccaacatgagatatccaagaaattgtcttctttgattaaactctaccgagactaagttgtttcttctatgcttttggttgaacttatatctatttttctttctttgtttactttggtactccgataaacgaaaagggggagagatattatttttaatttgcttgtttgcccaactctggaccctttttccagggggagttgtggttgcttagtacttgtgaacttatcttttaaagttagcttgtttttaaagtttctttgttatttttgagtgtgttactcagggggagtagtgtcttttgctcttgctaactttgcattgcaggtactttatgttaaaaattattttgttcatctaaagtgccaaagggggaga

SEQ ID NO: 370303 - DNA, 1792 bp, Cannabis indica
ttctttgggttgagcttcattccgtatctccggaccacttcaaaacattcttctaagtcgtccgcgtggctattgcacgccttggacttgaccagcatgtcgtccacgtatacctccatatttcgccccaggaggcctttgaacatccggttaaccattctttgataagttgccccagcgtttttcagtccgaaaggcatgaccaggtagcagtatacccccttattggtcctgaagctagtgcactcttgatctgctacgtgcatttttatctggttgtaaccgccgtacgcgtccatgaaggacaatagtttgaatccagaagtggcgtctaccatttggtcgatcctgggcagaggaaaacaatcctttgggcaagctttgttaagatcagtgaaatctatacatactcgccaggtcttgttaggcttcggcactaggaccggattggctagccattccgggtagtagacatctcgaatcatgccgcttgttaacagtttgtccacctctttctctaaggcttcggcctttactgagtcgaggggacgtcatttttgctggaccggcggcatgttcggattgacattgaggacatgggtgatgacgtgaggacttatgccagtcatgtcttcttggcaccatgcgaaaacgtcaatggcacccttcagtgtctttattatattttctttttcctctggctctaggctctttcctagccggagtaccttggtggagtcgaggtcgcacactgacacttcctcaacgtcctccattggttctacaattttttcggaccccacacggggatccaactcgtcttcttcagccatttctggctcaatagtttctcggaccatcagtacgggtaggtgggcagcaacgttgtagcactgcctagcctccccttgatttcccctcacagtccctatcccaggcttcttgggttgggaattttaggcacaagtgccttatggacgtgaccgcaccaaagtccaccaaggccggttggccgaggattgcgttataggctgtcggacagtccactaccacgaacgtgcagtatttgaaggtgctctggggtgtgtctgggcacaaggtaactggaagcctcacttttcccattgggataagtgttgttccattgaaccctgtgagttgggaaccacttggcgaaaggtctcggtccgttaggcctattacagtgaaggcctctttgaacagcagattcacggaactcccattgtcgattaggaccctggccacgatcttattggcaatgggggtctctatgaccaacgggtcatggtggggaaaacgcactgttttagcgtcttcttccgtgaatgtaatgggttgatccattagccggggcctttgagctgggagttgggtaacttcccacacctcatcgtgtttcacggcccctgcgtaccgtttcagctccttgcgggtagtttctccaatgtggggtcctcccgagatcatggccactctcccgttgggtctaggtggcaggccgggaatatgctgagcatctccggggggaaccactggagccaatactcctgctgcaccccctggtgctccttgtggcaaagctccagccgcctgacctgggttgagatggggcaaccgatttttgatccactcgtagaggtgtcccaatcggatcaagttttcaatctcgtctttcagatttttgcattcattggtgttgtgcccaatgtcgttatggtactcgcacctcttagtgggatccctccggaagctgtctttgtacaaaggaggc

SEQ ID NO: 370304 - DNA, 502 bp, Cannabis indica
gtctggattcagttctgggtctaagtccttgattctgatcctggtttgggttcaagtttcagtccgagtacatgtctagcttttagtctgattctaggtgtgggtttgagtttgggtcagagtctgtgtccgtgtttgtgtccaggtctggaccccaatctgggtctaggtgcgggtctaggtccaagtgcgggtccaaggtttggtcttggtcaggatctcggtccagatctagttccagcatttcgatcccagtttgactctttgtccgagtcatggttcgtattcgtatccctatctaggtccaagtctgttattgggatcgtgtccctaatttaggtccaggtccgggtctcaattccggtctgggtacacgaccgtgtccaggcccgagttctaatctcagtttggctctgacgctaggtctgtgttcagttctacgtctgggtccgggtcatggtcatggtcctagtcttgttctagggtcctggttcggcgattc

SEQ ID NO: 370305 - DNA, 698 bp, Cannabis indica
aagttggcctacacttactctcgggctaagtctgttgcttgcaagagtgcggctctgtccgacaccttgaaggcggaggcggacttggccaagaaggaagctgaagaagccagggcagaagccggtgctgtttggttgaagttgggcgaggccaacaagaagctgttcgctgctgagaagaagatctctgtgctaacaaaggatctcgaggctgctgaccgctttgaggagaccatcgaaatcttatctactgaggtaaacggtcttcaggatgagaggacttctttgcgagcagttcttcttcggatgaaggaggagaaggatgccaaggaggggtagctttcggccgaggtggacaggttgaaggagacggtcaatgccttggagacagccggtctcgagctcttctttgatttttggaaggttaatccctgggccaactttgactacttgggcgatgccaaggacatgtaccttgagtactgcgcggcccaagtggcttatggtgggaaggaggcgggtgctttaacctccggccaagcagcttcaacctccggttaggctgttgatgcttctcttgttcaaacaacagatcctactgctccagttggaccagaagaaccgaacccagagcctgggactccagctgtttaaacacttctttttatccttttttttaatatatcttattcggcctc

SEQ ID NO: 370306 - DNA, 857 bp, Cannabis indica
gcattgtagaatcacccaaaaagatatatatttgaattaaattttatttagaagataaattaaattagtgtataaaaaaatagatatttttcaatttcttccaatactttttagcattatttattgagatttttagtataatttaatattaaatcttatataattatttgtaaatagttattttataatagtggtaggtaccagtagtatctaatagcgttgctattgtttttttttttcaaaaaaaaaaaaaattgaaaacggttcattttcaaaataaaaaatattaaatatataaataatttgtatatgttattttggggtgaaattaaaaaaaaataaataaattgaaacaacgacatatgtaataaaactatgcagtggtgcttaataacgggaaacaatacttgttacccttagtttattattaattaaattggtgtctacactataaaatggttaatattaaaaaagcttatttcaattagtataattaaatatcaagtcatataaattaattaaataaatttaaaaaatattcctaacaaataattataaagtgttatttttaaatagcactaaatactactaatacttaataacaatacttctataaaagatagcaattaataaatttctataccgatttttttgtaagggattctatatcctaattttattttaacaaactggcatggtattaccaaagtagctaattaaaaattttgctttttaaattttgatatgtatcaaatcgtgtcttttaaaatttttagaccattaaatttttgtttaactattgagattgttagattcaaaaatttattatgtttgatttcgttcaattatactaatgt

SEQ ID NO: 370307 - DNA, 606 bp, Cannabis indica
ctctaggacagagtaagaacagaaataaactactagaacctagatgagcaactaggctctcacaaaataaagaaactctcttctctcaaataagttaagtgcaaaaaatgaacaatggaagaggtaattcgaatggcttctctctaggctctatttatataacatgaaaaccttagagaccatcacaagatcgaatctacagctctacaaaaactttcctaagaaaacacgatctgcagcatcagatttggatgctgacgcagcagatcagaccagaatcgggaaactttctataatcgggtccgatcctctactaatacttgattccggccaaaaacagattagatattctgattatatcaagatacaatcgggtccgatccataagagaatttcttctcttacaagaagtttccaaacaaaggaaagtctagctgaaaagtgcatctttcctaacatagaaaagagcaactacaaactaaatatacaaggtaagaaatcgggtatgaatgcaaaacaatcttaaaagaaaaatattttgtcaactaacttgccgaaaaaagactttacaatctccccctttgtcactttagatgaacaaaataa

SEQ ID NO: 370308 - DNA, 533 bp, Cannabis indica
gattgagtagtttcttcaagccttgctgtcttgcttttcttggccttgattttttcgcttaggagactacaacataagcctcttccgatgggcggcattctgggcctcgatctcctcaatggtcaactcggatagcctcattttgggaagatgacgggggtaggtctctccaaggcgggaatgatcctcaaaaaactctatcaagagtggctcgggtgtttgattcaagtgtcttaaagcacatttcaaaaaatcaggccaaataaagtaaggagtggggatacctagggggattctgagttcgcgaggccaggcagaggattcgattaaggcttcacaggatagaaggaacttgattgatcaaagcttggggtctagggctgtgaccttctgaaccttttcagaaaaaatatcaccgataacactctcctcgttgtcagcaactgctgcacaggaacacctccattagagtcatcatcaatacgtccacaacggaaaaacacgaaaatacacacaatatatataataataat

SEQ ID NO: 370309 - DNA, 520 bp, Cannabis indica
tttttgtaagtaaaaattgttctctccttgtacataaaaaatggaggtatttataggcccataggtgggtgagggcataccctcttaccccaccagggttccttactctgcatgcaaatggggttgtgaaatactaccatctaaccgttggtttggtagttagatcttccatcgtgtggtgcttaattgatgcaggctatcacgtgaggagatgaacacgtgtcgctcaaaggtttctcctttaaaagcaatatcccaaacaagttgtttgacaataagcactacagaggcacgtatgcgcacaactataatctgacgtaggggataaggtctgacttgatgtcagacgaggtgtaactgtcgagtgtgtctccgtgttaggtcacaaaggggcttctatgaagtgcaactcgggacttcctggaacaactgactcctaggagctccctaaagaccagggcttcgcgtaggcctccaaatatcggaagtgttaggttacaacttcaaggatcaattcctc

SEQ ID NO: 370310 - DNA, 603 bp, Cannabis indica
agtgtaaaaatgaaaaagccccacttttttattagtacttatatacaaagttttttattcatttttacggttctttaataaatatttcatttatatataacattgattttgtttttacaaaaatacaattcatacacaatcataaaaagaagcggtacaaatactataaaattactttagtgttatatgattattatatatatatgtactttagtaaatctttctatatatatgatttatttatatacaagtatgcaatattgcatttatataaagggtgatataacatataattattattcataattttttggctacttttaatgttttcatttggtcattttgctcttatttgattctttgtctttcagccaacataataatttatttatatacagagaatgataaagtacatgttttggagtattttacaatgttattttattttcgaaaataagaatgaaataaaaatttatagcttaaaaaatcaaatgatgtgtataatgattataatttcaaataagaaatatttgttgtatgagactgagctgctttaaggtttgataatgtggttgttgtatatgaaattgagttgtgctacat

SEQ ID NO: 370311 - DNA, 541 bp, Cannabis indica
ggaaggcatgacaagaagggtcataagaattccaaatacggtggtgatcgagggaatcaaaagacaaagacaggttcaagaaacacaactgacaagaagtgtttttattgcaagaaagaagggcacttcagggatgaatgccttgccctgaaaaataaactgcagaaagaaaagaataaagaaaaggggcaagcagatgttgctgatatttatgagtcagctggtgttctggtagtgtcaaacacagattctggacaagaatggatactcgactcaagttgttcttttcacatgtgtccttgtgaagaactattttgcaatcttgagaagaaagctggaggtattgttctatagggtgacaacaaagcttgcacaattcaaggaattggttctgttgtgatgcagatggaggatggtgttcaaagaaaaatcacagatgtcaggtatgtccctgaactcaagagaaatctcttgtctattggtgtcttggcttctaaaggctgtgaaattaaatagatgaaaactcactcaatgtcattaa

SEQ ID NO: 370312 - DNA, 816 bp, Cannabis indica
cgaaagctccccctccttggcatccttctcctctttcatccgaagaagaactgctcgcagagaagtcctctcatcctgaagactgtttacctcagcagatcagatctcaatggtctcctcaaaatggtcagcaacctcgagatccttagtcagcacggagattttcttctcagcagcaaacagcttcttgttggcctcgcccaactccaaccgaacatctccggctttcgccctggcttcttcaacttccttcttggccaagtccgcctctgccttcaaggtgtctgacagagccgcgttcttggaagcaacagacttagcccaggagtaagtgtaggccaacttcagactggcctgcacagaggaaaaagtttagcatattgagctaagtgtggaaattaaagggaactatcaagaaagacttaccctggtgaactccttcaagactccgatcaccaacacatcataagatgagtcgttgtcaccaccagccagttgctcactgacctcacgaactcgccggttcatgtagtgagccagcatctccttgccctttttggcctctggaagcacgggcaaaggtggagttggtgcctgcaccctatcaggatcactcctgaccagttcagacctagccgttcgtggtccagccgccttggacttggcagttttgggggtagatgggtttgcaggagtcagctcctcggaaagattaataacctccccggaaggtctcttttcctgtgaagaggacccctcgccgcccttagacttctaggccggaggagaggcactagagcttccgcccattctctt

SEQ ID NO: 370313 - DNA, 814 bp, Cannabis indica
taggggctgttaaggtttggttaagtttgggactgaattgagttaagggggttggtttttgtgttcccagcacagaaccggtcgaccagttctgggggacctgtaccaaccggtcgaccggttgatgtccagtttttggacttccggttgggaccggtctgccggttgggagaattttccgaaccctagtttttcccaattttgagatatttagggtattgccatgtggtttattgatagggaaacttttagttcaagtttaagtccccgagtagtgatttagcgagtcactcatctgtgttacaattaatgtgattagggcatccatctagcacgagaatttccgttcaggtcggccagcacatttgattcggaaaacaggtaagaactgtatatagcgtgttatatgagatatatgcatgatgtatgtatgattgtatatgttttgggtgatatcatagcggcacaacaattgtgtcggtgcgacagtacatgcatcgtactggttaagagtgatattcaccccagagagtattaattggcgctatcatagcgacacaacaattgtgtcggttcggcagtacgggcacagtactggttaagagtgatatcatggccaattgtactcttgggtgccattgatgctatcatagcggtacgaacatagtgccggtcccacagtgcgattatagtgctagtagtgggtgatatcatggtcaatagcaccaatcattaagaacattcttaatcagttgataagccttgtaaataggtgtatgggcgccgagttacaagtcgaaagttgtatgatatg

SEQ ID NO: 370314 - DNA, 409 bp, Cannabis indica
aacatacttgtgagtagatctaagatcctggtaaaataaattccaacagtttactgttaggacctcaggagaagtacctacaccaagcacctcattcatcatgaaagtatttttgagtgtggagtagttcattgaccttcaccctccgaatctcatactcttcactttcatgatagagcttctgaggtcttcccctaagtttaactataggtccctttccctttgcagggtcacggggtagtcgagtcattatacttgtgaacaaaatcccatataggaaattgttttcccgcattgttcgaattactttgaacaaattgcggttggtcctatcaattgcgtgtggtagacttatatgttgggttttagttgccctaaactaaaactcatttctaatataatcagattt

SEQ ID NO: 370315 - DNA, 888 bp, Cannabis indica
aaataaaaaaagagaaatataaagccaaattttttcacattgttcatttaatgagtgcaaattcttcttctttttgtgtcaattgatctttatgatatctcttttattaaaaattaaactcttgcacatcctaaaattgtacaagccatggtattcgtgaagtattaagttagttttaagaaccaacagtggagaaaaagttgatactagaaacaaattattttataagttattggagttcaactatcatgttatcctattttattgtttgtaagaggttattacctgaattaaatgatagacatatttttttaaaatttactaaacgatctgctaacaatgtagctcattctctagcgagatttatttgttttatttctgatcatattattcgagcgagcaatactccctcagagttcatttctacaataatgaacgatttgattgtttaatgaaatttttctactattgtaaaaaaaaaaaaattaaactcttgatccttagtgtcaacttatctctatctatgaagaaaaaataggtgaattagtatttttgagtatattaaaagaaaaaaaatagttaatattattttaaactatgtgttttgcaaaaattattactgattagattatttatttagtttaatgataaattgaaccttgtattttttaaaatagtactaaaaagtatcttgaactgatttttttattaaaataaaacttaataataattcgatctaaagatgttataaaaaaattaattaaaaaaaattcaaaaattgagcacataatcttatttataccattttagaaagagtattattatttggcacagtagtgtccaacatcttctataggtggtgttgctcctaaaatcgcccaatatacg

SEQ ID NO: 370316 - DNA, 508 bp, Cannabis indica
atgcaacataaagggtatctatgcgaaagtagctctggccgtgtatatatcactcgaaatgttgtctttaatgaggaggagtttccagcccttaaaccatcaacaccaactcagttactgtcctcaaattctcaattgtttcccactacaacattttctactatttttttatctttcaccaactaatgacatacctaacattgtctctgaggctcctcaaatggactcttctcataggccatgcagctccaataccattactacacctgttgcaaccgtggcaaaccagcagcctgctatgccccagctgtcactgctgcagcacccaactttacacctactgctacagctgctggctctacagatgtgccatccaattccccacctgctacacacccctctcaccatatttttcccttgtcaaatgttgtgataaatccaacacgcaagtatacgtatcgttttaacaagtaatactcaggtaagtgagatcgttcccacgaggact

SEQ ID NO: 370317 - DNA, 822 bp, Cannabis indica
gcagattcatgacggaagcgaccaaggtgcacgggtaaccgaggatagaaagttatccgtgatactgggggtattgaagtccttggcgaactatggaatgatataaggaaaaaatggaccagtcgactcaatgagtgatttccttgaccgagtcgaaggcttcatcaagctcaaagaagccattcaatgagcagaaggtgagcaaaagccgagcaaaatgaaggatccttccactggtacatccgcccaacttccccattactctagcaatccaagtggcaagcattcaggcaacaaccacaagcaaggaaacgggaagaaaggaaagttcaccgaaatgtccggagagactccccgtgatcacgccaaacacactgcattcgctatcctaactaaagatatagagagtgtttatatggaaactcaatcgtttattccgtacaagatgccagggcccatgaagaaatataccagaaaaagggacatgacaaaattttgtcggttccacggagactacggccacaacaccaacgaatgctacaacttgaagcgggaaatagaacatctgatcaagaaaaacaacccgcacttacagaagtatgtcaaggccaaccaaggtcaaaaaaaccagggtctgttgcctcgaccgatagatggacacttgaaagtcattaattggaggcccacacatcgctggagatacgggcaaagctcgagaaagatatgcccgaacagctcagtacgagcaagaaaaagttatcctggccgtggaagagaggaagcccaaagttccacgcggaggagagccaaccataactttca

SEQ ID NO: 370318 - DNA, 644 bp, Cannabis indica
atataaatttatttttcttgttctctgacattttttttactttttagttttagtttgattggaggggtcatgccacaaaagtaataaaaagactcacatatataaaatagtatgggggggggggcagggccactctaggcttttatgtgcctctgcccctgcctccacggctctagctttcttagccaaccctctgaacctcatactttcatggctgagtgcaaatagagctgcaatgcagttctctcgagtcgactcagagtccaaatcgttcctcctaagcagactcacaaggcactccacctcaaaatatgagctggatttagagttctcggctttggaaaaacttaaatatgagatttctacttttttttacaaaaaaaaaaaggcataaaaaaccatataaatgtataaaaaaaaacctgtaatctcatgctattatttatttatgccataaaaagtaaactatgagaactgattgtatttcaattataaccggtttgaattattttgtgttatttatttttattcattatgttatagaatcagttcacatatgcttctcatgacttattatttattgggaaatttacatgatatactaacttttgctattttttaacaaaaatactgtcaggcggtat

SEQ ID NO: 370319 - DNA, 594 bp, Cannabis indica
tgagcgtagtccgcagaaggccattcacttaaaagtaaatgttcatttagttcttaaagttgaaatctgacctagtactttattggtagtattttcttaaatgttctccattccagtaccgtggtactagaatgagttgcatattttcgtcatacttacataacttgtatgctccggagtcgagaacttcgaccacttgatatggtccttcccagttaggtccaagtacacctgccgtactatctttggtgttcaggggtactcttctcagaaccatatctcccacgaagaatttctgagccttcacttgtttgttgaaataccgagctactttttgttgataagccatcaactttaagtttgcagttgctcgtttctcttcgatttcatcaagtgattctgcaaggagtatgtgattggtaccttaatcgtacgtcaatcttctgtgggaaggtggctcgagttcgacgggtagcatagcttcataaccatacaccattgcgaatggtgtttgtccggttgccgtttttttagttgtacagtatgaccataggacttcgggaagctcttctggccagtttcctttggcatttt

SEQ ID NO: 370320 - DNA, 746 bp, Cannabis indica
aaagtaaactagcatcggatgtagtggctatacatcagactggaccgatattcacagtagaaaaggtatagtaaacttactgtaatatctttttctatgtaaatatcaattagttgatcttaaatcaaaaatgttaatcctaagatggttaggttctggttttactgtattgcacgtattctttaacttgttcattacagcttacccgtaggaataatacttacatcttgggaacatgttagtgcaatggagtgagagcgttcatcatagaaatggaatctgtagctcttataactatttataagtgaaatgatagttccttagagcttggctaacaaacataaatagaagagctcttatttcagtaattatattagtttactgaaatatcatttataagaagctagatgtttaaaggataaaatacattaaaaggtaaaacagtaattgtagtccttatttaatgtagatcatctatagaggatcattgattatttagattaaaataaaggataacttacagcatatctattcttcgtgaatagagcactctatataatcaagagtgtgattctgaatctatagtggaatcaggaggaattaataagattgaaaatttactcggtaaattctagaactacttattgggagcttgattatataggcttatggtccccaaactagctgagataatattactttgtagtcttaattaattaattttaattaatcaattaggattctaa

SEQ ID NO: 370321 - DNA, 436 bp, Cannabis indica
attattattattattttcattggtataatatgttctaattattatttatttttctttggttttgtagctttagtggttgcactggattggtctcttgcattgggctacttaatgaatcctttgagtctagttgattattttcaattactgtatattctaggagatcctttttctttgttttaaagtaggatctttcctagatttttttgctagtttgctatccagttttcctgaggcatctctgattcatgtttattgtacatatgaattagttgttcgtgcactcaaggtggataataaactagtttggatagatgatttttcaccttttctctatgtataaacttttgagtattttcaatgaaagttcattgtacaaaaaaaaaaaaaaaaaaagcttcaaggggtcaatgactctataagctatgtgatgata

SEQ ID NO: 370322 - DNA, 506 bp, Cannabis indica
ttttattttatttattattcctgtttgtattcctatttttattttcattcttattcttattatttttattctttcaaagaaaaaaaatacaaaatatattttataattatctaaaaaaatatttttctaactaattatgtaaaactattaatacaaaggaaaaaaattatatgtataaaattcaaaaataacctgtgcgaagcgcaagttgtttactagttcaataataaaaaaaaaaaaatcaccatactaacatacttttaaagagctgatacgtatacactaaaatacaaatatttagaagggcattttacaattttgtatacattattttaattaattacaaaatatgtgcaaaaaaacttattatcattttctcatacacttttatatataattaaaaactttttttcaatttttattataatatatatatggtaataattattgattagtatatatatggtaatattggttatgtttatttttatgtttacaattataat

SEQ ID NO: 370323 - DNA, 584 bp, Cannabis indica
gtgaggtagtgaatttgagattacgcgtgattagaattggtaggtatgaattttaggtatgaaattcgaagtttgtaaaaatggcaattttgagggtttccagggcccttgtcgcggcgtgggcaatctggatgttgccgccatggccacaaccttgctcactacggcaaggccctgcttctctcgagaaattttggatttttgtttttgccacaacttttgactcgggactccatttgggatgttcttgatatcattagaaagcttgctttgggctctatatgattatctataattgaaatgcaaattatgtgattatgtgaaattgaattttgggattagccctatttgtgtaatctcaggaatttgtgactaggagtaccgatgcttgctcaggaacacctgaggatttggaatctccacatacttgggataccaagtaagacagtagttagcacgtagagttaagcgctgtggtgctcatgtatgatattatgcttgtgattaggtgagaaaccgagattagggttatcaccctaaagtgagcggttatacgatctagggttattactctagtgtttaaa

SEQ ID NO: 370324 - DNA, 591 bp, Cannabis indica
aaaaattaatttaaagtgtaaaattgaaaaaatcctaatgaaaatttcattactattgggtagtattagtgtctagcacctttaaatatatttttttgggattcgctaacaatagtataatactcctttaaaattattatttaactgaacattttttttgataaactatttaattgaatattaatacataaaatgatggtagcatttcttaaatgaaaatggttagtaaatataggactgacacttctacgccttttcattgctacttggtatgtttactaattatttggaatattccattatttactaaaataagaaatgagataacttggttaattttttttgagtgtagcataatagtattttacaatcatatattagcttaatagtttaaaggtcttggttcgaacttatgacctctctttttttctcatgcctcccttaccactaagctagccttaggggtgggcatcatccaatctaatccaattgaattgaaacaaactgatccaatccaatccaatccaatctaattacaaaaagttggatatccaatcacaattggattggatgctaaaagttggattctaa

SEQ ID NO: 370325 - DNA, 679 bp, Cannabis indica
cgtaccaaataccaccgaggccattgacacgaaaaagaataccccgtagagaaaattgccaaacacctggtactagtagtagtcgtccaggcaaaaccagtaatgctagaggaaccactgacagtacatgtcctaataatggtagagagaccaatgatattagtggtcctactaatgcttgagggaccaatgtgactggatttagcgatctattttcttcttcgataagttacagtaaatttaaggagaaaatgtatacaagagaagacatcgaggatcatagtcattatatatctatgggtggcacaccaggcggggagttacacgttggaaagattttagagacaaagagcatttaaagatggttgttggcttgtatgctataaagaaagggtttgactactacgttaggaagtccggtactgatatttggtacgtcacatgtaaggatacaaattgtgggtggagattaagagcgaagaaaaacgtactttataacatgtttgaggtgagtacatttcataatgtacatacatgttcccttgatcttcaaggaaaagataaccgtcaagcatcacctttgatagttgcccatctaattaaggataagttcgcaactgacggctcggatcatttggcctctgatataagaaaaagtatgcacaaggattacaggatc

SEQ ID NO: 370326 - DNA, 640 bp, Cannabis indica
atataaataaaaagtcacccatgaattttttataaaccaataattttattatataggcacactttatatagaatggatataatttaaagaagaatagagttaatattgcattactaaaaaaagagtaaatcatatgttatactccataaacaaaaaggaaaagaaagccaaaaaaaaacaataaaactaaagaacctaaagaatagtgtgcgaattttgatataaatcatcaatgcaaatgtacccaacataaatttataatcaaaatatattaactaaagtccaaggacgtaaagaaacagaaacagagtgtgaaataaattgctctttcacctaatttatattggacattgatccttaaaaaaataaaaaaattatattggacatgatagctaaatggagatattgaggtgcaacattaaaaccaccaaaatataaatatatatatttattctatataaaatctggctatacaatagaattcttggtttatgaaaaattattaggtgactttttttttaattaaaaaaataacaaattattagatgttgtcacgtaaagggttagcatccttagttaaacctaaatataattgttgacttcgctttttagccaacgacaatgagcctttttgataagc

SEQ ID NO: 370327 - DNA, 844 bp, Cannabis indica
ggaccaccattggaccatatctgctacattttttaatgtttttatacataaaaaaataagcatcaggtgaccatcagacctcatcggaccagatatgctactagttttttttttatgtttttgtacatacaaaagtagcatcaggtgaccatcagaccaccatcggaccaccatcgaaccccatcggacttccaatttttttatttttctttatgtttttgcactaaaaaaagtatgggaaatttgataggggtatttttagattttagataaagtggtcatatatttttaatgctgatatgtattagtttagggataaaatattagatatatgtaagtataaaaaatcaaatttccctaatataataattaaaactaagaaatccttctattaaaaagaaaatggaaaatctggtttttttttttttttttttggtttcctattttttgatgattcaaacttgcattacataaactatataataaatataggttaaatcactcaatcctttactaaatatttgaagtgttctatttacaaggataagtctacagtacactcttataaaatagtatttcaacatcaagaagaactttataatctaatttttcttttttttttatgatcgtatacattataaatatttaaaattatttataatttttttaaaaaaaagagcttttttattttcacacttcaaaacagtttttttttacatttttacgaaattatgtataaaaacccctattacaactagcgatgcaacctaaattgcaacaaaaaatcatacagaaacccttattgcaactaccgctgcaaccactttagaaactcaaaccgtaa

SEQ ID NO: 370328 - DNA, 577 bp, Cannabis indica
taacaaacttgaaactaattaaattccaacaataatataaatgtacaactaacatactttcaacaatagattaaaaataaaacaaacacaaacttcaaactctaaatttcaatacacatgtatgggcttgggtttgttgctaagaagagagagtttgtgaagagatggattttgctctacgatttatgggcttgggttgggctcatatgtatggtcttaattaaataaatataaaaattgaaattttaaaacatgtggtgcggtgcagtttgaatcgcggtttaataattcaaaatcacgaaacgcaccgcaccgtgcggtttgggaaaaattcaaaccgcaaccgcactgcgaagaatttcaaatcgcattttttttgcggtgtggtgcagtgagggcggtttgagcaatttgatgtacacccctaattataatcaaacaaaattatatatttaaacaaaattatgacactatttaaaaaaaaaataagaaaaaaaaacaaaattattaagtatgattaatttatttaacaatttaaataatcatataaatagtaattaaagctattttattgata

SEQ ID NO: 370329 - DNA, 747 bp, Cannabis indica
gagaagttccactttatggtaaccaaaaggaattgttcttgggcacaaaatttcaaaagcaggaattgaggtggataaggctaaagtttcaacaatagagaatttgccacctccagtttctgtaaaaggagtaaggagtttcttaggacatgctggcttctaccgaagatttattaaggacttctcaaagatctcaaaacctttgtccagtttacttgtcaatggtgttccatttgagtttggagaagattgcttaaaggcgttcaaagttctaaaggaaaaattgatttcagcaccaatagtcacttcaccaaattgggagttgcctttcgagttaatgtgcgacgcaagtgattatgcaattggagcggtcttgggtcaaagagttgacagggtgtttcacacaatctactatgctagtagaaccctgaatgatgctcaattaaattatgccactacagaaaaagaaatgctggcaattgtgtttgcttgtgataagttccgaccctacctgattgggaataaggttattgtctacacagatcattcagcgatcaaataccttatgaccaagaaggatgcaaagccgagactgattcggtgggtacttctacttcaagagtttgacttagagataaaagataagaagggcactgaaaatctggtagcagatcacctgtcaagactagagctggaagagagtcagaatacgaaagaggtacaaataaatgagcaatttcctgatga

SEQ ID NO: 370330 - DNA, 553 bp, Cannabis indica
aaaaaagaaaaaaaaaaattattatatatacttacactattatatatatgaatatatctttatgtttctaatgttattaatgtgtttaaatgatggtggcaattttgttgcaggtactagacataaattgtagaaaagggagtgagttcaatggtgtaaaacaggatttatttttgaagcagttagtcctagctgttacagccaagtgtcagcattttgaagcaaggactccggtggtggaaagcccgattattgaggagttttctttttccttagtttaattgttattgttggttgtgtgtgctgcactaattatgttagtttaattgttgctactgtttgtgtttgtttatgttgtgagttttcccttttttgtgtctttagtattgtgtgtaatgaacattacatggattagatgtgtattaatcatgttattgtgtcatgtttgttatgttctgttttagcttgtaattgagaaaaatagtgcatgtatttttagcttggtttagtgtagcgctcgatgatgaaaaatatccattttcctctatttgtg

SEQ ID NO: 370331 - DNA, 876 bp, Cannabis indica
gttaagtttttggacttaccagtcggcgagctcagtggtaatatcgattatcttttcagagaaaaaaaaaaatcaaataactggattacaaaccaaaaaaatgaaaagggatagaaggtttgaaacctatctattgtctatattcatttaaccaactttaaaaacgaaagttttttgattcaattctcgtgccatcttgattttttatcaatttattttttaacataattaatgtaaagctaatttttcagcacgaaaaatacataaaaaatacaatcaatagacacttctaagttaacttattatttaagtttattttaataaaaattgagttagtattattttttattattttatactattttaaaaaatataaattctaatttgtaatttaactaaataaaaaatttaattgataactattttattcgtttttaatattaaggtttacttactttttattggtgtaaataaaactgatccaaaatatcatttactgtacattggtaatattatatattcatggaggaatttgttctaaccaaacaaatttattttctaaattctatgtatagtgataatcttactaacttatgtaataattcttaaggaaaaacccaatatgagatgctctaataaaacaactactacatcactcactacaaaatgaaaacaaaaaaaaccagcaaagagggggaataaaaagacacggagttgtacaaataatgtatgggaaatttgattttctatgcttagaaaatcaaaaaatttgatttttaaaccaaaaatttaaacctaaaaaactatcctttttttctaaaaccccaaaataccccctcacatattctctctctctgcatcatctctctctccctc

SEQ ID NO: 370332 - DNA, 610 bp, Cannabis indica
aagttaagaccctactttcaggcccacccaatcaaggtattaactaaccatccgctctgacaagtcctacagaagctggaggcatccggaagacttctcaaatgggctatggaattaagccagcttgatctacattacataccacacacctccatacaaggacaagcactggtagacttcataacggagtgccatgaggcagaggctagcgcaagcgtgcccacatcacaaatcccagcatggaaagtctttgtggacggtgcctccaacgaaaatggatctggaacgggaatagaaatgatatccccaaacagacttcgactctaggcagccctacgtttcgaattcgtagcctctaacaataaggccgagtacgaagccttgattgcagggctgagattagcaaaagctgtgggggccacaagagtagaagtcttcagtgattcacaattggtagtaaaccaagtattaggagaatatcaaacgcgcggagaaaaagtggccgcgtatgtagcaatcatccgagagttactccacgagttcacggactacaaagtggaaagaatccccaaaaaaaaaaaagaaatgctcacgcaaactgtttggctaa

SEQ ID NO: 370333 - DNA, 780 bp, Cannabis indica
gcttcttgctaacataggtagtcccactcctacataatctcaaaattactacacaatcgtcaccttcaattcatctaggattccagacaatactcataaattgtcccacctttggtaacgctagatcacttctaaacaaaattttgttatttgaatcaaatagatcgatgcctccattaactgctcattttctatattccactagggaatatcaacaatttaactcatattgtcatctttataatctgtctaccctgttaaatgggttaccactaaataacatatatgcacagttcattcagatttcttgatgtctctgactagtgtacatgtttaatatcaatagtaattataatattgcccataaattctaacttgagtcggtcgaaggatcgatatcggggtccccttgaatcataattggcacttgggcaggatccgtacacttttcttctttaacattaatctttcttaactacgggcaggttcttttcagatgacccactaccccaaaaaaaaacaagatatggctctaaattggctcaaatggcgcctttttgcatcttgaacactcaggataaggtcaccatctcttatactcactttgaccgctatcatggtcaccctagaacctttcgttctatccaataatttgtggatcatttagttttcgcttcctgatctactagtaagttggcttcatatattccacgctatttagtggtacaacaggaagtctcggtagtataagaacagacacaagatgagcctgctatcttt

SEQ ID NO: 370334 - DNA, 509 bp, Cannabis indica
agcctatactcaatatgttaatcctactctagccatattgatgtgacagcatcgatcagtattttagtcaacatacatttatcagtaatcagtgcaactctaagtatactattactgctatcaatgtaatctaacaggcataaacaacatgtacgctaaacatgtaataacatatgcatgatattatactaagcttacctcaattccaaattcaggtgtgccggtcaacctgagtggaacaactgctcggcgaattataggctcctaaatcacatcgataactatacgaataagtgtgactcgctaaatcacaaccgggacttaggttttaaaccaaaaacatatctacatcaacttagtatggcaataccctaaactagtagaaccataaacctaaaaataggacaaatcgacgagttgaaatttttggggaaccctgctacaaaaaccagttacccagttttctgcagaaaacccaaaaaattacaaagctcaaccaaatcgattcc

SEQ ID NO: 370335 - DNA, 729 bp, Cannabis indica
ttcaggtcataggtcccatttcagagagtttgggttcgggagcgagactgggtgcggttctaggtcccgaccctggttctgtgtccctagtctggttccatgtttgggtctgagttcaggtttgggttcgggtcccgagtccaggtttgggtttggatccgggtccggctcccaattcgggtctaggtctgatttggagtcagggtcctggtccggttacggttctagatctaggtccaatttcagttatgattccaagtccaagtctaagtgctagtctcggtcaagttccgattttggctcaaattttgggtcaccgagtacgatttcgggtccacatttgggtttgggactgggtttaggtccgggtgtcggttcgggtccttgtcaaggtacgggtccagggatgggtcctaaatgcaaacaccaactaaaggttttgtccaagccctgggtccagctctggatcccaatctcgggtcccagtctggttccatttcttgtgtcgggtcacgagctgggtcctaagttcaagtttgggtctgggtcgcatactaggtcccggtcctagttctattacccaggtccctatccttattctgggtccaggtctcggttaatttggggtttgggtcccggtctaggttcgagttcatgtttaggtctctgtgtaggttttgatctgggtttgggtttcggtttacgtcctggtcctggtcctagtcctag

SEQ ID NO: 370336 - DNA, 783 bp, Cannabis indica
ccgggtaagctgagaagcaaactcaccagtcatctccgcggcgaaaggagccaaggtgggcccaaggaagcgacggaaccagtccgacagagggtccaagtttaggtcccacggatcctggtactccgggttgttgatggtttcgtgcatctcaacccgcagaaccctcctaagggcttccacctcggcaaacccccgggagtattcgtccatggcatagttatgcttggctatccggagctcttgcctcacctcatccccaggaactggagtcagcacaatgttgggaggagcaggatgttcttccatgggggagaccccaccgtcgagaccatgggcaggagtgtcagctctccgaggccgcttgggctcgtcctgggcaaccatcttgcccttgcgcttgcgaatcagagcaacctcaggctcttcttcaccttcttcagcgtccccaggaagagcccggagctctcccgcaccttctgcgacttcctcagaaaagccccattgcttttcttgaccttctcccggtagcacctcctcgtcatccactaagtcaatagtgtcagggggagcgctggaagaggcctttagggcaggggctattggggaagaagtaaaggccggaggagcctcaggagtatgaactccggcaagctggtccaagatggcgtccatggaggtacctgtttaacaaaaataggcaagtgttagacatccgtgggaaaccccttacacaagatatggcaaataaactactcctacccgaacttcctaattcggccc

SEQ ID NO: 370337 - DNA, 954 bp, Cannabis indica
ttgtttgtcacattactagctcgcattattgtgttgaagttgtcaaatgcaacaccaaatcggtggttccatcatacgaggagacatgcgagttttttaaatcttgaggtaaaaggggtattcatgatatttgggttgtacgactcaagctcctcatctaagtcgtatccagattgtctccctaattcacctacttaatatctcctaaacttgtcctccaattcgtctattcgcaattagataggatcctcttgctttggaccgagttgttggcgaagatcaaatttcttccaattcaagtgctctcacagattcggttgggagtaatgctggtagacctcattttactcacagattgcatcctactcacgaacatcgtcttacgcatagacttcgtcctcgagtgactagcggatttactggttcccatgctttctccatcattagctcatcgagtactttctcctcttcgagttgatcgactgtgggtccttgaatgccctaaggtcacacttgcttcttcatgatctattctttcccattgagtgtggtttatcgtatttcccccattagggtccgtatgagccctctccctatggatttgggaagaacgttggtgatttttcgcaggtgacctacgttctccaggttgagtcccaagatcttcctcattttcatgagaaatttcttattcagcagtttctggtagtctcccatcctcatttctatgagaagggtctggctgatcattctgattttcaggggaatctcattttccctaggttgttcttcctagacattttcctgtctcctggttcgtgagccacgaggcctacctcatggtattctcactccgggttcaggttgattttgagtgttagtctcctgcgtcgccctagctgtggctgcatcacgcttgtaacaccctaactagcataggcgtattacgtgatt

SEQ ID NO: 370338 - DNA, 538 bp, Cannabis indica
tttgtgattaaaaaattagaaaacaaaagtgttaccaaacgacaccttagtttttccttttattttagattgaataataagatttttattatttaatttttcttgaaatatttttgtattcctatattttttaaaatggcatggtttgtgtgtttgatttttctattaatggaaatttctatttttccaaaaaaaaaaaaaattcctccaaactattgtaattttttaaacttttgttcaatgaacgtctaacatagggattatctaagggtattcaataagtattcgatccaatccgatcctcaaaatgcaaatatccgcacttgtgcggattggatttgattaaaaaatctaaaatccgcacttgtgcagattgaacgttgtttgatctcaaaaaataactgatctaatccaatctgcacttaattatatatatttttaaaagattataatatataatatatattaattttctagtaatattaaaaaaaaaaagaacacaaacttttaattttttaatcttatttagtaatatatt

SEQ ID NO: 370339 - DNA, 537 bp, Cannabis indica
tgttccacgatatcaatatgctatctcatttaaccattaaggattaaaatcagatttgtgctatttaaatcagtaggaaactgacttgaaacaaagaaattctgcactaaattgacaacatctcctcctacagtattccaacacctttagaaaaaaacccggggccattccatccggccccagtgacttattcgggtgcatttgaaagagtgccttacgaacctcttcttccataacaggactcatcaactcagcattttgtgcagcagttacccgagcttgaactcagctagttacttccctccaatcattgctagaagtgataaaaagatttgagaagtaatcaaccatgagctggagcaaaccagaattccaatccacccacctccccgaattatctttgagcttagagatcaagttatttcgtcgtcgagaagtagccgaagcatgaaaaaatttgctattgttatccccctcttgcaaccatagttgtttggaccgttgacgcaaaaaacttcttgctgaatgtatacttca

SEQ ID NO: 370340 - DNA, 1518 bp, Cannabis indica
tggaagactatacatctctagaggtgttgtttttcaggagtttgtttttccttatgaagagtctgctgtcaaaaatagcagtaccatgtctcaatcacacacaaattcagtagtgtctgctaatatacctgtctgttctcatcccaaaactcattacaccatggcagatttactttctccaaatacaaggcttgatcaacctgttttaattgacaattctccagaacctgttgctattcacaataatgcatctgtttctattcctaacagttggctatccagccaacaagttgtgtctgatgtaggagaattatcaagagagcataatgaggctcctgatgttccagctgcttgtgaggtttctgcaccatcaactcaacaaattgaagctggtcaacatgtggagactgaccagcaacctcttcatcccaatctatctccagctggtacatctgagttgcctcttgtcttttatcaacagatgttgctggctgtaaagacctcttagtttaatttggaaattagcagttaatcatgtttaattatggaaaattatttttagatatttaaataattatttatgctgttatttttgaattcataatgtatttttatgtcatatagtgaaatttcataattttgcattttcggtgtccggcaacatggaactcggtgtatggctcagtagaatcacaaattagtatttcagtatagtgggacggtttatttagacattgggaatgtcgggattagtcgggaatttagagttttcccaaaataccccttagaaaccttttaattagttttgtgtgggcaaggccattttggtctttttgccttttagtgttttgtctttatgtggatcaattaattgatttattgttgactttgacttcttagttttggctgaaacaaataaggaaaaagtgaattttataactcatttattcaaaaattagaaaattagaaaagaaagcaaaatcctttttctctcaagccctctctatttcggcccctctttgagcagcaacaatcttggtgtttctttggttttcaagcagatttttgtgtgcaattcaagctctaggtatagctcttactcttctcctctttagtttcttgaaaaatcaagttagaattggttgcatgcttagttttgttgttgtacttgctgctgtatgttgttgttgatttctgtagtgagagcatgattttaaaatgttgattcaagcatgattgtgttggtgattagttggttttatcaatttatggaattttaactcaaagttatggtttttaaagaaataatggaatctgttgctgcacttgttgttgatgcttgctgttgttttcagaagttattttatgcatatctaggtagatttgagctggtttggatgcatgtttgttagatttaaccaagtttgagttttgaactcaaagcttggagctttgttttataaacttggaaaatgtttattagggtctaattagcaggtctggaaagtttggttgagt

SEQ ID NO: 370341 - DNA, 571 bp, Cannabis indica
catgacctgcgcctcggaacccagacccagattcgaacacaggactcagactcaaacttggaccaggactcgaacccagatcctgtcctagaccgagattggaaaccgaatcgagactcaaaccctaacctaggacatggaccgggacacaggcatcagaattgggaccgagacctaagacctgaccctagacccaaaacctaacctaggacatggactgggacctgggacttgggacccgaagtggaactaaactgggacccgagattgtgatccagatctagactcagggcttgaacctcgtagtcagtgtttggatttaggacccatacctagactcggacccagacccagacccagacctagacctagacccgtaccccagacttgggtccaagtctgagtctgggtttgagttagggaactggaatcagactaggaccttagaaccagaccagatcgagacgcatgccaaatcaaaactcagatcgggactcgggatgtgaacctgaacccagacacggacatggacctagacccaaacccaggactcggactgagattggagact

SEQ ID NO: 370342 - DNA, 813 bp, Cannabis indica
tgggtatttttaaacaaaaaaaatagtctggggtcgatccccaaagcctcacgattttttgaaccgtctgaaaaccttcaacccccaccggccaccttcgattaaccctaaccctcttctactcaactccggtgtaaaaatggcacattttctattttttttttttttttgaaataggagttgaacaggccatttattttccaactcacaaatttattttaatttcttagataatttttatttattaatatttttggaataatttgttatttgttaattaaattgtaatgccatgtaggggtgtgcagaaagtcatccgatccaatcccaaccgatccaatagaatcggatatccaatcataattggatcggatcggatgcaaattttaaaaatccaattggatcggatcggatgttggatgagacatccgatccaatggataaccgaaccgatccaatccaatatcatccaatgtccatccaatcatatttaatatttataattttatatatttaattattttgttttaaaaaaatatattaattattaataggttttactgtgcacctgcacacattgatttaatattttatataatatttgcatttgatgtattggacttgtttattaagacttttgcttattaagttagatttgtgttatatttttattatgggatcatgaaaattaggttggatttggattaaactattgtttattattggattattaggttttaaattatattttttcatatattttttctttttaatgaaatcagcctaaatagtggctaaaatggattggattca

SEQ ID NO: 370343 - DNA, 622 bp, Cannabis indica
aaataaaaaataatatttattatggtatgaaatttagtttatttagcacaacttttagcgtatgtcaaatttaaactacattatatattattattagagtttaatttaatgaaattgactaaaaaatacatttacatcatttttgtagaacttcattgaaaataataagaataacaatatagaatagtatcttatgattatcaaacaaataattaccaccaaatgtaggcacattggtttagggttgttcatcgaacctgaaaaactacaatataaatccagaccacgacaatttgaatcattgtaactggggaaattatttttggtggtctagttaatccggaccgtttaccgcataatggttcgattgcgatttgtaataaatagttaatggttaaaccgaaccggacaagaccgtttataataaattatcaatttatatatgactatatgtataattttaaacattttttctgtgtcaagttttttattacattaattttagatttttatgttatgtttgatttttgagaatgtttttatattgttatttatttgttatagatctattacttatcatgttaaatatatattttaaaaaataaaattaaaaacttagtaa

SEQ ID NO: 370344 - DNA, 393 bp, Cannabis indica
tttgtttgagaaaagtcgttagttgttctcgctattggaaagtcaaattttagaactaatttttaagactttactattatctatggggtctatatgtacctcgatagtgtcttccgcggcttgggccactgcgacatgatcgaggatccttggatctatatccggtccatctgtgtgtggcacctcttcgattctaaagacctcctagcgaggagttggtgcctctaataaatagatgacattaattgacttcttttccgcgagcttcactgctgcattgtagcattcttgcgagtctgattggattcctcgcacagagcctactccagcgggagtagggaacttcattgtgagatgatagatggatgttacgatctgttgggttttatgccc

SEQ ID NO: 370345 - DNA, 616 bp, Cannabis indica
ctagttgagacaaactgcttgtaagactcaattaattgattttagataatcaattataattaaattagactatgtctagttcatgaattttcactaagcaagggcttgaatgtgaagaaaagagattctagggtttatttgttaattaagagactttgattagtctagttaataaatatattaaatgacaatattatttaataattaatttcagttattaaataattagaattgtcattaagtggttaaattagaaaatttgcatttttgagaaaataagacgggaaaatgacaaaatggcaaaattgcaaagtggggccccattatccattccttggtcggccacttagtgtagattttaccaattaatttttcattactttaatgccaaataaatctaacctaaaccttggtggttacctataaatagatagtgatggttcacacttaaaagattgatgaaatttcacttcagaaatttttcctgagccttctttctttctaggccaaatccacttctcttctttttcttcttcataatttcaaaccttgagtgatagagcgagtgcccacacacatcaagtggtatctcaatcatagtgtggaagactgtgaa

SEQ ID NO: 370346 - DNA, 661 bp, Cannabis indica
gtctcgagggtcaccaaatcggatcttactacgttttaccaggctgaacctgctgcgactcgcctctttgcgacctaaacccactcagagggcgcatctttcttttaccaatccagcgattaatcccacagaggatgtggtagtctcaatacccattcttcggtgtggagtatcggtcctttttcatccctttatcgcggccatcctcaaacattacgatgtgtctcctttccaagtaacccccaacagttatcgcacaactcttgctttttatgtgatgtacatggagtatgtacatagggctcccacagtagaagagtttagttacttctatgacataaaatgcgtaggccttcaaaacggtttctactgcttcagcaagtgggccacttctaagattaacggggtagaaggcatggtttccaatatgggagattggaaatcaaagtggttttacatattcaaagtctcggggattagaactgactttaaccgtcgatctagtatgtcgcatgtttcctgacttagtcattttttgagttactttgagattctaagctaactcgcccttttttgtttttgcagatagaccagctcgccctgcactcgacgcgactcgcagagattcagctgaagttctcgggagccttcctgtacaaga

SEQ ID NO: 370347 - DNA, 500 bp, Cannabis indica
gtgaaaatgcttcctggaaagaggattaattcacaattgttaatgatgaatctgaaattccagaaagcaaacttgctgggaatcgatttatccagacaacaatgggttcaattcattcttaatagtcttcctcctgagtataatggatttgttgtatcttatatgatcatcaattttaactcatccgacatggacaagctagaatcagaattgcgtgcttatgaacggagcttacctgcaagggggccatcctccagttttacagacttaagtaagaggaaaagaattaagtacgaagcttctaacagtgctgcttctttaagtacaattcgtgaaacaattgatggtagtacacttcaatgtttaaattgtaatgagaagggacatcaggaagaacgatgtcccagacttctaaaaaattctaatgaaggtaatgcttttgtttttgaatcatgtgtttaagagtatgacaaatccttctggattgttgattctggatc

SEQ ID NO: 370348 - DNA, 668 bp, Cannabis indica
ccacaaacggtggtggaaatccgtttgataagtcaggttgaacgccacaaggaatactccttgataagttcgaatagttctctcaagaactcaagaagaaaacctctcaaaattttattccaaaatattctgatttttcaaagtgtttacaaggctttatatagcacccttacaaccaagaaaacaggaaactaaaagaaagacaattttccaaataaaacaaagacaaaataaaggaaacaaaattaaaaaggaaagctgccaaatgccttgaaaaacgtgataagctcaatttgggtctaaattgagtctactttgatgagaagcacaaatctttgttctccttcagtgttgactgcggtctcctcttgttttaaaactctgttgactaagttgttgagttcttctttgaatctctttgctcgcgccctcatcaccgggccaactggaactttacttgtatctttagccttagtgttctcatcattcccccctcttgaaaaggatttttcctcaaatcttcacttgcatcaaaagagctcaaatcagaaacattaaaagtagcactaacattatattctccaggtaaatcgagtcgataggcattgtcattgatcatttcaagcacttgaaacggccatctcctcgaggtagcaatttggaacgtc

SEQ ID NO: 370349 - DNA, 222 bp, Cannabis indica
tatgctatgcatactgcccgcgcgcgcagggaggtgcactgccgagaaaactcggcgcaagcgagaagctacagcatttacgcgcgcggagaaggggtttcagacacccctgtgcgtgttgctcggacaagatcttgtccgaacacgcgtataaccgaggatcactcggttccgcgcgcgcgtgggtgagtgcatcatcccgattattttttcgaaacttca

SEQ ID NO: 370350 - DNA, 660 bp, Cannabis indica
atcatttttgtcttactatatttagcacccaatgaattaattatattctaataattattttatatgacgaggtaagtatatatatatatatgtatgtttttaaaaaaattatatgtgaatagttttattaaaattaaaatttaaaataattaattatataaatatatagattgattattaacttggtattattattataaaaggtaggatagagagagagaagatataaattagatttaaatagggagctaataattaggtatagctaggcattaattttgtctttagtctatataaatatattttgtttccattattggaaaaattatatatatattcgtaattagagaattgttattaggcaccagtagtgtctagcaccttctcgacatgtcgcgtaacgattgacaagtgatacttcctaaaaactattatattaaattatatgagacccaataattagttggaccaatagcgatattgacacataagaaggtgctaggcaccaccgatactttttaacatttctcttgtaattattataaatataactctaattagaaaaagttgtgacaaaagtaatttatattatgattttgtttcaatcctaagtccttctagctggtaaatatttgtttattattaatcaaaaaaaaaaaa

SEQ ID NO: 370351 - DNA, 783 bp, Cannabis indica
gagtgctgtctttatcgtcatcttgtcggacgctgagttgttgtctagagaggccccagaataatggcggacttggcttggtcaattcgacctcccaagtagagctttaaacgttgtccattaactttgaaggttgctggaccttcacctttcaactccacatctccatagggaaataccttgaccacggtaaacggtcctgaccaccttgactttagcttaccaggaaacaatttcaaccttgaattgaaaagtaacacttgctgcccaggttgaaactccttcctaactaagccttggtcatgccacttcttggttctctccttgtagatcttagcattctcgtaagcctcatttcgaaactcctccaattcatccaattgcagtaatcttttctctcatccagccttcaaatccatgttgagagtcttcgtagcccaatagaccttgtgttctaattccaccagtagatgacaagcttttccaaacaccaaccgatatggtgacatcccgatcggtgtcttgaatgttgttctatatgcccacagtgcatcatctaactttcttgaccagtctttccttgatctctgtactgttttctccagaatcatctttatctcccggttggaaatttcagcttggtcattactctgcggatgatacggtagagcaattctgtgacggacaccatatctcaaaagaagtgcttcaaactgtttgttgcagaagtgactcccttcatcgcttatgattgctcgggagtaccaaaccgagtgaatatgt

SEQ ID NO: 370352 - DNA, 557 bp, Cannabis indica
aattaattttaaaatattcaaataaaaaattaatttcctatatttcgaaattaattatgttactaatcaattttattaggttaaactagtttaattaacctagtatagtcattcaaatgaggcaaatgggccttcacaattgggtttgtagatgaacggaagaagattgcaaaatttacctgttacaaattatttatttgacctattgacaatttgaaccattggttaaaatcaaatcattagatctgtcaacaagttaaccatagcaatttagatcaaacaatcataggttttttttaaaaaattaataattgaacaatatataaaacacacatgcatgtaacaagttggatggttggatatatgatttatttactttaaattaattaaataatttcgaaaaaaataataaataataaaaaaaaatattttcgatttttttttaaattaaataattaattttaaaattaaacctataaatttaaaaaattaggttttcaacaaacctaaatatctatttcaaaaagattctaacaactttcaaatttcatgttatt

SEQ ID NO: 370353 - DNA, 523 bp, Cannabis indica
tacttattcttgatggtcaccttgttgagctcacggtagtccaggcacatccttatacttccatctttcttcttgacgaagagtactggcgcaccccaaggtgagtaactcggtctaatgaaccctttgtctaatagctcttgtagttgtattttaagctcttttaactcattaggtaccattctgtatggagcctttgaaattggattagtccctggggctaattcgatgacgaactccacctctctgtctggaggtagtcccggtaaatcttctggaaagacctctgaaaattcacagactatgtgcacattctccacatttagttgcgtctctattggtcgatccactacgctgaccaagaatgccagacaccccgccttcattagctaactagcttttaaggaagagattaatggagtcctcagggccagcttgtcgcccttgaaaataaaccgatccccagcctttgtttcaaaaacgaccagtttctttcggctccatcccaagtataacatcatat

SEQ ID NO: 370354 - DNA, 538 bp, Cannabis indica
aataataaaaaaaaaatacatcaatactacagtaaaatatttatcctggtgtatttttcgttatttcaaaatttctagtggtgaatttgttcatattaaatctttaaaagacatgcagatagagttacatacgtgaaaatattgttctgatttttaatgtttcataatagctgcattttgctaatagttacatacgtgaaaatattgttcatattatgaaacattttgctaatagttatttcctctgattgaaacttttgtctgatgcaacctttggccaaccacctagaaacttttgtctgatgcaaccttcgcccaaccacccaacaaccaccctgcaaccatcgtctgattgaaaccttcgtctgatgcaaccaccgtgcaactacgcagtaggggtgttcgcggtgcgggtggtgcagtttttgactaaattttcaaaccaacccgcacatgcggttttttcaatttcccaaaccgcactcgcaccgcgaaactaaaaagccgcaaaaagtagtgcggtacggtttatgcggtt

SEQ ID NO: 370355 - DNA, 394 bp, Cannabis indica
agcccgactctcaacacaattatctcatcaagttaatatgagcaaaaggagagtgaggttggacaacattcctcgtcctcagcgccgcctgtaggcaacacacaaccgccaccacaaggtgtgcaaccaccactagttggtgtccaacctcagcaggacctaaaggctctaatcatggaaagtatctgagaatgttatgaaacaacaaacatgcctattcttggatatcataaaccatacccatctcattatgattacgttccatatcccccaaattacataaacttacaatttgaaaagtttgatgggataaatgggtctcccaaagaacatatggcgtactttgtctcggcatgtggtgaatctgctcagtcagatccattactcataagac

SEQ ID NO: 370356 - DNA, 1127 bp, Cannabis indica
ttcgccaaaactggaggtgtcaatagatgcctttttatgctcttaaaggcctcctcacatttctctgtccatttgaatttcttgttgcctcgcaatacattaaaaaatggtagacatttatcagttgactatgaaatgaatctgttaagcgcagccatccttcagttatcagggtttgctgcaatgcccctcccattgactatgaatcccataaattttcctgaggaaactccaaaggaacactgctttagggttaagcttcatcttgtacttccttaatatttcgaagcattccgcgaggtctgtagtatgacttttatcgacttcaccaacatatcgtcgacgtagacctcaatgtttcgtcctaattttttttgtgaacatttcattcacacgtcattgatatgttgccccagctattttttaacccaaatggaatgactttatagcaataaagtcccatgttggttatgaagcttgtatgttcctgatctgggacatgcatttttatctggttatatccagagtatgcatccatgaacgacataagctcgtgcccagcagttgcatccaccaactggtcaatccttggcagtggaaagtaatcctttggacacgccttattcaaattagagaaatcaatacaagttctccaagttccattagggataaaatgcctcgcgtatacagtcgttgaccaacaacttatccacttcctatttgagttccccttgtctcttagaatctaagcgtcacctcttctatcttttagcttggtaattcggatcaacatttaagtgatgacagataaatttagggtcaatccctatcatatctccatggctccaagagaactaatcctggttcaccttcaaaaagcttattagctgctatttcaattgttcatccaagttcttcccaatataaacacactttgtaggattccttggatctagaacaacttcttccaactcctcaattggtttcaataaatttctttcatctagaatttaaggatcaagatcttaggaattattttaccaggatcttagatctcctcacaagtatgttgattaacatcctaaatatgaatttctaaaacgattataagtaaacacatataaagt

SEQ ID NO: 370357 - DNA, 522 bp, Cannabis indica
ttttattgcagattcagtttgttgatttctcaactacgaatctcatatgttcatgtcatcttataatattctaagttagaagaggctttctttttgggtattgctttgaggttcatgttggacgagttggtcatgaaatccgaacctccactggtccaaagagtggctttggaagttccaaacatgtttggagaaaaaattgtttaccaattaattaaagacgcatttgataacatatttttttttattcagttttatgttataaaattggaaaagtaaaactatttttcaaaaatatattttataaaactgttttcactttttttaattttttaattgagaatcaaaatttttttttaaaaaaaaaaacccacttttcaatatttttttttaaaatagtttttttttttacttaattaatattttagacttcgaccaaactcgaatccaaatctccccaaaccttggcgctgaacccgacctctaagccgaatctgaatttgaccccggacctagaccaaa

SEQ ID NO: 370358 - DNA, 833 bp, Cannabis indica
agatgatctgctaccattagtgccttcttgtcctttatctctatgtcaaactcttggagtagaagtacccaccgaatcaatcttggctgtgcatccttcttggtcataagagatttaattgctgaatggtccgtgtagactatcaccctatttccaattacataggggcgaaacttatcacaagcaaacataattgccaacatctctttctccgtcgtggcataatttagttgagcatcattcagggttctactagcatagtagattgtatgaaacaccctgtcaaccttttgacccaagaccgctccgattgcatagtcacttgcatcacacatcaactcgaagggcaactcccaatttggtgaagtgactattggtgctgaaatcaatttctccttaagaacttggaatgccttcaaacattcttttccaaactcaaaaggaacgccattaacaagtaaattggacaacagtttagagatctttgagaagtccttaataaatcttcagtagaaaccaacatcacccaagaaactccttactcctttcacagaaactggaggcggcaaattctctattgttgacaccttagctttatccacctcaatacctgcttttgagatcttgtgtcccaaaactatcccttctgttaccataaagtgacacttctcccagtttaggaccaagtttgacttttcgcatctgattaacaccttctccaaattctctaagcaatgatcgaatgaagaaccaaagaccgagaaatcatccataaagatctcaatgcatgattcgattaagtctgaaaagatagccatcatacacctttgaaa

SEQ ID NO: 370359 - DNA, 691 bp, Cannabis indica
ccccttagattaatgtaaatcatgtgctacatttaagtagagagtaagaatatattaggaaactcattcataaaagtaggtagattttaataaaataaaggctaattagaatttttactccgtaaactttaatatgtaccaaattatgcccctaaatttttttagccgttaaaaattcccccgttagatttaaggatttttgtctaattttattcaattttactatttaaagtgattatttaagtactaaactatgctcttcggattttggtatctaccaaattatacccttcgaactttgacatatattaaattatgcctcttgaacttttatctatgttaaaccttttttattaaaataagacaaaagtccttaaatccaacaatctcaataatttaggaggtatttttaatgatcttaaaagtttatgaggcatgatttagtatatgtaaaaatttgatgggcaaaagttctaattagcctaaaataaaatatgaagttatttataattaattgatacaaaaaatgggatattttcaaaaatatgggaaaaatgagtcatcttatgataaatatggcaacaaaactaaatgccacaaaatatggcattaactaaggaagcaaactacaaatatggttttttttaaaaaaaaaaccatataataagttaaaaacagaaactaattttaa

SEQ ID NO: 370360 - DNA, 617 bp, Cannabis indica
gtatgagacgaagatgagagggataccgacgggaggtggtggtggtccaacgtatgcgacaaagagtacagggagaccttcgggaggaggggtgggtggagatcgatggacgagagagacaagaagaaagggagatcgatagagggaggaagatggcgagagaggggcgcgatggtggggaggcgtggctggggttgttgagagttaagatttttgttttagggtgtgggaaatagagaagaaataggtgagaagatataggtgggcatgtgggaaatagaaaaaaagagtaggtgagcacgtgcgaaatgtggcaagaagtaggtgatgattttttaatgcacccttataggcgatggttttaaaacggtcgcctataaggttccattaaaaaatcgcattttattaaaaaagcatcacctattttgtttactacgattttaaaccgttgggaatagtaaattttctcgacgattttaagtaggacttaattttttaagtgacggtcccccaaaaaaaaaatcgtttttaggaccgtcgcgaatttggatatttgtagtagtgataatacaaaatgtatatactaccgtcagaaaaaaacttgaactgagactttg

SEQ ID NO: 370361 - DNA, 491 bp, Cannabis indica
gatcaaatgaactggggtttgaaaaaaaaaataaagtgaatggtctgatcaagagaaacatgtgacaaaaattgttttaatggagcaatcattgggcaccactctttttactcagtccaatcatttggagtgatgtacttttgtactcaaaaatgccacataaagtatacatgtattattttgtggggctttaagttgttgacttcagtcaactgggcccctctactaatcagagcccacttctctcagcccaatatccaaccctaccaattcatcatcttcatccatcaccaacacacacagccgcacttcccttcaccaacgtgacccagcaacgaaccactgcaccaagtcgagagtccagtcgatcatcactccactcaggccatctccttccctgtacaaaccgtagccacagagatcgcaaccagcgaccaagactcaacctccgttcgaacctcccagccatttcctccattcaacccgagcca

SEQ ID NO: 370362 - DNA, 567 bp, Cannabis indica
gtgtcgtaatgcaaggagtacggagtggtatgagcctcttcaagaattttatttctaagttccgcactacttggaaacacctcagaccctatcagcctgcatcagtaaacacctcagaccctatctggatgcatcacaattaaccacgaacttctctttatcgaaaggtagggctaacagtggagctgtgattaatctttgtttcaactcctgaaaacttacttcacacttgtccgtccacacaaaatgctgattctttctagtgagctcggttaagggtgttgaaattttagagaacccttctacaaaccgacgataataactagccagacccaagaaacttcttacttctataattatttttggtcttggctaatccctgacagattctatctttcccggatccaccttgatcccatctttactaacaatgtgcacaagaaagcacacctgagatagccaaaatttgtactttttgaatttggcgtacaacttgtgttctcgaagccgctgtaaaactatccgaagatgttgctcttgctcctcttctgattgagagtacacaag

SEQ ID NO: 370363 - DNA, 750 bp, Cannabis indica
agctgttatcaaacgttgcttcaactcttgaaaacttacttcacatttgtctgaccacacgaatcgttgattttttttagttaacttggtcagaggcatacagattttagagaacccctcgataaaacgtcgataataccctgataaaccgagaaaacttcgaatcttcgtcatagattttggcctcggccaattcttcacttattcaattttacttggatcaaccataatcccattcttccggacaatatgtcttagacaagacacctctgacaaccagaattcacactttttgaactttgcatacaacttatcatccctaagtcgctgcaataccattcgaagatgatgctcgtgctcctcttccaattgagagtatacaaggatgtcatcgataaacactatgacgcacttatcaaggaaatccttgaataccctattcatgagatccataaatgccgcaggagtattagtcaatctgaatgacattaccaaaaactcatagtgcccatatctggattcgaaatgcagtctttggtatatcttcttctgggattctaagttgatgataaccagatcgcaggttgatcttcgaaaacactatctttccttgaagttgatcaaacaaatcgtcaattcagggtaacgggtacttattcttaatcgtcaacttgtttagttcctgataatcaatacacattctgagggaaccatctttctttttcagaaacagaaccggagctccccagg

SEQ ID NO: 370364 - DNA, 482 bp, Cannabis indica
aatcaaatatttgttaatcatcaaaaataagagacttaaaaatttgagttaacaaattatccaaatgtgtttcctcaaacaccaagggatgcaaaacaagtgagataaaccattttccaccaaggactgaccctagccgaccactgtcatctttgtggcacaatgaatggtagtggtcatccatgaagagggggagtgacattttttttccaagaatatatattcaccaataatatgtcaaaactaagtgaaagaagccacttagtggtgtgaaaaccacttagctgaccactactacaattttggtataattagtggcagtggtcggccactacacatgggaagaagtttcattggccaatttttatttccaacatcaatgtatcaaatacaagtgagaaaagtcacacaaggcttcataagtctcctatgcgaacattgccacttgttttggcaaaaatagtggcagtgctctcctaagc

SEQ ID NO: 370365 - DNA, 948 bp, Cannabis indica
ttttcctttctcgttagataggttgtaaatcacaaattacaatggtttgatccctttctcgtcagaaaggtttgatcaaggtgttataacgattccacccctccgctgtcgaaaaggtttggtcaaggagttataacagtcgacccctcttctgtcaaaaaggtttggtcgaggcccttttataaagttttcaaaatttgaaactatgggtttgcattgtactatgtatttccagatcaatttcggttaatcatacatatatgcccctcaagcaattttaaagattttaggctttgtaattacttgtttgaaagaaatgattattttattcacaaatggaattcaaaatattccatcagtaatgtgatttacaatcattaatctcaaaagaacttccccagttcaattgtttattttatcaatcttccaggaacatctagttttgataaaacgggtttcgatgttcagggtcaatccccaacattctcccacaattgtttcaattttcaaggtcaatccctgacatatactagggtttcacgtggagtaatccgtgttttagttttgtctttaactgccactggttaacatccagttatggaaaccataacgagccagtatctactcaggtcgcaactcttttacaagtttgcttttactggagtaactgccttttgtactcttacaacctgctccttcttgagataaccaaagtgtcccctcttctcgcagagagggttataatcttcaatcgctcgagttattaggtagatcgaagtgatcataggcatcttcttgcccctttatatatcgatgaaggtgtccttgcgttatgagactttctatctcatctttcaactgacgacactcttctgtggtatgaccaatatcaacatggtattcacactgcttacttggatccgtcttgcaccttgcatgtttcatagg

SEQ ID NO: 370366 - DNA, 935 bp, Cannabis indica
gttgtttcctttccattccatttcattttattatctccaaccaaatgacacctaagtgcttttaacaattcattcttactacgcgcaaatcatggttttgccaaagctagttttaaaaaaagataaatgcaatttgtggagtctttttttttgttttttttttttttttatggaaaagggtttgttgatttcaatggtcttggtaatgtagcatgggataatttatgcaaaataaaaaaggagggatgcttgaggtttagaagaataatgagttggactaggggtgttcatccaatccaatccgtattattttgctcatagtgcatccgatccgcactaagtgcagattttatattttttatccaatctaatccgtacaataattcatatccaatctaatctaatttgtaaacatgcggattagatcaattactttggattggttacttcttaataagctattcaatatttataaaaaatattttttttacataactaacaacaaaacaaaataaattattgttcttttatatctctaacaacaaattaaaataataaattcaaatgaagaaaaaaaatatagaaagaaatgattaaggggagtttaatttgcatcccatcaaatgataagtacactccattattaaaaaataaacttaaataattttttaatattactcttaatatatttttttaattttttccttcacattatttttgttaatttcagtacttattttgattttattctaaatcatgtatatattttattttttctatgaaaattttatgtaatttttattttaatataatttatttttatttgataggtatattttttaagaatataaattggaagaaaaaattaaaaaaattaagtacagttaaagatatagattttatataaataaaaattattaaaataggatgtcttt

SEQ ID NO: 370367 - DNA, 504 bp, Cannabis indica
tacttgtgagtagatctaagatcttggtaaaataatttccaacatatacaatttgacatgtttgtctgaccatgtaattacaccgtaattgtgtaatttaaagtaattgaggggttccaattacactctccaattctcatggccccctatgagaattgaatgtaattacattgtgtaattactaaaaaaaattcatattaaacattaaaaaaatattattttcccatgcaattattaactattttgtcaaacaagatattagaaattcatatgtaattagtaacttatatttaaacacactttacattttaaaatataatataattattaaactgtgtaattaccaccttaataattatatatttacttccacacacacccttataaaatttaaagtgacacgttcaaaagcactctcaaatctttgaaaaaatattccataaaataaatattgttaggcatctccaagggctgtcccactattatatttttcttttgtttttt

SEQ ID NO: 370368 - DNA, 699 bp, Cannabis indica
ttgtgtgagaattagggggttaatggtagtgggtacgacatactgaacccagccctccctcacatgaaccaccccaattatgaaggctcatttgccttatttaaattattatattagtctaacctaattaaaattgatttagcaatataattatctttaaaatatatgaaatttattttttaattggattattttggagttaattttagaaaaacacttagttaatgagatatattctagatagtaatttctagtaactagttatattttctaatatttaattaattaagaaaatatatttacgttaaaaattaattattttaattaattttggatcaacttaaattagaatattttttcgagcattaaattagaattaataattaagttgattttatttaggatagttaattatttgattcttttatttaatacatttaactaaatataaaaattaaatatttaagttgattttattctagacacttaaatattagttattttcaaaatatttaattaaatagaaaattagatttaagttggaaattttaattgcagaacaacttaagttagaataattttcaaaatatattttatttaattttattaatcattttcccacctaaattttgaaattgcatttatttaatgtagataattttgaaatttttttgaaaaatagattaaagtcgaaaatta

SEQ ID NO: 370369 - DNA, 622 bp, Cannabis indica
ggtcgggtactaggtcccggtcctagttctgtttctgaggtccctgtcctgattctggtctaggtcccggttattgtggtggtttgggtcctggtataggttcgggtttaggtctctatttgggttttgatttgggttcgggtttgggtttaggtcgttgtcctagtcctagttcagttctagttccatttacgattctgagttcaagtctgtgtttgagttcaagtcggagttcgaatccaagtctgagttagggctcagatccggatttcagtctaggtccagatcaggctccgagtgtgggttcgcatcctaggtcttggtctaggttgggtccgagtcccaaattccaatcccgatctgtgtcttgatttagttcttggtctaagtccttggttctgatcctggtttgggttcgagtttgggtccgggtctacatctagctttgggtctaattctaggtgtgggtttgagttctggtccgagtttgtgttcaggtttgtgtctaggtctggacctcgatctgggtctaggtttgggtccaggtgcaagttggtgtcccgagtgtgtgtcgaagtttgggtcttggttaggatctcggtccagatctaggtccagcatt

SEQ ID NO: 370370 - DNA, 418 bp, Cannabis indica
atatatataattttactgtatttttttttttggaaaatttgtggcaaaagttctcaaaaagttcacgttgatgcatattagtccccaacttctaaaaatagcggcaatagtcttcaaggtcacactttttatttatccgtcgatacccagtttgacagccccgttaagtattggtaagaatgccacgtgttgaagtattattggtccaaattttataaaaaaaataattaaagaataaataaataaaaactttaatattattttttattttcttatttaaaattaatttcttttttctttttcctttttctttttctttcttcatcttcttcgtcttcttctccttcttctcactgccatcaccatcaacccccaaccttaaccccaaaccagcaccaccaccaccttcaaataattt

SEQ ID NO: 370371 - DNA, 603 bp, Cannabis indica
cacggggctcctgaagaaacttaactgcaccctcgactcgtagagcctttttcaaccatatccgcatatgatgttgcctcactggtagtaattactagggcgtgtctaatttttcaatttagacctgccaggtatttctctttcttgctgaagttcgtaggcacaatacccaaagccagcttggccaaacggttaaatttcgttgtgtactcagttaccgacataccctcagtctgcaccaattctgtaaattcttttcgctcagcactgtggacaacctcattgtaataattggcattgaacaaatctcagaactcttcccaagtcataacagtgatgtttcgggtgagggacaccaattcccaccacacgagagcgtcttcctagaacaaaaaagtagcgcaggtcacccgatcatttccaactaccctcgtgaaattcaaaattcataatatcactgttagccactgctcagcctcccagaaacactggaggtgcttgcttacggaacctctcgtataatggctccatactgttgccaacaacaggttgttctactggcaccgtaggaactacaacggcctgagcttgcggtggaggcac

SEQ ID NO: 370372 - DNA, 521 bp, Cannabis indica
atatttatataataataatatattatatgttatcatttatcacttatcaatatacataagtaaacatttaaaaaattatatatgtataaggtgttttggtcggttttggttttattggtcggtttacgatccaaaaaaaaaactgatcgactattggcggtttaaaccgttggcaattatttcggttttcggttttggttccagcggtgtttggtacgtcggtttgaacggttttttcggttctctggattttatgctcagccctaccatactctaatgtcctaacaaataggcacactacccaaggtgattaagaaaccctaatctcctaaacaggattactagaaacataagctcgggaaaaattagagtttcaaaagttcatcactagtagaacccaacccgcttggtctagtgtgacccgaacatctacatacatcgcccaactctcgcactcatggttgatcagagacaaatttaccctttcctgcacagtagagcacccgtgagccaagcccagc

SEQ ID NO: 370373 - DNA, 725 bp, Cannabis indica
gacaaaaatctttaaatccaacaatctcaatagtctaagaggtatttttaacaaccttaaaagttcaggggtacatgtcaaaattcaggggcaaaaatcttaattagcaaaaaaaaatataaatcaatttacataattacccttcaaataaattaaaaatatattttataattgataatataataattttatatttaaaatttatacatcttccttctcctcagtaccaaacaacataacatagaggaaaattattattctctcggttccatcactctccatgcttcttacactttccatccttccaactctcattcctctttaccaaacatagagtaaagattgaatccccttaaatttgggatgattttatatttttaattttttatgttcaaaaggacaatttgaagttttactaaccaattttttctttatcatctaacaccaaacaagacaaaagagatcaacaacaatcatctccatccctcattctccccaccctctctaacctctccatccctctcatcaaacatagcctaaaagtttattattcatctttccaaaatttgattttttttttttggcaaaagtatttctaatatacttgaaagttttagaaataaaaaaaataaatgagatctaaatggacatataatcgaatgctctagtgtcataactgcaatacaatgaccaatcctactccataccattaccattccattatt

SEQ ID NO: 370374 - DNA, 537 bp, Cannabis indica
ataggtaataacaagtcaatagagtgaaaaagtagtactcaacttgtcccatctatgaaagagtactaatggtaaaatttagagggttaaaaccgaaaggttttttaatggaatgatgtgtctaaagagaatttgtgagacactaatttctacctatatggactagaggtggtgccgcctcttatgagaattgggagttattctctagagagtccatgaaatggatgttgcacatggccattaacggtgcacaagcgagatataatgaggtctcaagtgaactctagcaaagatgtgtgtgttatcaccggtttgtattaaaggaatagtggttcaatgctacggcaaccaaaatttcaacaaactttgtggtaactacactaaggtaaaattcaagtcgaaagacattttactttatgcatctaagcaagatctctataaaagtgtttgatttattcaatcaaagtgggggatatataatatttgattgattaaataatgttacaatggtgtgtcacaagttttaatctagtgggg

SEQ ID NO: 370375 - DNA, 599 bp, Cannabis indica
acgatcctcgggacaacaacgcttttgtagttagtcgctaggcgacaagtattttgtaatagacagtaaaatttttgtaaagtattttgtaaatgggatccctaagtattttgtatgaaaatattatataagtttaattaaaagtaaaaattttaattaatcacgattttcataaacctcgttgattagcaacgagctgcacagtacgtttgaaaatcacgtaataagcctatgctagttagggtgttacatagacagatcatgcaagaggtccatgaggggttctgcggagatcatactggaggtctaagtctctcaaagaaaatactgagacaaggatacatttggccaacaatgaagaaagattgtgtagactacgtcctgaaatctgattcgtgccaaatgttcgcaaacataccaagaggccccccaacaagattaccctgatgactagcccctggcccttcgcggtgtgggggatagatctcattgggtctttaccaacaggaaagggaggggtaaagtatgctatagtagccgtggactacttcataaagtggatagaggccgagcgtatgaagaccataactgctaaaaaa

SEQ ID NO: 370376 - DNA, 668 bp, Cannabis indica
gttcaagttcgggtctgggtcgggtcttggatcccggtcctaggtctgttgcccaggtcccgaatcttgtctgggtttgggtcccgatctaggttcgggtttgggtcctagtcaaggttcaagtttgggtctcggtttgggtttttatttgggtttgggttcgagtctagtcctagtccggttcaagttctaattgcaattttgagtttgagttagggttcgagttcgggtcggggttcaagttcgggatggggtcaagtcctagtcagagtttgtgttcgtgtctagatcacggtctaggtgcggatcaggctccgggtgtgggttagggtcttgggtcttggtccaagttcaggtccgagtcataggttttgatcttgatctgagtctggatttagttctgggtctaagtcttgggttccgatcccgatctgggttcgagttcatgtgcgggtgtcgttccatgtttgggtttgattcttattttggctttgagttcggctcctaggttcgggtccgggttcaggttttgtcgtggtatgggttcgtatccaggtttgtttcctggtttgggttaggggaaggtttcgggtctgggtctaggtctgacttcagattcctgggtctaggtcaggtcctggttcagttttgagtctcggatttagatc

SEQ ID NO: 370377 - DNA, 765 bp, Cannabis indica
tcaggggcaacatttaccccccaagccttgtttatttgaaaaatgaatcaaggcttgttcaagtgcctccggttgactcctcggtttcctggcacgtgctttgggtgcgtgagggtgtatttaatgatcgccattaatgcagcgattcactttttgtaggcgttgattcgtttcatgcccattgattgatacggcgcattaatgtgtgtcagacggatactcaaacgtttccaccgccttaattacgaatcaatctcaccgttgattcttgggaattcgaattgtgcacctcctcaaccgttcaattggtaggtgattgtgcgtgttccacatgccccttggcctattaaagccacaacctttccttcatttggttactttccttctttcgccaactttcttcgagttttccagagagaaagaaatcctcaggccaaaaaaccttcaaacacttacagatttctttgctaacctttgttcgttactgtcagtctatatttctttgttgatcaacagcaacccccagttccaacacttcatgtaagtttctcgcatccctcactttactgtttagtgttcatggcatgctttactgtttatttgtttttctgggtttagtgtttgaagtttctggggatgtttcaccttgagtttttacgtaatacgtctagatttcccttttctggtgttagggtcactcttgttacacattattattattttttgtaaaggcccattcactttttgcgtgatggccttcaaggg

SEQ ID NO: 370378 - DNA, 599 bp, Cannabis indica
atgcagagagagagagaattgtggaggggggttatttttggggttttaagaaaaaaaaatattagttttttatggtttaaattttggtataataataaaattttttaattatttaagcatataaaatcaaaattcccttttaaattgtgtatgacatatataacatgttatatccacgtgtcacacaaagattggttctcttgaatcttgtaacctcacaaatgtaaattgagtagtgttatagtcaatgttcgtggaaaaatatcccaaaatatttttattttagaaaaaaaattcataaaagtatttttttttttgaaggaaaatgttaactttattaataagaagattcagccattacaatagaaagaaaatacagtaggaacatcatcctcactaaaaatacgatctggatacaaacaagagctacgagcaagacaatgtgcagcttttgtttacagaacgtttaacaaaattaattgagactagtgacaaatcggccaaaagagaacgacaaaccgccacctgaaggccaaaaggagaaggtatctccaccgtgctttggactgcctggacaacaaccaaagaatcggtttcaa

SEQ ID NO: 370379 - DNA, 835 bp, Cannabis indica
ataactcaacaaaagataaaaccaaaagtaaattcctaacatcttgaacaataagaccaaattgtgaggacataaaaatattactttggactgcttggacacacaccaaactatccgtttctaacactacattgtcccagggatgagttgcaatcaacctcaaagcttctttgatgcctatgatctcagcaatttcgggttggacatacccaaccttttccttcttgaaagcttctaccatgattccatgatgatctcgagctacacagcccactccaaaccgcccctcttgttcaaataatgccccatcaacattaactttaatcttattaacacaggtgcaaattgcaatccaacgctcacaattctgccccccatcattcaaaggagacaacgaaaggcccttccttccctgagcaaatttgtattgatcaagcatgtgtttagctgatgttacaatatttgaagcaagccaactcttcttttgccaaacaaagttattccgcgcacgccaaatagcccaactcaccatcgccacttcctccacttcaacttcgtgccccctagtgaaaattcccaacaaccagctgctgaatgttgcagccccagccccgacgtccactatgctgcgatgccaagcagcctttgcaaacgagcattccaccaatgcatgttgaatagtttcagtactagagttgcacaacgggcagtcgacattgataggagcatgacgcttttggagttgaaaatacgttggaagcacacccgaagcagctcgccataaaaaaatactaatcttaggaggaatttgtaatgaccaaagccgcttccaaaa

SEQ ID NO: 370380 - DNA, 593 bp, Cannabis indica
tatgcaccaaattaagaaacagtagtaagtaagtaattaaagttttatggctatattgaattgttttgttttattttgtaggttaatcctgaaatggttgggcgtcttgagaagggtggctactggcttgtgctttacaggaaaatatatatataacaggtcgaataatggaggtaactaacaacttagtttcatctcatcatgtatataactataatgaatagagtttcaattaactatatatatgtgtgtgtttgtgttggtagattgttgagcttaggaaccatccataatatgttggggttcagtttttcatccggagttcaagtcaagaccaagaaagccttcagcattgttctcagggcttatagcagcctcatgtggagagttagagagtttggtgcagtttgatcagaccaacaacaacatttgtaattagagaattcataataattataatggtgatcccatgatatactaaaatgggaatgggaatggaaaaccagcagtactagaactagatcctgctatttatagtctttgcaatggggtacattagtataatatactattactattattacatataacaa

SEQ ID NO: 370381 - DNA, 545 bp, Cannabis indica
atacttaattagaccaataataatataactcattaaaaaatactagatactactagttatttttttttagtcaattccccttagatgtcccctaaccctaagtaaactagcaaagacagtattaattgacaccttgcacatttgatctcatataattcaattaaaatattaattttaaactaattttaagttataaaaaaaataaaatatttggtttatatttttttaattatgaaagcgtatttataaatacatatttttagttaaacacctgaaatttgatctcataactcttacacatgcacttactaatactctctatccaaacttttacaaagagaaaaagtttaagaaatatcatttaaacttaataaattttaagaaaattattcgatatattttttaagtttttttaaaaaatttacggtttgaattgctttagtcgtttttccagtaatttttatgtgagttgttgtgtagattttatttgcgatttaagttactctattagttaccatgagaatttctatgtagaatttcataaa

SEQ ID NO: 370382 - DNA, 450 bp, Cannabis indica
tctctcagttagaaagttcagcttgcccgttggtttgaggatgataagcagtggcaatcttgtgtttgacattgatttagataacaaggcaacaagaattttattcacaaaatgagtaccttcatcggttattaatgcccgtggtgttccaaagcgagtgaaaacttgcttttggaggaacttcatcaccatatttgaatcattagtgggacttgctactgcttcaacccatttagagacataatccaccgccaacaagatgtatagattgccataagatggtggaaacggccccatgaaatcaattccccaaaccatcaaaaagttaccacttcaagaatgcaattcaatggcatttcattccttgctggaatattgccaactctttggcaacgatcacaacttcttgcaaaatcatgagcatcgttgaaaatggaaggccaatagtac

SEQ ID NO: 370383 - DNA, 571 bp, Cannabis indica
agaaattgaatttagcaagcacgctggaaaaaagaacgtcgaaaaccgatgccccacgtggccgcacgcgcccccacgcgccgcctgcgcgagtgggcttcgcggctggcagcttcttcttcctccagcgggtctgcaaaccgggtcacgcgacccggtctcctccagtcgggtctgctctctttttccggccaaaaatcgacgaaaacacgcgattcttgatgggttttgttcgggaatagatttctaatcaatctaagtattcaatttgggataaaacatccaaaataatggtagatcaagaaattgaatccgaaaattgaaaacttaaaaaaaattgattgtgttatgaattctcggttggaacacgaaataaattgtgtaagaatattgataaacaattgataatgagaaatctatcatcaattttagatcaaaaaccataaaatcaaaacacacaaattataatttcatattataattatataaaccctaaaactttaaatttaaaattctcttaatatagactatgaattcaaacatataatatatcaattgaaagagaatttaa

SEQ ID NO: 370384 - DNA, 1045 bp, Cannabis indica
ctctttctctctctcgaaaatcctagggcagctagggttctttattttcttcatcaatttactgtgatttccagcagctcttagtgaattcaagctaaggtaagcttctagacaactttccttggttttcttgaacttcaagttatgaaattatgcatgttttgagagattgagttccatagttgttgttggtgtttgaatcatgtttctgtagttagaatatgatttattatgttgagttaagcatgatttagtagttgtttgaaggttttagcaagctttgagttttagaactcaagcttgaagctttaaaggtgaaaattgattctgagctttgattgttgttttgttgcttggaatatgtttattggagtataatatctaggtctggaaagtttggttgagtttggaaacgatttggttaggggtttgaattttgttggttttcagggtaaaaccggttacccggttttacactgcttgtaaactcgattacttcgattttgcagcaggggggaaaacttgttttttagcttgtcgtttcgtgtcagttttaggtttctaattaggttattccctgctagtttgggatagtattatattaagttgcagtagatagggttttggtttgaaaacttagtcccggttgtgatttagcgagtcacttatgtgtgttgatatcgatgtgatctaggagcctacaattcgccgagcagttgttccactcaggttgaccggcacacatgaattcagaattgaggtacgattagtataatatcttgcatatgttattacatgtttagcgtacatgttgttatgcctgataaattacattgatagcagtaatagtataaatagagttgtgctgattactgataaatgtatgttggctaaaatacttatccatgctgtcacatcaatatggctagaaaatgactagaatattgagtataggatgacattatggtcgatattattgttttatgaacgttctagactcagtaccgtgtgggacacggggattagggttatgatcaggtgtatg

SEQ ID NO: 370385 - DNA, 704 bp, Cannabis indica
cgacaacaaaaaccaataaatactttaaaccgaaactctgggactaaccctaatttccataaccgaaccaaacctaacttccattagctccaaaataatccaaacaatactcagttagactaaaatggatactgggtacaacctcgagcccaaaatcaattttgaggaaaacccaaaaattttcccttgtaggtcgaccggttctgctacaccagaaccaaccggtcgatcggttctggcaggatacgtatcttgggttttcacccccaactcgaaccaaaacgaaaccaaacctatgcaactgctccagatcaataaattatcataatcacaacatatcccaataatcaattaacagcaattcatttattcaatcaaaattgcataatcaagtgaaattagacttaataaacttcaccttaaccaaaccaaagcaagcagccactaactccaactgattcaaacctaatcgtactccaaatccaatctacaaacacattctaaactcaccaaaacatcacagctcagaaattagacttaaccctaagcaaaacttaattcaaaccatggaaattcaagctaaggaacatgaaactcacctttcaatcttgggcaacacttagaattaacttaatccaacgtagactttgttgattgaagaaaaaacttagttttcagctggtttcttaggattttcgagagag

SEQ ID NO: 370386 - DNA, 509 bp, Cannabis indica
tttgaatcgaagcaccgtggacagggagatactgcgttgtggcgctgcctttgtatcataggagtattgtggtactccatgtccctcacacaaggtggtgataatatcagcaagcccgagtccacccccacaagatccctcaaccataaaatcaaaagttactctaattatgtccgccacattcaagttgcaacccttcataattgcataaacaaatttaagcctttcgagctgagcatcaaaataatgtttgtatggtaccaaccttgcactaacaaagtatagccatgccttggctaccaggtttatttcacacctaaatagctgatacagttctccatcatactcatgaaacctaaggcctggataacctaaggtttcagctatgtcctcataattcaagctttttgcttggatttgctgtttaagtggttgttcttctggggtgaagatcggtaagtcatagacaacatgattagcggctggggaaactggcactctgacccccc

SEQ ID NO: 370387 - DNA, 607 bp, Cannabis indica
ttctatatgcattactcatttagggatgctgaatttctttacggcttattaggtgaatctaaatatatagaagacaagtctctaattctatccaaaaaaatggaatagagataacccagtaagaactttcttcagctgaataacttttcagcgcttttcgaaagcaacttagttatgttgcctcactgatggagcttaaattatcatagatggatttttacatccttctagaataattcctccacccaagagtaaccaccatctcgaataggttacgagttggtgtagatatacggattctaatatacacctctatcatctaacatataagtcactatcagagatctttcttgactgtctcctcatgttccttgtttgattacatcttagatggctcccactcaatagtaggagtctttttaaattcatacacaagtgtacacttgacctcttactattggttctcagggacatcttgttgtgacatattatctttgtctgaaactgtaagtttcttctagattaagtcatcaacatagcattctagtattaacacaaaagtgaaatacttgcttaagattaagtaatcattacagataccataaaa

SEQ ID NO: 370388 - DNA, 749 bp, Cannabis indica
atttttaaacaaaaaaaaatataaaattttatttaagataaatatctaaataagataaaatgtacaaaactaacatttctaatcttataattgtaattaataaaatatattttaaaaaataaaaaattttgaaaaaacagatatagttagcaatttgaaattctaactagattatctttaagttttattaatattttaatgtcaaaataagatcatttcaaattttattaataaaataagtaaatatctgatcttataattaaagtttataaaataaatccaaaataatcaagtttcaaaaataaccataaaggcaagtttgtagaaaaatctatttttcaaattcaaagtccactaatatctaaaactaatttaaattaattaaaaaaatattaattttattctaattattatatttttctttaaaaatttagattctaaacaaaattataataaaatttgaattttgtttcattaaaaaatgatttttaaaacttgaaatatcacaaaataaagattgcacaggggattattgataactctaagatttagagttatttttatatctttaagcttgaattttaagttgaattgtgcagcaattaatgtttatattatgtaattgtgtttagtttattgtgtctttttaataaatggaagtgtgtgtgtgttagtaagtgttaaatagacttatgttgttgtttttatgtgtattaagcaaaaaaaaaatacaagaataggtatttgga

SEQ ID NO: 370389 - DNA, 551 bp, Cannabis indica
aaaaaaattacaaaaaatacacgcttgtacggagttttcaatatttttactgttttttagattttatttacgtaaaatataatcttttagtgtattttatgttgtatacttcttattttattattgattttttgttatttgtatattattttttatgttgttatattgttatttaatgttattttcttgttttctttttgtgtttttatagaatactgtgaaaatataaaaaaaaaaaaattagaatgtaaaaatataaaaattttaataaaaattggtgttttatgtaattatccctagtttaattccatatccacaacaatttattgtaggtatcatgcatatttagattattttggtatatattttaggttaaatttgagccaaaatatattgtaaaactatatttggtctaatttttttatgagcattgctattaggcaccagtggtgcctagcatatcgcgttgcgattggctagcgatactctctaaaagctattatattaaactatataagaacccgatacttaattggaccaatagtgatatt

SEQ ID NO: 370390 - DNA, 636 bp, Cannabis indica
agaatctaacgaagtctcgctaggtgagagtcaaagttattcttattttatttttcttcattgtttcatattgtaaacactagtctaagttgtcatctttggatgtacaactagttttacatttacaaatacttatctatcgagatctaacactattatgtttgtctaacggatgacaatcttttgggatttttctcgtcaaaacagcaaattaagttagaccaataatgaagacttaaaatttatacaacaacaatttctgacagaaaacaacatgattcaatataaatttatacacattcagaaattatcatacatttagcaagtaagaaagacatatgaaaatacaaaacaagcacatcttaaataatttctaaagtttccaacaaactgatacagtgtcccagtaggcgagagttaaagatatcattcattgaatagagtagtcagctcatctaaaatggacactattctagcaacttttatacgatcaaaataagaatccaatgttgtcccagtaggcgagagtcaaggttattcttattttatgagcttctactattgtttcatactttgtaaatttatctctatgtagtcatcgtatgggagggtctaatagagacaaaaacttacaaa

SEQ ID NO: 370391 - DNA, 506 bp, Cannabis indica
agctcgaaggaaattatcgtttgacttctatatcttaatagaagctatagattccgtatttgtgatttgtgctcccgctcaattgaactaccatgttcttgatctatattcacgagaagattcattggtcgactttaacgaacagattgaaaaacacaaataaagcaactgaactagaatctaaccatctcaggattgagattatttgatctaagaccaactaggtaatatggaattgaatagatactataattattttattatatctgattcaagttcaatatcggtcccttccgatgcatactccatacatccaaccaagcttactttaaccaatgccctagaaatgacatatcacttatctaaggtgcaagtaaaaaacattgtagattatcctatcagttaaaccctatgtactaataaatcataagaatacatttaatcacacaatcttgattactttccactgtgttgataacacaatagacaagaatatcaatgtgata

SEQ ID NO: 370392 - DNA, 614 bp, Cannabis indica
cacacgcgcgcgcacgaggtgcatcactcggcatcctcacggtttttcagacaacctgaccgaggaaactcagacacgagttgtctgaagccgtgtcacgccgagttccctcggccactgaggctacatgcagccttgtgcctcggtcagcactcccaatccgcgcgcgcaggggtatgcaatgcatacccttgtgcaccaaaatttgtttcttcatattttttttattcaaaaattatttttcattgaaacaaaattcaaattttggtagaattttgtgtagaatctaaatttttaattaaaaatctaattatcagaataaaattaatttttattaattttaattaattaaaattagttttagatattagtaggctttgaatttgaaaatttgatttttccacaaaagtagccttatggttaattttgaaattttttattattttatttatttaattataaaatcagatattacttatttttattattaaaatttgaatgatcttattttgatattaaaatattaataatattagaataatctagtttgaatttaaaaatttactaaccatatattttttaaaaaaaaaattagttatttttgtaaatatata

SEQ ID NO: 370393 - DNA, 503 bp, Cannabis indica
cttaattaactgctaattttcaaattaaactaagcggtctttacaattaagatcattctctttttgacttgctcaacgctttggaggcttttactactcagatgcaacaaaataatgcatagtttcaacaacctactcatgttgcaccatatagtgaaaagccaactattgctgagctgattgaaatgttagcagctattaccttgcagtttcaacaaaggtcagtgggtatgaagttcaaagttcaaatactttacctgcacaagtggagagtaacccattagagaatgtcagtggcatcactatccaaagtggtacacaacttgaattaccaccacaccaagaagttaatgatttgatttcagctaaaggactcaacaatttatcccttgaaagatcatctccatcaaaggctgaatctcctactttagttggtccattatcactagaaacgccatacaaaccaattgtaccaacttatgtcactcctccaccttttccaa

SEQ ID NO: 370394 - DNA, 614 bp, Cannabis indica
gaatgtgtggatcggtggagccacttgagaaggttaaagattttatcaaagtgatggatgagcagtttaacacttcagataaatccttattcaacaacctcatccaagagttctcatccacaaaactcaccggtgttaaaggagtccgagaacacatttcaaagatgagggatattactgctcatttgaggaagctcgatgttatcattgctaataccttcctggtccattacattcatcacaatcttcttccacaatatgggcctttcaaaatttcctacaatacacataaggaaaaatagagcatcaatgaattgatgaccatgtgggctcaaaaggaagccaggctcctacaggaacaaggagaaaaaagggaaaaagtccatggctcccaaggctgtcataaaaaaagatttcatcaaatgtttcttgtgtaagcaaaagggacatgcataaaaagagtatagccagttcaagaaatggatggacgacaaaggtaatccaatttccttaatatgttatgaatctagtatgggtaatgttaatcttaacacatggtggattgattctgattcaacaattcatataacaaattccttgcaggatattcaaaa

SEQ ID NO: 370395 - DNA, 700 bp, Cannabis indica
aaagaaaaaggcaaaaaaaaaaaaataataaaaagaaaataaaaaaaaaatatttttattaatgatttttaatgtttcaaaaaaaatttaatttatttttattttattttttaaatatttatttatgtggcccaataatattgtgacacgtgtacattgtgtccatgtagacaatatcttatatacacatggacagccaccctagcagttaactgtcaaaaacaaacggtaagggctaaatgctaacagaaagctagttttaggggtttttccgtaaaaaattaggttttgggggttaattgctactaaaataaaagtattgggggttaagccacaatttaccttttttttttaaagtctgttcaatttagcaaatgctccaattaatattcatattaatattgtctaaaaatttagccacgcttggtaggctgtattaagttgtattgtattttattatattaaattggattatatattttgcttttatataatgagattatttcacaaatatacaaaataacaaaaaaattacaaaaatacagttatacagaattttaaatatttgtacaaattttataattttatttacagaaaatacggtctttttatattgtactcttcttaatttgttgttaatttttttgctatttatatgttatttttgttgattttttttatgttacttttatatagtttt

SEQ ID NO: 370396 - DNA, 701 bp, Cannabis indica
aactggaagatgtatataataaaagcactaattaattaatcttgcataaattaaatttcaacctctaacttgacaacatatcatattatatatatatcataaatcgacaaaataccactattggcagaatgcaatgaacgacataaaatataattaatatactaaaatattaatagcctaacttacacaagaaaatcatgaatggacttatataaaagatactattaacttcggaagaaagattagaagatgaagaacaatttcataaatgagatatggaaatgaagcacaaaagaatcaatataaatattaagaataaaaaatacaatagctacactctaacctcaccaatatttctaaaatagctcactcatttttatctcgtaaaataagtaaaactaagagagaaataagaaaataataaagagagtataattttactactctaaaaaactgattatttttttcattgtatttggttcctttttatagtgcaaatttgctcctcaaatatggtattttcgtgtatcatttttggcatgtttactaataagtaatgagaatcaatggtaatgtaatcatttccttacttttgtttacttacattattaaaattagaaaagggataacttgattaataagggagaaaagaaagggagaacttctcccaccaattttgtaaggaatgtcattaagggtaa

SEQ ID NO: 370397 - DNA, 633 bp, Cannabis indica
aataatattatttgttttattacatatgtagtggaaaaaaaaaataatttgatggcatgaaaaaataagagtataattatatatataaatatatatgatgatatctcatatattgagagagagaaaaaaaaaagtattgagaaggagaaaattagtgtccaaaaaaagaaaagaaaaaaaaaagtaaaaaatgtgcgtcagtgtaatatgaagaaaatatatgcaattttataggtatacgtattacaataaaactaaaggaaaaaacggtatatgtgtcaattaattgaataacaatattatggcaattaatttctgttgcccctgattttgtccaaaatacgtggaccaaccggattgagacacgtatactgaagaggttagactctgggataattcaactaagtctctttaatcaaaggaatcagcatttaacatgcctcccggagaaggcaggtgagtttcacatactccctgagagcaaagctacaacaaagcatctccgggaggtgtcaaatcctatctgaacagtcacctcgcatttaatgccgcatgggagaaggcgtattgaaactgccataagtattaaagtcaaacggcgtaaccccccttctgtagctactacgctatgat

SEQ ID NO: 370398 - DNA, 666 bp, Cannabis indica
tcttagtgggagaattttaaaattatagcccatcactatttggatgactctagtgatagcctactatgttatgatcatgatgggaactttagaataaaaattagaaagtaaatctaaccattcatatggatagaaataacttatgagaataataaggataagatagaaaaattttcaatgcctattcgaatgacttaggcaaaatacctaatccttatgaaatgttttatgagatttaatgtgattacttaatcttaagcaagtattttacattaatattagtactagaatgctatgatgatgaacttagtctagaaggaacttattatttcagactaagataaaagtcacaacaagatctttttgagtacgaatttaaccagactcctgctgttgagtgggagccatctaagatgtaatcaagcaaggaacattgggagataatcaagaaagatttatgaaagtgacctatatgttagatgataggggtgtatattagaatcctaatatctacaccaactcagtactcagtattggagatggtggttacactgggggtggaggaattattcaagaaatttttttaaaaaaaccatctgtaataatttagttccaccagtgaagctaaataactttgttgacttaagataaaagtcacaacaagat

SEQ ID NO: 370399 - DNA, 523 bp, Cannabis indica
atgccaaataccaagaacccaacgcatggggtctttggagataattgggaaggaccatatctcatcgcggaaaaaataggtgacgctacataccgactcgctgcgctcgatggtactgcgattccacgagcttggaatggcgaaagcctaaaattatattatcaatagtactcgcattattaaattatgttcgctttgtacttatacttagacattttttataaaaaaaaatcctaagtataaggggagtatatatgccataatgtactattgattatataaaggaaatgcctcatatttgttaattcttcaagtttaaacaaattttgtcaagtcttgtaagattttctacttattacaccaagctgtaattaaagtcgaatatatatatatataaaaaaaaataaacgcgagtacccgtgtactgcgaaaatgttaaacattaattatccccgcgaggatatgaatttgtccaaaataaattgcaaatatgtctaagtacagagtgcgagtacccctgtac

SEQ ID NO: 370400 - DNA, 976 bp, Cannabis indica
tattttacaaaaataaaattttaattaaaataaatatttaataagataaaatgttgaaactaacatttttctaatcttataatttaatttaataaaatatatttcaaaaataacaaattttaaaaatctaatatggttagtaaatttgaaactttaactagattatgtctaaattttattaatattttaatatcaaaataagatcatttaaaatttaaacaataaaataaataatatttgatcttataattaaaataaaaaaataaaaaaaattaaaaaattaactataaggctagtttgtggaaataattaaatttttaattcaaatgctactaatatctaaaactaattttaattaattaaagaaaataaataaaaatttgttttattctgataattaaatttttatttgaaaatttagactctacacaaaattttaccaaaatttcaattttgttctaatgaaaaatgatttttgaatcaaaacttatcacaaaaataaaattgggcacatgggtatgcaatgcatacccctacgctcgcgcacgagggggaggtgtgcgagggagaggctgcaatgcagccctgttggtcgaggtagctcggcatgagcaagccttcagacaaggccatgtccaagtaaccttggtcaggcatttgtctgaagacgcttgctggtcgagtgttgcctgcatccgcgcgcgcacacgtgtgcaccaaaaccagatatttaaatccaactttaaaaaatcataactaattcataaaaaatccaaattgagttctgtaaaagcttaaatttaataatttgtcatctacattccactaaaaataatttcagaatgaaactaaaattatttgtcattgtaaaattgcgatttctatacaatcatcaaatatgctcataaaccaacatgaacacatccaattcaacacaaacattattttaaatctatatatttcatgaaagtaaatc

SEQ ID NO: 370401 - DNA, 442 bp, Cannabis indica
aatattattaattttaaaattaatagataattaaaaaaaaactaaaaaactaaaaataaaattaacatatgtgacttgacacgtaatatactatctagtatatatatatatatatatatataaagaaaagtttaaacaaaggtgatacgaaatcctgtaaatcattttttttaacaaatgattcataaaaaaattaaaagagttattaaattattaattgcacaagtagtagtaggtagtaaataaaattatgatacatatatttatcatacttataaaagtaaaaggccaaaatttaatatttatacttattaattatttttttattgaaatagcacattatttaagatataattttatttttttatataaattttaattataatgttcttaaataaatactcaaaatctagtctatttttgttttaataaaaagagatca

SEQ ID NO: 370402 - DNA, 578 bp, Cannabis indica
gtgcttaatgaattaccgagatggtgtgattacaagtatgaaattgtataagtatattagtatgtgatgtgttatatttacgattattctattataataagattaattgaatttaataatgtttatggatttaataatttttcttgctgagtctctgtgactcacaagtgctgaatggtgcaggtaaagggaaaggaaaaattgggcagccatgagtttgaggtctctgcagcagtgtacatatctgccatggtgtctttgcttctgagaagtaggatcaatctttttctatgattgaaaatgtaacctactttcgtaataatgtaatagcggttttataactagttgtaaaataattttataaacaggggatcattgtattatgacagtattttgtatgaaagttttatgttaaattttaatgaaacgttttaattaaaccacactttccctgaactaatagattagttattaataaatttgtaaaagcacagacgtagagtgttgggttttgttccctaaataaactcatttcaatataatcagattttctaattaataaagattagaaattattt

SEQ ID NO: 370403 - DNA, 564 bp, Cannabis indica
aggtttcctaaactttatatttgtttatttcattgttttagaattcatattaggattttaatgaaacatacttgttagtaaatctagatcctggtaaaatatttctaacagttctaatttctcaaagcaagcttctatttatattagttaaatcccttaattaaattttatttaattatttaaatcaataaatacctataaccaaattcagttactaatatttatgagggactctctcaacgacttgagagaatatctcaaaaattttgaaacatctataacaactttttaaattagatatttacataattgaattaattaacttattaattaactcaaaaagacaaattccatggggacaactactatgtaggtgcctaacattgtctttttaggataagatgatgttttttgtcttgacaacttttgtcttaacaaatcttgtctcgaaaattttatcttattaattttaccttttcctatttattaatttgaaaattattattttactattttaccaattcaaaatagattttttcgtaacatcattatagtactatttat

SEQ ID NO: 370404 - DNA, 692 bp, Cannabis indica
attgatttgccaacccccttttcccaacacatcacaagtaaattctattttaccaacacaataccaacttttgccagcacaaaaatgtgctggcaaaagtgacattatttcttgtagtgtagagagccttgatctctgcacagacctcattcccctcatcatcagaagatcccatttcctgaagccgagatctttttcctatcctcaagaaattcctcgatacccgaaagaggttggcacaaaagtcttcgggcccaggtttgggccttgggttggctagattctctgatagaaaccgcgccaaattccttcccatatacacatgaaaccatgccaatctttctctgaaattcttcatcatcctgaggaggacctttaagatcgctcacaagatctataccctcagggatcacttgtgaggatcggccatggcaggctacggggttcccctggtttggattggtcggaatctcctcagtcctggaatccatcatttgcggctccggtagagacttgatgtctgtaggaaaaaatggagaatggttagtgcatctgggtattatgagtttggaaggatgaacttttgaactcagaagagacattttgacaggaaagagatgatccattatgaaaatagatctcactaaagagccagaaggtttgtaaaaaataacaagcttgagccgcctttt

SEQ ID NO: 370405 - DNA, 433 bp, Cannabis indica
tcccttaaaaataggtaaataaaaatacaaatgactaaactgcccctcgaaaataggaaagttgctgatattttccctttatttacgtgggttgttaaggccaaattcgtggtttgacttgttgtccacggatgaaagctacccactaaaacctgccaagccaaaggctggttaaccatgcatctctaatgtgcatgctggtcggccatatgatgttcaaaagttgactggtctatgcttgttatagggccggccaagggtggccagccaacccccttgaggtgtttggttcgtcatctcatcgtccctcttaagtacttagacccctcgtcggttgaagtgctgagtagatggcttggccttcttgttgacgagttgtactcccatatggcattgatgttggccacatggacatgctgttggaaattatttt

SEQ ID NO: 370406 - DNA, 755 bp, Cannabis indica
atttgtaactaaaaagttacttttaaaatgcaagaaaaaaaaaacaaaaaaacgtcaaaaacggtagaaaatgtcaaatttagctaacgtggtatgccttttcaggtgtttgttctctatacgagatttttgattttaccaaatcggaagctatagcgcagttttctcatgtagtaatgtgattattgtaaattagatgaaaaaatgtatattattgtaaactttccaaaaataataatctcaggcttataggtatctttggacttttaaagaaaatgggctgtgatctctatcgtaataccacaacgagtcctgaatattgatattgcattatagactataaaattcatgtagcaagccaattacagttttcccataaaactgcaaaaatgtgagctaggtagaaaataattggttaacttcacaaatgacatttaatttgtttaatcaataaaacaaatttaaccaaattaattttttcttaaaacaataaattgaaataataaatgcaaatgaaacaagtttttctagtttctacataaagaaaagagcaaataaagattttgaaaaaataagcaactaaattatgatattgctaagaaacaaaggcaaataagttaaaaactattcctttttattacacattaatgaaatataactttaaaataattttaattgataaatactttctattgtaatcaaagtagcaaatatacatagggaataagatttaaaaaactgaatataaattaaag

SEQ ID NO: 370407 - DNA, 737 bp, Cannabis indica
tatttttatgattaaaaaaatttaaatgaaaatattattaaatgccttttaaaaaaaatttcttccttatttttttttcttgtttacataattaattagttaaaaaatattatttaattaaaatgtcataattggtaatataaagctctcacatgggacacaattgatcagtcagtctcagccaaaacatatatattatacaatccttattatgtaacatctttttcttcatcatcatttttcttcttctttttttttttggttaaataaaaacagaaaaagttattatcttttaaattgtgatgaaagagtcatctatactaaagaagaaatttgttacttttgactgaagtaatgtaattataattaccctacttgtagagcaagtctagtgcttaaaatgatttaaagaaaaaaaaataattattaataatgataattttattggaaccaattaattctctaatatgactttacaataaaatgtgttaacttcttaaatttaaataatttccttattgaattggatttatgataaatataaagttttgtacaaaagtctaagttaaacatattaagcaattagtagtgtgcttcattatgacactgaattcttattattattattgttattgtggaaatatatgatagtataagactagactaatctacttcaatagtgagataattatatcgatattgcatataaaaagaaaagaaaagtgacttccatattg

SEQ ID NO: 370408 - DNA, 509 bp, Cannabis indica
gattgggattgggagagtgaaattcttcaaacgtcgactctaatcgagggaaaaaatcggttgacctctgagacttcctcatcacaaagctcaccttagagttgttcagattgcgatcgagagagtgaaatggaagagtcgattagttttttaattttttttgaacttttttttaataagattaatagttaacggcgttagaagagatccgtttgtaaaataaaaaagatcgtccttgacgttaaaaaaaatcattaaaccaagaattaccgttagatagccacttttaatatatatatatataaagataaagatattttatagtgtatttttattattaaaatggaagactttctcatacattttttattttatttttactggtataaaaacaaatgaaaaatttatatgataaaaaattatataaaattgaaaagtttccaataaaaaatataaaaaaattctacaatgtactttcttaaaagggatgtatcgatgcacccctatct

SEQ ID NO: 370409 - DNA, 552 bp, Cannabis indica
taaactcttatgtgtttaattcattgttttagaattcatattaggatgttaatgaaacatacttggtagtaaatctagatcctggaaaaataatttccaacacctatatgttagatgataggggtgtatattagaaacttgttatctacaccaactcaaaatgttagagatggtggttactctaggggtggaggaattattctagaaggatgtaaaaacccatctataataatttaagctccatcagtgaagctaaacaactttgctgctttcgaaaagcattggaaagttattcaaactgaacaaagttcttaactggtttatctctattccattttttggatagaattagagacatatcttctgtttatccagatacacttaataagcagtaaagaattcagtatccctagaggagtaatgcatatagaaaatgatgttgcataatgttttatgatacatagaaagtaagcagttgcataccgcaaacttacagttcttgttatttgggtttagtcaagtacactacactcttgggttttatgccctaaa

SEQ ID NO: 370410 - DNA, 576 bp, Cannabis indica
ctccctctctcaaattctaaaaactcacttgaggagtgaactcttggagaactctcctcaagcattgagataaataacactccaagtggactagcctattaccgctgaaagggggtgagccactataaattcttgtgtttggttttggtgaatttctttttgcaaaccggtttactttgattaactattgcttgtgttcatcttgctcgttttacgatcttcttagatccgttgacgaaaaaccgcgtcaacacaagtaacctaaagtatttttatttaaattacttaagagatatagtactggtatcaatattgttgtaataaattaagtattacatgtaagttttattataataatttaaatgcctagtctaagtgccacaaatttttttcttacataaggatggatacaaaaattgatttaatcaaactatttccgagccaaaacaaagattgaattcagttttatttaaaggcaaaattgttatattatttataataatataatatatagattaaatatgtgtaataaactaataatatgtaacatatgactatattagttgtcatcttttt

SEQ ID NO: 370411 - DNA, 656 bp, Cannabis indica
tcaatagagaatgatcgggaatgaggattaaaatattaacggagatagagacagaagagtactccccgcaaatttctcgctccatgtgtatctcttaattgaataaaatcactaatattaggggtgtatatcagtcagtttaatcggtttaagttacattttatttaacccaatgtgaagaccaggttataaaaatttaagtgtaacccggccaattaagaaaaaaaattcaacctaccttatgaactggtcggtttggtcgggttaacccttccaactccaaaccgagcactaatgtattttttttttcacattcaattgctatattttaattaattgtaataataagacaaatataaaaattgaattcaaagttcaaatcacccgtcataaaaaatatagcagtttgaacttttaattttttataaatatgtatatagattatatataataaatatatatataaccctcttaattgagttggtcgggttagttcgagttaactaggcgggttgatattatttttaacctgcgcaatataaaaattgggtgggttatattttcgtcgagtttttcggtttgtatttttcgtcgggttatctcgatttggtttgggtggtttgttcagttttggacggtttacaaaaatttatgta

SEQ ID NO: 370412 - DNA, 525 bp, Cannabis indica
taaagcttgcttaattcacacactcatattttttctgccattattttcttatttgtttcaaatttaattatgttagagtgtattagaaattgtttatttttcagaataataatttaaaaaaattagaaatataaaaatttgtcaaaataaactaatagatttagtaatatatacaatatgatatgttatataaaaaggccaacatgtaaacaaagaatgaaaatttatttcaatatgccaaaatgtatgagtataggcatagtatagccatattaaataaacttatgagcaggacattttatgtgagcaagacattttatcatattcaaaactttgacaagtgcatatattgttatccaagtttactatgtaagtttgtaagacatgttatagtcatgtactttgcatatacaaccaaatttgatgtctcaacctgaaaaaatagactaattaatttgttattttatgggcacacatttcatttgaaacaaaaaataaattcttgtttcaatatacgaaaaatag

SEQ ID NO: 370413 - DNA, 1170 bp, Cannabis indica
gaccaatactcggcatacaatgctgtgattgggcagcctattctaaaaagagatgaagatcgtgacgtccatctatcatctcacaatgaagttccctactcccgttggagtaggctctgtgcaaggagtccagtcaaactcgctagaatgctacaacactgcggtcaaactcgcagaagagaagtcggttaatgtcatctatctgctagaagcaccacctcctcgtcgggagatcttcagaatagaggaagtgccacataaagacgagccagatttggatcttaggatcctcgtctataccgcaaccgcccaagccgcgaaagacaccattgaggtacccattgatcccattgataataataaagttttgaaaatcggttctaaactaacttttcaaaaacgagaaaaacttgtcacatttctcaaacaaaacctggatgttttcgcctggaaacattcagatatggcaagaatatctccgcaggtcatgtgtcatcgattgaacattgaccccgaagtgcgaggtttccgacagaagcgccgtaaaatggaccccgcgaggtaccaagcgatgaaggaagaggtcgaccgccttttggcatgcagcttcataagggagtcgttctacccaaactggttaggaaagcccgtactcctgcccaagcctaatggctcatggcgcacgtgcgttgatttcactgatttgaataaagcttgtcccaaagacagcttcccacttcctagaattgaccaacttgtcgatgccactgcaggtcatgagcttctcagcttcatggatgcatactgggggtacaatcaaatcttgatgtatgaaccagatcaggaacatacttcgttcattatagatcgaggtttgtattgttataaggtaatgccatttggtttgataaacgcaggtgcgacacatcagaggctagtgaatacgatgtttgcagatttgattggagataccatggaagtgtatgttgatgatattctcgtaaaaactcaacatgcagaagaccatgtcaacaattcacaagcaatgtttgaaatattgcgacgatataaaatgcggctgaatcctcttaagtgtgtcttcggagtcggttcagcgaaattcctcgggtttatggttaatcagcgaggaatagaggcaaaccccgcgaa

SEQ ID NO: 370414 - DNA, 721 bp, Cannabis indica
tgcacttcttcgggttgagtttcgttccgtatatcctaaccacttcaaagcattcttctaaatcgtccgcgtggctagtgcacgcttttgacttgactagcatgtcgtccacatatacctccatatttcgcccaagaggcctttgaacatccggttcaccattctttgataagttgcaccagcatttttcagtccgaaaggcatgactaagtagcagtatattcccttatcggtcctgaaagctagtgcactctttatctgccatgtgtcatcttaatttggttgtaaccggcgtatgcgtccatgaaggacagtagcttgaatccggaggtggcgtccaccatctggtcgatccttggcaaagggaaacaatccttggggcaggctttgtttagatttgtaaagtctatgcaaacctgccatgttccgttgggcttcggcaccagtaccggattggctaaccactctgggtagtagacatctcgaatcatgccactcgttagtagtttgtccacctctttttctaaggcttccgcctttattgagtcgaggggactttgcttctgctggaccggtggcatgtccgggttgaaattaaggacatgggtgatgacgtggggacttatgccggtcatgtcttcttggcaccacgcgaaaaatgtctgtggcgcccctcagtgtctttattatttttctttttcctccggttctaggctctttc

SEQ ID NO: 370415 - DNA, 919 bp, Cannabis indica
ttttataataatttatatttttatttttaacttttagtcattaaagtgaaaagggtaaaacatattaaatttgtatttatttataaagtatcatctactgcgttgctcatttcacaataaatttgcatagaatataataaaatgaccatattactgtaaaaattaaattcaagagatattcttaacgagctgtatattataggagatacaacttgttattgtaaaatgttcaaacaaaatactaattatttttattttttttatctaagagtactcacattagatactttagaatagagaatcactaaaatatttaaaaaatcaaattaaaattactaaatgctctaaattcattacatattttaaaatttctttaaaattcactattcatattttacatttatagaatactatttattaatctaaatatattttattaattatttgatattttaattttactttttctacgagaatatgtatgaatattatattatatatttgaaataaataaaatatattaaaatataaaaaaattagaattttgttggtatattttaaagaagttgatatatagtgtaatgtaaaactttaaggtaaaataaaaatttattgtgcacttaaaaagatggctaattaggatttttgtctcctaaactttaacatatactaaatcatgctcactgaacttttctgaccgttaaaaattctccctgaactattgagattattaaatttaagtacttttatccaatttcatttaattttactgttcatatactaaatcatgctcttcagactttgatatctatcaaattatacctctagaattttgacatatactaaattatgtcgcataaattttcatctatgttatatttttttaattaaaattaaacaaaagtctttaaatctaaca

SEQ ID NO: 370416 - DNA, 1238 bp, Cannabis indica
actaagatcgggagaggctgaactatgctagagtactaatcgaagtgcaaatggaccacacctccaaacatgatagaattcaaaaatgagcatggctttgctacttcagtgagtgttaagtatgagtggaggccggttacatgttctcaatgttctgggattggtcattcggctggggaatgtaaaaaaaactgttgctccctccaagcaacagtgggtggtcaagaatgataaccgaaagcagaaacttcctgaggttgatactgatggttttactaaaattcttacaggcccgagattggacagaaataaggaacaaaggatgcctaatgcagtaagaacggggaacacttttcaggcacttatgttagaagaacaagatgggaatactgagggaagccatggtgaatatgggtttgacaaggttagcaatggtgaagggaatattgacgacacaagagggggggggggagggaccctctctttctaatggatagattgttatgttggaatgtccgaggagccaatcatcaatctaaacaacagttaatcaagcactttattttgtctcaaaagattgattttgtgggtctcctcgagactagggtaaaggcttcaaagcttggagccttgtactctaatgttttcaatggatggtgtttttcttcaaatattgcttggcactcgggaggtaaaattgtgattgcttggaatccttacagatttactagttgatatcatcaaatgtactagtcaactaatgcatttgaggatttcaactattgaaggatttaatagcctactcacggttgtctatgcttcaaatagcaggggagagagaaaaggtctatggaaggacttgtgtgatttgtccactaatgagaattggtgtgtgatgggagatttcaatgatatcctagccaaggaagaaagggtggggcacagggtaaggtcttatcctgattctgatttccttacttgtgtgaatttttgcaagcttgaagatattaaagctagtgggaatttcttcacatggaataataagcaaccagggaatgataggatttattccaagatagacaggattatggccaatcaagcctggattgggaagtatgaatttgctgaggctgtatttcttaatgagggactatttgatcattctccagctatcctttctttacatcctcaaatagtagggggaaaaagccgttcaagtattttaggatgtggaaatc

SEQ ID NO: 370417 - DNA, 641 bp, Cannabis indica
tagattataacttatgcaaagaaatttagaaatgtttgaaaaatttgattcatggatgtccttatcatgaacttaagaaaagctagtactgttaactggaaattttcaaaatgatggaatggctatgtacttagtgtaaaccattactagattcatggatgtccttatcatgaacttaagaaaagctagtactgttaactaaggtttgcatgtttgatagctattctaagtgattaggggttgaccatcctatggccattaagataagaaagtgtttgtttttcaacaaatactacttttctaaaaaaatgactaaatctgaaaataaagtagcaaagtagaggagatattttttcttgattccaaaagtgttctatcatcttattctgcataagatgatcccactggcactgcctctattatcttgaccaaccaaagaggacaataccactaatgttcttagcagtaagtcacggtacctcgtcgtagtgggagggtttcaaggaacttaccctattatgacttggaagactctcgtgattaaaattcattgttagtttaaacaagtaatggattgtcagaataaggaactaagaaacaaagcaaagagaactatggttaaaaccattcatatggagtaa

SEQ ID NO: 370418 - DNA, 994 bp, Cannabis indica
aaaatcatagattatgtcttaaagtatcattacaacgaaaatactcttttgcgtcgttttttaggtcaacttagcaaaaagtaatgcaattgagaaacgttggtcaattgcgtcaattacaaaatgacgctgcatttttctcatttgtgtcaattttgcatctatttataaccgacgcaattgataaggcatacttgcatcagttgtaaacagatgcatatgggctgttaaaaaaattattacacaccctccctcctctcatcttgcgaacggtaaggtttatatttctcttttgatatatatatggggaatacttctcaatagatattactcattcataattactaaataaatttaactataaatattaattttaaaaccattagattttgatccaatgacgaataataaaagagaaatttaaatttttatatttaatttaactacttaattaaaaaaatatatatttctacactctataaaaaatatatatatttatatacaaagtacttaagtcaaactcaatttttttttattgttgacctcgcttctagccaacggtagtgagttaagagcgattaaataagataaataaaagaaagcaaaaacagtaaagtaaaataaacaccaaattttaaagaggttcagccccgtaagaatggtaatagcctactctccttgtatttatattgacttgagagaaggaataaagtgttcttcctctcgaaagctcttacaatggatctctgagttattttctctcttagattactattctctctcgagtgtgtttctggattaattctttcgaccccctccatagtgagattatgccactatttatagggactttgtaatgaccgctttagtaatttggattagtaaagacaattaacactaatttctgttattttattattatttatgaacttaattattgtggaccccaatatttggaaataaatattagagttataatttctcaattccggag

SEQ ID NO: 370419 - DNA, 583 bp, Cannabis indica
tttaaaaaatatttccatctactagagtcattcaacagtaagattgagcataaacaaaggtatctttcgatttgaacctttgtatagtgaatacgatctagattttactagagtgacacgtagtcttgaactctatctctaatattgtaccacacaacaaccttttataagggtgtaatcaaaagcccttgagttaatggccatgcacgtctatcctagtatagtgaacgctctagaaattttgcccgaaatttcataggaagcagccccactcccacattcacataggtgagtctatcaagagtactcccgtagcttagtaatccactccacttggagtatagatttcattaagagcttctattaactcagccttaaattgcttcaggaattcatgattctcttttcgtataattatagaatgatctcacttttatcacttcataacttgttattgttgggttttgtgccctaaataaaaacccattttaatataattagatttactaattaatataagatcagaaatctttctatgttgcatggttcacatgatttatttcatgattatgtttaatgtata

SEQ ID NO: 370420 - DNA, 489 bp, Cannabis indica
tgatttgattgtaccccgaataagtgtccatgaagcttaatatttcgtgcccaactgttgcatccacaagctgatctattcttggaagtggaaaatagtctttggggcatgctttgttgaggtctctgaaataaatacatacccgccatttcttgtttagcttggctaccgatacgggatttgcaacccaagctgggtagaaagcttcaattatgaaattatttttgcatagcttctctacctcgtcctttagggctagagctcgctctttgtccaataaaatttgcttttgttgaattggtccgaagttgggatcaatatttaggacgtgcgaaattacagaaggatcaattctgaccatatcctcatgtgaccaggcaaagatgtcaaggtttgctctcagaaattttatcaatgctgattttacttcgagcaataaaccttttctgagttttagcttcctggctaggatatctggatcgatctcga

SEQ ID NO: 370421 - DNA, 534 bp, Cannabis indica
gcacgtagagtatgcgcgatggcgcttatattgaataagatatatgtgagcaattgtaaccgggattagggttattaccctaatctaagcggttaaaagcctagggttattatcctagtgatattagtttagtaaatgctatgccatgctaagtatataattatattgagatttaagggttatgcgtttaaggcataatcgggttggactcggtaaccataaccaagatgaaccattctaaggcattattgtatttagacgtgtgagagcaacacgtaggtctatgccacgtagacataaatagacgtgtgagagtaacacgtaggtttacgtcacgtaaacataaacaggcatgtgagcccaacatgtaggtgtgtgacacacagacaaatttaaatggcattactgtttatattatatgatgagcatattattgatatattttatgctgtcttgctgggcttggctcacgagtgttctactgtgcgaaagggtaagactgttgttgattaaccatgagtgcaggagctggac

SEQ ID NO: 370422 - DNA, 709 bp, Cannabis indica
tgggaagttcatgtaattaatggactaaatttgtacaaattataaaggggtataaattttgatataggttgtattattagggtcaaaaattgaaatttccctaataaaattagtattttgtgaatattttacagtttattcaagttaatttacgaatgatttgtatattttaataagattgatgtcttgttatttttctattgatttatagtttttttcttaattattattttatagttattttataattgcttttatgttgctgtttatatgtttaataattgttttataagtttctatgttatttttatgtgttttttttttgtataattgttgtttagtttacgtgtattttatgatgtatatttttagcttattccttacataattgttttgttgtatatatgtccattgattttgttaactttaagttatttttaagtggttttcaaaatatttttttattcaacaattattttttagttgttttatttatgtgtattttttatggtgtatattgttaatttcattttcatatttttttaattttatgtgtgttgctttgtagtttagatgcatatatagtttaattaatttattttcacacattttattaaaatgcaataatattttttttgtttaaattatatattaattttaattatattatataccccattttaaaaattataagattttattatttcta

SEQ ID NO: 370423 - DNA, 619 bp, Cannabis indica
tgcaattactaattagataaataataagatttttacaaaatataggattttggacaaaaatttataattttactctcacatagaattttttacaaaaatattctcttttttatgaaacaattgtaaaacaacaaaactgaataattaaaacaacagtataacaactaaaaaataaccgaacaataatgaaaacttaacacattacacagtaaaaaatttatacattatttttgaaaaaaattctgtcccacaataaaaaagtaaaaaaattgaaaacttcagtatgtggtgtaaaaacccctaaataatttaagaagagaatataaaaatagcacaatagaaaatattatttataccttatgaattttaagcccttagaagttagtccagcagtaaaagtttcagtaatattttcaaattgactagccatcaaatctcccaaattaccaatatattggttgtgatcatatccaaaaattgttatatttgcattctgcatttcaataacatttctatatattaaaatatattttatatcataattttttaatttttattttcttttaaatataaagaaaaagttaatattacttacgcaattccaacatcgaatattgcc

SEQ ID NO: 370424 - DNA, 502 bp, Cannabis indica
gtaaaattgattaatttgatctaaaagtttttgaaaataataaaattgagtgagaaagagatagagaagaaaaattaataaaataatatgtatatattgttttgttcaaagtttagtcgatagcattatcaacaaaaagaaaagataaaaatagaatgataagctaacaaagataagagtagacaaataattattttcattactttcggtagaagcatacatattagtacatattaaaattgtggtcgttattttcataattagttttaatattacgtatattactgaaaattttcatttatttaatggttaaattcctctcctttgggccttatgtgagagttaggggccaatagcagtgggtacgacatactgaacccagccctcctcacatgaatcaccccaattgtgaaaatccatttgcctcatttaaataattatattaggttaattacattagtctaacctaatttaaaattgagttagcaacataattaacttt

SEQ ID NO: 370425 - DNA, 533 bp, Cannabis indica
ctaatccaaattactaaagcggtcattacattatcccctatataagagtccttactaaattaccattgaaaactaattttaaatatcaacacatatcattttggactttgtgttttgcaaaagttacaggtaaaaaccttttttttgttaaatgataaattggatcttgcattcttcaaaatagtaaacaagagtagcccgaactaaatttttgtcaaaataaaacttaataataatctgatctagaggtgttacaacaagactgattatattttctgcactaattcatggtagaaatgatcttcaagctagttatattaagaaaaaattgtcaaaactgaactcagtgtactattttgtataattttggaaaaacaggatccaatttgtcattcaataagatagagagattgattgataacttacataaaaatagaatccaaaatggtattaaccctatatttatatataggaaagttttatttgcaccccatatagttttaagtacaccctattttaataatttttatttt

SEQ ID NO: 370426 - DNA, 606 bp, Cannabis indica
ggttttggtcctagtctgagtcccagatctagacaccgcctactggtctgttccaggtcccggtactcgaatctcgagtgaatatctggatcactgtcacaggcctcggtatggttctggtgtaggtccaaggttcgatttctgagtttgggttcaggacagagactgtgttgcggttctaggtcctgaccctggttctgtgtcgctagtctggttccatgtttgggtctcagtttaagttcgggttcgggtcccgagtccatgtttgggttgggatctgggtccgtctcccaattcgggtctaggtctgatttggagtctgggtcctggtcttgttacggtgttggatctagttgtaatttcagttatgattcaaagtccaagtcctatttccagtcctggtcaacttcccattttggttccaattttgggtcatagggtacgggttcaagttcgcctcttggttaggtactaggtcccggtcctagttctgtttcctagttccctgtactgattatggttccagcatccgattattgagtgggtttgggtcacggtgtaggttagagttcgagtccaagtctcggttcgggtttagttctctgt

SEQ ID NO: 370427 - DNA, 554 bp, Cannabis indica
aaaaaaagtcataatgaattgtctacaataatatgaaataggaaataaaatttccatactaataattgaaactaaattatttaataactaaaacaattaattcaaaaatttaaagaagaaaagaacgagcttcatctttaacttggacaatcccacccttctgtccaatcatccattttaactcgttaggatagcaatccaagtttaagcagctggaggtaaaataagaagaaaataaacatggttagtagatctagaattaataactcaagggaataataattctctaaaacacatgaatttgtaacaaagttagaaataccttatttttttcctttgcctttggattagcagccttcttacccttattagctgtgttaatagctttaagaggcttcttgctattttttcaatttttcttctttgcgggtttcaaagtagaggcaatgttggctttgcctatgcactagaaatgacataacacttatccaatgtgtaagtaaactttatcgctaactatcacatcagtgtaaatctagtgcactgatgaatca

SEQ ID NO: 370428 - DNA, 832 bp, Cannabis indica
atacaccttaccaatgcactctgtaccgcaactgtacacgtgttggtagtgtaggaatcacaacagataagcatgcatatacactaaacataaacatacattcgcatatccatatcacacattatatacagttcttaccttctttccacattcaagtgtgctggtcgacctgaacggaaagtcacgtgctggatggatgccctaatcacatactagaactgggtaaatcacatgctcgaaaaccctaatctgggaaatccaaacctacaactttaggttctgttatactctctatgaatcacactaactagggaaatagggaaacacccaactatggcactgaaatggacgagaattgagaaaactaattttttggggaacctagccaaaaccgatttaccgattttacaggtattggtaaaactgataaaccggtttttataccagtctccccaaaaactcaccaattcgctcaaaacttgtccaattgctaccaaactttccagagtacctaaacaatgcatatacaacatattccaaccagaaaatcacagaaaaccccaatgaaactcaacttgccattagagaccaaaactttgagttcaaaactcaaatttgcattaatccaaccccatacactaaaaccatctccaagaaacttaaaccaactcaaatgaaccttataatttgaatcctaaacacttctaaccctaacagccatcaattctcaaaatcatatactcaaaccaagaaaaacttaaaaattaaagaagggttctactagggcttacctgttgggttttatgccctaaataaaactcatttcaatata

SEQ ID NO: 370429 - DNA, 457 bp, Cannabis indica
ttttgaaaattaagcgtattcattcttttaaataagctgagttagaccttgcggtcattacatagaaggtcctccagaactgacgaggctggaatagaaccatacaacttgtaaataaaagcccagttagccacattatgggccgcaaaattacaagttctactaacatacacgaaattacagcaaataaaagagggagatgacttagaacaaaaggagacatagttttcaagcgctcaatgtgactccgtcccattaagagtattgataactattctcgagtcactctccaccaaaacatacttatatcctaactcttgagccaacgaaacagctaaacaacaggccgctgcttctccatataacacatctgagaagtccaaccgagccgtatgaatccgaaccactctacccagatggctccttgctaccaccgctatgcacatgctttttaagc

SEQ ID NO: 370430 - DNA, 498 bp, Cannabis indica
tccaggagaggaacattggaaagcaaaaatcaagtaaatcttaagatataaaagaggaactatatgttagttgataagggtgtgtttaaaactaattagcctaattattattgtgagtaattgattggtttggtgaggcgtgggtggagtgaggtgagctggtgaggtaagtaggtgagagagaggagtgattgattctaataaaataacataatatatataaataaagtaacaatgtaaaaagtaaaagattcctgacacgtaaaattatttatatatgtataaatgaaaaaacgtttaatatatattatataatatacattaaagatataatatatattaaaggtaagtaaatgttagattactggtcggttacggttataatcgccagcttattggccaaaccgtaaccgaccgccagttacagcggtgtggtcggtttttttttaaacggtttcggttatgacgtggcgccattttcttggttttttaacagtc

SEQ ID NO: 370431 - DNA, 690 bp, Cannabis indica
aatcaataattattaccatatatgtattataaaaaattgaattttttttagttatatataaaaatgtatgagaaaataataataagcttttttgcacatattttgtaattaattaaaataatgtatacaaaattgtaaaatgccctaaaaaattattaataatggttatcttattattttttagccactaagaaatctctatttttaggacactagatcgaatctcaaataattctaattatctcgatacttacaatatcaatttatcataatattctcatcaaaatcacttatttaaccttgttatggcattttggcccccgatccaatctccaaggttgtcaaatctgaaaaatatttttattatacaaattgctcatattatattcatacatactatataaatatttataattaataaattatgcttatttatccacttataacagatttaaattttatgctgaaatagattagtaggatcataatcccacttattaccttattattagcccataatatatatatatataaatcctaattatttttcattaggcttatcgggatattacaatcattccctccttatggaaatttcgtcctcaaaatttacgtgaataactcgggatacagctccagctcccgcatttgcgactctaattgtaacgccctaatgctaaggcacgctac

SEQ ID NO: 370432 - DNA, 628 bp, Cannabis indica
tttgtgcacaatgaatgtcacatatgtgtgtcttcttttttttgtttggagctatgtggctctattactatatgctactatgtgttaacttgtctggcatgtaccacactatgtgtaagtagtttttttttatagttaaccatgtaccacatataggtcgctctagacattgagcaacgcacaaacactttagagtttttcttttcgaacttgtaaaatctatttaagtgagtgtgttttatgcttactagtccatgtatgagcgtggttgccccccaaatgactaagtaggttcacctcttgatcacttgttaagtaatcagggctttcacataggaactgttattgtcaccggtttgccaatataatttcatacactcttgacctcagttaggcttgcaatttgattcaatcacaatcatacaagctgcgtcattatatgaaaaataactttcaattttttcttgatgaataaattgggcaaaaatgtcttattacatcaaaagtgagcagtttgtgcctttacattatcaaactttgctggtaggtatgacgaccagctatggaattgcgggtacaccaaccagcctaagacattgctgaaaagcaacttatattggtagtactt

SEQ ID NO: 370433 - DNA, 546 bp, Cannabis indica
aaaaaaaaaaaaaccaatatatgtcttttttttagttgttttagcgtcactttatgcgtgagtgggaaagtcttcccacacgcgcattgggtgacgctatagataattaattttatttttaataaaaaataaataaatttaaaatttcagaatagttttagtgacacgcattgtgtgttagcaatattaaaattttaaagtcatttaatgcgcatcacaaaaaattctctaaaatatttagtaacacgcaccttttgtgcgtgtcactgtagtgtcactaaaaatcaattttgtagtagtgatatttatattttcagaatacaatacagttacactttcacaagtttttaataacaattttctatcaatggttcaaactgtatcttaaagtatggaatatgagtttagtattctgtgaccaggatccacttggactattctaaacactctttattgtaactaaacctaagtcatcaaaagacacaaccacattttagtatctatggcatttgtatcttgttcatagtggttttgacaagatcattc

SEQ ID NO: 370434 - DNA, 473 bp, Cannabis indica
atttatatggtatttttttttatttttaagtctttttatggtatttgatatgccatacatatgtaattaggtttttaaatcacatatttaatgtttttatatgtttagaaagttttatttgtcattgatgccggaaaagttaccggagtttgctgccggtgtcagattagtcgccggagtagtagtcggtgccgggaaagtcgtcggagttactgtcggcaccaaaaaattcgtcagaattggcattgtcatcggaaaaatcactgaaaaaatcaccaagaaactagtttctaagaaaccggtattagtttcttggtgatttttctgttgacaatgtcaattctgacgacttttctgatgctagcagctaccccgacgacttttccgacaccgacagcaaacttcggaaaatttattagaattggcatagtcgcctgaaaaattaccaagaaactggtttctggtttcttgat

SEQ ID NO: 370435 - DNA, 470 bp, Cannabis indica
tgtttggggggtatttatggtgtttttctggggggattcctagaactgaatcacttgtctttctgtgcaggtttagtaagggcacatattcccagcagatacaaaataggaaatacatgacctataccgtaggcatcttaggggttaggtggatgtaatcctttatcccttcttgaccaatgtgatccctcatagagtattcgtcactagccttattaatcacagcgtaatagctgcaaaagaggggttacgtcgtcagacatattgcttatggcaattccaatacgttttctcccatgcgacattaaatgagaggtgactgttcaaatagggtccagtacctcccggagatgccttagcattcccctagtctccgggactatgtggagccttcacatcttctccgggaggtatcttctcgctgacgctcctgttgcaaaaagcttagtcgatttatctaagagttgagc

SEQ ID NO: 370436 - DNA, 838 bp, Cannabis indica
aattgacttaaacaaatttagactccctctagtgatttgccgcaaccctttgtaatccaccttgctaatctgatctctgaaacacaccaagtagtgaactcccttcagctattgatgtgtgcttacttcctcccgaagtaaggcttaaacaaatcttctcccgaagatatatgctcacttcctcctgaaatgagacttggaaaagtcttctcccgaagacccacgcttgttcaaagcttctcttcaacctattctatgaatagtatgagatcataataagaaaaccaaaacctagttgaacactctaggtttttacaaatgaaacactcttctcacaaagaaagatatgaaaatatgagactagaagagataaatttgtttggctgctctctaggtcctatttatagaacatagcaaccctagagacagccacataaacgatttcccagctgtacaaaactttcttaaaaaaattcctgatttgcagcatcagaatcaagtttcacagtggcaaataaggaccagaaaggaaactttccaaattgaatcaagatcacgaatttggacttcaaacctgtcaaataaaaataatatgatttgttctaataaaggaaaaaatcgaaatcatccattagaaaaagggaaagtcaagtttcccaaaattagacaagtttccatacgagaatttctcctcttacaagaagtttctaaacaaagaaaagtccagctgaaaaatgattatttcctaaggtagaaaagagcaataaaatgcacaaaatcaatgtaataaaaagaatttaaatgctcaataaaatgcacattaattaaaaaatatttt

SEQ ID NO: 370437 - DNA, 882 bp, Cannabis indica
ccttaaaagttcttttttttagtggtaatgatacacaatatatgtgataattggtctaatatttttataaataaattaagtaaaaatttaaaatatgtgtaaaaactacaaaattaatgtttcagtgtatgtgtaaaatatacagaataatttacagtataaatatgtaagtttaattttcggttgcaaatatataccaataaaaaagggcatgtggacaattgcttgatacttaacggtcagttatctacgtaagttacagaaatataacttaagtattattactgtcaaaaattaaacttaaatatttatctacaactaataagggtgttcgtccaatctaatccgcactattttgcgcgctcattgtgcatccgattcgcaataagtgcgaatttttttttttggatccaatccaatccgcacactcaaatctcatgcaatctaatctgcataagtgcggattggatccgtcaatttgaatcaattattttttcatattaaattatttaatatttatgaaaaaaatatttattttcacataattagcaacaaaataaaacaaattataattatgtctccaacaacacattaaataaataaaataacaaatttaaaggaagaaaaaaaaattgtatgtatatagaaatgtctacttttattttaaattgtatgtagaaaaaaattatatataagaatagaatatatgtttgatctattatgttttgaaatataatagtattatatgtattagagttttaaattactattttctttacattaaaatattatttgttatataaaattttaatttaaaaaatgtgtggattgaattagatcactacttttaacatgttaatcaacatccaatccacacaagta

SEQ ID NO: 370438 - DNA, 619 bp, Cannabis indica
gcgtacctaattatttagggcgtcatagttatgctgattatattggatgattctcgccaagtatatgttatccttctttactgtctttgtagaaaaatgctaagtatagagatacaatgcttctcgcggttctcttttgccatttcggaaggtacaacattagcgaggcggttacttcaacgcataaagagcgagatggataaatattgttattctttgaacatactcataagtatgtagatcaattagctataagctctttacttatgagtatgtgggtcaatgagttgcaagctcttattcacgagtatgtgggtcaatgagctgcaagctctttgtttactcgtcttgaacaactttcattattgttgactgaggttttcggcaaccaatgaaacattataggattaaagagctgtaagaaaattagagaaggatttttacgtggttggggcgttaatgagccttagtccacgagtcaatcttatttatggatgtatttaatacagagaatgtatttggtgagtgtttcactcttataaatacagagaatgttcttggtgagtatttactcttcttgctcttatgcaacccaagattctcgaccccatttaatgag

SEQ ID NO: 370439 - DNA, 540 bp, Cannabis indica
aaatataaaaaataaaattttagtaacttatgaagttgtttgtttaaacattgtttacttattggttaattaaatattaatggttagctaaagattaagaaactaaaatattacttttgattttggtcatctttttcactgatggtaaaaaaatatatgcttctcacatattaaaatgatcattgttgcccctgattttgtccaaaatacgtggaccaaccggattgagacacgtggactaaagaggcaagactttgggataattctacaaagtttctttaatcaaagggatcagcatttaacatgcctcccggagaaggcatgtatgtttcacatactcccggagagcaaggctacaacgaagcacctccgggaggtatcaaatcctatctaaacagacacctcgcatttaatgccgcatgggagaaggcgtattgaaactccaaaaagaataaagtttgacggcgtaaccccccttctgtagctactacgctatgattaatgagcctagtgacggctactttatgagaaaccacatca

SEQ ID NO: 370440 - DNA, 768 bp, Cannabis indica
ttctaaggcaccttatagaatggctcattagaacttaaagaattgaaattcaacttcagggattgcttgacctagggtttacacggcctagtgtgtcaccctagggagctcctatactatttgttaagaagaaagacagatccttacgcatgtgtattgactaccaggaattaaataaactaactatcaagaataagtatcctttacctaagatcaatgatcttttcgatcaacttcaaaggaagacggtcttcttaaagattgatctccgatcgggctatcattagttgagagtccgagaggaggacattccaaagacggctttctacactaggtatgggcactatgaatttctggttatgtcttttggactaaccaacgctcctgtagcttttatggatccgatgaatagagttttcaaggatttcctcgatatctgtgttatagtttttaccaatgacatccttgtgtactatcaatcagaagaggagcatgaaaaacatcttcggatggttctacagcggttacgagaacacaagctatattccaaactcaagaagtgtgagttttggctatctcaggtgtcttttcttggacacattgtcagtaaagatgggaccaaggttgatccagggaagattgaatccattgggattagtcgagactgaaaacggttacagaagttagaagttacctgggtctggttggttattattgtcggtttgtagagggattctctaagatttcaatacctttaaccgaaatcac

SEQ ID NO: 370441 - DNA, 543 bp, Cannabis indica
tttttttaggggggttgaatgcccgcctcgcctacatgtgggtccacccatgaccgcggggatgggtaactgcaaggacccacccctaatgggggtgggaattccctgtcttggtagttaatgtgacgatggtgtgggacaatttcaatacccaaactggggatgggacgagaatggagataatactatccgcaccatatccaaccctgatatatatagtttcatttttattcttaacgtatatatagtatatatatcattatataatttcatttttattcttaacgtatatatatagtatatatttatcattgataatcaaaattttatatcatatgcttaaagtggtgattattgtggattacaagtgtgaaaatattttcttctcgtttcttagttttatctttgtttactttttaatttgttgggagaattgagaggtatgagactatgatattatgcttgggttatgattttttttttcttttcaaactttgagacaaatttatttttatcttttattaggttatgctgttttttttt

SEQ ID NO: 370442 - DNA, 549 bp, Cannabis indica
aacagtttctactatttgattccacttatttccgtcatgttcgtcggccaccttggccagctccacctcgccggagctactcttgctaactcatgggccaccgtctccggtattcctaaacaacataccatatagaaaaattcataagaagaaaacgacattatacaaatcaatttctaaacagtataccatatagaaataatactcagtaaacgaaactccagatctcaattacataatcaaaacttatctatatattactcttgaataaagaagaaaagagggttgtgactctcgaataattagaatcaaatatcagtttaaatattaatgagatttgttttatttttattttattattttattatatataaataatattttattattctattaaatataaaaaaaaagtcacccataaatttctcatatataagcacactttatatagaatatattaataatatttattttatttttattttattattctattatatataaataatattatattattttattggatataaataaaaagtcacccat

SEQ ID NO: 370443 - DNA, 629 bp, Cannabis indica
tagctcacttttcatcagaagattttgtttccctaattcaattatatgattacctccattagctactcatgtcccatattccacttgggaatatcaaaaagtttaactcttattgccatttctctaatctgtctatcctctcacatgaactaccactaaataacatacatgcacagtccattcagatcttttgatatcccctcattgagtgtacaatgtttaatatcgatatcaattgaaaaagcaactataatattgcccataaaattctaacctgagtctgccgaaggaccaatatctgagtccccttgaatcataattggcacttgggcaggacccgtacacttttcttctttaacatcaatccttcttaactgtaggcaggttcttttcaaatgacccactacccccacaataacatgatttggctctacattagcccaaatcacgctttttacatcttggacactcaggataaggtcaccatctcttattctgtaacaccctaactagcatagacgtgttaacgtgattttaaacacactgtgcaactcattgcaaatcaacgaggctattgaaaatcgtgattaattaaaattttcttatttaattaaaaacttaaagtatta

SEQ ID NO: 370444 - DNA, 367 bp, Cannabis indica
tgatcaaaatattaatttttaacgctaaataaaacgaaatatagtaaaaaagatataattatataactgttatattttaaaaatttctttcaacaaaccgtatattttaagtcgaaaccattaataaactgattaggagttgcatcatcattatctcttcctctctaagagcaagtgcaaggaggcactaaactttggatttggtgtgtgtaatccctccaacgtagcagcaaacggtacatcatatatgccgtgtggctacagtgcacgacatatatgctgtggcactgtagctacgactattttctttttttttttttttctttttttcattttgtaatattattattattatttaatttatatt

SEQ ID NO: 370445 - DNA, 580 bp, Cannabis indica
tcccacaactcgccccctgcggtcaatggaacaatagaaatccccacctggagggttgtaagttgcatgttgtcattcgaatttctaaccctgaccgcagccatgctaaaaccagttaggtatgccttaagtgtctcaccaagctgccgctttatattgattagcaaggccacttcaggtcgcctatccctagcagcttgaaattgcttttagaaatccttagatagctgctcctaggaaattattgaatgatgagtaaacttgttaaaccagctactcgttgatccaacaagcgaggtggggaaccaaataaaacataaattgttcgtcacattactagctcgcattactgtgttaaagttattcaaatgcaagaccgaatttttgggtgatacagctcaatctccttgttagagtcgtatccagatagtttccctaattcccccaactgatatgtcctgaacttgtcctctagctcatttatctataattggattggatcctcttgctttggaccaagctgttggcgaaggtcaggtttcttccgattcaagtagctctcgcagatccgattaggagt

SEQ ID NO: 370446 - DNA, 527 bp, Cannabis indica
tagtacgggaagaggaaaaactcagcataccgtgtactatgtacagcaagcggatgagtagggggggagacgcgataccctgtgatcaagaaactaattttttgcctcctaatggcctcgagaaagctgagaccttacttccaagctcacccgattaaagtactaaccaatcacccgcttcgacaagtcctacaaaagccagagacgtttgggagacttctcaaatgggccatggagctaagccaatttgatctgcactacgttcctcgcacttccataaaagggcaggcgctggcagacttcatcacggagtgccatgaagcagaggctaacgctaacatacccacaccgcaagtcccaacgtggaaagtgtttgtcgatggaacatccaacgagaatggatccggagtaggggttgcgtaatgatatctccgagcggactccgactccaggcagccctacggtttgaatactcagcttccaacaacgaggttgagtacgaagccctgatagcaggactgagatta

SEQ ID NO: 370447 - DNA, 520 bp, Cannabis indica
tacctcttggctcacgagtggaattcgtaaccgaggattggacggctgatcattggttgcctgggaggcattcatcgtcgggtcatcctctgtttctcccaggggaatgacgttcggtgtgtgctgacctacagtctggtaggctcttcgtattgcacaacagcttgctgactacgatcttcgatctccgcatggtgagcccttaatgcttccatctctttgtctctccattcaacgaacatatgcctctgttcgtcaaacgcaagatttattgcgacacgcagttcttcctgatcatgatgcagagtgttgtcatgaatctacatgagtcctagcgtcggcacagagattttgtatttcggtagcgtctccgatggtcgtttgggcattggttccaggcggaacagtcgtgttatgaatgccctggctgtatgcggaactgttatccccagtatctctaaatatataaattttagataataatatagtcttagcttagctgcgtatcgactttctatct

SEQ ID NO: 370448 - DNA, 1065 bp, Cannabis indica
ctggggcctgactgctggattttttttcaattttttcagaaccaaaatgctactccgcatccggttctaagtcttctaagagacggggaagtacgtctggccaccctagaggaggtcatgcacgggccctgtggcccaggaagggtacaagtctcgtgccaacgggtgggaggcggctgagctccactctaccttgacctgcgctcaccagctggagaagattgtggtggtggcaggcatcaagccttcgacctccaggacctatcactggctgcctagggacaaggagacacccaacacatacggggttttggagcttggagccaaacccacctgatgtccggagccatgcttcccctccggactattttataaatttccttgtatttgttggccttacgccgtaccaactcattccccaagcccacccgcctgctttcaggcctttttattttttttgctgcccggagctggggctcgcctagtagtctagcagaaattttgtatttttatgaactagtttccatccccaagaagggggacaaatttaaggacggtttttatggccttcgggcgcatcctttgaatgagggcctagtccttttcaaccattagaagcacgtgaaggagtatcgtgaccgcttcttcttctcttctggtttctaggccatggatcgcccagagcttctcacggaatgggttaggatccctccctatatgaggaccgcgcctacccaaattttccttcaacgggccaagaccttctccacgtatgataagaaggccctcgatgtcgagaagttggtcacgaccgagaactgtcggaaggctaaactaatatcggagaaccaatcggtggttgacttcaacctgtccaaagtttatctgcgcgaatgcgatgactccgacagcagaaagggcactctgggtagacatcattgccacggcggaggacaagtaccagaagtacctcttcaagagggaacaagagctggcctatatcaaggcccaggcggccgctgggaggactcttcgcctggaagctccaccagagcagaggacccg

SEQ ID NO: 370449 - DNA, 638 bp, Cannabis indica
gctataacgtacatagaatatagaaaaaaatttaagacttaaaaaagtttttttggaatgccgaaacaagttaagagtgtatctatacatctcttttaaagaagtacattgtagaatcacccctaactattttgtttgactaatatattattatattgtcatgtatgtattatctgttcttacttatgattatttattgattattttcattaatattctgagaaagaatttaaacaaccatgtctcacaggatcgttataataattgaaaaacaaaatttcttctctaggtatatactatgaatggaggcaaaatgcatattttttttttttttgtttctttcatgcttgatagaagagttgatgctttcaaatgttatttttctcctattttttaatattgtaaccaaaacattaaagaaaaaatttatgtagaaaataatcctaaaccgtactaagcataataacattcaaaaaaaaaaaaaaaaaaggaaaatttgacattttattcttaaaaaacacacatggtgttattttataccaccctcacaaaagtttgttaactatgctaatcttttaatcttaaccccaaaatgcccctctctcctccaatccaaaaattcagcctcctctctctca

SEQ ID NO: 370450 - DNA, 900 bp, Cannabis indica
tatatagaaaacttttatcattacttgcaagtaacatattatatatataaaacaagtattactctcactaaccttttagtatataattaattacataatgctcttttcaaacgtaaaggaaaaaatgacataatagaaataccatttgtgagatgtttattttaatctataggtagacttcttaatcttgcatatgttcaccactattatatgaaaatatttataatagtctgtataccttctcctctagtttactgtttggaattgattaataaattgaaacaagtaataaataccaaggttactataatagaatcttttataaagacaagtatgtaaatctcttttgttgttgatttttagttcaaaatgaacttcttagcaatgaatattgttttatatctttatgtttctctatgttgcctaatgagtctttatcggtaaaaaatctataattaatgttctccacccattatgcaactttactaaatttcattgctctttaagatattcatttatttattcatgacatattgtaccacaatttaattctttgcattctacagttttaatttgtgtctcaaaattaatattatagttgaactcttattgtacataataaaatcactagaaaatattgatcttattattctaataagtcatttcaaggatggaccaataaaatctttaaagagtaaattatttagaaattgtaagcaattctaaataacatgacttattagaactttatcattgacttgtgaattataatgattagttaaggattcaataaccattaaacttaaaagtttttctgaatcataattaatctaatacttgagatgagagtttgagaaaataaatgatctttctagaactaggttcctagatcgatcgctc

SEQ ID NO: 370451 - DNA, 442 bp, Cannabis indica
tttcaaacatcctaaatcaaccaacgtaaccacctagttgatggttgtgacgccggatgattttagacaagtgtcccccatccttctgacaatgaagccggtcaagatggctttcaaacacctaaatcaactaacgtgaacgcgcattgaaatcccatcagagggttgtgaaacggatgatttcaaatgagtgtgagcaatacatcactccgacagtgaagtctgttcggacagctttcaaacatcctcaatcaaccaacgtaaccacccagttgatagttgtgacgccgcttgattttagacgagtgtcccccatccttctgacaatgaagtcggtcaagatggctttcaaacaacctcaatcacccaacgtgaacgcccgccaaaatcccatcggagggtggtgacgccggatgatttcaaatgagtgtcagcaatacat

SEQ ID NO: 370452 - DNA, 505 bp, Cannabis indica
ttttattttaataaaaaatcaatttagagtcttatttttacaattttagaaaatacagagtatattttgtcactaacaaaatgaaggtccaattagtaatttttgcagaactcaggttccaaaatactatttatctcattttaatttataactagtagccattcaataattctgactgaagaaacgagtgtctaattatgattcatttatctcacaatttttttttatttatatatatgaaaaattattcaatagtgatttatatctaatctctactccaatgtaaaagtatatttaaagaaaaaataattgttttatttaaaaatataaaaataagaattaagatgacttattattgtaggtaattattattttttttttgaaaaaaataaaaaacaggaatcaaaattagtttattagaataattatttaattttttcaaaatttttataatgacccaaatttttgaagtattactaatagacaatactgttgggttttatgc

SEQ ID NO: 370453 - DNA, 623 bp, Cannabis indica
ttttgggtacaatacatataaaaagaggtatgtttcaattaaatatagaattagagctaaatttgattaattgattaataaaagtagtatttttcaacttaccccaacttaaatttgtacttaatttaatatcttagttgcataagaaaatgttacctattttataggaaccaaatacctatattataataactaattacctcataatttactcttatgtatcttattgttacataactaataaatcgattttataacataaagaataaaaataaataacacaaaataactcaaaccaactataattgatatataactggttctgtaacataatgaataaaagcaaataacacaaaataactcaaactagttataattaaaatagaaccggttcaataacaagtgttataatgaatgaaaacaaataacacaaaataattaactcaaaccggttataactaaagtagaacatgttatataacataattaatgagtatttttgtaaaaaaaagggaataagggaaataatttggtgggttagagcatgttgaatggatgtttttgtttgagttattttatttaactaatttttgtgtgtgagtttttatcttagttgctttacg

SEQ ID NO: 370454 - DNA, 1127 bp, Cannabis indica
gatatccaccaaattgtgcccctggatttgatatataccaaatcgcgacccttgaattttcatctacgccaggcttccatttgtaaaattggacaatttttttttaaaaccaatgatttcaatagttcaagtagaatttttaacagcttgaaaagttcaagggtcatgattcggtacatgttaaagttgagttgcaaaaaattccaaaaaagaaatactctattatagtacaaaaaattacatgaaatatgagatttgatactaaagttacaaaaataatggcatatataagtttaatcactctcctatggcatttttctacatttatgattttttattggtatttgtatatgccatattttataaaatctaatatccaaaactcatatttctatgttttttgttttcttagtcctttttagttttatttttactattaattatttttaggtattttttattttcttcttatcttttctttatagtcacaccctgggatcgataaaccttttggatcttattaaccaagagatacgactttgcactatagttagctcagcaccatcagaccccagatccagattctgttagaaggtcgttccaaccctcaactctcttttctaggttcattgatattgaatcaatcgaacgaacttctaacacttgttccacttttggaagaccctgcgttatatcaccagatctcgatttttcatatataaatgtaactaatgtatctccttcggaaagtttttctccataatggccatgaacagttgctcctggagtggctaaatagggcttcgccaatcttattactacagagtcgatttgaacaattataacttgacccgattttaggtgcggtccatgtttgactatacatacattttcacaaaaaaaccgcccaaggctaattattggggattttttttgataataattattatcataattattatgaaaaaaatgccaattcaagttgaatggattcaaacgagtgttactgcatggatcggaattataaactatcccgttttcgtccattaaataatattgaagtacttgaaaaggctgtgtgaaattgtcaagttgcaaatatttagttaccgagatctgattatgag

SEQ ID NO: 370455 - DNA, 569 bp, Cannabis indica
aatatataataacaaatcttatactctttattaggagtggcaactgtgtatataataattatttgctttgtcggcctagctatatatcattgaatatgaaattaatactctctaattttaagtatagccgcaaaatgggttagacataataataatgttgaatttgccttaaatggtttggatcattctttattgggtcgccacacggctaacatatatattataaaaagtagaaattagaacgagtttagtttttttatgacataaataaataatgttaagagattatgaggttttttttttttctttttttttattatatatatttctatatttatatggcttttttatgtcatatatttttgtagagaaagatagaaattctatttgtaaacaataataaattttgctggaaataaaaattgtcagaaaagtcaccaacaccggaaaagttaccggtgctggaaaaatcaccgaaaaagttaatctcactgaaaagtcaccgagaaagtcatcgtcaccggaaaaagtcacaagaagtagatctctcaaatataaataaaaataga

SEQ ID NO: 370456 - DNA, 563 bp, Cannabis indica
agttaggaaacacaagcttgtgaattgctttttacctaaatgacacaatctgatccaagatataggaagccaaattgatggattcttttgaggtgatacgatagagaaaagaggccacatcttgagacaccacagttttattggaattgggaacccaattactaagtttaaacctcatgagtgatgcatgagcaaaagtgagatgtgtaatacgaagactctgtccaaatttccactcaacccgtacactagtgagtttagttagcatcagaaggcgatccatggacattatagcatttgtcacatcttctggcagttgcaaagctttggaaatgtctttttcagcaaaggaaaaccaatgtcctctaacatacacttttcgaaaaaaattcaaaatcctcatcaagaaaatcatcagagaagttagcataaaattctttgacaattccatcaatatatccttcaaaaccagtaagagtaatttcccaatgatgatattgaacaaactcaacaataccatacacacaacgagcatgcaaatcataattcctctcactttcaaa

SEQ ID NO: 370457 - DNA, 568 bp, Cannabis indica
aacataaacaactgctaatttccaaattaactaagcgggctttacatattaattctgtttttttttgtggccttagttctgtttgttagtcattaacctgtcaagggggagaatgttagtgtcgttattttgtgacagtttttgttctgttcaatgtctagtcgtatctgggtttttagtctgttatatctgcactagcttcctgttacgtgagtttcagtgaagtattagttagtgcttggtggacttattttgtggatatataaatagtcggtttctgttagtaatttctttatccattaaatcgtttagacagttatttcggttgtatgtggagatagagtcgtatcttgtttcttgttgttgtgattacaggtcagatcgtggagcttgaggatgttcaacaatggcgtaatgatttgaatctggaattgctgagttcaaactgaagggagttcagtgtcatcatcatcatcagatctaaagggatttcaggttgaatacatgttgaagaagagctcagttgctgcacaagggattatgcattaacaatcagtgttcttgattg

SEQ ID NO: 370458 - DNA, 753 bp, Cannabis indica
tatatattgtaatggttaatggaggagtattgcatatatattgtcatcgaaaaaggaggaattcaagtgaattaactatatatttaaagttgatttccggtctccctgaatgtgcaaaatcacgtgatctgcaacattgagtagtgtatgtagttctccattaatcttctttctagtttagtgagcttggtttattaccccgaaattggatcagaccatcttttaagaaaaaagaaaaataaaacaacgaaaagctgaattacatgactcaactgcatttacatgactcaactttactgcagtagagggagatttgagaatctattatctttactgcatttacatgactcaacctttccataactcctttcaaattttatctttcacttggtaaagttgcttctttctttccaaacaaatttatttgatttttttttctcttaaatctttttgttcaactcattagcgtatttatttttggaatcaaaccttatatggctccatagtagacttagtttgattgtcttggggaatattttaatctttaaagatacccgttcgatgtcaaattcattattatttattttgagggcactatttctaaatctagacaacatttgtcaggctcattcaaagacaagggcaatggactttcaagttttggagagaactgaaattgatgttgctgtagttatgtggttaaggatagagacaaaacattcaattgttgaaggagattaaagtatagatgat

SEQ ID NO: 370459 - DNA, 601 bp, Cannabis indica
gagaacccacttgttcagcgagaggcaaacacgtggaatttgtacgtggatggagcatccaatgaacatggctcgagtgcaagggtgatattaattttgccagaaggctttaagtttcactgtgccttgagatttcaattcaacacttcaaataatgaggctgagtatgaagccttgatcgctggtttgaagataactaaagtgttaaaggtcaaaaatcttacataccatagtgattcgcaattaattgtaaatcaagtcttaggggaataccatgctgagggcttaaaaatggcaaagtacccagagaaggttcggaagaacttggaaaagtttgattatttcaaaattgagaaaattccaaaagaacaaaactctaatgctgatgccttagcaaaattggcctcgcaggatgaacttgatgaattgaacttggtaccagtggaagtgttaaacgagccaagtaaatgtgagaaggaagaaattgagatgataaatagcttgcctacctggatgacacccatagtcaacaatctcctcaacgggcaacttccaactgacaaaaacgaggcacaaacactcttgtattcagtgcctcact

SEQ ID NO: 370460 - DNA, 1136 bp, Cannabis indica
gttatgtcttcgagatgatccgaaatctttatcttggtcatttgtttcatatcgccctgatcgtgtggctagacaatttgggtttgatcaacatgttcctcatgatcggaagataggggatttagaaaaagcaaaacagtcatgtttgttgggttccttccaactctcaaagcgatctcacgacacattttgactacccggtaaagaaagagaaggtggggtttctgttaaatttgctaacatatggatgcgacatcattgtattggattaatcagtcgaggtgaggcttgtgaccgggagaaagacgtgggtccatcgtcaggtatctcctcactcgctcctcttctcttaataatgctaaatctttgatagtttatacaagataatatgactttgttgttgaaaacaggggtgtatgttccttcgcaaaagtcacctcctttagcaccctccgaactctgtttagttgatgagcgtcatactcctgccaatcttaatatcgggtccataggagatgatgtaatggtagctttagtgggtaaaccttctgacactttgggtggtaactctcacgggaatgatgtagcagttcgaccaaactctgaacaacgacccttccattgttcaggaactaatggtgacagcgatgctaccacgaacttatttagtatatatatatatttttgcttatggtaatttgttcgtagtcttcaccatatatttatatatttttttacatttattattagttttcattacatatccccttttttttctaatttcaaggtcactacatgatacccacttgtcccttcttctagtagcagcacaattcaaagtactatcacacatgaattagctcccacaactgcacctttaaaggtatggaagtctttccggcatatatatttcatgtatatgtgtagtataatataaatacttacatatgtatatatcttgtgcaggcaaccgggtttgcaagtttctctagagctctcaatctgttttctttatcttagatgcatgacacatatactgatcaaagcactcatgaactgtgcttgccagctcccccaagcaatcttttagctgccgactctatgcatgtaagtttggagcgtagtgaagacttaac

SEQ ID NO: 370461 - DNA, 700 bp, Cannabis indica
agttggggcaggttccctatgaagagatgtcttcaaaattgcacagaacgaagaaaaatagttgctttacgtcgaccttctagaagaaaaacgcgatcaggctcacctgaaaaatgtggcttatcagcagcgaaccgcgcggtatttcaactctaaggttaatgaaagcgttctatgagtaggagatttggttcttcgaaaagtaatgccaaacacgaaaaatccaacacatggggtttttcggagacaattgggaaggaccatatctcatcggagagaaaattggtaacgcaacataccgacttgcagaacttgatggaactgtaatttgaagagcctggaatggcaaaagcttaaaattttattatcaatagtactcgcattgtatcgtttgtacttgctgtgttttaaacttagtcaatttatctacataaatattctaagtatagggggtatataagccactgactctgtactattgattaatctatttcttataaagagttatgattttttttcgaagtttttgaaatttttctaccttagtatttattacaccgacctgtaattaaatcgcaatagagatgataaaaaaacagacaaacgcgagtacccgtgtactgcaaaaatattataagataaataagtatccccgaagggatctaaatttgttcaaaaggaaaataaacataaatttgtc

SEQ ID NO: 370462 - DNA, 587 bp, Cannabis indica
tcacagttctactttcatgtgtaggtaaaggaaaggcgataactgaactggagtgaacctgagctcggatgggattgtacatgtcaaagcagcgcgacctggagtgtttggtctcgggacatctgcgaattgtattttgataatcgctgtgcgacctaaaaatgtgtattttggaatattacttttaaaaagtttgaaaacgggatcccggcacttgtaaatattttaatatattataaagtttattaattaatataaaagttttaatttgacacgtttttcaagaaaactcttcaattagtgaaaattgcactgtaattgtaaaagcactatagcgtgccttagcattagggcgttaaaattttggtatctgagccgccaggtttgtctaccgaattttgctaatacatgtacaatcttcatcagagaaagcttagttcgcggttcagtaagcttgtacttgtttagtattttaaagattattaaagcatattagattataattatttatgttaagtgcattgccttaaaatccgtaagtgcggtggtaagaatgtaaataggtcgttgcctgaccaggctgactt

SEQ ID NO: 370463 - DNA, 507 bp, Cannabis indica
gcataaaacccaacagttatgaccctgcatgagtccgagcgcgtcacagagattttgtaattcggttgcatctccgatagtcatctggtcgttggttgcagtcaaaacagtcgtattatggatgccctggttgggtgcggaactattattcccagtctcttgcacactaggcgcaattccacctataggaagtatctcaccattccccactttgccggctgtctaggattaacagcaggcggaaccattgtgctccctgggttcggcgatgtaggatctagcgtctgtgaatttttcggatcaatcaggcctctacgagtttgcaccatcgtattggcggttggatgttgaataaagagcaatttgtgatccccctctcaatgaaagtaccaaaatgttgatttcgtttttagccaacgacactgagtctattttgtaagcgataaacgatatataataacagatataagataaaaaaagacatatggattttatagaggttcagcc

SEQ ID NO: 370464 - DNA, 648 bp, Cannabis indica
acttagcctccaagtaacttaaacaataaaatttctcttctttttctttcttttccattttttttttttttaaatatgatagcccctaaataaaataaaaaagaataaaagattaattatttaaagaataattaaattaccctcaaagctaaataatctctaaagtaacctaagggcattttggtaattttactaatccatcaacccgacattctaataaaattctaacctaatctggaatattctcaaataattcttccattaacgtcgtgacattactaaccacatcgctaaattttcacaattgtcgggcccaaaaaatattttatttcgaaattgatatcctcagtactcacatatcccaatataatctccgtaattaataaatgaccctatttatttcattgattaaattctcaataattaccctaagcaagatcataatcttacttcgttaccaaaataattacatatttaataaaatatgtctatttaaatattattaattttccgggacattacaactatccccccttataggaatttcgtcctcgaaatttacctgaaaggctcgagatacaactcccgcatctgtgactctaactcccaagttgcttcttcaaccttgctgttttgccacaacacttt

SEQ ID NO: 370465 - DNA, 543 bp, Cannabis indica
taataaaataaatagagcatgatattagaaaaaaaaaagatgaagaaattttttttagataccaaagtgtagtctttctgttaaaaaataaaaataatcccttggggattaatgagcaagtatactttgttggcaaatctgctttagtcttatatctcaaagaaacaatacaaaaataaaataaaattcgtaacagctaaaaaaaaactaacttttgaggtggaagaaacaactatgagactttgaaagtacattgttgacataaattaaaaaggacatataaaaatatcagcctcttttaacataaacaagcgaaaatccattcattataaaatgatatttatataaatgggatcaaatacacaatacgacaccattattttgtagagcaaacaagaaagaacataatacatttagaaagaaacgacaaccattaattgacatgactcttcaataagaaaaaaagttatatatatacggaacaaatcaattgaataagagagacatacctgtatctttaagctctcaaggtaaaaaaaaaaa

SEQ ID NO: 370466 - DNA, 658 bp, Cannabis indica
gaatttgacctccctttgtgatgatgattgctgcccttgtgtgaacccctactagtgcttgaacctctactagtgcttctacccttattatgccatggtttcttttgtccaggccttcccctacttaggttaacatccccattagtatgccccggtctttcaaccttcatttccaaatcttttgatttcaaagctgagattacttcttcaagagtgatctcagttctcccatacttaatggctgtcttaacctccctgtaggattccggtagtgaattgagaattataattgcttgattctcatcacttaaggcctcattttcccccgagtttgctaactcaatgtgcaatctcaaaaactcatccaagttttgttctagagatttagatggactcattttaaaaccaaagattctctccttcaagtaaatcttgttgatcaaagatttcttttgaaattgctcttccaacttgttccaaatcttagcaggtgtatcttccttgtcaaccaatctgattatagcatcagagaggttgaaaatgatcaatccggttgctgtttccagcaactcttcttgctggtctttggttgtatcacttgaccattccaccggatctttaagaaccttcaacagcttgtgttgagccaatagagccc

SEQ ID NO: 370467 - DNA, 593 bp, Cannabis indica
tggaggaagctaaagctcgaggatttaaatttatcattgttgagagtgatttgagggtggcgatcaatgcccttaatgggaaggagtcccgttgggagcttgagaactatgtctcattttgtaaaagaaactctcctttttttattggttgtaactttcagcatgttagtagacaatgtaattttgtagcccataatgtggctaagtgggctttttctcttcagagatttggttccgcgccactatcctctatgcccgataacttattctgtaacgacggcgaggtctaactaattttatgttatataatagcacgcttttcttcaaaaaaaaaataaaagaataactcttattttggtgtgagccatcactttctatttataggaaaccactaggtttaggttagtaattatttgacattaaaataatgaaaataataattggaaaaaggctattcaagtggccggccatggtgttaatgggccccacttggaattttacagttttaacaattttcatttctaatttctcaaaaatgccaattttccaattctaaccatttaaatgccattgataactaaaatagattatta

SEQ ID NO: 370468 - DNA, 549 bp, Cannabis indica
atgaatcgaggagaatgattcacatagatggagactatgttgtttgaggagagcaaggtttgtctagggtttatggatttcttcttctgagctctgtgctaagttgatgctaacctctcttcccgccagaaccagagccagagtcagagctagacaaaagagaagaaaaagaccatttactcctcactcgtgtgctttgtacaaactcgataagagaagattttgtccttttatttttctttccttttttttttttatttttttttgggaaaagtagaaattttttttaagaaaaaatgaattactttgtgcagattagaactgaatatcggtggcttttggtcggtttttttactaaataaaaattcagaattttgatttttctatttggattggtgcaattcgaaaaccaactagccaatccagaacctatcttaaaactgtacatttttgaacttcgaatttggtcgatttaaaccgcccaaaaccaacttttttaaaaaaaaatatgatccaatttattctataaacacattattctacatttta

SEQ ID NO: 370469 - DNA, 625 bp, Cannabis indica
gaccaatattatattttacatgtgacactttatggatcaagtaacagaacgataaatttagtaataagtttaaaaatttgagaatatcaataggaactacaataatgacatcaattttatatgtgtggaatataaaaataatgcattatgaaataaatttgattcatatctcacacatgttttttttatacataatctcacacctgattttttttgttcaattcataatatattttttctatataaaaaaaaaaaaacattttccctatattttgcaaagtaaaaaaaaaactttacacacatatatatagttatggatacatatatataaataattgaataattatttaatttaattattatgtgtttttttaaaataattaacataaaacaaatatttttatagaaaatttattaaaataatagtaaaatattaatttgtaaatttatactttaattaaatattaaaaattgagagaatttaggagaaaaaagaaaaatagctttggagagattttagacagccacatcaccgcctcatactttttctttatatagatagatatataaattgattaatattgatttattaaaataatagtaaaaaatatttaaaaaaaatata

SEQ ID NO: 370470 - DNA, 482 bp, Cannabis indica
tagcaacaagaaagctaaggccttactttcaagctcatcctgttcgggtgtacaccgaccaaccaccacgataaatactgcaaaagccagatgcctctggacggttactcaagtgggcgatggagctggggcactacgaaatcaacttccaaccccgaacagctatcaaaggccaagccttggccgactttgtggtggaatgcacaggaaaaactgaaagcatcccagaaggcgatctcgagtcaacaccacagccgagcaacactgaaaacaagccgacctggaagctacatgtggatgggtcggccacagatcaactatctggcgcaagaattgcccttgtcacaccttgggggcaacacttgcatgcagcggtcaaattcggattcaaagcctccaataacgaggccgaatatgaagccctaatcactggactcaaattagcgaaggagatgaaagccgagcacatcgagatctgcagt

SEQ ID NO: 370471 - DNA, 355 bp, Cannabis indica
cataaaacccaacactttgttcccaggaatgtcaaaaaatgcagctttaacctcatctttagtgaattgcatcatcaggttctcagcttgttgtgtggacaaaaccgcacctctgctcacaagcttctttagcactggtcttctgttagtcaagcttgttcccagaaaatccttatagtaatcaacaaaggctgcagaaatcagatttcgatcagtgattctggtgccattcttgctttctatggagaaaatctgattgtgtcgtgccctttgcttaatacttgcatgaaaaattgcagtatttagatcaccattttgtatccaagtaaccttagccttctgctgtaaaaaggct

SEQ ID NO: 370472 - DNA, 798 bp, Cannabis indica
ccagaatgaaaaaattacaaaaataccacctggtcataccttaagcggcacagaatgaacggagaagatgaagatacctccatcgatcaaatctgcaacgtaaccagaatgaaaccaaaatgagggtaatacaaccataaattctggcaaaaatgattggaaaagaagaaatgcactgatctaaacagaaaattacgaaaaaaacaagaaaactgggaagaaattgaaattaaacatttgattttagttttaatcgttcaaaataactcactccaaaatcgaaaatctagattcaagcaatgtagatctgtattaaacagatctggagctccccctctaatccaaaataaggtatgatatgaaatttttttcaaaaataaatctacgccatatacagttgcattctagttgattcgttgtttacaatagaccattcagattcttaaaaacaataaacaagatctgattcaaattaaggaacgatatgttaagtataagcctgtttttattttttttgcgttaccttacagttgcaatatcgttttaaaatagtttacaaattatgaagaatttcacatgacaggaacctaaaaaatagcagatatacaaggtacgtacgatttatgtaaatggttgcaaattagttttataatagttggaaattgatctaattcaaataaaactgatgaaaaagcacaatgaccacaactatgttaaattgggttaattgttgtggtttttgaagttgttttacagttgcatcatcattttataatatagtttaattcaattttttgt

SEQ ID NO: 370473 - DNA, 726 bp, Cannabis indica
tgtgataggtccgcttttaccggatcaaggtaacgtgtattaaatatgttgtaaaccgtaacattctaggatgtctcgctgggaacacaataacgatagccttggtagcgagctggaacttttcccatgtcttttcgaggttgatgatgtaagcctcgtccttcctgcgcttgaagacataatgctccatctgaaaattgcagttctgggcaacaaggtggacctcagcagtcaacatcatttgtatgtcagcttctatctaagagagctgactcgacgaagctgtgaaccccattgaaaggtgtctgaagctgattaataaaggtaccacgggcgcgccttcctatagcgagatgggtgcctcgctatttgctgtttggtttaacccgactgttacacttagtctttataaggtgtattatacactaagtgtcttaccagtcaccacgtctcgtttcttaatgcgtagcgaggttgatgtctcaccttgtacgtctgaagtcgtatggcttctcgttaatgttcgaggcaacaattggtgtatctttatcttacataagacctttcaattagcaagttgtaaatatactctgtcaattccgcattaatgagttattccattttcaaatataattaccgttacgttcattgattcatattcttccaaattttacacgtgtcctcctttgaaataatagccgaatttcgagtataacaattgcccct

SEQ ID NO: 370474 - DNA, 502 bp, Cannabis indica
gagagagagagagaagagagtggaaagaaggtcaagatcaaattggttagagtttatgttgtcatgacagattgaagagctctaggtttaagcattggagaaccaattctgtctgtaattgttcttgatggttctacattgtaattaaagtttgtaacttgttgaatcatagtatagaaacttcttgggggaaagctggagtaagacttaaaatttgagatccgaaccaggataattcttgtgttttctctctgttttcatgtttaattttttggtttgtacttgtatttgtttgttgattatttgagttttgttattgtttgagtttgtgtttaggaatgtcaatctgggctattttcgcgggccgagccgggcccccggcccgacgggccgaccgtggcccgaattattcgggctcttatcgggcttctagcccggcccggcccggtatatattatttcgggtcgagcccggcccggcccggttttaaatattaaaaaaa

SEQ ID NO: 370475 - DNA, 786 bp, Cannabis indica
aagaggcccaaatagtggcctatagaggatattatcccaccgggatagcagggtacatgcctggagcaccgccctcgggtactgtcccgaccgcggctccacccatgaggggcatacagttctctactactcccagatatagtcagggccaggccttggcaccagcatcatcccattttggaaatccctcagggataaatggacaaactcccccacactccgctccaaccgctagcctggcaggcccttcccagggttcaaggagtaaacgatcctccaaaggcagcaccaggacggaggagaaacgccaaaagagggggtacactccacaatacacccagtacacggagctgacggactcccaagagcgtgtgtactttgctactaggcaaaatacacactaccggagaccaccacccttgtacaaggatagctcccggagagatcccaacaaaagatgcgaataccacaatgacattgggcacatcaccaatgaatgcaaaaatctcaaggatgagattgaaaacctgatccaattggggcacctctacgagtggatcaagaataggctgcctcaccttaatccgggtcaggtgacagggggtgcagcaggagtattggctccagttgctccgacctgagatgcccaacacacccccggtctgccacccagacccaatgggagagtggccatgatctcaagaggaccccatattggaggaaccacccgcaaagaactaaagcggtacgcggggccgtaaaacacaatgaggtttgggaggttac

SEQ ID NO: 370476 - DNA, 532 bp, Cannabis indica
ttgtgtagttgctgctgtgttttaatgttgatttcagaggtttatttatgatttaaaatgttgattcaagcatgattgtgttgctgatctgttggttttatcaagagactcaaaactatgattttcaaagagaaattgtttaaatctgctgctgttgttttgttgatgcttgctgtagttttcagaggttaaattatgcatgtttaagtaggtttcgactgatttgaatgcatgttagtgatgtttgatcaagtttgagtttggaactcaaagcttgatgctttaatggtgattttggtttagttgcatgaagctcggtttttatgctttagaaatgttccttagggtctatatagcaggtctggaaggttttgtttgaattggtttggatttgagcaagttatgagtttttttggttgaaatctgcgaggaaccgtaattccagatggggttctgaaaattcccagaaccggaattccggttggctgattttctgaaaccctagattttctcgtttttatgttatttgggg

SEQ ID NO: 370477 - DNA, 594 bp, Cannabis indica
  modified_base (565)..(565): a, c, t, g, unknown or other
tcaaagtatgctctaagattgcgttttatccgacgaaaccacttctagtgaaaattcttccaatccatccactactccttctcccgatcacacaataatcagtattcctttcgccatgaataataataatgaagcacaacaaagaacacttaatgattatcttcatcctacacaaacttccataccatcatgctttatatttccacctaatatgccaaatcttggtgtcaaacccggcattattcaacttttgccgacttttcatggaatggaaaaatgaaaatccatatgtgcatattagagaattcgaggaagttgttaacactttctatgaccgcgcaaccatcaatgatgctgcatgcttaaagtttttccccttctccttgaaaaagaaaagtaaaagttggttgtattctttgagatctagaaccaatggaaaaagggaaaaaaaagacaaagacattttttgttaaatatttccctgtccataagacaaaaagtttgaaaagacaaatctcaacattttcccaaaaagacaatgaaacgtttatcaagtttggagagntttaaagatatcttaagtcagtgtccaca

SEQ ID NO: 370478 - DNA, 712 bp, Cannabis indica
aagaaacaaccagcagcctataacggccagatcatcagcttcgtggacgacgaagcttcagatttgctcaatcctcaccatgatgctttagtcatttctttatttatttcgaattgttttactaaacgtatactgatcgataacggtagctctgctaacatcttatttttgaatgctcttagggagatggggatcgacgaggccaccatcatccgcaaatccacagtattggttgggttcagtggagagcagaaacactcagtcggcgaggtcacactccacgtttatgcagaaggagtcaacctacagacgaagttccttgtagttgactctccatcagcttataatgcaatcttgggccgaccgtggatccattccatgaaagctgtgccatccacataccaccaagtgatcaggttcccaaccaagtggggagtgaaagaaatatggggagcccaaaaaactgctcgagattgttatcaaaactcgctaaaagagaaatcggcaacattatagcaactacagcagtctagtccgacctttgcaccggatgaacccagtatggaagacctagatgatgtgtgcattagcaaggagttcccagaccataaagtccagattggaacaaagcttacacctgagtttcgagccaggctgatcgaattcttaatcaaacaccatcactgctttgcatggtcccatgaggacatga

SEQ ID NO: 370479 - DNA, 508 bp, Cannabis indica
cataagaacagagaggaaaaaccaccaagaacattgtctgtaataaatactctcataaatacccaaactcgtggactaaggctcattaatgccccaaccacgtaaaaatctctctgattaattccttatagcttccttaactattattattatattggttgccgaaaacctcggtcaacacttattttttaaaatttgattattttatcttattttaacttcaaggtcagatattttacattttacattattcaattaattttataaaaatgaccttatttaaaatttaaaataagatatattttaatcttgaaaattttaaaaatctaactagatattttgtcaactttcaaatttttgttattttatttaaattaaattattaaattagataaatgatatttatttatcatttaattttataagacattttattttttctaaataacataaattttgaaaagttagttgacatttttgaataaatattttggtttgttaaaaacct

SEQ ID NO: 370480 - DNA, 699 bp, Cannabis indica
tttggtggtaatcccggtaactcttccgggaatacatccagaaattcacatactactcgaaccttttccagtccctcaagtgtatcttttgtggtatccaacacactagccaaatatcccatacatccttctcgtaataattccctggtcctaagtgccgatatcaatggaatccgagatccctgcacctttcccataaaaacaaatgggatctcaccctctggttcaaaagtcaccatctttctcttacaatctatagtagcattgtacttagtcaaccaatccattcccaggattgcatcaaaatcttctaagtctaattcaatcagatccactgacaattctctcccttctactaacactgggagagaccttacccacctcctggagattaccacttctccagtaggtaacaaggtaccaaatccactagacatgatatcacatggcctactcaatttctcaatgattctactagaaatatatgaatgtgtggcaccaaaatcaatcaaaatagtaaacataataccaccaatagatatctcacctgtaacagtcgaagggccagcttcagcatctgcttgggtcaaagcaaacaccctagcaggaaccataggactctctttcttagcctcgggcttctgtagttgtggacaattgttcttgaaatgacctgctactccacattggtagcaaact

SEQ ID NO: 370481 - DNA, 548 bp, Cannabis indica
acttgtagttgttgatttgaggtcatcagcaccactgtattatgaaccaccactactacaaacaaaggcttttaatcccggtttttaaggccttttatcccaggttttcgctaaaatgaaaaccgggatatatgcgagtgggataaaaagtttttaaaaaattgggataaaagggggactttttatcccgattatttcataaaaaccaagataaaagggggactttttatcccagtttttatgaaataaccgggattaaaagtaaaaataaaataaaaaaaataaatcaaaaaaaaattatatcagttccttgaaacagtttttacaattagattccaaaaatttataccaaaatatacatattaatacaccatcaagggttcacaaaaaaaaaaaaactcatcaaggaccaccaatgacgaagcttcgtgcaccacgaaacgccatgaacctagaagtactgtgaccgacgaatggccacagatcaactctatcaacctaagaaaaaaaaaaagagagagatccagaataatgatcgagaatcagag

SEQ ID NO: 370482 - DNA, 785 bp, Cannabis indica
ttggtgctacagaccatatgacaggtaattctagcttcttttctaatcttcaaccccacgcttccacttctactgttacgttagccgatgggtcaccatctcgtgttcttgggtctggtagaattactcctactccaatgcttcctttgtcgtccgtcttacatttacctaatctttcttttaatttgatctctgttagtcaacttactcgtgatcttaactgttgtatttctttttattctgatcattgcgtatttcaggatcttatgacgaagcaaattattggtaaaggacatgaatctggaggactctacattcttgatacaccaatacctaaatcagttgcttgttctggtgtacaatcccccttcgaggcacattgtaggttgggccacccatctcttcctctgcttaaaaagctttgtccacaatatagtaagttgtcttcgttagattgtgaatcatgtcaatttgctaaacatcatcgccttagttcaagtcctagaatccataaacgtgctagtgttccttttgaattagtccttctgatgtttggggtccttctcccatcttgtctaaacctggttttcgttattttgtttacttttattggatgattattctcgtgtcacttggttgttttaatgaagaatcgtttgaattgtctctatttttgtgccttttgtgctgaaattcaaaatcagtttaatgtgtctattcgtactttgagaagtgataatgcaaaagagtacaaatctggtgtatttcaatcttatatggctcaa

SEQ ID NO: 370483 - DNA, 617 bp, Cannabis indica
agaccattgtaaaatgtctcaagttggatacaatgaggaataccatggtgtgggcacttcctcaacaactccttgaatctttcccatgcatcactagtagtctcatcttccaattgttgaaaggacatgatctcgcttcgaaactttgcatttcttgttggaggaaagtactttctcaagaatttttcagccaagtcattccaattagtcaccgaatcgggaggaagagtattaagccatgctctagcccgatccctcaaggaaaatgggaacaacttcaatcttaaagcctcttcacttactccttgtagcttgaaagaatcactcacctccaaaaatgagcgaatatggaggtgaggatcttccgttggcgacccaccaaattgaccaaccgtttggagcatttgaaacatgacgggcttgagctcaaagtgaggtgcttggatttcgggtctcacaatacccggatttagctcattgaacataggggctgcatactctcttattgctcgggctctatcatcggccaaagcaataggattggcttcattatgagcacccccaatttcaaacccatcggccatattgcagcgttttttagccttttgttccttcct

SEQ ID NO: 370484 - DNA, 576 bp, Cannabis indica
gaaaggcgttcttgcattcctccatccattgaaattttttgtttcctcgcaagatgttgaagaatggaacacacttgtctgttgactttgaaacaaatctattgagtgcgacaattcgactagttaaacttttgacttctttgctttttgtaggtgatttcatatccagaagggcttgaattttctctggattggtttcaatacctcgggcattaacgataaagcccaaaaacttacccgacctgactccaaaggagcattttaggggattgagtttcatgttgtatttcttgaggactttgaagcattcctccaggtcatctatatgccccccagccttcctggattttacgagcatgtcatccacatgtacttccatatttcggccgatctggtctttgaacattttatttaccaatctttggtatgtagctctagcgttcttgagaccaaatggtatgatattataacagtatagacccataactgttcagaaacttgtatgttcttggtccggtggatgcattttgatttaattatacctcgaataggcgtccatgaagcttaatatctcgt

SEQ ID NO: 370485 - DNA, 528 bp, Cannabis indica
aaaatctacccactttattaataatgtcctcattatataccctttagattactataaatcatgtagctacatttaagtagagggcaaggatatattaggcaacccactcataaaagtgggtaaattttaatgaaatataataagagggtatttttgattaatggataaaaaaaaagtattcctcaacttatcccttttttttttttgacttttcaactagtaaagtaaggcccaataaacataacaaaatcaattagtgaactaagtgtagaatatttgggctttagtgagtttatggactttaacatcatttctttcaatttagataataagtccaaaatgtacatgtaatctttttacaaaaatacacagcattgagattaacaattataaaacgggaaacctaattaaattgataaaattaattaaaattaatctaaaaatactaaaattaatatttatgcaaaactaaataaaaagactactaaaataaactaaaaattacttgagaacaaagctaatttaatg

SEQ ID NO: 370486 - DNA, 1092 bp, Cannabis indica
atgggcaccacccacagtttctccatttcgctgtctgatgctaacttagccaaacagtctgcgtgagcattcttttctctggggattctttccactttgagtccgtgaactcatggagcagctcccagaaaattgctacatacacggccattttttctccacgcatttgatattctcccgacacttggtttactaccagttgtgaatcactgaagacttcactcttgtggcccccacggcttttgctaacctcacctgcaatcaaggcttcgtattcagactcattgttaaaagctgtcaattcaaaacgtagggtcgcctggagtcgaagtccatttggggatatcattgcaaccccgcttcggatccattttcgttcaaggcaccgtccacaaagactttccatgttggggtttgtggtgtgggcacgcttgcgctagcttctgcctcatggcactccgttatgaagtctactagcgcttgtctttttatggaagtgcatggtatgtaatgcagatcaaactggcttaattccatggcccatttgagaagtctcccggatgcctccagcttctgtaggacttgtcggagcggatggttggttaataccttgattgggtgagcctgaaagtagggtcttaacttgtttgaggctattaggaggcaaaaaactagtttttcgatcgccagatatcgtgtctccgcccctatcatgcatttgctgacatagtacacggggtgctgagttttttcctcttcccggactaaggccgcgctaaccacattctcagagatagccaagtattgtaacaagtcttcttcgaggacaggttttgataggattggaggtttagccatgtgttcttttagttttttgaatgcctcctcgcattcgtcggtccactcgaatttttggcatttcttcaggatgttgaagaagggaatgcacttatctgtggattgggagataaaccagctcaaggcggcgacctttccagttaagctttgtacgtctttgtgcttcttgggagaaggcatattcaggagagcttggattttttctgggtttgcctctatctctcgttggctgac

SEQ ID NO: 370487 - DNA, 549 bp, Cannabis indica
acctactcaagtattcctccagtgggccgagactttctccacttacaacaggaaggccctcaatgttggagacttagtcatgacagagaattgtcgaaaggacaagctgctatccgagagtcagtcggtggatgacttcaatctttccaaggtcatctgcccgaatgtaaggactccagctgtggaaagggcactccgggtggacataatcgcctcggcggaggaccggtactagaagtacctcttcaggagggaacaggagctggcttacatcaaggcccaggctgcggccgggagaatccttggtctggaagctgcgccggaacggaggctctccaggcccaagccttcggtcccggttcccaacactggtgccctagatgccagtactttaggttctggtaagtctcctttagttattcgccatgtcccctctgtccaagagtatacccaatatagacccataggattcgatgagcacctttgtaagtttagaatgccttccacccggtggggaatcatgcgaaggaatactacttttcccatttg

SEQ ID NO: 370488 - DNA, 599 bp, Cannabis indica
gatgttgttggaccaaaaaagtacggattggatcggatgaacacccctactttgatttatgactacttacatcagggtcggcccaagcattaggcagattgggccattgcacaaagcccccatttttttaaggttcaatttatttagggaaatttacatcatttactaacttttccaataatcttacaattatactgtgacacgctcaaaataacatttttacgttttttttttttttttttaattttggcagtatactgccttgattcaaagatatggacattagtatagggttttatatattatgtggcttataggtgtctttatgaggtttaacctcttcattttttaaaataatagtgctttaaaaagggatgatttgacaactttattattacttaaatttgaaattgaagacaactcacccatcacccacgtgattcccattcccaagtttataaatgtattttgtttctctctctatctctttttgtgggttgatgtttatagaaaaattcttgagattggtgtcaagataaagaccatcaaccaagaactttacataaaactcttctctccattcttcactatttcaaaaa

SEQ ID NO: 370489 - DNA, 330 bp, Cannabis indica
aattatgaagttgttgttacgcagcttttcaacttcgtctttcacggctactgctcgttctttgtccaacaaccttcatttttgttgaactggccggaagttgggatcaatattcaaaacatgtgaaataatagaaggatcgattccgaccatatccgcatgtgaccaggcaaaaacgcctaggtgtgctctcataaattttatcaattctgattttacttcgagcgacaaaccttttcctacctttagctttctggtcgggatagctggatcgatctcgatctcttttaaattttccacaagtccaacattgctgcttgggtccccaag

SEQ ID NO: 370490 - DNA, 512 bp, Cannabis indica
ttctgtgtctcttctctgttagagctttcgtcccctgatcctgatcaggttcatttccagctggttccacctgatttatatcaggttcttcttgatcatctagcctccatagagtagggtcaaactgtattgtacctgcatggttagtttctactgtacctgcagggttagtcttaagtaaacaaggacattcattttctttaaaaataacatccctgctaataatagttttaaatccacccttttctcttagccagattctatagcccttaactccttcaggatatcctagaaacactcctttaatagctctaggttcaagcttaccaacactttggtgcacaaaagcactacaaccaaatacccttaaatttgagagatcaggtggtttaccagaccacctttcctcaggtgttttgaattcaataacacttgagggacatctgtttattagataagcagatgtcatgactgcctctccccagaaaccatgggacaaaccagattgtatt

SEQ ID NO: 370491 - DNA, 601 bp, Cannabis indica
atgattctgttcttgtgagaaaaattgttagagttcttccagagaggttcgatactaaacttttagcaatggaggaagctaaaaactttagcacaatgaaggtggaagaattaatgggttccttgcgtacttttgaattgaatcaacaaattaaacaaaaggacaaacccaaacccattgctgataaaggtaaaagtatcgctttaaaagttgttgataatgaaaattctgatagtgaatgtgatgatgaaattgctttattaaccaaaaattttcaaaaatatatgaaaaagattggtaataaaaagaataattcgaaattcacaaaagggaatgcttcttttaaaccttctgtttctaacaaaaagggaattcagtgcagggaatgtgaaggttttgggcatattcaatctgagtgtgcaaacactttgaaaaagaataagaaaagtttcaatgtcacttggagtgatgatgaaaccgaaagtgatgaagaaaattctgagaatgttgccctaacttctgttatgactaatgtgttgtgtgattcacaggtgaaagctagattggtatgtttgaataataccactaaacaagaagaatc

SEQ ID NO: 370492 - DNA, 1212 bp, Cannabis indica
cattttttttttgtattttacgaaaattcatggggttctatttcaaaaccaattagtaatgagtggagtaacacatgttcttatatatgactcaatatttttacatttgatccatatgagacaatattgtccaatattcactctcaagatgacaattattttttgcttaccaaccttgaatcaccttatcataaatagtgcaattaatttgcttgcttatttttgttcgcggctggaagttctatttgctcgcttattattgttcgcggttgggagtaccattttgctcgcttacgactcactaactatatgataggtgtggatcgaaagttcgctaggaatatggctttgatgccatgttggggttgcatctcaaaactaattggtaatgagtggagtagtcaatattcttatatacatggttcaatatttttatattttgatatatatatatatatatatatataagataatattgtttaatattaaatagcaaaccacacataaaactaccaaaacaaccattagagcaacccaaactataaaaatggaaaaaaaaatagtacatgaagtgattctcctttaattattttaattttaagaaattaatatttttctaatagtacaagaaactaataacttaatcttttttttttcaatttacgaaatatatatttttgttttaaaagaaattagaattataagtattaaaaatattttaataatatatatttactcttaaactttttgatttcaattttgagaaaattaatattgatattaattttaatcttaactttattaatttatttctttttagagagaaaaataaattttttattaatagaccaattttataatatagttataatatatcactattaaaattaataagatacgcacaccgtgccttttataaaaataggaatgaaacctcaataatacgttcaactaaaataccaataagctaccagcattggagcataaaaaaaagcataaagaatgctagaactaccatccaaataaacatgtgacaaattacatctattaatgactatttaccaaagatcttctaataaaaattgggtaataacaaccctattattcaatctagaataaaaagaaataatcaaacaaccaacaataacgataacaataataaattccacttataaccagtcctgtatatttacagatatccacatcagcaaa

SEQ ID NO: 370493 - DNA, 498 bp, Cannabis indica
aataaagagtatgagtctaataattaagttgctaaatataattgataaagattaaagtttcatcaaaattaattaacgaagaaatagaacttgttcttttatagtattaaatataatttaaaacaaatatataccaataaaacaaagagtatgagtgtaatagttaagttgctaaatataattgatatagattaaattctaagagaatcatttttaaataaataattattaaatgtttaaaaatttaaatttaaagtattatttttttataaaaaaataaaaaagaaaaaattgaaccacaaaaagacaaaatagttgaaccaaaaccaaaaaattaaaagagaaaaaattaattattaaataaatattaaatgtttaaaaatttcaatttaaagtattatttttttaaaggtagaaagtttatagattatattaagtcaaaaaaaaaatattaaaaaaataaaaattaaattatttaaatttaaaatattaataact

SEQ ID NO: 370494 - DNA, 546 bp, Cannabis indica
ttaattccgctgcatcaatgtaaggttttcttaactttatatgtatttaatttatcgttttagaaagttcatatttagggtgtttaaataacatacttgtgagtagatctaagatcctggtaaaataatattccaacaatctcaacctttgggaggtccaatggatccctcgaacctccaatggtgtggcccactcggtggctcaatgggcaaatcgaaacaacaagtttggtggtcttgatttggccaattttgatgatttcctgtagttaattactgcaaatagtcatggttccccggaatttgtttgtttcttttgtgagttggtagctgttgtgttgtgtgttgtagtgttagtttctattgacttctttcttttggcttgtttttgctactgccttgggatgtagtgagtgttcctggttgttttggcctatggcctaactttgttgtttggtggttctcattgtaaccatttaatcaaaaaaaaaaattgtttgtttttaagagtaaaaagaaaaatttcattatttattagtgtataaa

SEQ ID NO: 370495 - DNA, 841 bp, Cannabis indica
ataaaattgtgaagacaaaattagcagtgtggacatatatttttcggttcaatagatgagaaaaaaacaggtttaggctcaagagggtcaactagggataaaaatttaatggtaggctagaaaggctcaaactatccaacaaatgcctaaatcatattcctattgaacattgtcaaagatttcgcctcaaaagataaaagatgcaagttctaagctatcttgtctgtcaatcttaccacaaaccatagtaaaacaattataacaattttcacagattaacaaaattgcatatacacacaggtttttaagcatccaaactaattcaaagagttaacagaattgagcacacaattattttgcaatttcagagacactttaccatcaacagcagcatacaactatctttagcttaattaatcgactaacaactaaataaaaagactaaactaaaacaaaataactaaaaagaacagaataactaaaacaattaattttttttttaatttcgtgattgaatcgattatatgatttaatttcttagagaatcttttgggattaaatgtaacaactataaataagtgtttctctattctaaaagggagttctgatctccaatctttaaagctcatacttgagattcagagtcaagtttagagagagagtccaagatcataatgagtgtgcgtaaaggaatgtaataggagtatcactctagaagtgattttctatttctttgtaattattcactgtgttgagcatgtaatcttaggcttattcaattgtatactattgactttcctaatcaataaaagatccataattcattcattctcgagctaag

SEQ ID NO: 370496 - DNA, 947 bp, Cannabis indica
atatgggggagttacttatcattttgtaacatatgggggagttacttgttactatgagtaacctccacaattatcaccaatattaagtatgtaaaaggtgttacacatcttaatttaaaaattttactactatacgagtattagtatgtgtatgagttacatctctttattgagtccataacatccatgaaaggttatgagtttgactttcaaatggtgatatcaaaactactataaagaggtttttaatgctcatttgggatgtataagttttctcattaaaaaaaaacttaattagaaaagtacttaaagacttagataattctcaaagctatttcctagagtagtttccttagtgcttagagagtagggaacgataagctttttgcaaaggtgataatatattgttcaagctatggtgatccccactaatttatattcaaggttgcgagtgagtatatatagatatatatattcttttcttgttatatactatatttttttgcatcttcttcttctagctttcttatatctataaatatgtatagtgtatattatgtgtgttgtagcatatatttaatcattctcttattattatttttttaacaaagtgataagaattactcatgaatttatgatgcagacatccacaaatagcgcaggaatctcctcaaaccaagatatctcatcgtctaaccaaaaagcatgctttgtcaaaccataaattactaaagtaagcgagcaacatgggataaaattgcccccagaaatttagacaataaagctataacatcctcaaaataacacactaaaagagctagagcttcaacttgtaatactaaaaaactacacaccaactcatataaaaaatgctctacaaaacatctacaaaataaaataaaataaaaattaaaaaaaaaattaaacccctataaagatattaaaaa

SEQ ID NO: 370497 - DNA, 968 bp, Cannabis indica
gcacgagaccggctatctccaaggcattgaccttctccttcaacttgtctacctcagccgtaagctcccccaccttggtgtccttctcctccttcatctgaagaagaactgctcgcagagaagtcctctcatcctgaagactatttactttagcagataagatctcaatggtctcctcaaagcgatcagcagcttcgagatcctttgtcagcacgcagatcttcttctcggcagcgaacaacttcttgttggcctcgccaaactcaatctgaacagctccagcttctgccctagcctcctcagcttcctttttggccaagtctgcctccgccttcaaggtgtcgggcagagccgcgctcttggaagcaacagacttagcctagggataagtgtaagccaacttcagaccggcctgcacaaaggaaaaattcagcatatggagctaagtgtgaaaagttaaagggaagtatcaaaaaagacttaccctggtgaactccttcaggactccgcccaccaacacatccagagacgagttagtatcagcactagccagttgctcactgacctcgggaaccagccagtagatatagtgggccagcatctccttgccctttttggcctctgaaagcacgggcaaaggtgtagttggtgcctgcacccgctcaggtgtactcctaaccagtttagacccaaccgttggtggcccaaactcctttgacttggcggacttgggggtagaagggtttgtagcagtcaactcctcgaaaaggtcaatgacctctccagaaggtctcttttctgaggacccctcaccgcccttagacttcttggccggaggagaggcgctagagcttccacccattctcttcctcagagcatcgatcatttggcgaggcatgtctgcacagaacaaaaacagtatggttagaaaacagccatcaaaaaacacaaggcatgaaagtcaagaa

SEQ ID NO: 370498 - DNA, 1453 bp, Cannabis indica
attgagcacttgatgctggatcggtcgttggagcatgtgcatgatgataacatgctcacctttagacataggtggtgtgtggacctattttaccagaacttaacgtggtagttttttgtaggtttttgcaatgttaatcttgtacacataaactcccattttgtaattgtattataatctcaccaaatttatatataacaagtaaatttaaagctatttaaattgttgcttgtatcaatttatttcttttttaaatttttgataaatactgtgaaaagatgacttcttgataaattatttcgctaggaatcgcattaaaatcgcacatacatcgcccataatatcgccaaaatacacatcacatcgcagaaaaatcgcaccataatcgcacaatgtcgccaaaaatacagaaccaaagcaaactcaaaaacaagatcctgtcagttaacatcgcacaaaaatcgcacaataatcgcaggatatcgccaaaaaatacaaaacaaactaaaaactagctcctgtcagttacaaatcgcacagtaatcgcataatgtcgcctaaaatcggtaaacaaaccaaaaaattattaatctaggagaaaaaagcacaatatccaacaaccagcaatacaacacatattcatttaaatattagagaaatggttcaaactcgagctttgcatgtagctctgttgtgccctgaaccgtgacatagcgaacaatgacgaggttccactaccacctgaccactagacggtcgacgcttcgtcggtcttctacctgcattgctcttcctaggccgacctactggttttttctccactggtaccccgattcttatgttcttgatatgttccggtagtacccactcatcctcctcgccaacaatattaattgtggcatcgtaggtcttcttccacgtttctttagtgtaatatggagagcaaagtgtgtacacgctcacattctgactaactgctgcggcacatgcatggggacaagggattttgagcgtttggaaaagtccgcaagtgcatgttctctccactaagttcacatcaccacctctctcaccttgaggactcgtaccaacgttgaacaattgggcaccattacgaaggacactcctgaacataccatctttgtgttgatcctttaaatcattttcaaaagtagtagccaaaggagtagcgcacttactagccttttcgagacgagaagcaaaccaattttgaagtgtgaacctgatgaagtcaaccaaaatagttactggatattttctgaattcttctgtcaccttgttgaagctttcggcagcgttgcttgtcattatgttgtaccgatcgcctggacaataaggacgagcccacttttcaaaccctatttgctcgacgtatgtagcaatggcagggtccatctgtttcagcacctcaaaatgcctatcacattccgtc

SEQ ID NO: 370499 - DNA, 789 bp, Cannabis indica
tttgatcttgtatgtaacggttgtggtttgtacgtgcgacgatgtcagtcatatatttcaaaacataaaagccacattcttgacttttaggttgtcttggacaataattaaaattgtctctacaaaacctattattcaacctcaaaggcttgcaaccactagtactttcatttctcccaaagaaatctggttctgtcaaattgaaaggggctatgggaatggctgctataagtaattcttttggtatccttcgagatgatttagaggggacttcgaaataattcactaatgctgttattcatggattcaaacaacattcggttggttttatggtactaaatcaagtacgcagtggaagagttattttgattatcattgtatcatatgcccaagatcaccatatatatacagtattaggctaattagtaatttttctccctgaacttcgacatgtagtaaattgtgtcccctgaacttttttggccgttaaaaattccccctgaactattgagattgttaaatttaaggacttttgtctaatttcattcaattttactgtttcagtgattgtttatgtactaaaccatgctccccaaactttgatatctaccaaatcatgcccctcaaactttgatatgtactaaatcatgccccttgaactttcatccatgttagaattttttactaaaattagacaaaagtccttaaatttaacaatctcaatagttcaggggaatttttaacggccaaaaaagttcagggagcatgatttagtacatgtcaaagttt

SEQ ID NO: 370500 - DNA, 652 bp, Cannabis indica
atctcggactctaactcccaagtagcctcgtcttctctgtggttcttctataagaccttgactactggaatctctctattccttaacacttttagctctctcgccaagattttgacaggttgttgttcataagtcacatcttcctgaaaagggagagcctcattcaataacatgtgacagatctggagtatacttcctcaacatagacacatgaaacacattatgaacatgtcctaactgtcctagtaagtttaatcggtaagcgatctccccaatcctctcgataacctcaaaaggtccaatatacctcggggctagcttacccttcactccaaatctcattacaccacgcataggagtaactttgaaacatcaaattcaacttcccgtcgatggagatcggcatagcttttctgacgactctaaacaaccttaagtcgttcttggattcccttaatcttttcagtggtactagtgataatttggggtccaatagtgacatgctcatctggttctgcccaacacaatggcgatctgcatggtctcccatataaagcctcataaggagccatacctatactggcttggtagctattattgtatgtgaattccacgagtgacaagtgttctccccaactacctccaaaatcca

SEQ ID NO: 370501 - DNA, 536 bp, Cannabis indica
aatatgaaataagataatatatttataattttacttaaaattatatttttaagtaaccgtttattataatactactcatttttttactatttttgagtaaattattaataataatattacctaattttatatattggacattttttttcctcacaaacatgccataggacctaataataacttcaacgaaataatatttatttaataaaaaactacagaaaaatcacatatgcatatatatatatatactagcaaaaaactacgtgcgaggcacgtatattaaattttatgctaggttttttctatgttatttgaaagtgagattattattgaatactgaatgcaatatattagtgtttaagaaagcttaatgatttaaatatattcttaaactattacttaaatgggggtaagataaaaagaaaattaaaaaagtatagattgcagaacgtaataatcgtaataatatgatcacagaataaacaaagaataatataaaatgtttatttaaagctaatacatatatgtatatatga

SEQ ID NO: 370502 - DNA, 785 bp, Cannabis indica
aaatattaaattaaaatttatatttagcgttatctaaattagtaattttaattgaataaatatatatatttaaaataaatagatgaaaatacactttaaataataagctttattataaggatattcgatctccattgttggatctacatagttcttgttttagtgagattcattcccaatagattggcgttcatttacaatctagcagcgtagaatctcgaaagacaagtattattgtaagtgttttattcttagtaatgtccatccgaatagtggctaaaaagagtaagacttacaaagtatgaaacaatggtagaagctcatgaataagaatgaccttgactctcgactaaaacgaagcaacgttagattctctttttgatcgactgctctattcaatgaatgatatatttgactctcgcctaatacgaaacactgtatcagtttgtttttgaattggttctaggagcggatccagtatcaaaagcaccgtatcgcatggctctagtggacttgaaagaattaaagatacaactacaagagttattgaatctgggattcattagaccaagctactcaccatggggtgctcctgtattgtttgtgaagaagaaagacgggtctctgcgaatgtgtattgatatccaggagttgaaaaagcttaccattaaaacaagtctcctttacctcaaatcgatgatctctttgatcaactaaaggagaagacagacttttccaagatcgatcttcgctgaggctatcattagctgagaattcgagaggaa

SEQ ID NO: 370503 - DNA, 945 bp, Cannabis indica
aataaaaataatcaaatatttaagtgtctagaacataatcaacttaaatattaattttcttatttaattaaatatatctagaaaaataccaaaaagtctacctagaaattatctatctaaataattcataaactaattactagtttttctaattaaaataatatattttaatctatttattttaattaaatcattaatgaaaattacttgatttaagttgatctaacattaattaataaattaatttcaactttaatctaatttttaaaattaattttttttgaaatatctacatttaaaataaataaatgaaattcaaaattaagtggaaaaatgattattaaaataaaataaaatatattctaaaaattattctaatttaagtgatctgaaattgaaaaattttcaacttaaatataatgttctatttaattaaattcattaaaatagaaataattaagtatcttgaataaaatcaacttaattattaattctaatttaatatttaagaaaatattccaattaaatttggtctaaaattaattttcaacttaaatatattttctaattaattaaattttatgatatagaaacaaataattaagtatcttgaatagaggaaaggtgcctcgaagcctagtgctgccaacatcaatgtcgcaagagcgagccctgagctgccctcaatccaagatgaagctacggaggttttcttagacccgtatgatgaactggaaccggagaaggaagtagttgcagaagtggtaaaatcgactcctaatttgactaattgggcggacgatgcggaggcgatggactttcaggcatctgcacagtttacttggagtaaattgaacttgaatcaagtgaaatcccttgctcccaacttacttttactgaaccaactaaaattggggatcaggtggttgcaaatttagatttgga

SEQ ID NO: 370504 - DNA, 715 bp, Cannabis indica
attgctaaaatgtccacaccatgattttgaaaaatggagattggtaaaatacttttatgatgaattatctccctcaaaccgacaaatggtacaatcaatgcacattggaaattttttgaaatttaaagcataagaggcttgggagtctcttgagaatgtttctgtaaattctcaacggtggaattgccaagatcctagatcaaaagcttccaacacacctaagagaggtggaatttatgatgtcaaagatgacgtagatttaaaaatatcattagcaaatctaactaggagtgttaaagctatgtcattaagtcactccaggaatactcctatccatggagttaattttgttctctatgttatagtacaagtcatactacccagtcgtgcccatcattgcctatataccaagaggcattttctgaagaagcgaatgctctttaaacttatgggaattcatttgatagcccatttgctcagtcctacaatccaaatttttcttggagacaaaaccagcctccaatgaaccaagggcaccaatacaactcacccaatcagagtcatgcccaacctaatatgtctaatcctcaacaacaaagaaaaccatctttagaggatactctacaatagttcatgcaaagcacccaacaatccctgttaaaacttgaaacacaaatgggtcagcttgctactgttgtagttgaaagggaaaagg

SEQ ID NO: 370505 - DNA, 585 bp, Cannabis indica
aaatttatgactaaaagtgaaaaagttgtaactaattatgaactagcattcctacgttgtgactaaaaagtctgtgactaaaagtattagtcataaaaatcacaatttcttgtaattaaatatgtttttaatcaaaatacttgttgtgactaaaattaaattagtgataatttgtatctaaatactatgtttagtcacaagtaaattttttgttatgactaaaggtcacgtttggtcacaaaaaattattattgtgagtaaaaaattatcaataaaagtgacattcttttgtagtgttagaaacctaattgtttatcgagcttttcggaaactaatttaaaattaattatgctaaaggtcgaaagtgtaactagaagtaaagaagacaataatttttatgtagttagggtgttaaagaaccttaatccacaagtcataataaaacattctcaaataacacaaacataactcgaataataaaaaaaaaaactcaagctcctccaagatgttaggagtgtatgtaagcatgtaattatatttattattttatttggaataaataaatacaatgatttattattatat

SEQ ID NO: 370506 - DNA, 756 bp, Cannabis indica
gtcctagtgatcctagatctagacaccgactactgtctgttccaggcccggttacccgaatcctgagtaaagatctaaatcactgtcacgggtctcagtctagttctagttcaggtcccaggtcccatttctgagttttagatcgggatcgagacggggtgcggttctaggtcccgaccctggttctatgtccctagtctagttccatgtttgaatcagagttcaggttcgggttcgggtcccgagtccatgttggggttgggatccgggttcggctcccaattcgggtataggtctaatttggaatccgtgtcctagtccagttacagttctatatctaggtccaatttcagttatgattccaagtccaagtcttagttccagtcccggtcaacttcgagttttggttccaattttgggtcatgaggtactcgtttgggtccacttttgggtttaggactgggttaagtccgggtgtgggttcgggtccttgtcaaggttcgagtctagggctgggtgccaaatctagacaccgactacaggttttatccaagccctaggtgcagatccggatcccaatctcgcgtcctagtctggttccatttctggtgtcgagtcacgagctaggtcctaggttcaagttcgagtctgggtcgggtactagggctcccggtcaacttccagtctatttttccaattttgggtcacagggtacgggttcgggtccactttttgggcttgggactgggttcaggt

SEQ ID NO: 370507 - DNA, 528 bp, Cannabis indica
aaaaaatatatatttagtgtaattaaatttttataccatatatataaaaatttatatttattttttcatatttttgtaaattgaccaaaatattagataatttataatttatctgaaccgtaattattaggttagcgtattaaaatacttttaacccagtccatatccgtacacactgaaactaaaagggaaatttgattttctatacttaaaaaactaaaatattttattcttaaaccaatacattttaaactaacaaaaatatgacacttttctcaaaaccccaaaaatacccctcaaactctcacagcatctctctttctctctctatctcggcatcccacaccccatcggaccccatggtccgaccatcggacctgggactttttttttcattcggtttgagagagacgaagagagagggggggtccagaccatcggaccccatggtccgaccatcggacctgggtccttttttttttttttactttttttgttttcgatttgatggaccggcggtgatgaggg

SEQ ID NO: 370508 - DNA, 714 bp, Cannabis indica
aacgtcataaatactcgaaagataagtattattgtaagtcttttattcttattaacgaccaccccaatagtgactgctaagagtagggcttacaaagtatgatacaatggtggaagctcataagatagaatgaccttgactctcgcctaaacgggacaacgctggattcttatctaataaaatgttgctagaatggtatccattttagatgagttgactactctattcaatgaatgatatatttgactcttgcctagacattgtatcagtttgttggaaaccttaaaaattatttaagatgtgtttattttgtataataacatgtctttattacgtgctaaatgtataataatttctcaatgtgtatgaatttatattgaatcatgttattttctgttattaattgttgtaaattcaattttgaatcttcattgttggtctaacttagtttgttatttttaatgggacaaatcccaaaggattttcatacattagacaaacatagtagtgttaaatctcaacagataagaataatgttgactcttgcctaaacgggtgatcgttggattcttattttaattgaaattatcctttatttttcatcttagttttttcattacgaaattgcttaaaaaaaaaatcattcgatagatggttcataagtcatttgcttatgatgtcattctattttcttctatgaaattgaatggcgca

SEQ ID NO: 370509 - DNA, 551 bp, Cannabis indica
ttccaccacaataattataaactttaaaacttttataatgtaagaattgttccatataataaatcttaaagaaatttaaattattgttttgaaaaaaaattcaaattattaaatacattaaaagcttaaattaaaaataaataaaataaaaaaaaatcatatcttttcaaatgattgaactcaagccattgtacttgatgtaaaataactttaccacttacattatgattatattgttggttgtatagattattgtaggattaaataacttgaatatactgtacttttctagttacaattattgttgagtggaaaataaaatgaattaaaaatcaatagataaatttgacattaaaagttaattaattgaaatttataaatattcatcaagtaaataagtaagaaaaataattaattaaaaattataattaatcatcagataaattaatatatgagttttgttaacaaaaagatagttttcttttagtgatacacgcactccatgagtttgaaacaaaggacaaacctttgacatggtgggaccccgtgtc

SEQ ID NO: 370510 - DNA, 540 bp, Cannabis indica
aaccatgcaacattaaatgttatttctaatctatattaataagtaaatctaattgtattgaaatgagttttatttagggcataaaacccaacacatctaggcctgagaaagtggggcgcacgatatcggagctggagaagaaatcatgcacgccattggagccatctttggcgttaagaaagttggtgtagccatagcggagagagcggccagtctgagagtccctacagactcgaacagagaccatgctctggaaatctttgaaaatatcctttagatggtcttcggtggcgttcgatggaagatcttcaacatcctcaaagacaaatagtatcatcaccaagagagtcacactccctaattggccttttcttagaacacccgggcatagtgcttttcgctatggctgtcagtaccagcatcgaaggtcccaagggtcgcaggatttcctgtacgccgctagaaggggtaacaacaaagttgaacccaaaatcatctaacgcccgggggatgttagaatgtttagatccttcttatagt

SEQ ID NO: 370511 - DNA, 916 bp, Cannabis indica
cggcactgaaatggacgaaaattaagaaaacaaagcgtttggggatcctgccaaaactggctagccgattttactagccggtttgcaccagttcaccccaaaccctccatttcttgctcaattttccaccaaatgccaccaaacttttcagagtacctaaacaatgcatagacaatatattccaaccagtatttcacaaaataaaccaatgaaactcaacttgccattaaagacctaaacttgagtttcaaagctcaagcttgctcaactccacctccaaagctcaaattcaataaccagaacataaaatcaacttaaaattaacctaaaatcagaaccctaagcattactaaccctagcagcccctctttcacaaaattattacatgaaacccatttcaaagcttaaaaacataaagagaaaaggacaagggattacctcaacctcaagaacaccttttattcaccttgattacagaattggagaagagtttggatggtttcctctggtttttggggtggccgaacaaagaaagagagagaaaaagctaaactctctaattttaggtttttcttgatttttcttaaaatgaaaaaggaatttcatagctattcccttgctgaaataaagcttgctaggtgtcacacacctagggcagccacctatccttcaccaaagggaaagactaaaatgccctcaaagttataacataggtatttttcaaaactaagggtaaaatggtcaaattccataacatcgctcaatcttgatattttattttccctaaaaatattttccactaagaaataaggttttaaaattacccatgtgatcaaactagtcatccatcgtattttccgttgtcagcgagcaaaaattacaaaaattgcatatttcacatataagccaaataata

SEQ ID NO: 370512 - DNA, 914 bp, Cannabis indica
ttctcatggttatgtatgttataattatttaagacatcctgcaaaattttaaaaattttagaaaaatttaacatgccgaaaactacgttcaaacagtgtgttgcacgtgtgactattttattttatacgcgtgtaaaatagactgtttgaactttgttttctatattgtaaattattcagaattcctcaaaattttatagtttatcttaaatagctataacgtacatgaatatgaaaaaaaaattagactaaaaaattcttctggatgccgaaacaagtcaagggtgtatcaatgcatcccttttaagggggtgcattgtagaatcaccctttaatttttatctacatataaactttttttttggtggtaagtgattacaatttatgaaaaatgcttatagttaattaattatttgtgataattttttctctttattttttatttatagttttatatacttatgtacacgtgatcatcatccaaaaatcaaaatttagaattttaatatgttattttttctcatttaaaataaaaaaaaaactggctgaattcatatttttagtagtataaatttatgattttatgtattcttcttcatctatgttgagatctatttatttagtctaataattattttcttcaatttttatgtattcttcatttatgttgagatctatttatttagtataataattattttcttcaatttaggtggtataatatatgtgtagtttaatattaaatatggtaaccaaatttttatttgtaagtgaaggcattttaaaattactttaaaattatttttctcttctctccttaattctctaaatttatattttactattattttaataaatttttctaataaaaaaaaaacataaatctataaattgatattttacaattattttaa

SEQ ID NO: 370513 - DNA, 745 bp, Cannabis indica
ttcttggagaacgtataaaccattgatctttttaccattcatcactaccaaagaacctttggtgatccttaagcttttatgcatggaattatatctgtatccttcatatttaagtgcacccagggatataaggttttgtttaagctctgggatatgccttatgcttgtcaacactggtgtaacaccctactagattaggcatattattgtgattttcttaacgatgtgcactcctttgctaatcaaaggttttatgggaaaacatggataatttaaattttctttattaaactttaaacttgattaattaaacactttacttaatttgggatcccgtttgtaaggttacaactgttgtacaaaatatttagttacaaaagttgtcgtccagtgactaacaaaataaagcctgctaccccaaagattgaacactccatgtctatctgtcccgatatgtacaatattcatctgcttgtactcactactgtacaaccttaacttttctttacctacacatataaataataattttgagtcgacaaactcagtaagaaaagcataatcaaaacataaacataaaccagattctaactagacacccatacaccccaattataaattctatcacgcgtcccacgcgtactgagtctgtacaacagtactattgacgatatataagtctatactcggtactctagtcattaccgatatgatagcgtcaatcagtactttgccaaacatatat

SEQ ID NO: 370514 - DNA, 761 bp, Cannabis indica
gttgtacagtcaaagaaatggtaaagcatagaatatatagcacatggccgaaacaggttgagacaaaagacttggaatggtttagaaatttatagatgtaatagaaagtgtttggaaaatagatatacaaatgtacaaatcagatgttttctagatgaggtccctttaaacgggatgctctttgattgtaaatatggtttattggagtaatgaaattaaagctgattcatcaaaaaaaaaaaaaaaaaagtacacacgtgtaacagactgttgaaactttaaactctattttcgacgtgttaaatttttctaaatattttttaaaatttaacaagatgccttaaatatctaaaaatagacaaccaaaaaaagaaaattgaactaaaattttttactagatacaaaaatagataagagtaagttattgcaccatgaatatgttgtcccagtgaaaatttcactccaaatttcaaatgttcagcaacctttaaaaattaactattttgaaaatttgattactgagttacttagaagtgtaacgagtaataaagagataatttaaaccaaaataaagttgtctttaatgcaaaagttgggatcccaaatgaccaaacaataaaaaacaaaataagtcttggtagttgaaatttgtaaaaagtaatgttactacaacacaagagttttttttttttttttatttttaagagagagagagagagagagagagagaagtaattaatttaatttttttatttttttta

SEQ ID NO: 370515 - DNA, 569 bp, Cannabis indica
acttacttgcaatagcttacttgtgataatatttgttaatgtatttaagttttgttatagattacttgtgatactttattttaatttacgtagttactctgttataactaactttatattttttttttgttaatgatgtagatatggctaactcaggttcatgctcagattcagacccaacaacagagtgtcctagggagatacctacacgaggagctactcaaatgaatgaagtatccaagctgacggaccaaggagaaaaacttcctctccaagttaatgataagcgagagtattatggcaaaaactattccaagttagtacccaagctgagacagagttcatgcagtccttctcttccgggaaggacggttgaagacgtatcatattccctgtgatctttcacacacaaaaaaactacttgcaagcgagagtcatgttgaattttcatgtagcagacttcagattctgcgaggaaaggctaaagttgcataaaaatacaatcgatgacttcactttaaatgaccaaagggtgaaacatcattgggcacatgacagacttcaagcag

SEQ ID NO: 370516 - DNA, 897 bp, Cannabis indica
ataatgataattagtaagatcgtatccacaaagattgtatatcaaattttatgtaaaaccaactatttaacaacttaaaattttaagaaaattagtttgtttgaataatgaaactaaaatgaaatggtagatatggaaatatgattagaatatggttacaattgttagaaaattaattccaagaaaagtatcaataaaagagtagacttgaatagttaaatccgcatttgtctaaaactgcccaaattgttccaacatcatttcagcaaaacacacaaacttaactagaatttccaatatgttcattagatttttccgaaattcatggtaagttctgtcatctaattaaatatattcttacattaaatcagatctaagaatacaattcaagcaccgattctcaaagttatgcaaggtagtaaaatattactattctactcactaagaacaatctagaaatatattttttttttatcattcaagtacaaactattagatctagccttttcaataccaaatctagcttaataaactgttattgacactactaaaaaactcggaattcccgtcggtttacactgcggccaagaatcctgacagtccataaaccgtcacctatacgagcgtgcggatactgggtagatagatgacggtcgaaaactgtcgggcaaatagtataggccacagtttaaaaccgttgcctatagtgaacactattggcgacagtttaaaaccgtaaccgtagcctacagtataggctacaggcttagtataggccacggttttaaattgtcacctatagtggtataagcacggttttaaaccgtcgtttattgtaaaattttcagattaattttaaattttgtacttttcaacgacggtttttgcccgtcatta

SEQ ID NO: 370517 - DNA, 668 bp, Cannabis indica
acaacaacggtgtggggtataactcaatgagaaaggttaggagagcctcactctgagacaagagacaagtgagacacaactaagaccaaactgatgtaccttaaagaatttcatggcacgacaaggatgatacatgtatttgagaagtgttgggattagaaaatgctcatgcaacataaatggattcaagatacgatgtaagcaaaggatactacaatcaacttatgatttactttacggataatagtataagtatgtcgaagtatcatcataagaaatgattacgagggaaaaaaaatccaaagagtgttgattttggtcaaaagagctggtttgacaatagaatgaaaatagacctgtcaaaagtaaaagtcagcaagagttgagaatttttttgacaaatattgaaagttttcttcatccaaagggactagtaacagaaatttttggaaggactctctcaagccgacagtaaccaacttattagacacaagtaagttttgtccaattgaaagtgaagaaattagaagaaaagaacaagataggtattgataacatgattgcgcttggatataaaataaaatgcttaaaggaggtattgacttgtgcttaaaggtagtgtgggaagtaagagtcaaatacccctgactaaggaattataaatagtg

SEQ ID NO: 370518 - DNA, 962 bp, Cannabis indica
caaatatcatcttttaattctaactctacaaatatcaaatctatttatttaataattataattaattatcaaataaaattatttaacttatttatctatataatcaattaatttctcttgactccactatagatttagaattacactcttgattacacagaactctctattcaccaagaatagatacgctataaattatccattatttcaatctaaataatcagagatcctctatagaggatttacatcgagtagtgataaatttactgttttatttttttaatgtattttatccttaaaatacttagtaaactaatataattacttaaataagagctcttccatttgtgtctgttaagccaagctctaaggaaatcatcatttcacttctaaataattacaaaagctatagatttcatatctatgaatagcgctcccactcaattgcactaccatgttctcaaaatgtaagtattgggttgatacaagtggtcagctttaacgaacaagtcaaagatgttggacaccacaacacgtgaaaacgtaattactttattattgaaaaagtaattacaccaagacttgaacacttttttttattagaccacaatacaccaaacacttactctttaatttaatcactagacacctttactacacacttgtatataactcacacttttgggacactttgtatttagacacttattaagaacacacacacacttgtgtatagataacttagcacacactaagacttcacttgttttgtgcacccacatccatgagaccaagggtctatttatagtgcctcatggttggttgatgaagcctcttcaatttgctagagaattctagcattgggcttgtcccaaataactagaaacatctagtgactattgtttctaaaaatttctagaaaattattttctactcatttcttacatttatctagacttttc

SEQ ID NO: 370519 - DNA, 527 bp, Cannabis indica
aattaaagtttaacatagtattatataaaaatatgatatataatccaatccaatacaatacaatacaatacaacacaatacggcgttccaaacgaaccctaaatgagattgctagaaacaccccattaatagattgctaaacgtttcaaacgcttttcacaaaaaatacgtccaagtaactctgtaattgtgagattattaaaatctatatgtatatattatattatattatattatatatcatataatataacatccaacacataatatagatattataagatcatattttaatctaatattatattctatgctaaataacaaataatataacaacaattaccatatgtttcctatatagcaatgtaagtgtaaaaaagaaaatgaatgagatccaacattcaattgttgtgtgggaatttaaaatctgcatatattaactgtacgtagttatagtaaccaccaatagtgtcctatgatattaatgttttgaactaactaatattaatgagttttcatatcatcag

SEQ ID NO: 370520 - DNA, 558 bp, Cannabis indica
tcatgcaatactctggatttgtcagctttttgtagacaacaattatgacattttttggtcattaaagaatcctaaagtagaaccctcaagggtcattcgagaatggaagttcaaaaggtatctaggatagcctatagtcctggagaatgcttacgtggccccccactgacacaatcccaaggaatctggcgacttctcccctccgtcagattcaaaaaaggctcacggcaaaaaagtagttacctttttgtacattgcaccactactttgaataactcttaaaatattatttattaaaattatgaatttaaataaataatttatcattaaaatataagatatgataattaattaacttaaaaagttgcattcaatgcagcagattgcgcatattcagtatgtgtcacatttgcaccaaatgccatgtacacagcaaacactgcatatgcagcagatgcctttgatgccatctatgcaacatatgccacctgtgtcttgtaaaacccgcttagttaatttggaaattagcagttaatcttgattaattatgaaattatt

SEQ ID NO: 370521 - DNA, 1009 bp, Cannabis indica
aaataatgtaaaataatttttttaaaaagagaattattcaaattatttgtgctactaatatagtaatgagttatattaaaaaaatcatattattttatgaatgtgtgtgtaaatacattaaattataataaaataaaacaatgaataattgagaatttaaataaaaaaaataaaaagtaaaactagtttaataaaactgtatattaaatatgtaaaaaaaataattatattatatatgtatattgtataataaatatgttcggtcggttttcggtttaatcgtaagttatttaaacgaaagtgatttttttttcttaaaattgtgtttaagacaggctcatttacctcaatatcccgccatcttcttcttcttaccgccgtcaacgtcaaccgatctccggtgtagcagcccatttttctactctaggggaggcggccaagacccaagtcgacggctgtcccaaagcccaagacccaacgtcgatgcctgtgacagtgtgactgtgactggtatcttctcttctcacgtcgagggctgtatggtggctttgaagtttttggactaactagtggttgatttaaggtagtattgctggctttgagttttgtttatgatcacagtgattgaatccccaataaatctcaagggatttatgatgttctcttgcattaaggtttattttttgttcagactctgtatatttatatgtagtgatatgtacattagtagttgtgaagcggctttgctacctgtatgcttggaatggaaattatgctcattttgttagcaaataagttgttaattaaattttgaaattgtgctactaactgtatgcttggagttgtgaaatttgattgaagttcgttgttaacttcggtcgagagttgagcatctttactaatagtacctgttctcttttgccttgtccttgggtggaacaatctgtaatactaagtttttgattgagatgaagtatgctgtcaaactctgtatattcaccaacagtcc

SEQ ID NO: 370522 - DNA, 622 bp, Cannabis indica
tatcatagtccgagccactattttatttgctatctgtacttccacgaccaaaggattgttgtgcgggaagcgagcgtgaatagcatcttcttcagtgaaggttactgttggttcccctacccgtggaatttttggctccctttcttttacgaccaaaactacttccttttgtttgtgttgtaaagttcaggcatacctctcccgagctttgctcgaatctcgagtaatgtgtgggcccccaatgatgacttgtaaatgcccgtccactggtggtggcattagtaggtcttggttgttgtctgcttgggcgacccgctgattctgatcgtccttgacgtactttttcacgtgcgggtttatttttccttatcaggtattcaatttcctgctttaggttgttgcactcatttgtgtcgtggccatagtctccatgaaaatgacaaaatttggacatatcccgcttgcttatgtgctttttcatgggagcaggtttttttgtaagggaccacagattgggttgcttgtaaattgtctctaggtcgtcagttaagatagaaaaggcaatgaatttggaagcattttctttaggggtttgtttggctttgcctacgaactttccctt

SEQ ID NO: 370523 - DNA, 451 bp, Cannabis indica
gaacatgcaattcgcattagggagcccatctggcatgctcgaccgccttttcttgtgcctggaaaaggaaaagctattatgtctgaaataagaggcatgtcaggtgatgatggactttcgagtcttgctcgggcaatcatcttgcatactactccatttttcttttaagcttcttgaccattatgccttatgtttctgatgtctgttttttccaaccatgttgtttttattccatgcagacgctctgaggaagagaattggcaaaagtttcagtgcatctcctccagcaagaagtctaaaggtagtgaggagtcctcttctaaggagaagatgcctgccggggaggtcattgatctttccgaggagctaacggttgcaaacccctctactccgaaagttgccaaggccaaggagtctcaatgagggagttcagtgttggaaatattttacc

SEQ ID NO: 370524 - DNA, 681 bp, Cannabis indica
gagtttttaggacttacacagcacgtgctctaacgtgataagtatacttgttaataaagtgaaacgatacggagactgtattttgaaatggctctaataataataataataataataataataataataataataataataataataataataataataataatagtacttgaccttgaaatatcaaaaattaaacactcaaaagtctttggctccttgttttttttccttaaaatgtaaagctcagtcaccttctttcatttaattagtattatttccatgccacaaaaagtatattattatttacttaggtgagaaataagagaaatgctatttatataaatatttaatatttaggaccataattacgacaacaagctatagtacatgaatgggagaacttatattatgcatatgatatgctccgtaccctcattcacaagttaaacatatatggaatattttttttagataaaattacggttttaatatttaattttaactttcagttgtaaataaatatcgaagtttaatttttggcgataataatgcctaagttatatttctagaattcttgaagtatgagtagacatcatccaatccagaactaatccaatccaattgaaccgaactaatccaatctaatttaattataaaaagttggatatccaattacaattg

SEQ ID NO: 370525 - DNA, 654 bp, Cannabis indica
cactttgtgcttctttactgttttttttgcatggtaggattagaatttcttagttgagcgtcgaatttctaggaaataactctgactgaatttgtcgcgtaatgcgtattatctcccttattagtgtctttgctattttcctttattttgcttccaccttctgcattttttttatttcttttcctctgcttttgctgcctttgggatttttgcacccaatgtttgctaaggaaagtcctttgggtttccatttttggcaaacatccggagggggcctctttccagcagttagaggacccccattcccttttttaacattagggtttggtttggggcctaactgttggattcctgttttttcagaacaaaaatgtctgctcctgcctctggaacgaagtcttctaagaagggggcggccactctggccaccttggaggaagtcatgaagggccctgttgcccaagagaactacactttccatgctaacggctgggaggccgatgagctcctctccaccttgacttgtgctcaccaactagagaagattgtgaccgtggctggtattaagccatccgcgtctggggtctttcaccgcctctctcgggacgaggagacgcccaatcacaactacgggggttttggagcctggagcca

SEQ ID NO: 370526 - DNA, 521 bp, Cannabis indica
tcataaaatgtttaaaattctgttaaaattaaatttttgtaatttttcttttattatttttgtgtatttgtgaaaaataattacatactatcaaatcaattacaatataaaatattttttaattatattaattttattttcttaaaggaattagtcacatttacaaagtgtcactattaatatatatagtatttaatttttcatttttatttatttatttattatacgtaataaaaggtgaacatcaaaaattaaaataattttatgtatacacaaataataattttattatttgaaacaattctcaaatacaaatagtatctgtacatagttatgattatatcaataacagtttcataagtacataagttgaataatatataagaatatttttatttaaagaaatatatttctatttaaagaaataaatttccatttaaggaaataaataaataattgattttatgataaatgaatattttatattcattgaatttggacaaaatcaattatgtaatatt

SEQ ID NO: 370527 - DNA, 761 bp, Cannabis indica
tgcttaaaataaaactaaggcaccacctacgttcaagatcatttgcttgtgcatagtcactcatagtatacataccaaaactcaccctactcactatacgtagtagcacttccctgtctaatacctgtagggggaaaataaaagggtgagctaaaagcccagtaaaaaaatacttatcatacaataccataaaatatatcacatatcattaatgtactaattaagttttagcaatattatacaccttattttataaccataaccaaatattggtacacatggaaacctttatcatataggtccatactaattgttcacaccatacatatgtacaaagatcataactccaatatcatactcataatataatcatatcaatactataaaataataatatcattaccataacattggcatatcatagccattacatacataactcgggcctaacttggccttgcaacatcccgggcctaatatgcccatataataacctgggaatatgcaaccctactattgtaacaggatagggtatctctacattcaacaacaagatcgccgtatcatactgcaccattaaaatctcatacacgactcagtataatgcatggtaggatatctctacattcaacgaccttatcgtgttttatatcccactatggccccccactttacctgagacgttagcatacaacatacaacatgcaacatacagatacaacatatacaagctataaaaaccataatatatatcaattcac

SEQ ID NO: 370528 - DNA, 498 bp, Cannabis indica
aaaacgatttttgaatcaaaaatcatggccgagaaacaaggttgcacgaagccttagatggcgaggaagctcggcgtgagaagctcttcagatagggttgtggccgagaaaactcggtcagctcttgtctgaagaggcgtgctgtccgagtgacgcctcgggtccgcgcgcgcacacgtgtgcacccgatttcagatattttcatccaaattcaaaaaatcataactaattcattaaaaatccgaattgggttctgcaaaagcataaatttattaattttttgtctactttccagtaaaaatatttccagaacgaaataaaaatatttttacaacatataatgcgatatccaaacaatcatctaataagcacttaaataatcatgaaaccatccaaatcaacacaaaacatcgttttaattgatatttaatgaaagtaaatcattaccatggctgaggccagttgttggaatatgttttatcaggatctagatttact

SEQ ID NO: 370529 - DNA, 594 bp, Cannabis indica
gtatgttctgatgaaaactgcctgaaagtcgaagaccaaagcttgaaagtcgacttacaaccttgcttcccttggtgttactgttgaacctgctgttgcttctgcttctacagaaatggctgaattcaacttgtgtttggggagaatggagacaaatcaagctttacttctcaggaagatggacaacatcatgaaatacttccgacccaatgatgatgaataagtggttcaattctctatctcactacaagaaaggggaccttttatcccacttttttagttaacaaaaataaaaaatgggataaaagatatattgagactttctatcccacttttagatttggagcctcaaatatggagaaaaaaattttttagacaagggccctgtttggtagaacgttgaaaaaaaaatatcaaaggtaaaaaaataagttcaagattcgatttttatgggttagccaaacggggattaagatttttagggaaactttttatcccggttattagttaaaaaccgggataaaaagtgtttccctaaaaacactttcatctcgcgaaatcgcatatatctctgctctaacctcaacagaaacc

SEQ ID NO: 370530 - DNA, 1201 bp, Cannabis indica
attcaaggcatctaacacaaagtcgcgtatgaagctctaatcgttggactaaaactagcccaggagatgaaggccgaacacattaaaatctgcagtgattcacagctggtggtaaatcatgcatcaggcgaatacgaggctcggggagaaaagatgatagcatatctgagaaaaatacacgatttgctcgcataattcaaaagctacggtctcagacaaattccaagagaagaaaatacaactgtagacgcgttagctcgattggcaagtagcgctgtccgtgacaaggaaaacttggtccctatccggctccttgaagagcctagcatcactggcacggaagaaattaaaatgattgatacatccccaaactggattacgcccatagcagcctacctcaactgtggggaactcccagataaccgaaatgaagctcagaaaatgagaatgaaggcagaacggtatatcatagtagagggagtcatgtacagaagaggattctcgatgccgttactcagatgtgtcactcaagacgaagctgcacgactcctatctgaggtgcaggacggattctacggaaatcacgccgccggacagagcttatccaagaaaattctaaggaaaggttacttctggccaacgaagattgaagattcgagagcctatgttaagaagtgcgacaaatgccagagattttcaaagataccatgagctccgcccaacgagctgacatagatgcagagtccgtgaccctttgccatttggggaattgacctgatcggacaattacctaaaggtaaaggtggagtgcagtacgcagtagtagcagttgactaatttactaaatggactgaagtcgaaccacttgcaaccattacatcaaagaaagttcaagactttattgtgaagaacatcatacgccaatttggactaccgtacaaaatagtctcagacaatggcaaacagttcgacagccaatccttcactgatttctatgcgaaccatggcatcatcaaaagtttctctgcgctggcacatcctcaagcaaatggtcaagttgaaacagtcaacaaaaccttgaaggatacactacagaagaaacttgaagatgccaaaggaaactggccagaggaacttcccaaagttctatggtcacaacagaaaaaacagcaacggtcagacaccatttgcaatggcttac

SEQ ID NO: 370531 - DNA, 955 bp, Cannabis indica
ggaaggagtcattatattctggtgcaatcaatgtaaggtttcttaaactttatatgtatttatttcattgttttagaaattcatattaggatgttaatgaaacctacttgttagtaaatctagatcctggtaaaataattccaactccttggtatgaagcaagacgccacaaacggtggtggaaattcgtttgataagtcaggttgaatgaaaatatcctgatttttcaaagtgtttgcaaggctttatatagccaacttacaaccaagaaaaaaggaaactaaaagaaagacaactttccaaataaaacaaagacaaaataaaggaaacaaaaataaaaagaaaagctgccaattgccttggaaaacatgatcatcttaatttgggactaaattgagtcaactttgatgagaaacacaaatttttgctctccttcagtgttgaccacggtctcctcttgtttcaaaattctattgactaagttgttgtgttcttctttgaatttcttggctctagccctcgtcaccgagcccacaggagctttacttgtttcttcagccttagtgttctcatcattcccccatcttgaaaaggatttgtcctcaaatcttcacttgcatcaaaagggctcaaatcagaaacattaaaagtagcactaacattatattctccaggtaaattgagtcagtaggcagtgtcattaatcctttcaagcacttgaaacagaccatctccgcgaggaagcaattcggtgttggaataattttacctagatctagatttactgccatgtatttttttaacatcctaatatgaatttctaaaacaatgtaaataaacacatataaaagttatgagaaaccttacagtgggtgcagcagaattaaatgactccttccactcagatctctcacccttgtatcctttctgtagcagagtatcaccaagatctgag

SEQ ID NO: 370532 - DNA, 456 bp, Cannabis indica
aacttaaaaaatgagcttatggagctctccttttataggtgaaggaggcccacaaaaataggaaaaatacaaattagatgtttctaaccgtagatggtgatctaacagtgaaaattagctcttattggtgatagccatttttcaaagcccggtgggtcccactgcagataattttgagtttatttttataactcccttggggtgaaatttgaggacgatatctttagaattatgattgaagtgtgagacatgatccgtaattttgaattgatcatctgtatcacgtggtgtgacagtcagtagtcccgtaatccataagggaaaatactgagtaagctgtgcaatcccacattgcctagggaaggtaaagtgtgatgattatgtgactgtgtaagtacgggactacacagttgaagaggacttaaatggattgattgatactacctatattaacaa

SEQ ID NO: 370533 - DNA, 798 bp, Cannabis indica
atatatatatatatataaaacaggagagataaaaagatcaatgttcaaacagctggagtcccaggctctggatttggtcttcttagccgactggagcaggaggatctatgttcgaacaggagaagcatcagcagcctggtcagaagcttggccggaagttgaagcagccacctctttcccaccatagacaacttgggccgcgcagtactcgaggtacatgtccttggcgtcgcccaagtagtcgaagttggtatgtggattagccttccgaaaatcaatgaagagctcgagaccggcagtctctaaagcatcgactttctccttcaagcagtccgcctcggccgcctgagcatccttatcttccttcacctgaagaaggacctgccgcagagaagtcctctcatcctgaagacaatcaacctcagtagataacgtctcgatggtttcctcaaatagatcagcagcctcgaggtccttggtcagcacggtgatctttttctcagcggcaaacagcttcttgttggcctcacccaactcatggcgaacagctgcagtctccgccctggcctcctcagcttccttctggccaagtcctcctccgccctcaaggtgtcaaacagagccatactcttggaagtagcagatttagcccgggagtaggtataagccaacttcaaaccggcctgcataaaggaaaaggtcagcatatgaggctaagtatgaaaagctaaaagggaagtgtcgaaaaaaaaagactaatcctggtaagctcctgcaagactccgcccaccaacacat

SEQ ID NO: 370534 - DNA, 512 bp, Cannabis indica
acaaagcaggtgtccaattagttatacaaggattgcattcattgtcaatccgtttttacacattgaattacaataattaactaaacaacgttaacattaataaatgaacggcagttactaagttcatcaacgtatgcgtcttctaaatctgcgagttggctgttcatattctggtgataaactcgcgggttcatcgattatgctcgggatgtctgcgtccttaggtagtcgcctcctgtggacatcgcatgacgggctgataggacctagacatacaagtctatattacattataaaggctgcagggttcttaggaccaactcgcatttatagagaatcgttctcttggtttatacacggacacggggaggatgctcgcatatagttcgatatatgcgagctactctctagtctcggatgcgattacacttcggtcatgctcgccacctctcgctgattctatcttaagtgaggtttaaaacttcgaggagtccctcagggacatctcagct

SEQ ID NO: 370535 - DNA, 649 bp, Cannabis indica
caggattttagatttctttttaatctaagatcaactagtgatattgacttggaaagatacaacgataagtttataatatcttgactaagttcgatatcggtctagtccaatgtatactccatacattcgaaactagtatactttaccattgtattggaaagaacataacacttactgcaagtgtaagtacacatcatcgctgattatcacatcagtgtaaatccaaaatactgatgaaacatcgacttagtcttttgaatcatataatcacaatcacattccactgtgctgacaatactgtaattgtgaatccctcccctgcgtcttcgactcgtcgtcggcgggtggcgtgggtggtgaggatcgtggctggcatgtggcgtgggtgataaggtggtcgttctcttctctggtggttgtgtggaatggaatggaggctgttgtgaagttttttagggttctgtctgaatgtaaatgagtaaatggtatttactttttagggttatttctttatttaattattaatttaatatatatataaataaagttaaaaacagtactaaaaaaaattaacaaatatataatatatttatgaaacgggtgatcaatgtgatcaatgaccctctaatagatgatctacattgaaaag

SEQ ID NO: 370536 - DNA, 616 bp, Cannabis indica
cgacctagaacttgtgtattttgaaatgtataatttgaaaagtaaattttacaaagtttgaaaacgggatcccggaatttgtaagtattatattatattacaaagtttaataattaaagcaaaagttttaatttaacacgtttttcgaaaaatatctttgattagcaaagattgcacaataattgaaaaagcactgcagcgtgccttggcattagggcgttacagatctgatccaagatctgataagtatccgaatatttcggatcagtaatgatccgtcgaataggatcaccgacccaaattaatggatctttttgccatgcctacaaatgatctacactaaaaagagataaatttaccattctacccttcaatgtattttatccttaaaacacttagctacttataaatgatatttcagtaaactaatataattactgaaatgagatctcaattagttatctctactcagccaagctcgaaggaaatcatcgtttcacttctaaatacttataaaagtatagatttcatatctatgattagcgctcccactcaattgactacactgttcctaagagtaaatatctagccagaaccatggttagcttccacgaac

SEQ ID NO: 370537 - DNA, 829 bp, Cannabis indica
ttttgattaaatggataattgttgtgagttgatggttggattatgttgtgttggtgatattggattgatctggaggtgttgggcaggtgtggttctgatttggttcgagtttggggacaaaactctaggctactaccttgccagaaccggtcgaccggttggttctagtgtatcagaaccggtcgaccgattgccatcaggggtgagttttcaattttttttctccagactggttttcgggctcggggtggttttcggtgtttaatttggaatgtttagaagttgtaaagcctaacctagaactattgaagataaggattgtccggttttaggaattaagtttattccgaagattttgattaaagtatttattgagtgttgttgtcgtgacataggacccgggattgtcaagctttgattccatttagacaggatgcacgctaaacttctggactgaggtaagaaaagtattaaatactgtataaggttaatattatgatggttacagtatcgattaagattggaatttcggtatatgttgttgtgatttaatcttaatcgaggttaacattatgtattggttgtggctcgattatgaccgagggaaataataggaaacgattattatcgttgtgactcaattatgatcgagggaaatgataggaaacgattatcatcgttgagactcgattataatcgagggtaatgatatgaaccgattattatcgttgtgactcgattatgatcgagtaaaagatacggtcattaccgttatgagtaattactcctgaaaccgcggataggtttcttacttatcgtttgctgtatc

SEQ ID NO: 370538 - DNA, 515 bp, Cannabis indica
agttgagataatactacttgtaagatttagttaattgattttaattaatcaattataattctaaaattagactatgtcttattcttgaatttcactaagcaagggcttaattgtgaagaaaaaagattttagagtttattaattaagtaagagactttattaagtctaattaataaataaattaaatgaaaattttatttgattattaattataattattaaataaatagttttgacatttaaatgattaaaattggaaaatatggcatttgtgaaagaaaagataaattgtttaataaaatggcaaaattctaatttagtggggcccatcttatggccggtgacttaagggtaattctagcccatttttatcattttttaatgtcatataatttaaatctatccctaggagaaatcctataaaaggaataagatagttctcattctatccaacttaagtttacctagttttcattctctgtcaaacaactagaaaatttgagaacctccttcta

SEQ ID NO: 370539 - DNA, 673 bp, Cannabis indica
ctaaaataaaattaacatatgtggcttggcacgtaacatctatctagtctaaatacatagaagaatgcatcttataaatacaaaacaacgacttgttttgttcgtttgttttctgttgtttttgtttttttgttttctaaatatattttcttttatttttttatatatattatttttttcagtaatttttttttactaactattaacattttatggtgctcaatgtcatacagatatggtatccaataattgattagtaattttttttatcttttgtgtttttttcttttattttttataaataatcatcgtaatatttttttttatataattttttgtactattcttattatgtggcaccctaaaatgttcaataccaaactaattcatatacacaattgattaacaattttttttatcttttgtgtttttttttctttttctctataattcatataccaaactaattagtaagcagtttttaaaattatttattaaatttaaatttataaaagttgatattgaaatgaactaataagggtatgctatcttttgtggtgcttgacactctaatgtgtctaacatttttgtaattattatgtacatatgtttattaacttcgattaaaattttaattttttatattattataaataaatttgtaagaacatct

SEQ ID NO: 370540 - DNA, 810 bp, Cannabis indica
tcaacctattccaacataatttaactccagaaaacagaattaaacaacaacaacaactacagcaacaaaattcatcattttaccttgaaaaccaaagttttgggttcaaaactccatactaagttaaaattaacaaaccacaacaaaatcttgcttgaatcaacatattaaaacataattaagcttcagaaatcactaacaaaccaaaacaacagccacagccacaaattctcaagcatgcaataatttattttttcttaaacttcaagaaaacaaagaaaagcttgaacaaaggttacctccacttgaattactctaagaattgctaaaaatacttgaattgcaaagaaaattcccagccctagcagccccaatcaaaaccgaaagagagagagagagctcttgagagaaagaacttcttaatttcccaattttctaatttttgaataaatgaagtaattgccttgattacttgatatactcagccccataataacataaaaaatctgattattgacttaaaataaagtccactaaaggacaaaacataaatgggcaaaaagaccattttgtccctcccccactaaaagggttagaaagcactcaagggtatttttgggaaactctaaattcccgaccaatcccgacattcccaatctctataaaccgtaccactgcactaaaatactaagttgtgattctactgagccatacaccgcgtttcatgttgccgggcactgaaaatgcaaaattatgaaatttcactatatgacataaaaatgcattttgaattcaaataaaacaacataa

SEQ ID NO: 370541 - DNA, 969 bp, Cannabis indica
ttaaaaaataaataaataaaaatctatatatatatttatgtttatacacgataccaaaaatatttttctatcaaatatatttaactctacctcaatttttttttatatctttcaactgatagaaaaacctcagtcgtataatagccatttaaagttcgtttggtacatcatattatactgtattgtataatatagtattatattaaattatcttttatataatatttttatgtaaaattaaatgtagtattcgtttttatgagtatatatataaatataaaatattttagtataattataaaagtttaagataatattatattacagtataatatatgattcaatttaatacaatataatattatttaatacgacgtactaaatgagctacttaaagtaaaaaaaatgagagatggttttgaattagattataaaattaaatatacgaagtcaaattttcttaataaacccattaataggtaatactatttaaagtgttctcatttgtatatatctttatatctataatgtgacgatctaacggtttttgttagtttaacagaatataagaatatttcgttaaatttaacggtattagtagagttagttttacaaatatatataaatattaatattatttattttacattaatttaaatatatataaatattaatagtatttgttttagattaattaaacttttactaattttagattaattatttaaatatataagtggtaatattattattttttttattgttatttttaatattaggagtatgatgaattttaatattttaaaattttaaatttatttttcttaaatttttaaaattttcacatataattttttataaaaaaaaataaaaattaataagtagtttttttaatttataaaattttacaaatacataaaaaataaaaaaaaaataaaaaatatctattctatataaatgtgactatat

SEQ ID NO: 370542 - DNA, 536 bp, Cannabis indica
tttttatttttaaaaataaatttgatttgttaattagataaaaagttggagaatggtaactaatcagtatataatttgagatacatttttagttttttccaaaacttaattgtatacattttaataataaattagttatttttatgttatattataatatcttattatttaaaatacatttgagtaatctccaagtttattttattgtagaaaagagtagaaactaattacaaattaagttttctttaaattattaaaataatttaatggtagctaaatagtatataattggtatcaaaggtaccttaatagtttattttatttttgaaataaggaaaaaatatatgttcccacatcttaaaacgatcacattaaagagtagatcacaatgataattttttaacttaagcaagcaacaatatagtcagaaaataattttacgaattttgttacgttttggttaactaaatgaaaaacagaaaaatatatatttgctcatcgtcaccacaattaaaagtaactatttagttgcttat

SEQ ID NO: 370543 - DNA, 724 bp, Cannabis indica
ggagataaaacttagctgtatacttatgtgatttctgagcctgaaaccaactatcatattattgaagtgcccaacataaaattgcaggagcattcctaattggagtaccatgttttttcttgttaagttcagtccaaatgcaccaagccatagtaatgaagacacaaaactgatgtggggaaaatactgacatgagataattaagaatgtcgatgatcttccaagggagactaggtttgacgaaatttcaaaaatctgaaagcttccaaacttgaattgagagagggcaaaggaaaatagcatgtaaaacatcgtcaaattgccagccacaaaaaagcagcttccagaaaccggaacatgatgagctagaagcgctgagccagtgggaagaatatcatgacacacacgccaagcgaagaccttaattttctgggaatttttagaggccacaaagcacgccaccactttgctaaaggaagtaacgaagaagaatttgaattgggtatagagttcattgctagggaatatccactcgactgtgtagactccacttttttcataatgccacgtgacctgtatacagaaaaaatattaataagtataaatgaaataatatatcatataaagaataaccttaactaataaaccgttaatagacaaaactcagatcagaaattatagttagttggaatattaatggaatattacacttaaatcatttttc

SEQ ID NO: 370544 - DNA, 639 bp, Cannabis indica
tgacgataacccgccacaggctgcccaggctgcccaagccgatcaggaagcccagacttgggagactaggtttgctaaaatgcaggccaagatagaggagcaagatcttgagatacagagattgaggcagtagggggctcctgcagtgcctgtgccagaagttccagtggcacccgcccctgttgcccaggccgagatagtggtagcggcaaacagattggaacccttgtatgaaaggttccgaaaataagcacctccaatttttctgggaggtccagatgtcatgaaagccgagcaatggctaacggtgatatccaagatactaaattttatgggtgtcaccggaaatgatggggtggtgtatgccaccttccagttccaagaagacgctctagtctggtgggacatggtgtctcagattcatgatgtcaccaccatgacctgggaaaggttcgaggaactcttcaacgccaagtattataacgaggcagttagaagtgccaagaggaaagagttcacccacctgacccaacgggaaaatataagcgtgactaagtataccacccaattcgatcagtttgcgaggttggcctcgggaatagtgccaaccaatttcagcaagaaggagaagtatctgga

SEQ ID NO: 370545 - DNA, 530 bp, Cannabis indica
tgttggcaagattaccccctcatgcggcctcaggcaaggtgaccccttatctccctatctctttatctgggcggccgaaattctatctaggattctggaaaacgcccaaaatttggggattattaaggggatcaggctgagtagggggggccctcttctttctcacattttttttgctgatgatctcattctagttggaaaagccaatgtggaggaggccaaggggttctgggactgtctggagaaattctgctcttggtcgggacaaaaagtgaataaattgaagtcctctattttctttagtaagaatactccaagtaatatgaaacagaggataagggagctgttggggttaagttcgccagagggtaatgttaattatttagggcttcctctattcagagcaaaacataaggatgcagattttaactttattctggataacctgaccaccaaactgcaggttggaaagccaaaactctttctaaagcggggcgtgcaactcttatcaagtcggtgggtttagctct

SEQ ID NO: 370546 - DNA, 1264 bp, Cannabis indica
cacttttttcttaagaaattttgtattttgtgttttgggattttggattttagatgagtggtttataactcttgttggttttataattatgggttgtttcgttgatcagggaacataggttagtgtggaaatttttgttcttattttgtgaaaaatggggtagtataattgttggttttaacaattttcaatgtcttggcttggatataggggttttagtctgtctgagtattagagagacatgaaatggggaatgggactgcatttttagctttttttttttgatcaagaataataatctttctattaatcaaacaagccatttacaaccaaatagggactaagcatttttagctttattgatgaaagatttcattgaaagattggagcttgaatgggctttgatttgtgaatttgtcttgcagatattggatcagggaatctgtattttcaaggggaagaaggttatagaaaaaatgaggagttacaaatggctcaatgttcacgagaggcattgactcagctttcgaagcaggtagagtcaaggctgcatggaaggtatgtattacaatccatgaactttgattatataatgtaagtatataactaccaaaactggagttgaggttgacaaacggcattgtggttgtggaaaatcttcttgattttctgttacctgtactctgagcattttagctgcgtttcaaatgatttgagcttcgcgactagtcaattttcttgtggcactttgctcctataaagctgttgttgaaatgcattagctcaaaattataaaaattggacaactatttaattagaatgtttgctgtttcaatggctaaactccaatgggctatttaagtgtcgtcaaatattcttttattttctaccattaggaaaaatagttcctattattttgtcttcttatagaaaattaatggctttctctgccaggacgtctgtttttgatggaatttccaagcttatgtcacaactcaacttgatggtaaggtttatgttcttctgcataacagattgtagatgctcttcaacaagtgcttgttgatgctttgcgtgtcccttgaacttgttaatcagcatatcgtggtctttactttgtgtttgatttttttttctttttgcaggtttgatttttccgaattctcacgcttctattgaatttgttttctttctttgtccgtgaaaatggtcaaagaacatcagtagtgttccccatctatgttacatttttcaattgtttttg

SEQ ID NO: 370547 - DNA, 805 bp, Cannabis indica
ggtttgcaacaggtttgggtgcctaagtttttgccagccgagtgtgataggaggatttctggaattggtaataaggttggtcatttttgaatgatgggaaaagaattttgtgtctttacccagatttgagttgacaaacccattggtctctaacgttattgtattggggtgactcatgggtttgtgggccacatcaagacttttggataaagtggcaagtgggcctatggagaggttgattgatgtggtgggcctcagaagttggatttaaaggaggaagttgttggttttaagaggggtaatgggccgtgtgttttggttgggcttgtgacttctcccaaccgtgtcgttaggcctggggttggaagtagtcaagagtttatttatggaggtgattttgtgagcccaatcaagtcatttattgaggttcggtttggtgggtttcctggagaagaagtaacctttatggggagagatgggcctttagtaaataaaggcacttctatggataatttatggggccataaagccgaacctaggcaagatgaggatataggctttatcaaagttttttcaagtcccaaggaaagttgctctactgatcttaaaaattttgggaagatggacttgtttgaataaaaagctgggaggtgtcactggtgtgaagcccacctcggatactaatgagagaactacgccatttaagaaaaggaagtttgaaggttcggcttcgctttgttctcgacctcataaaatttctagaaggctcccagaagttgttagagatttttcagtgggatacaaa

SEQ ID NO: 370548 - DNA, 1303 bp, Cannabis indica
gcatgttgagaagaatgtttgtgatagtttattgggcacaatattggacaatgagaaatccaaggacactaccaatgcaagacacgatttaaagaagctaggcgtcagagaatcgttgtggatttatgaagatgagagggggaagctgttgaaacctcatgcaccttacgtgcttaaacctgatgacaggatccaattttgtaaatttattaaggatgtgaaatttcccgatggcttttgttcgaatttgaaaaaaaaagtaaatgaaaatttaacaaatgtcatcggattgaagtcacacgactgccatgtaataatgcaacgattactgtctgttggtgttcgcaagtttctcccgaacgctatatcgaccaccatctctgaactgtgcaacttttttaggcaaatttgttcaaggactataaatgttaaagacatggaggttgctcaacaagatcttattttaatcttgtgtaaaatggagtccatatttcctcctgcattttttgacataatgattcatttggtccttcatttgcctgaagaagcaattttgggtggacctgtttttatgaggtggatgtatccatttgaaagatacatgaaaaaattgaagaactacgtaggaaataaagcacgtcctgaagggtcgatagcagaaagttacgttgttgatgaggctttgacattttgttcaatgtatttcaagggggttgaaacaaggtttaaccgtcttgatcgtaatgaagatgaggttgtcccacgaaagctttctgtgtttcaatctcaatgtcgacccattacaaaaggcaatctccggccacttgatcgcgcatctcgtgaacaagtagagtggtatatattcaacaattcacctgaaattcaagcttacttagagtgagtttttttttttattaatttttctttttttttcaccttaaatttcaatcaatcaattcaaatctatttgattttacagtgaacacttggaagtgatccgacaaaattacccgaatggagatcataatgttctacacaaaaaacattttcgtccgtggtttcacaagaaggtgaatatatatgtgtagtaaaggtttattatcttaagtggtgtttgtcattttctaatgaggtacttatttttatagatatatgacttgcacaagtctggatcattagagaatggcaaagagttgctagctttagcatccgggtctgatcacttaggtacttactatgaaggttgtattgtgaatggagttcgatttatggccacctaacgagatgagaagaggagcacaca

SEQ ID NO: 370549 - DNA, 796 bp, Cannabis indica
aagaagaggtagaaaagctacacaacaacattttcataattgaagctttctacccggcctgggttgctaatcctatactagtacccaagccgaacaaaaaacggcaagtttgtattgacttcaccgacctcaacaaggcgtgcccaaaagacttctttccacttccgaggatagattaacttgtggatgcaatagcagggcacgagattttaagcttcgtggacgcctattttgggtacaatcaaatcaagatgcatccaccagaccaagaaaatacaagtttccgaacagatatgggtctctactgttataaagtcatgccatttggtctcaagaatgccggaactacataccaaagattggtaaataaaatgttcaagaaccagatcagatgaaatatggaagtatacgtggatgacatgctcgtcaaatccaggaaggctggggggcatatagatgacctgggcgaatgcttcaaagtcctcaggaagtacaacatgaaactcaatcccctaaagtgctcctttggagttagcttgggtaagtttttgggctttatcgttaatgctcgaggaattgaagccaatccagagaaaattcaagccctcctggatatgaaatcgctaacaaaaaccaaggaagttcaaagttagactggtcagattgccacactcaacaaatttatttcaaagtcagcggacaagtgtgttatattcttcagcatcctgcgaggaaataagcaatttgaatggacggaggaatgcaaaaaagcattttaagagctaaaaatgcaact

SEQ ID NO: 370550 - DNA, 660 bp, Cannabis indica
ttcttacgataagtagcacattgatggaaaagaaaaaatagaattcttactacaagaatcacattttaattacttataacaaattataattttatgattaaattttatatttttttggtaatgtacttacgaatatataatagtgtattttttaattaatcacaatttttttttttcacttttataacaaattttgtagtaatgaaaataaaaataataatagtgatatgtcattctttgataattcacaatggtaaagtatcatcacaaagatcgaacaaaacacaacaacaaaattaatgaatcaacatgaagctatatttagaaagctacaatgtaattgaatttgtgtgtaattggaggtgtttgtctaactatgtaattacattataactgtgtaattggaagtaattgaggggttccaattacactctccaattctcatggcccccgtgagaattgaatgtgtaattacactgtgtaattactaaaaactttccatattaaacattagctactaaaaaaaattatttttcctatgtaattactaactattttgtccaaacaagatattaggaatctatatgtaattaccacctcatatccaaacacaccttgtaatttaaatatagtataattactaaactgtgtaattaccta

SEQ ID NO: 370551 - DNA, 652 bp, Cannabis indica
tttgattaattgattaatcaaagtggtatttttcaacttaccccttttaaatttaaactaaaaaaaaagaaaacctactttatcaaagagatacatggtggttgattttaagggtgttcataaatagttgatccaattcaatccgtacgatccaatccaattcacaaactgcggatgtctgcacttgtgggaattgaaaaattcaaaattcgcacttgtgcggattaaatgtttttaatatgtaaaagtaactattcaattcaatttacacatatttaataaaaaatttaaaaattatatatactaataatattttatgtaaagaaaataataaattgaaaaatacgaacacatataatacaaatatattttaaaacttaatagatcaaatgtatatttcattttattatatatatatataaatatatttttctacatacaatttaaaacaaaattaaaaatttctttacacatataattttccctccttttgaatttattatctattattttatttagttgctagttatgtgaaaaaaaaaatatattttttcataaatattaaataacttaatattaaaaagtaaccaacctaaaataaccgattcaatctacacttttgcgcattgaattggatttgatttgagctatt

SEQ ID NO: 370552 - DNA, 502 bp, Cannabis indica
agctaaactcaaaattcaaacacaaagcacaaccctaaaatttcctaaaatcatgctagaagcaattcaaaccatcctactaacacaatccttcaacaaaacatcaacaattacatagttctcaaacacatgcaatcaaaagccatgacttcaccaaatcagaattcattttctttttttttaaaaaaaaaacaaaaaatagatttaagggttaccaagattcacaagctttcaattatgctaatccacaccaagttccttagcttcctcaagaacaaattaattttatttgagaatttttgaagagaaagtgaaggaaagaggggggaggggggcgagcggtcaaggctaaggataactagaaaatgagtttcaaatttctcaaaaattgcatttgttgaaaatgtcttagttggtcaaatgaccaaaatgtctttagggccaataaaactacatatgcacacatcaaaggcaaaattaatcataaatcatacacacaata

SEQ ID NO: 370553 - DNA, 757 bp, Cannabis indica
atagtgtctggaggggcactggaagaagccttcgaaggggtaatcatctgggaagaagttggaggaaggggagcatcaggagtgtgagctccggcaagggtggccaaaattgcctccatggaattagctgctgcaacaaaagaaaagagttaagtgttagaatatctgtgaaagcagtaaacacttaaaaaagcaatcaagctagtcctaccctgactctctaattcggccctagcaaagttccgaatcttaatgctggctgcatcatccccgagatagctgtccgagggccggaaccagctagaagaaagataagccgaagggtccaggggaacgggctccggaggtccagaacccatccgggaccgacctaaataatctcctaagttggagaaataatagtcctttgcatgatccccccaccgggtcgaaggcatcctaaacctaaggagacgttcatcgaaccctacaggcctaaggctggcatattcgctaacaggagggacataatgtatcgctaaaggggacttaccagagccggaagtgctggcgtcaggagcccctgtattcggcacctggacgatgggccttggcctgggagccctcttctcaacctgactcccaatgcgaagggatctcccggcagccgtttggctcctcctctcgaccgggctcccaacgcgaaggggcctcctggaagccgcctgggccttagtataagccttctcctgggccttccggtagagataatcttggt

SEQ ID NO: 370554 - DNA, 503 bp, Cannabis indica
gcatagtataattttctagttacatcgagcgaccatgtgcgaccatgtacgacctacatggtcgcatagtgtagttttctagttacactgagcgaccatgtgcgacctacatggtcgcgcatggtcgcatagtattttttttgttttcactaaacgaccatatgcgaccaaaggcgaccaaaattggtcgcacatggtcgcatatcacaggtcatcttcaacctcgaactggagttattttcacaccaattttttttagaataacctaaatttatgctttatattgttatataactgtaaaataacaaatacccaatcattaaacttgagagtaaagttagttactaacctttacaattattggatggaattttcacttcttctttaagggtttcttgaattttttaggtcaaatgtgtatgaataccattgaagaagaaatacttgagtagtgctatgaagatgaagataaaaactcatatggtaatgaagaactcaattga

SEQ ID NO: 370555 - DNA, 847 bp, Cannabis indica
ctaaaaacacctaaagcatcgaactaagtgtacaatccacttaaaaactaaaagtaaaaataaaagtgaaataaaataaaataaaataaaaataaagcaagggataggaaaaatgtgttttttaaaaattttaaaagcatcaaaattatatttccaattttaatttaaaattagaaaaatggaaaataaaattcaattaccaaacacactttcaaaagtcattactcatttctataattttgattaaaaaataaaaattttaaaattctaatataactaattttatatttgtttatatgtgcactaacttattttaattgcatgcgcgcacttttattatttaactaattaaaataaaaaaaaaatactttcataagtgagcaaaaataatgttctcatctaaagaattctctattattattactattattatccacgtcacaggagcaaaatgattaacttttgtgggtacctcttggtaaatgttgtgtagtgtagtagtttgaattgtttctgtattggttgttgggtcaagtacttgtgtactcttctagcccctctcttttgctaccggttttcatcttaccatgtgcatgtgttcgaagtagttcggaccctcattattattttttcctattattaatataactttggctaattagtaaattttttttctcgaattttgacatataccaaatcatgctttctgaatttttttggtcgttaaaaattccacttgaactattaagattgttcgatttaaggacttttgtcaaattttagtaaaaagattctaacatggatgaaagttcagggggcatgatttagtatgtatcaaagtttgagg

SEQ ID NO: 370556 - DNA, 520 bp, Cannabis indica
taattactaaaaaatttccatattaaacattagctactaaaaaatattattttttcatgtaattactgactattttgccaaacaaaatattagaatttcatatgtaattaccacttcatatccaaacacaccttgcattttaaaatatagtgtaattactaaactatgtaattacgaccctagtaattactttacatagtaattgcacagttacttccaaagaaccgtactaaaaacacaccatagcagatactctaaactctttcattttaaagtttttttaaaatacactattcatgctctacatttatagaatactatatattgctctaaatatatttgtattaattattttgtgttttaataattatttttgtatggggatatgagtacatattaatattatatatttgaaagggtaaatactattttggaccctgtgttttgcaaaagttaccaattagaccctgtgttttgttaaatgacaaaatggaccctgtattttctaaaatagtacaaa

SEQ ID NO: 370557 - DNA, 622 bp, Cannabis indica
gtggaaaaggtagtgatggaacacttttagttacattatttataccataacattgttgacatttccaaaactaaataaacattttattcaagattaggtacttgtagtgtctagtaactttaagacttattgtcttgtgattggctagctagtaatactccttaaaagttattatattaaactatatgggacccgatacttaattagatcaatagcgatattaacacgtaagaagatgcttaacaccactgatacattttagcatttctctttatttaatgggtttagttgttggtttattcatgatcttttattgcgcatacaaaacttatttaccaactacctctggatttagttacatctattttttaaaaaatatatagctagggtagacttttttaccatgtttttggattttgttttaagtaattcgcgtgtatattttttaaaatttatttaactttacaaccatttatgaatacttaaatttaattttgaatattaataatttatatttttagaacttatctagaagctaggattgcaagattttttagaagagaaacctggagcaggatttgattttattttcctgtttttggtatattgataagttataatt

SEQ ID NO: 370558 - DNA, 564 bp, Cannabis indica
attttaaaagaggaaaaaaaaaatttgggcccctgggctgggtgagccctaggcacaggcctagcctgcctatgcccagggccgggcctgtctacaatgcccatcaaatttgatggaccacttaagaaaatgttataaataagttttagagttgggcttgaatgaacattttttatttttatggggcttttttttttatatatatatagtacattttttttggttttgaatataagtttgtaaaaatatatacttttttttttcaaaaaagttaaaaaaaatatgagaaaaatagtataagatatctggttacctcttttaaggtaactggttatcttctgattatcttaggtagtgtttggttggaggtaatgtaatagaatggaatggaaaagaaataatttttattctattcctttgtttggttgcattttaaagtattggaatgacataaggaatgctcttttcaccattttagtagaatgactattccattttaaaaataaaggaaagatcattccaatgtaacaagagaaaaaatttaatgatttttttataaatttt

SEQ ID NO: 370559 - DNA, 756 bp, Cannabis indica
gaattcccaggatccaacggttggattggatcgtcatcgagacgatggaaacgcttgagtgtttgtctaacacccattaatgtgatgtatcaattaatggacaagaaacgaatcgacgcctagaaaaagtgaatcgctgcagtaatggtgatcattaaatgcgccatcacgcgcccaaagcacgtgccaggaaatcgaggagccagtcggaggcacctaagcaagccttgttcacttcacagttaaacaaggcttgggggtaaatgttgcccctgattttgcccaatatacgtggaccaaccggacagtgacacgtggatggaaagggtttagcgtttgaattaaatagctaagtctttataaagaaaagcattattttggatatgcctcccggagaaggcatgcaaggtctcatatgctctcggagagcaagatggcatcaaagcatctccgggtggtgtcaggcttcctctgagcagtcatctcgcatataatgccgcatgggaggaggcgtattggaactgccacacgcaataaagtctagtgacggctactctgtgaagaatcacatcagtcaagagggattaaggactgccctcacaaaatccctacaacacctagggatttaaccatgcataacccaggatatattcattggaaatgtacaactttactgaaagttacagaaatgcaagtaccttatgttggaatttattttaccaggatcttagatctactcacaagtatgttgattaa

SEQ ID NO: 370560 - DNA, 993 bp, Cannabis indica
atttaattattttgttacaattagatgaactaagtatgaggcctcaagctagtcaatcgataacaagtgtagccattttttttctaaaaaattcttcaacttatttcactttttactttttaaatatttaaataaaaaattaaataattaagtgtaataatttaaaattaagattacaagtataataaaatttaaattatgaaattatatgtgtataattttaaattataaaaagttttgctataaaattttaaataatttaagtgcaaaaaataaattgcttaaagatccttatatagtaataaactaaaaaaattaattaataattataattaatttaattttaaaatataattaatcttaattaaagttttataaggaaataaattattaggttatttcaggttacaagttatttattatttattttattttatttccaaattaatcacaactatttaatagtaatccaatgactttaaaaaaatataaccattgaaacttcttccatatatatatatatgcttcaagagtagaacctttaatcctttatctagaatactatatttaaaaataacatctaacttatttaaatataaataaataaatttgagccaatttttaagctaattttatattttttgttccttgaacattgacatataccaaatcatgtgccatgaatttttctcgccgttaaaaattttcctcaaactaatgagattgttagatttaaagacttttatcaaattttactaaagaaagtatgtcgtggattaaaatttaggtggcgcaatacggtacatgttgaagttcacggtaaatgattttataaatatcaaagtttgagaatacgatttaatatatggacaatttacatattagcaaaataaaataaaattaggtaaaagttcaaaaattcaacaatctcaatagtttaggaggaattttaatgacctaaaaattcagggaatataatttgatacatgttaa

SEQ ID NO: 370561 - DNA, 576 bp, Cannabis indica
ttttgtaatttttttttgttgtttttatatatttgtgaaataattcctttaatattactacactaaagtgttatatgtatataaatatatattttaggatttgttaataaataataatgctctagctcccattgtagcacttaaatattatttttccatgtttaattattatttttttttttacaaaattagaaataaactccaaaactataattaatatattgaatttcattgatgccttagccttagcattcacaattggatcatttaatcatttggtccaaaatatcattgacaactaaagcaaattaattaagaaagtttaatattttaatattagtaatgatgatcatgaattgggatatatgcctttgaaaagtaatggtagaatcatatttaggtataaatagtactaattacacaatttaacactatataattacactgagggattacatttttcaattctcataaaaattaagtgtaattattaaaaaaaaatattaataattacttaaaaaaaatattattttctcttgtaattattaactattttatcaaaaataatataataat

SEQ ID NO: 370562 - DNA, 630 bp, Cannabis indica
tgatggcgtcttcatggcttggaccaatgaccaaaatatcaagcttaccttctaccccaaacctgaggagatgatcgccaaatttcgggagaagaagaagaagcttgatgccatggtggaggcacgcatcggacctcgtctccctccgcgcattgattaggccgctcgagattaacccagtacaaccaggatttcacccacttctcttttttttatttttcttttatatatatttgtttatatacagctactttgagacaatacatttatatagctgtttttattttgaggggagacaatttctaaggcctgtccccgggccatttgtatatatttcgacctgccctttagggctaggatatttatacgtgatcttttgacgcacatatttctcttttttgacctgtcctttggatcaggatttttatacttagtttgttttctgtctgtccgtgcggtataccctagtacccccctgagtggcatagaaactttgtttttaaggcactcagttttatttacctgtggaggaagtatacatttagacggtacaaactctttaaacaaagtctaagttacattcttggctattggtaatattttctgaggtgatcggcattccaggctctt

SEQ ID NO: 370563 - DNA, 640 bp, Cannabis indica
gcattaaacacagaaaccctataagttatctaaatcatgcaggtactctcgtcctatatcaaaattcagttctatttcactataacataattcacactcacttctcaaatctcgcaacaaaatcatagatagttacttggtgatcaggcaattaaaaataattaagtaggaatgaaatagaatacatagaaactgagggaaaataagatcataataaaaggataaaataatgtcaacaatattcatctaaaccctaattaagtgtttagctactcatgttcatggaagaaaaatcacacatattaacttaaaaaaagagaagaaaataaaaaagaaaagaatgttgaaaacgctctgaggaatgcctccagtattgcagttgatctctgaaattcgtactccgtattctgctgtttatttccttttaaattgcctcccaaaaactattgaagtccacttcttttatagccaaaaaatgataaaaaaaataaaaaaaatgctgaaaaaaaaaattattctacttagggttagaaaacctattctggttaggattagaaggagaggtgagttttctactgtgttaactgatagtattttggctataactctctcgatatttctcagaattggacgattcaag

SEQ ID NO: 370564 - DNA, 649 bp, Cannabis indica
acgggtgctatgtggtgcaggtaagggcaaggaaaagttagagctgccatgaggtgactaccttctccagcaatatacatattgaccccaccacctgcgtgcttagttgccaggagttgttttggactagctgtatttgttgtattttgaattgtgttttgacttgcttttgtctatagtcttttggtaaaacattttatagtaaggatcctcagaacacgctttttatgccgttataatgtccgttttcagtcttttattttagtcaagtttttaatattatcacagtttttactaactaattaatctattagtattaaattagtttataaaatcacatatgtggtgtccccatggaatagggcgttacagatgacattaaagttttttcgagaattgcaacagaaagagtcttgattttgcattcttgatcgattaccaagctctaatttgtgggaaaattacaactaatggcgcagaatcaaatcaactaaattttaaacattcaaacaattagtaatgacaagactaacaaacacaaaaaataattggaggaaaacagggataaacagagtatgaacaaccagaaaataattaaagcaataaacaaaaaagttaacaccaagatacatactagttcaagtccgat

SEQ ID NO: 370565 - DNA, 717 bp, Cannabis indica
ttttatttttcttaggcaccattgaaataccatgattaaatacggtctgaataatcactgtatactgtatcttttgtatgtgttagtaaaattttaaagttattcccacaattatgcagttagtatttaacgttaatattaaaactactgtcttaaatttacaaaaaaaaaatataaaataaagaaattttgccacaaaagaaaagaaaaattaatgtgtttggaagtaactgtgtaattactaggtagggtaattactaaggtgttaattacacagtttagtaactacactatattttaaaatacaaggtgtgtttggatatgagatggtaattacatatgaatttctaatatcctgtttggcaaaatagttagtaattacataggaaaataatattttttagtagaaagtttttagtaattacacagtgtaattacattcaattctcatgggggccatgagaattggagagtgtaattggaactgttgaccgagatttttcggcaactaataaaatattataaaattattgagctgtaagaaagtgagataaggatttttacgtggttgtggcgttaatgagccttagtccacgagtctctgttatttatggatgtatttaatacagagattatacttgggggaatttcacccttataaatacagagaatgttcttggtgagtatttactctacttgctcatatgcaacccaaga

SEQ ID NO: 370566 - DNA, 789 bp, Cannabis indica
aacatacataagttgaactcatatctccaatatcatactcatagcgcacaatcatatcaatactacaaaatatgtcactaccataacataggcatatatatatcatagccattacatacataacctgggcctaacttggccctacgataacctgggcacacttagccctaccattgctatagagaaaggtatctctacattcaacagcaacatcgctgtatcatacctcactataacaatgtcatacacgaatcagacaaatgcagggtagggtatctctacattcaacggccttaccccgtatcataccccaccatggcccctcatttgtacctgagacgttagcatacaacatacaacatacaacatacgacatacaaatcatacaaaccataatgtatattgattcaaaactcatattgtgtccataccacacattctcagtactatatacacattcataataaacatcacaaataatatttcaatacacaaataatttaaattatgcagttaacacataaaaactacttaatttccttaccttggaatccgaaagttagaatgacttcaactataatcctttggaatgcttaaaccgaaacaacactgctgcaattattattccttaattttaaaccatgataataaaattctaattagaagatgggttgaatagaattaattcttaacaagaaattcttaattaaacttaccttagctctcttaaatatatggtagtcaatcaccaccataaacctccactaagatatagtccaacgcttgtct

SEQ ID NO: 370567 - DNA, 890 bp, Cannabis indica
tttttttattaaattttaaaaatattacccaacaacggatacaatctaataattagaatctaactatttacatccaatttaatttaactgtgattaattaaatatccaaatttttataattaaattagatgaattttaatatgttcaaagtaatattaatagactagtttggatcttaaacttacaaattttaatttaataattattataaattttgttgaagattaataatatacctagctagctataataacaatcctataaaacccaattgggccaccataatatttgtatacaatagttgactgttaaccacgtgacgttttttcttttgtacgaagcttcaaagatatggtactatatatatatatatatatttatatatattatatgaaaataatgaagctgaaaaatacaactcaatatgtaagcaaactacttgttcgtagtctagctgggaaaacgttgaaattgaacttttccaaaaccataatttaatcatagttgtaatagaatagtactctcatgtatatataattaattatataataagagtgtgtatatatatatatgcatggtttttatagattattagagagagttgacatttttggttgcctgcgtaatatgggcaatcgattctttgatttattgaatttgtgtatttgtttataacaaagtctgaaagtagtgcttttatttttattataataataacaaagaaaagaaaattggtattatataggtactactatatagaggcaattaaattaataatgagataatatcgttcccataaatttgttgtaatatatagcttatatagctctttacaaagagttgggtttggtgtgtgtgttattatattaggatcttacttcaaagatgcc

SEQ ID NO: 370568 - DNA, 851 bp, Cannabis indica
tatatatgaatatatatatatgctgttacttttacactactaacactaaatgtttatgtgattttgagggtgttagtatagtgtaggatatcggtgaggttacggtgttaccaacacgagtatcagggagtacgtcgtgcatgtggtataacacttagtaattctcaggagtacatttaaggctctaccaacacgagtacagagttggtacttcggtgcatttggtacagaggtcgtacttcccttaagaacgttcttatccactcagtgagctcaatttctgagctcaaggcggcttaagcataaagtcgacgttgcattacttatatatatatgtcttgcttatcttactgagtctgttgactcatcaatttgctacctggtgtaggtaaaggaaaagcgaagctggaggaatagtgagatggagctcgacaaagattgtacatatcgcggcagtgcaacctggagggtctcggtcttttactattttgagtccgtgttttgagctgcctgttcacgaatttgtaaaaataaaaaataaacatatatatatatatgtatatgctagtaaggtactttaaatcatattttgatactcgggatcccgacccatatgtttataaagttataatatagtaaaattatcttttgaatttagtaagttatatatacgggcgttacacctaagatgcctaatgtctaactatataccccgctatttcaaaagtatcaaaccataactaagtgactctataggccaaacgtcgcattcaactattaccgggcataaataatgaaatttataaaaatggtaaatggcggcaaaactcccaaaactttcattttggttt

SEQ ID NO: 370569 - DNA, 984 bp, Cannabis indica
aggtgtgttctgacaggttggcgcggtatagtcacaaccgggtatttcgggccgaaccgggttcgggcccgaaatgcaaattggattgaattaattggcattatatttgatattatgaaatctgaaatttatttgggaattaattgagtgtgaaatggcaattttgcccttgaaaatgtgtatgtatgattaattggccctaagggcattttggtcatttgaccccttattattgtatttggaaaatgggattttattaagaaaatcaaagtaattttctggttatttccttctctcacctgaaccctctccctctctcaaaccctctcaatttttgagacttgaatttggtgtgttctagcttggattaagagtgttgattgggaagaattgtgttgaagattgggattaagcttgtgcaaggaattaaggtagcttcttgctgatttatttgaaattaaatgctgaaattcttagggtaaaaagcatgttctttgagttttgaatgttcttgttgcatgatgagtgaattgatgttaatcttgtggaaattgagcttctatttgttatatgctttgttgttgagcttgggcagagattgtatggaatttctaggttggattttcatgttaaaatggtgttatgctgctggatttttattaggtttgtgttgggttgagttcatgttcttgaacttgagattttgatgagttgagcatgattttgagtcatttatgtaatctgaatttttggatttgatgcatgagatatgtgtttttgatcctctgagatatgctagcagctctatttcatgattttgagatttatgcatgtttgggttgaattgggggaaagtttggcatattttcgaagccgaaaactggcttttctggttttttaaacccagtggtcgcgaccatgataatggcagattgttattttttttaagtttttgttttccccataacttttgactagggactc

SEQ ID NO: 370570 - DNA, 623 bp, Cannabis indica
tgtccgtttttagtgttttattttagtcaagtttttaatattatcacagtttttaataattaattaatctattagtattaaactagtttataaaaatcacacacgtgtcgtctctatagattagggcgttacaacttggtatcagagcagccatggttttaaaggtcctgaagactggtcgaatatgtacatttgttgtgaggacgtgtcgactcatggtatagtaagtatttatattatctactattggattacctgcctaggctataataatgtatgttggaaaaagtaccatagtgataattgtgataagaatatgtgtatggtatatgcatattgatattcatatccatctgagttttaaatggttagaagatgtggactaaatgcgtgataagttatgcagtaagggcaatcgaatagtctgaataacgagctatctcggctcggggaaaacagtaaggaagagaattatttatttccataatattgggaacatgtaaattctgttatacaggatatgattagacaacaagggaaaatagatctgagatctaaaagaacaataggttcatctcgtgtctgttcttgtactaccgacacttcctgttgtaccactagat

SEQ ID NO: 370571 - DNA, 699 bp, Cannabis indica
gttacaagtctaacactaattatatttgtaagctatgtgggacttttataacatcataaaattatacttatataataaatgagaaaatatacactaatcatatttcctaaggaatatatggtgtaatataatattttaaaaaaatatattatttattatcttgttgaccgaggttttcggcaaccaataaaataataataatttagagagctgtcagaaagtaagaaggagattttttacgtggttggggcgttaatgagccttagtccacgagtctgtgtatttatgatagtatttaatacagagaatgttcttggtgagtttttactcttctagcacttatgcaacccagattctcgacccctctttaatgagctttggggggtatttatagtgtttttgtggggtgatccccagaattaaggtacatgcatttctgtaactatcagtaaagttgtacattcccaatgaatatatcatgggtaatgcatggtctaatcctaggtgctgtagggattttatgagggcagtccttaatcccttttgactgatgtgattcttcacagagtagccgtcactagactttattggtcatagcctagtaggtacagatcgggggttgtgtcgtcagactttattgcgtgtggcagttccaatacgcctcctcccatgcgacattaaatgcgagatgactgttga

SEQ ID NO: 370572 - DNA, 741 bp, Cannabis indica
tttacgcgcccacgtccgccaccggcgctggaacctcctcgaaccaggatagctcatcgtctaaccgcagagcatgctttgccaaccatgggccgctaaaatcttagagcgagccccatgggacaaaactgcccccggaaatttagacaataaagctataacatcttcaaacaacgctcctaactcaataaaatactgaagttccacctgaaaaaaacatcaaaaaacagcataaaactttaattagaaaactattcaaactgaagagaatcaaccaaccaccaagactaagcaactagatctccctataaaatactagaactagccaaagggattaccctttggctagtaacaactaaattatagcattctacttcataaccttcataggatccctattccttacttttacccttttaaaatcaaacataataaaattttccttttaatacccattattccttaaatattcaaaatattatatactaattatttcattttatctcttaaaaatattacttatttatagactaaaacatgtcaaaatccttaataagtcaaattatttattattttatttatagcgtaaaacatggtatctataatctttattcaacctaaattaaaccaaaattgtattaatatccttaaaacttaagattgcacttttcacattcaaaagtaccattttcctaataccacttcatcatacatttaattaataatattaaattaatatta

SEQ ID NO: 370573 - DNA, 626 bp, Cannabis indica
gatgttgtttgaccaaaaaagtaacggattggatcggatgaacacccctaaaataagggttcaccttattggaataaataattaagaaattctcatttagtttttctttctctctttattttcttcttcttttcttcatatctattttatattattctacattattttatactacgttatcagcatgagtctctaccaaagtctcaatgtaagtattttgttaaagttcttaaattgttttaaagtcacgatacactaaatatatatttatatatatatatattcatttgactgaaatagtttcaagaatcttttgttttttttttatttatatatctatatattatatatttatgtatatgtttttatatgtttattattgatttcatatatatatatatattatgttcttatcatttataatatttacaatatatgtgtgtctatgatatagtagagaaaatctatataaattataaatatatcttgaaaattatgtatcatcgataaaatattgcatatatcctgaagattatgcgtcatcaataaaatcttgtatatagcttgaaaattatgcgtcctcaataaaatcttgcatatattctgaagattatgcaaacgtaata

SEQ ID NO: 370574 - DNA, 566 bp, Cannabis indica
aaatttcggtagcataacaactgtaatcgacgtttctaaaaattgtaaatatgcaaaaaataagaaacaaaacgtacacaaaataataaaaataaaataaaataacattaacaatttaatacaaaaattatctacccatctgaccgtagaacaattcatcgcggtatctattttgcaacagatgaatatctaagatattcaaactccactttataaagaattttaaggttttagtgattttacctttctctaataaagctagctactttttgcgcttttcaatcaacaccaaaaattcaatacttaaaaaataataaaaattaatattgattaaattctaaattttacagattttatcaacatctatatataaatatgtataaactaaaaatatatatatcatcaataataaggagcctctctcgaaagaccgccaaaaaaagaagaaggagcttgatgaaatttgacaatggataaaaaagtcaatatatatgtataaaaaaagtttcgataacaatttaaataaaaataaataatctaaacaaaaaaaaaaatccaaaacgact

SEQ ID NO: 370575 - DNA, 632 bp, Cannabis indica
accagctcgatatattcttttcgcttagcactgcagactgtctcgttataatacttagcgttgaataactctcaaaactcttcgtaggtcataatagtgatgtctcgggtgagggacaccaattctcaccacatgagcacgtcttcctaaaaataaaaagtagcacatttcacctggtcatttccaacgaccccataaaattcaaaattctttctatcactgtgagccactgctcaaccttcattacatccagacctcccagaaacactagaggtgcctacttgcgaaacctctcgtatagtggctccatacgattgccaacaacaggttgttctgctggcaccacaggaactaaagcggcctgagcttgcagtggaggcactgcaagaggaccctgctgttgggaatattttaccaggatctaaatttactaacaagtatgtcgattaacatcctaaatatgaattgtctacaacaataaaatatacacataagggtttaagaaaaccttacattgactgcagcggaataatatgactccttctgttcaagatctctagcccttgattcctttatgtagcatagcattattaagatctgaacatggatctctttctctccttcgggtttgg

SEQ ID NO: 370576 - DNA, 539 bp, Cannabis indica
cagagttctcgaactcctacacatggacttgatgggtccaatgcaggttgaaagcttgaatggtaagaggtatatttttgtatgtgaagatgatttctcttggtttacatgggtagaattttttgagaaaaatttggtatttttgatgtttttaagtatttttgcttaaaattaaaagttcaaaaagattgcaacattggtaagatagttcgtggtaagagtaatcatggaaaagattttgaaaatactgtgtatgttaaatcttatggtatctttcataatttttctgcttctaaaactccaaaacaaaatggagtggttgaggattcccaccttcttgatcatgttttagacgaggctttgtatggcttgaaacaagcacttcgtgcatggtatgagcgtctatctgagtgtttacactctcataattataaaggaagtgtttttaaaacacagttcatcacatacattcaatttcatattattttttcatatgttgattatcttgtttttggatctacttctaactctaaagtgca

SEQ ID NO: 370577 - DNA, 784 bp, Cannabis indica
ataacaattgtggcaatttttgttaattaatatgatattaatttttttttattttattaaaaattaatataataataagaaatatttttttagtggaatttttagtgttgtggttggagtgaaaatactttttgacgccaaatttagtgataatgtaacactaaatttagtgtatccttagagatgctcttagaagagaaatttacatctgggactggatttctcaatttttgtacaattttaaaattacattttactatgttattattatactgtatatactgtatttttttattaaaaaaaatttgtgccattttgttaaaacttgacagttcaacatttattataactaattttattatatttaagtttgtaaatagtgttgatttattgggcatatcagttttgtgacagttttttttgttattatttaaaattgataataaaaaattaaaatggacaagagcccacgtgactcctccttcccaagaaaaactatatttgtttatacatatatatttatcttgaatctatgagtaaacacatacactttaagggtacctttagaaagccacaatgtaattagatttgtgtgtaattagggataattatacaatttggcatgtttgtctaaccatgtaattaaactgtaattgtataatctatatataaatataaaggaaaacacaaaggagtctaggtggcatactagattttttttagtgtatttttaaaattttgtgatattttcatattttgttaagaaataaactactacacatat

SEQ ID NO: 370578 - DNA, 665 bp, Cannabis indica
atcacactaatcaataatttgaagaatcaatttaacaatattcatatataaaattggcaatattaataagataaatatcgacttatcaaattatcccacacttgacttttgctcgttctcaagtaaattgataataaaatgaatgatgcttaaacaaattggtctttatgaaaaataattttagtttaaaaaattatacatccatctataatttcaagaaaaatccaaactcttcaatcattagaatttcaattcaagataataacttttcaaactcatcatattttttacatttaaatcaattcatacatgccaacaatcaatgttcatatcaaaacaaatgtgtatttgaatgaaaattcactccatattatcaaactattatccactaatataattacacacaatctaaaaattaataggactttataaacttacagtgtaaggttagggaaaagtagatgagaaagtattttaggctcaaatcccagcatagcatacatatacaacattattacaaataattaccttttgtctttcttaatgaattcctcacattaagtcttatatctttttttttacttagtacttactatttttccttacacttacgtatgttgtcagtattcatacatatatatttttattatttcttatattttttt

SEQ ID NO: 370579 - DNA, 583 bp, Cannabis indica
taatttaaaatatggctaatattaaaatatgtgatcttataattaaataatatataaatattaaaaaaattaacaaatttttaaaagctgaccataattaaaataaaataatcatttttaaattaaaacctcaaaatatgaaagaattaataataatttattaaaaattaaattattaatttaaaattgatatttatgtttaaatatattaaaaataatatttgattttgaattttagggtttgaaattgggaaaattcgaatttttttttggaaaaatcccacaaaaatgcacattgtgtgtgctgcccaggaggctgcaagcagccttgatgcatgcgcgtagaggggacttgcaggatgtcccaactgagaaaactcgacgtgtgcagggtggggacacgggattttcagccttgtgcgtgtctgaataggttcaatgccgtgtcttcagacacgacttgtccaggcatgcgcgcgcacgggcttcttgtccgaagctcttggtgcgtgaatccaaataaaatatttttagaataaaaataaaattattttcatgaaaaaattttgtaattcacattcaa

SEQ ID NO: 370580 - DNA, 509 bp, Cannabis indica
ttggcaactacttctatgttatttaggatgtaacactagtagttaattaattattggtacaatgccaaaattttatagaactttccatagacagaataattatctttcctgcaactttaacattcagtccctctggtagacttagagacttcagataggtttttacacttctccaaaatcactactccacccttagattaatcaccatcttatcagtagactttctagcactaaggcaggtctacaaaacctgatttggtgtagtctaagagtattacataccacccttatcgactaacatatagttcctcttcttgatcttaagctttacttgattatcttccaatgttccttttcttgattaatctgatacctactcattactcccactcaacagcaggtgtctggtctaatgcataacaaagcatatctgagacctctcactgttgatttaaggaattcttttcttgggatttatcttttctagaatagttgaaacttctccttag

SEQ ID NO: 370581 - DNA, 619 bp, Cannabis indica
atatgagcatttgtcccaagtttatattttcttatgtcaaaccacaaaattacttacgttttagttatattatgagcgttttatgaatattttatgaaatttttatgaaacttaatgtgctaaataatatattcaacctatcttattgtttgaatatatatttttaattatatctagcactatatatggaatgtagtataacatttaaatcatacaaatctaaattaattgtattcataataaatttgcaaaataaatacaaattaatacaattattgtatgataattaattaaatgctcaatccataatgtgtaattaattatacatttataactatataatatcttaaatatttgtactaataataaatttgtataaataaggtaaacataaaaattagtacaatttcataatataaaatgaattaaatgtaaaatccaagaatatatacttaacgacagattatcaattaatttaatcaataaattacttaattggtaaataaatataataatagcatacttaattgtagaatattcaaataatcacatacttaaaatatcacaattattataattacatgtaaaaataaagcatgtaattaatttactaaattaa

SEQ ID NO: 370582 - DNA, 521 bp, Cannabis indica
gaaacgtttttaaattattatttattgtattaatatttttttaatattatactaaaaaaattaaaagagccgcgcgaagagcggctatattatctagtttttctataaaaaagtataaaactacaaattgataattttactattatttaattttccataaaaatataaaatatttttaaaaaaattcaaaaataaaaataaattccaaaaaaaatatattaaaacttaaatcaaatataattaatcgtaaatttcgtttatatacatacataaaatatcaatcaatatatataaatctatatctatatatctatagatataatggagacataaagcggtgacatggtactctaaaatttctttaaaagtatttttcttttctcataactaaaatatcacattttttatatttttctttcttttaattaagatatttaaaaaataataagggaaaaaacagaaaaatacaaaaaaggaaaaaaaaattacaaaagtactttgggccggcccattaaacattt

SEQ ID NO: 370583 - DNA, 614 bp, Cannabis indica
aattgggttccgccggtattaattaaaactgttagaatccctgattaataccggcgggtcccgtcggtattaatcaattcaaaactttgggcagtaaaaatcccaccctcttttttcgaggcgggattcagccggtattaatgtcaatccgccggtaataatcaatttaaaataaattattatttatttatttaatatattatttattatatagttattaccggcggattactatttccgccggtaatacccccattaatagcggcgggtcagttccgccggcaataataccgccgacaataaccaatattcttgtagtgaatgtcaccctagtacggatagttgttatgattttgtaattttttttccaaagggtatataatttttcaactactatctatgtataatgccacatcattaatttaacagtcaactttagtcaattttaacagaattagatagaaagattatactattccgatatatattagggggtatttttaactacacttatagattaagaagcataatagtatagtgtcataagtagagggggtaaaaaaattaattattctttactttattattctaaaaaagagacattaactttcact

SEQ ID NO: 370584 - DNA, 1146 bp, Cannabis indica
aacatactatttttatatatactaattgtcgaaccccaaattaaatttctaaacaagtggactcacctccgtaatagttacaatatagacatcattattcactcctggtcgaccatacaaatattaggtttggtctctaccacatgactcgacgggcacgatcgacagacaaacagacgccgacgaagatctactaaatttcgttggcagcgacgaacaaagaagacaaaagaagaactttgttggtgtcggtgatagtgagagcaacagagaatgaaatgggaaatggagaaggtacgacgaaagccatggcaagagagaggaagaagaaatggattccttttctaattttactgtaaatataaattttaaattttattttaatatatttagtgacaaaggaattaagtattgttgtgagtaaatgagtcttcgaaataaatagttgtaactaaaagacagttattagtcacaactttactaaatgataattagtcatatatttttgtcataaaatatattgcgactaaatatttttttagtcacaattaaatttacgtaaaagtaacatttagtcactaattatataatttgaaaattatcacaaataatttattatgactaaaatattatttgttatgagttgcgataaaaatatacatttagttataaattatttttgttgtgattaaaagtcttaatttttgtagtgtataatgtaatcttacttctttttttttttatgaaacctattatgtagtcctgattattatgatcatgaccatatcacattattcttaaaggataggtaaattttagttattaattagtatttataaattagtcatctactagtgaataattaattggatagtgtcacaaaccataaactatatataattattggagataaattgagaaatattttttttttatccattaatcaaaaatactctaatattatatgtttttatatctacgtttataagtagattacccaatataactctactctctacgaaagtttaatatataatttacattaatcttaagggtctaatatgaacattatcatttataacagtgagtatatattaaagaatatgaaaataaaaataaaaattaaaacaaataaagtggatatac

SEQ ID NO: 370585 - DNA, 1250 bp, Cannabis indica
gtgattataataaactagattataacattatcattatacattataataaaatcttaacaactcattgaactcacagtacttcgaaatttataatttaccaaacactcagctcagcttttttctacagttcttctgcagctactttttctcacagcatagctacaactgcttttttttacagcacggatgtgccaaactggcccttagtcttttggttgtgttttttggtctattttttttaatatatatatatatatatatatatttatagagatttttacaccacttattcaaatttattaattttttttctttgttactatagggcagaatttttttaaaaaaatattgtgtactatgttaaattttatctgttattccactgttatttttaattgtttagtttagtattttaggattttcttataaaaaaaaataatattttttttaaaaaaaaatcgtgtagcagtgaaattataaatttttgtccaaaatctagtatttttgtaaaagtcccgtatgtacatacaatggcttccgttttgggaaaattacacacaccactgacttttttcattttcttacttttatactgttaggaggtataatttatatttatactgtataattttataacttttatacggttagcttcaggatgtgttttcttgtcactttaaaatgtgttttttttcttttttaaattataaaagttatgggaaaattagttgggtccaacatcaaaatttaatttttttttgttttattagagagattgattggaggtgagatgtgacaaaagtgacattttttttaatttaattctttattattttttaatatttaataattattatataaatctcactttccaatatattactagtcatcttctttacttctcttcatttataaacaaacaagtgaattgaagagttagctttcttgagaaaccaaggacacctcaccttgtaatagtaattgctcctcttctgttcttcttcttcttcttcatgggtctctttcttttgttttttttttcaaaattccatacacttatcatcttttttctcactatcttcctccttaagttcacttactctcttcattaacatataaatttttttattttatttcttgtttcagttcttcttcttcatcttcttctcatttttttagtttttctaatttttagtctacactttttagggggaaataaaagagttggtttttttattttgtatttttcg

SEQ ID NO: 370586 - DNA, 517 bp, Cannabis indica
ggctaattttgagtggttataacgtattaggaggacaggatgattgagtcggactctcgggtaagttgaccagccaattattgtggatgatgcaaatcttgaatcaaccacccaattgctaattattaatcattcattcctgtcgaatggggaaactctttcaacttgtcaattattgcacattattattttgttccaatccaattcagcccaatcaaattactcctctcctcctcatgttacagttggagttattagtgtgttatttcaacattcaaggctaagtttgctttaatgttttctcttccctattgatttatttaatgaatagcgttaaaggtttggatttttgctcttaaattataatattatcctccctttgaacttttcaaactattaaaactatttaatagtttaactatttgtgccttttaactaattgtgactgttacgtcaacactatatgtgtaatttttttattcatcaattaatttttaatttaataatttttaaaaat

SEQ ID NO: 370587 - DNA, 956 bp, Cannabis indica
ttcaaatatgggtatgacccaaaccatggattgggcgtggcccatgtgagccattgggcttacgggttcctcgtttcttacttataagtgggctttgtaagtacttcgatcgttgggtttagagcaatttttggccactacactaaatatatgtggtaatattttttatataataaatcataattaatgctatttaaatttatttattaattaaaaaatattattcaaattaatataatggaagggaataattcaagtctgtcttttttttaaggtgtcaatgttactctcttcaagggtagttgtattactaagagaataatattccaagattaaaccctcaaaacaaacagagtaacatttcacattgtcattctcttgctagcattgacccataatttttaagtgttaaaaatagtattactgtgtttagttgtgtacaaaaattatctcttcttgagaaaataaggtttttgtgcacatgaatcttattagaaatattatcctaattcatcactatataaaatattatatatatttatgtaatattaatttttctatttttattgtaatgaccgcttagttttattttgagaattaaggccagtttggcatagttgtgttgtggaaaaaaatagttgtagttgtgctgtgagaaaaagcagctgcagcagaactgtaaaaaaaaagttgagttgagtgtttggtaaaattataaatttcaaaagtactgtgagttgttaaaaatctattataatgataatgttataatctagtttattataatcacaaatatgtaaaaaacttattttatataatattttatttttttttatattatttttaattttttttcaaatataaatttatatggatttgataaaaataatttatattattttttgtatctatgttttatctaaatgtaaaaaaaaaaaatagaaaactcaaagtac

SEQ ID NO: 370588 - DNA, 550 bp, Cannabis indica
tcacagcctattctctttctttctctctcagtcctcttctttgtctctctatctgtctctctctctctctctctctctctctctctctcttgatgcaggtccaggtccgccgtcgacgaggaccactgagccattggccgttgacgaggacaccgagccattggctgaggaccaccgagccctattctctttctctctttgtctgcctgatacccctctctctctctcatttttttccataatttttctttgcaatcttgttaatagatctgtgtataaatgttccttttgggtattatataatttttatttttcagatctgtgtgtaaatctcgtttgattgtttggatatgagttgcggagttgtgtttgagttggggtggagttggtggtagttgtggttgtttggatataaataacaggttaaggtggtggtggatgctggtggtgccgtggtgggcatctgtggtggtgatgatatttttgaagaggagtgatggtggtggttaagtctgtaatgaagaaagatactgagagagagagagagaga

SEQ ID NO: 370589 - DNA, 795 bp, Cannabis indica
ctctaccaacacgagtacagggttggtacattagtacatttggtacagtggtcatacttcccttaaaaacgttcttaaccatttggtgggctcggttgatgagctcagggcagcttaagcataaagctggtatagcattgcttatatatatgttatgcatatcttactgagtctattgactcatcagtttgctaccttatgtaggtaaaggaaaagcaaagctggaggatagtgagatggagctcgacagtgattgactatatcacgccagtgcaacctggaggatttcggtcttttattattttgagtctgtatttagaagttgcatgttcgcgagttttaaaataaaatattatatatacatattagtaaaatacttttaaattgtatttttaatactcgggatcccgacccatataagtatagagttataataaaatcaagttaacttttggatttgaaaatatttaaatacgggcgttacagtaagtgttgaagatggagacttcgtatgtgttttggggtgtgtatagtataaaaaaaattaaggtgtggaaagtatttttgtaaatttttttgtgtggtagtaaaattataaaactgtccctaaaatctagtattttgtaaaatcttttaataaaaagtaacaaaaggggcacaattctacaactgtacaggaagatttttaacaggtcgtataccataggagacatcatttaatagtgtcataaatttatgggtaaaaatgttattattttttaaaaaaattgtatttttaatttaaaatatgtaatt

SEQ ID NO: 370590 - DNA, 664 bp, Cannabis indica
gaattccaatctgtccaaagaggatttcagcagctgattgtagtattctaattgaaaaaatggtggttaggataagaacttagagtacgcgtaatctatcttttgcaggtagagtagttctcatcaactcagtattaatggccatccattcttattggtgtcaaatcatgatattatcgaaaaaagttgtgaatgaaatagaatctatctgtcgtggttttttgttgaatggaagtcattttctctcaggttcagtagatgttgcctagagttcagtttgtctccctaaatcggcaggaggcctaggtttcaagagcatcacggattgggatctagcgactatgtttatgtatgtttgggccattgcaaaaaaagagacaacttatgggtgaaataggtgtataatgtgtacatcaaggaggaaaattggtggtcctatagggccacgccaacagtcagcttgtattggcgcaagctggtagccataaaagataaagcaacaagtagttttgatgtatcccaggtgcagaatgacaggtacaaagtggttgagggatataaggctattcggcctattgctagtaaaattgaatgggattcaattgtttggagcacgttaagcatacccaagcatagcttcatttttttggctctctatgcttaa

SEQ ID NO: 370591 - DNA, 526 bp, Cannabis indica
atgattatgtttaatgtataaatttaattaagtccataacatataaatatatatatatatatttgctcatgattatagtgtcatcagcacactggaatataatcatgattatatgttcaaaagtttaattcccatgatttttcagttcactgaatttagactgacatgataatcggcgataaggtatacttacaccttggataagtgttatgtcctttcgaagggcattggcaaagtttaccagtatcggatgtatagagtatacattggaagagatcgatattgatcttggataagatatcataaacttaccattatatcttgatcttacgtctatggattttaatcctgatatggttaggttgaacttagttgtataattaatgttcttcaagttgttcgtggatcctaaccaatgtttttggagaatatttacatcttgggaacattgtagttcaattgagtaggagcgctaatcatagatttggaatctatagtttctttaagtattaagaagtgaaacgat

SEQ ID NO: 370592 - DNA, 608 bp, Cannabis indica
actaaaaaatatcaacacagttttcattatttacttattttaatttcacttccaaaatttaaaaaaggacctactagtctacggttctccaaatcaattctttttcttttttaatgaacttttctcattttttgtaaataagtgacgtgcctttgactaatcccgttaataaaaataataactaaataaataaacaaaagactacaaatttattagcataattaggaaacatacaaagctctctcacacacacacatgcttaaataggaattgatttttagagaattacactatacactgttttattagcttttattttttttttctcaaatttacagtttgggtttctaaagtagttgcagcactagttgcaataggagtttctatacgattttttgttgcaatttaggttgcagcgctagttacaataaaggtatttatgtagaattccgtaaaaatataaaaaaaaaacttgttttaaattataaaaataaaaaatctccttgattttttgaggatacaaaaaatctacatgaatatgactaggtacaaaaaaaattatagatttaggtcagatacaataaaatactacaaatcaatacgacaca

SEQ ID NO: 370593 - DNA, 762 bp, Cannabis indica
tgctctgttagttgttataggagtttctatgtaaaattatgtaaaaatacacaaaaaaaaaaaactgttttgaagtgtataaacgaaaaattctaaaattatttagtttgttttaactaaaaaaaggcattcttataaatatattaatttttttgttatttttatatttttactatcatattttttttatatattttttactgtactaagtttttaaaaatattgtcttaaagtatcaaaattataaaaatattgtgtttcaataaaaaataaaatagaaaaataactataaaacaccttaacaataatataaaaaacaactataatacaataaaaagacagctacaaagcaatagaaaaataataagacattgatctcgttaatattaactcctcagcatgttgtactgcgtagttttcttttacatagttttaacaaattgatttatctttttgtaataatatattatatttttcataatatagaatttgtatataatatgaaatacaataataacatataataattaagtatgtgtacttgattgatccatagtaattaccacgactcatgggttgaatagtacgaaaatatttgtggtaactttaaaaatgatagttctttgataacatctcagtatacttatctcatttaatatttgatattgaactatgacaatcatattgcttttcaattaacctaagttttaattaaactaataaaagttagggatgtgattttgtcccgttattgtactttca

SEQ ID NO: 370594 - DNA, 504 bp, Cannabis indica
tttttcaaatttttttttcatagatgtaacaatctgaactcatatgatataaaaatgagagataattaattatttttattaattatatcatatccataattttattaattattttttattcaaatatcacattatttaagatataattttatcttttcatacaaattttaattataatgttcttaaacaaatactcaaagtgtagtctatttttgttttaataaaaagagatcaggtagcaataatatctatatttcttttatattgtttattttttctctttatattttataattttttagttttactattttatattttaatctttcattaaaattcttttatgttgttaatttttatcaaacggtaattttatataaaaattaaataaagtattcaactatttacatataataaagcttcttagtttttgtttttgagtcgcctctcaactacttaatctaattatttttttttaggaaaaaaaaattaaataataaaact

SEQ ID NO: 370595 - DNA, 576 bp, Cannabis indica
aaatttagataaacttttaacacataaactttttacaaaataaacatcattcagattaccaatttctatttattataacaaagatgaattgattactatttttaagtaaattaagtatatgtaaaactactaataatatctagcatagttggtaactttttttttctttctgaaattgcaaagttggtaacttcatagaacactccattgtggaggtcatgaatttgactctgctcttctaaaaaaattgatattatatgttatcattttgatgtttattgagctttgctaaaggtatgtaagtcatttttccatttatataaaatatgaaaatgaattaaaaacttggttaaagtcttaaacatggtcttagtttgcatgatttgaattttatttttaagatgagttgagttttgtttttgtgtgaatatatatgtgtatatttagacatatgtttgatttttctttcttttaggaattcgatttattaatgtatcattcatacaagttcaatcaatactttctcataaaaaagtataagaagatgttaaataaattaacaattaacccaagatc

SEQ ID NO: 370596 - DNA, 767 bp, Cannabis indica
gaataatacttgagggattttcagatgttgattcgacagatgatattcatgatcgaaaatctgtaatcgggatttttgtttaagcttggcggaaatctagtgtcatggggttctcgaaaacaatgagttgtatcacgttacagtataaaaagtgagtatcagtctctttctactacagatacagagattgcgtggataacttctgtgctacaagaactaagaatcaaactatatagaaaaccaaaaatatagtgtgataatcagggtgctcagatacattgaaaggtagaacggttaaatttctccctattcgatgtagatcatctatactagatctttgactatttagattgtaacaatggataatttcataacgtatctatatcttggtacatatataacgttctatataattaagagtgcaattccaaatctatagtggcgcaagaagattaataagttagagaacttacttggtaaattctagttctgcttattggaagcttgataatattggtccatggtccccacactggttgaggtaatactgcttgcagactcaattagttgattttaattaatcaattataattctaaaattagactatgttacatttatgaattttcatcaagcaagggcttaattgtgaagaaaagaggttttgggatttatttattaattaagagactttgtatggtctaattaataaataaaataaatagtatttttattctgttgtaatccatatagttaaatcctaaacctt

SEQ ID NO: 370597 - DNA, 577 bp, Cannabis indica
agacataagtaaggcttacgacgatcttgaatggggatatcttcgggccatgctcgagaggatgggctttgatggaagatggatcaatttagttatgtcttgtgtgggtaccgtttcttacatgattttccatgggggtaaggagttaggtcctattattgcacaaagaggcctttgtcagggtgatcctttatcaccatatctatttatcctctatgctgaggggttctcaagtctgttgcgtagctatgaacaaaggggtttaataacgggcttcaaaattgctagaggagcaccagttatttcacacatgctttttccagattatagttacatctactgtaaagctacagaggaagaagcacataatgtgaaagaattattgtacactatgagatggcttcggggcgaaaaaaattgcaataagtcgtctgttttctacagcaacaacaccagaacttatcatcgagatacaattttccaaatgcttgatatatatgaggcagatgagaatggcacttatttggggctcccttattcagttggtaggaacgagaacgctattcttggttttctg

SEQ ID NO: 370598 - DNA, 357 bp, Cannabis indica
gatttcatcaagtgattcggctaggagtatgtgattggtatcctagttgtacgtcaatcttctgtgcgatggtggctctagttctacaggcagcatagcttcatatttatatgccataggaaatggagtctgtttggttgccgttttctcaattgtctgatataaccatagaacttcaggaagttcttctagcaaatttcctttggcatctttgagttttttcttcagtgtatccttcaaggtcttgttgactgcttctacttgaccattcgcttgaggatgtgccactgcggagaaacttttgatgataccatggttcgcacaaaagtcagtgaaggattggctgtcgaactgctt

SEQ ID NO: 370599 - DNA, 561 bp, Cannabis indica
aaatacatataaatattaatatattatttgtaatatttttattttttattcttatttttaatcttagaataatattcaattttaatatttttaaattttatttttatttttattgtatttttaaaagtttaaatattattttttaaaataaattaaataattaaataatttcgtttaatttataaaattttaaaaatacaaataacaaaataaaactagcaatataactaaacatatctacaatttaaatctatatatatatataaaggagaagtatgagatagtgacatgacattctaaaatcactttaaaattatttttctcttctctctttaattctctcaattttaatattttattaaagcataaatctattgttgcccctgatttttcctaatatacgtggaccaaccaggtaaggacacgtggatcaagcaattcacaatatttgctacatctttatgccataaggtagcgttcaggacgtagcccccggagaaggcacatggaactccatatgctcccggaatgtaatatcccagaaaataaataatatttaaa

SEQ ID NO: 370600 - DNA, 602 bp, Cannabis indica
atgcaggtttggctaacataaatgacaaggtcgatgaagaaagccagaccatcatcctgttgagatcacttccaatcgcatatctggaagtcaaggtagccatatatcaagtatggcagagatgttattgcattgaaagatgttcttgccgcacttaagtcaaaagatttcgagttacaattggaaaaggaatccaagaaagaagaagtgtatttggcaagaggaagatcacctaagaaagtgaattcaatgagtaaacaccatcactctcaatcaagatcgaagtcaagagagaaggacacagggaagtattacttctatggaaggtctgaacacttgcaaagattttgcaagaagtacaaagaacaacaaggcttcaacagatctcacaatggagataggaaggagtattggcaccaccatcatggtaagactctgctgcaatcgctgaagatagtgacgactgctccacaaacggagagttgttctctatgtcagagtcttcaataacagggagtggattctcgattctgaatgcatttattgttgggaatattttactaggatctagatttactaacaagtatgttgaattaacatcc

SEQ ID NO: 370601 - DNA, 488 bp, Cannabis indica
ataataatatgtaattatattaataaaaataaaataataagataatattattaataatattaataaaaattttattattcatagctatcttattatttcttagccattaagaaatttatatttttagggtatttagtcaactccgagtaccgtaaaatatctcagtatttctaaaatcaatttatcgcaataatcccgttaatatttctaactaaaatcgttgtgacatttttggcctccaatggggtctctagagttggcgaacctgaaaatatttttattttatagataactcatattatatctacgtatttcaaataaatcttcgtaattaacaaattacgcttatttatctacttatcgggccttcagggtcaccgaacctgaaaatatttttattccacatatcgctcatattatattcacacatgctatataaatctctgtaatttatagattacgcttatttactcacttataacaaaaat

SEQ ID NO: 370602 - DNA, 701 bp, Cannabis indica
tctctcaatatgtttgcttctcttgtggctccttggttctttggatttagccaccactccactattgtcacagtagagcaccaatggtttttatacttctggaactacttccagagcagtgtagaatttcttcaactaaactgattccttaactgttttgcaagctgctatatattcgactttcatagttgaatctgcaatattggtttgcttaatgctcctgcaaactacaactcctccactaagagtaaatacagacccagatgttgactttcgactatatttgtcagattaaaaaattagaatcaatatatctagtaggattcaaatctctaccataatatacaagcatgagatctctcgttctccaaagatacttgagaacgtgctttacattacagctatctagtgttcaaaatttgggcctatcctcggaagttctttacgaggtctatttgcacaaccccaaggtattgcccttaagggcgagttgtcgtctggtctatagggagacaacaacctgatagagaagtttgttcaatgcttatattgatggatctatatatgattgaccagtatatatattttgacaaagtaaatggttcagtgcagcagttgtttctttagttcacacaaccccaacgatgacatgctgaatctagatccattattagttcaagtttttacaagattcaattttt

SEQ ID NO: 370603 - DNA, 659 bp, Cannabis indica
atgtggatcctcgacttggggacccaagcagcaatgttggacctgtggaagaattagaagagatcgagatcgatccagctatcccgagcagaaagctaaaaattcgaaaaggtttgttgctcgaagtaaaatcagaattgataaaatttctgagagcaaacctagacgtttttgcctggtcacatgcggatatggtcagaatcgacccttctattatttcacatgttctgaatatcgaacccaacttctggccagttcaacaaaaacaaaagtcgttggataaagaacgagcagtagccctgaaagatgaagttgaaatgatgcgcaacaacaacttcataattgaaactttttacgcggcttgggtcacgaatcctgtactagtacccaagccgaacaagaaatggcgagtctgtattgatttcacacacctcaaaaaagcatgccctaaagactgttttccactttcaagaatcgatcagctcgtagacgcaacagaccaagaacatacaaatttccaaacagatatgggtctctattgttacaaagtcatgccgtttggtctaaaaaatgctggagctaagtaccaaagattggtaaacaaaatgtttaaagacaagatcgggcgaaatatggatgtgtatgtggatgacatgctc

SEQ ID NO: 370604 - DNA, 646 bp, Cannabis indica
cttcacgcagttttaataattttttaaaatttatttattaattacatataaaattttaggtctattttttctaatttttaataataataatataaaattatatagtatattttctacatatatttttatgtgtgattagcacaaattttaatcataatacaataaacataaaaattcacttcacatgaagttatttataataattaaaacttattaaaaatatatttccttttaaatgatctattaataatgatataaatttttatgtaactaaaaatatcaattttttttatttatttatttatagctaaaataactttttaatagttaaatatacatctctttcatatatataataattgaaaattatatatttaattaaattattttatagtagttctttttggtttttataaaaaattttaattttagtgttaataatctaaataaaggaagttactttatataccattttttaattttgttttctttcaaatttatggtttggattacttcagtgatttctatgtgagttgctatgtagatttagattgcgatttaagttgctctgttggttgctatataggtttgggtaaatagtggcataagtacccaaagttttaggtttgtaagcggcataaaccca

SEQ ID NO: 370605 - DNA, 828 bp, Cannabis indica
cctggttgtaatgggttaaactcgaagcgacctaatcaatgcgaggaggaaggcgaggaccgatgcgcgcctccaccatggcatcaagctttttcttcttctctcggaactttgcgatcatctcctcgggtttggggtagaaggtaagcttgatattctggtcatttgtagaccaggccatgaagacgccatcatcaaaacgcttggcgcaccggctgcaggagacgggagaaaggagctcatctctttttgccttctttaaggcttggtctttgaagtctttgagctccttcagctccacggccaggttggccctggactccaagtttgcctggtgagtttcctctaaggacctcaccttggcagccatttcatccaaggcttccctggcctcccgaagctctcgcctggccttagcagcggcttcgccctccgccctcagctcctcttggtgcctggcctccagcctatctctccgaagggcctcctcccggatcattgcctccgcttgcgcttccctccgcttggcctcttcctcactggccttggcaagggcctcccggcgctcagcatcctcctgataaagccgcctttcagcagtcaggtcctgaaggatcttcttaacttcgtccatgtccccaaaatcggacaggacgaagccatgattaattatgttcttggaaaggcggccggcctcagcagcaagctgggaaaggatacaagtataagtaagaatctccaagaaaaaataataaggagaaaagtaaactacaaaatacttaccacagtgagggagtggctgagatcctggacttggaagatggagtt

SEQ ID NO: 370606 - DNA, 500 bp, Cannabis indica
ggcatggaatccatgtacatcttttcctctgttttaggtgactggttttgagttagcttgaaatgctgagccagtggagtgctaacagacttggcctcattcatacagaacttgtcaatcaatttctgaatgtaacccttttgagataatgaaagtctttcaggtctagctcttttgatgtcaatcccaagtattctcttagcttcaccaagatccttcatttcaaattcagcacttagattttgctttaacttgtcaatagcctgtctcttctcaccaattatcagtatgtcatccacatacaacaataaccagattggttcattgttgtaatatacacatggatcgtagttgcttctgttatacccaatgctcatcataaactcatgaaatctcaagttccattaccttggagcttgtttgagaccataaagagatttctgtagtagacatacctagtttggtttgttacttttgaatccatctggttcttccatgta

SEQ ID NO: 370607 - DNA, 923 bp, Cannabis indica
atcataaatcgcatcacttttcttaaaatatgtttatattgttaaacttattttaccgggatctagatttactaacatgtatgttgattaacaccctaaatatgaattttctaatacaataaaataaacacatataaagttagaaaactttaaattgatggtagcgaaataatatgactttttccgtttagatctcttgcccttgaattctttctttagcagaggattattaagatctgaacctggatcttctctccttcggtttggttaaccaccgtcttccgaactatgattgagtacttggcttgctatgtgtgggcatggtactctatcactaaaggcttgaagattaatgaagaataataataaggattcgaaatcactataacaggagcctctaatctactagttatttgatggagttagaaaactaggtttagtttgattgaaggttggatgagaatgaaagcatcatgttccttttatagtatttcaagtagggtttaggatttaattatatggattaaaaaagataaaataatgggcaaaaaatacactaagttgcccgccacacatgtgggcctcactagttacaattttgctactttatttcaatcatttatcttttctttcaataatgccacattttctaatttcaatcctataaatgtcaaaattatttattgggatattggcggttaaaccacctgaactttacggtttgtaacacttaaccacaaaaactgaatttttggcggctaaactacctaaaccctggttccgttttgctctgcacacctccgtccaaaaatcacagttaagtgccactgtggactgtccacgtgtacacacttgtacacgtggcaagtttttagtggtccacgtaatattggtttaaaaaaataattataaatattttaaaa

SEQ ID NO: 370608 - DNA, 929 bp, Cannabis indica
tttttagttccttattctgactatccattacttgtttaaactaacaatggattttatcatgagtttcttccaactcagggtgagttccttgaaaccctcccactacgacaaagtaccgtgactatatgtgtaagaacataagtgatattggcctcatcgattgtgtcaagacaacagaggcagtgggaccatcttatatagaataagatgatagaacactttagaaaaaatatatcctttactttgctactttgttttcagacttagtcattctcttagaaaaaatagtatttgttgaaacaaacactttcttatcttaatgaccataggatggtccacccctaatcactttagaatagttatcaaacatataaacctaagttaatagttctagcttttcttaaattacactaagtaatggtatacactaagttaactgttctagcttttcttaaaccattacatccatgaatctagtaatggtatacactaagtacataaccattccatcattctaaaatttttctatcactaggtatttccctagaaggacttaggcagttgttagtaactaataatagaccttttattttcatcaatatgcaatccgaatttctagggaggtaagtttggatacaattaaaaattcaacttaatgatctttgaactgcatatccaccaagtatttttccacctctatcagttcgcaagatctttaaccacttaccttaatgtttttaacattgctaaaaattcataaaattgctcaaacatttaaatttctttgcataagataaaatctagagtgatcgtcttaagaatttaacgataactcatatccacccctgaatgtacatctatatgttcaaatatagattatcctactttcaagtagatatagacatattttctctttgtagagaatgatc

SEQ ID NO: 370609 - DNA, 616 bp, Cannabis indica
ggtacctcttggctgctcctctttctctcttgtgagcatttttggtgacccccctaaagcctgtgagctataaaattttctcatgcaaaaattacaagagaaaatcttgtttgttgttggtgctatttttgatgatgatgatgaggaggaggattgatgatgatgatgatgatgatgatgatcaaattctccagctgaaaaaagacaattggtttttgctgaggcctcctaagcttaaccaatccccaagatgatcatcattattattattattgtcgtttccagtacttgttcttgattccacatctaattggttatctgaaaattcatttccagcttcttcttcttcttcttcttctttttcttgtttctgttgttgattattctcactcttgaaaaacattgcaacacaaagactacacagaaggttataacaacagaaaagaagtaaatgtattatataatgggagtctagctaagctatctatgtaggttgtgtgatagaggaatttaagaattgtggggtggttggacttaaataaaggattcaattaggagggtcaaaaagagagagagagagagagagagagagagagagagagagagatacaaatag

SEQ ID NO: 370610 - DNA, 492 bp, Cannabis indica
tttgtctaattttagtaaaaaattctaacatggatgaaagctgaatgacatgatttaatacatattaaagtttgaggggcatgatttggtaaatattaaagtctagggaccatggtttagtacataaacaattactgaaacagtaaaattgaatgaaattagacaaacgtccttaaatctaacaatctcaatagttcagggagaatttttaacggccaaaaaagttaagtggcatgatttggtacatgtcaaattcaagaaaaacaaatcctaattagcttaatttaataatcacaaagcgacaaaatgtttttttttaaaatactaatagtaaataaatatttaaatttacagcaacatctgtcatactaacattgttattggataacaatggtgtctagtacttcttaacatgttgttttgtgattaactaacgatattatattatacgagatcttatatttaattggactaataacaatattaacacat

SEQ ID NO: 370611 - DNA, 869 bp, Cannabis indica
ttttagggcattgcttaagaaaaaatttgtctcttttaacgacaagggtatcacatggtctacaatcttgcatgccaaactatttgaatactttatcgatataactcttttgtgataatctaagaatatcctgagaacgtctcgatgtatttgaatttttaaaacaaattaaagaggcgtcatcgagatctttcatctcaaaatgctcagaaaaatctcttggttttgtgcaataagcctataagcctatatcattagtggtaagcaatatgttatcgacacatagaattagaaatatacacttattcccactaaacttgtgatacacacaatcgtcaacatcattcatctcaaaactaaataagagaatcacttgatgaaatttgtaatactattgtcgggaagcttgcttgagtccacagatagtatttttttttttaatttacaaactattttctctaggtcaccacacacaaaattttctggtttttccatataaattgactcatcaatgttgccattgagaaacgttattttaacatctatttaatgtaactcaagatcaaagtgagcaacaagtgttattattttcctaaaagagtcttaattagccatcaaagtgagcaacaagtgccatttaggctaattaggatttttacccccaaattttgacatgtaccaaatcatgctgcttgaacttttaaggtcgttaaaaatgccacctaaattattgagatagttggatttaaagttttttgtccaattttagttaaaagaagtctaatatggaagaaagttcaggagacatgatttaatacatgtaaaagttcgaggaacatgatttggtagatatcaaagtttggaagcat

SEQ ID NO: 370612 - DNA, 645 bp, Cannabis indica
attagggttttgtcttttatttttagtgtatttatttattaattaatttaaaaataaaaatctgattattaaaaagaatgaaaaaaatatttatttattattttatattataaaaataatttagggcaataaaactatgccacttgtacataagtgtacacattggcagttctatttggcatttataacagccaaatttaacatatgtattaaagtgcaaacagaataaaactaagggggttttaccactaaaaacaaagattaaggggttaagtgtgtaacaattgaaacataggggggtttagccgcaaatttctcttaataataagtaaaaaaaaaaaagataaatactagcggacacatataatagctagagagaattttagcccctcacatttttatattttagcatttatagtatactttattgttgatttatgaatatgtggtaatataattttaataagaaaaagaataattgaaaatgcttaaataataatatattttttataaactacaaaagtaaataatattttaaaatttatttttaaaatatatttcacgccgaacctatgaaaatttaccatcgttgatgcaaaatttaaataattaataaatatataattaaaaaattattaaaattat

SEQ ID NO: 370613 - DNA, 612 bp, Cannabis indica
acaatcttcgagttgttggttatttatatttagattttggtggttgtgtaaatgatttaaaatcaaattatggctatattttttactttggttggtgcagctatttttagaaaagtattaaacaaactttaatcacatcatctactatgtatgctgagtttgtcccatattatggggcatgtttacaagctttgtggttaaagaatttgattttagagatacgactagttgattctatttcctcttctatattaatatattgtgataataatactattattttcttttcaaagaataatgaaattagtagtgcttccaaacatatggaaataaagtatctcattgttacagacttggccaagaaaggagacattatgatagaattattgcaagaccaagttgatgttagcagatcctctaaccaaattattaagcgtcgtgttgtttaataagcatgttgttgatatggacattttataatcttttgtttctttgggttagtggaaatttcttgttatattatttgagattacatttatatgtaattttcttattaatgttatgaactacttggtttgttttgtgggctaataattttttattattggatgt

SEQ ID NO: 370614 - DNA, 699 bp, Cannabis indica
tctcttgccttttgcttcattctgctaatgtttctctttatagtttcagggtctaaattctttttgggaggacccatcgttttcttctatggaggttcctgattcataaacaagtgctagtgtcagattacaaacttaaacatagaaaatgtattctaattatcagtgctaaagaaatgaatatacttgttcttatactggtttcttacaagttttctttgtatttgcaggctatttacaattggagcagttgttggacagcccaaatctcctcattttagttgcaccaggtggagattcatccacttctctttttctaaatttctagggcctactaggtaaaatagtttctcgtggtggaaggattggatttttgcctttatcaggccagtgttcaggattaggcataggtgcaattgcccttgcataaatgcctatgaaggcttccttcttgtaacatgcagcaacaaaatcataaatctgaagctttgaataccgtatgcatgctattgcatgaccacatgggatacctgtgaggtcaaatgatctgcaagtgtaatgtccccgcttcaagcctccattgggcccttacaaccacggaataatggctcttctacacgagtacaccactttggcttcttcatggactgacgactggccctacagaccaacatgagtatttccagcgtgctttgtcct

SEQ ID NO: 370615 - DNA, 680 bp, Cannabis indica
aagtgtttaagcagctggagtcccaggctcttggttcggttcttctgggccaaccggagcaggaggatctgttgtttgaacaggaggtacatcagcagtctgaccggaggttgaagcagccgcctcagttttgccataggccacttgggacgcgcagaactcaaggtacatgtccttagcatcacccaagtagtcaaaattggcctgaggattagccttccaaaaatcaaagaagagctcaagaccggctgtctccaaggcattgaccttctccttcaacctggccacctcagccgaaagctcctcctccttggcttccttttcctccttcatccgatgaagaactgctcgaagggaagtcctctcatcctgaagactgtttacctcaacagataaggtcttgatggtctcctcaaaacggtcagcaacctcgagatccttagtcagctcagtgatcttcttctgagcagcaaacaacttcttgttggcttcacccaactccaaccgaacagctccgacttccgccctggcttcttcagcatccttcctggccaagtctgcctacgccctcatggtgtcggacccgtgttcctagaagcaacagacttagcccgagagtaagcgtaggccaacttcagaccggcctgcacaaagaaaaaactttagcatttgagctaagt

SEQ ID NO: 370616 - DNA, 800 bp, Cannabis indica
ttgcacagcttacccggtatttccccttacagatcacgggactactgactgtcacaactactgacgacaacaccacctatgctaatatggtggagaaggcactgtgagctgagggcacagttgcgtgcactcaggtgtcccgagggactcaggttgctggtggggctcctactcctcctacccctagttatggaaggggtggtagtggctcaaccactgatctaaaataaaaggcaccaactccacccggtggctcgggtcagaccaagaggttctgagggaactagggtcgaggaaaacgtcaggatggttctaaaacctgataaacttacccgaagtgtctagttgtaaaaagcatcatctgggtgagtgtagagggcaagggtgtttccagtgtgggttgtcaagacattataaaagagactgcccacagcttaagaaagaagaacacaagatagctgctaaacccactccagcaagggtgtttgctctaactcaggttgatgtagaagctagcccctgagttgtaataggttagctctcgatcaacaactcttacttcttagtattgtttgattttggggccactcactcttatgtggctgcaaaaaattttggtaaattagatagactgcatgataattatgataaagggtttggaaccctactgcctagcgaagaattagtcatctccaaaaggtggatttagtctatgtcgattagaattaaggatagggagttgagtgctaacctaatagaaatgggtttaactgtaacgccctaatgctaaggcacgctac

SEQ ID NO: 370617 - DNA, 563 bp, Cannabis indica
acaaatatttaatcccttaaattctaaaatatgcctacaatagcccttaaatggactcttgcaaatttttactgtagtaccaattgcaccattatatgcatgttggaaagcatattttaccaggatcttacttttactactcaagtatgctagattaatctaatctaacaccctaacatggattctttaaaaaaaaaaaaaaacgatttgagaaatccttaaagtgtgtaatgaccacatatttatgatatagattagtagggttattagcattaatcatttgcattttattgttatatgttaatagtttgtgttgtgggttctatttttaagaaataggcattaggattataatttttcaatttttgagattttattaaattctaggtgtattgtttatgctatatgtgaaaattaatatttttatgatttttgctcggtggtaatgaaaaatgtgacggatggccaatagagtcacatgagttagtttggaatatcaagttttaggtgggattttcaccggtttgttatcaaggaatagtggttcaatgctacggcaacca

SEQ ID NO: 370618 - DNA, 1081 bp, Cannabis indica
tgttaattaagagactttggttagtctaataaataaatataataaatgacaatattatttaataattaattatagtaattttagtttttacggaactcgattccgataaaaattgagaaagttatgaaggtttgaattttgggtgcccatcggtgtcgagctggtgctcgctcgcactagaaactcggacaagaaaggggcttgcgcgcgcggactgggacaaaacagtgtctgaagacacggtgtcactcgttcagacacgagaagcacacccacgtgatgctcctgctcgcgcctacgtccgcccacacgaatcctacaaatgccgagttttctcgactgggaacgagtgacacgcctggcctatttgcagcctcatttggctgcacgtgcagcgtcctgggcagccacctcacccaacctaatttttgtgggacttttccccaattttggatttttccaattttcaaactccaaaattaaaataaaatatatattttttaatatatttaaacttaaacatcattttttaaattattaatatttatttttaatacattatttttaatttttgatatttcgaggtttaaatttaaaaataattttttaaattttaaattatggtcagatttaaaaatttgttaatttatttaatatttatatattatttattttttaaggttgtagatattttaatattgggtcatattttaaattaaaaagataactttatccttttaatttgtaaatattatattaaaaatacaaagtttagtatttaaaagcaaaagttttattgacacgtttttcgagaaatttcttgattagcaaagtgcacaatatttgaaaaagcactgtagcgtgccttagcattagggcgttacatacctactcattactcccactcaacagcaggtgtctggtctaaggcatactaaagcatatctgagacctctcactgttgatttaagaaattctttcatggctttatcttttctggaatagttgagacttttccttagataaataaaatctatgcctagaagtcgagaagcttctatagattgccattagaaagaaa

SEQ ID NO: 370619 - DNA, 718 bp, Cannabis indica
ttgtaaacccatttgcaagctattattttttccctttaggccttagaaccattatccaggtcttgttttctttaaagaaatcatctctgcatccatagctttaaaccacttcttagcattaggccctatcatagcttcttcataagtttgaggctctacacttagagattgcatggctgtcatgaaggcataggctatgtcttcattccaaatattgaaactgtacttaggattaggtttaggtgtcctcttctctctgtctctggtcaattggtagtcatctagagcttcagtgggttgaacaacctcagtttcatctccctgttgctcttcattctgtgtctcttctctgttagaattttctgtatgttccacctgatcctgatcaggttcatttccagctggttccacctgatttatatcaggttcttcttggtcatctagcctccatagagtaggatcaaattgtattgtacctgcatggttagtttctactgtacctgcagggttagccttaagcaaacaaggaaattcattttctttaaaaataacatctctgctaataatagttttgaatccacctttttctcttagccaaattctatatcccttaactccttcaggatagcctagaaaaactcctttaatagctctaggttcaagcttaccaatactttggtgcacaaaagcactacacccaaaaactcttaagtttgag

SEQ ID NO: 370620 - DNA, 818 bp, Cannabis indica
atgcattctgatcttgtgtactatcttttaatgttaatattggtaattattgaaaaaatatgtaaaattgacacttaattgaatgtgttggatgcacatatagtcatttcttgaagatcatgtgttaagaagaacttggtaaaaatgtctttggttctatctccttcattatagttttatttgagtaatgcattttgcattatcttcatagaaaattaataatgttcatactttattgagtgtaattcatatatttttcgaatatattatgtcaataatcttattcttaacttgttttatgaagacaagtatgttagcatggtttaaagttgactcactaaaaaaaaccaatgggacaaaatttgagctaagaaaaaaagagtgaaatatatattcgtaattatttgcaaattgtctcattaaaagccttattataaaactgagctaaaaggaaaaagaatgcaacatgaatatgtctccccctatgcacatatgatccattaatttttttttgtgataatatatctcataaaattattgttatctatgaccatatattttctaaaattcttttagagtatgtgtggacttctaaattatggatgaggggcttctcgaatatcaataattatctaacttattgaatcatccatgtgtgtgtatatacaactttgtcgtaccaaagtttaaaattttaagtacatatgaatataacacattgataatataaatttttgttttcaataacgatggtgctacaagactatatatttgttctattcttattttatgatcttaatttccatatcaaatgatca

SEQ ID NO: 370621 - DNA, 501 bp, Cannabis indica
aatttaaaaagaaaaaaaaatcttgataactaaaatatatatatctttttcagagaacgactgccgcgcttcacttctatgtagatctgcaactatatagatataatctatatagctactcgatccatttcatttaaatcaataaaacaaattaccctagcaaagtgttagcatttcctctaagtgtggtgtatatattttagcctatcttcataaaaataaattttgatggtgtacttataaagtagtttaaatttagcacatgctattatatcaaatttaatataaaatataacacgagctaaattttataccacaataaatattacttttttatttactcttttgccacctattaaatattaatgtaattaaaatctttttatatttcattaataagatttttatatactttcaataagaataggaaaattaactcaataccaatttttaaccttttttttaatttataatttgggttgttatgtagattttagttgc

SEQ ID NO: 370622 - DNA, 606 bp, Cannabis indica
tctccacggccaagttagccttgcactgcaagtccgcctagtgtaactcctccaaagacttcacgttggcaggcatttcgtccacggcctcccttgcctcccgaaactcatgcctggccctggcgacggcctcaccctccgcctttagcgcctcacgatgcctcgcctccagctcagcctccctccgttggacctcctcccggagcctcacctccgcctaggcttccctttgtttggcctcctcctcaagcttcgccttagcaagggcctcccttcgctcgacctcctcctggatcacccgcctttcagcagacaagtcccgcaggatcctcacagcctcgtcgatgcccccaaattcaacatgacgaagccatgattaactttggtcttggaaaggcggctggtctccgcagtaatttgcaaaaaggagataagagtgagaataaaagccttagacaaaattccgaggaaagaaataaatcataagtacttaccgcagccatggcgttgctgatgtcttgaacctggtagacggagttcaaggatgcacaagcagcgtaccgtttggcgggaatttagtcaagtgggagacatactcgctggtca

SEQ ID NO: 370623 - DNA, 534 bp, Cannabis indica
aaatcatttccttaattagaaaataacttccataaataaaaatattctaataatataatcatatataaaagaaatttaaacaagatgtaaattttgtccaatgatcaatctccaacaattgcaaataatgcaattaaaacaaaaaataacatatctccaattaacaatatctctattatatttattcaatttctagtcctagagtatcaacaaaatcaattgaaaatctcttagtgcttaagtgttgaataaatcaaacactttatttaattattttataaaacattaatatttaagttatattctacatgcaattataaattgagaacttctaaaaataaattataaatatgaaatattatccccatatgagattatattcaatattgtgtaacactaacattaataggttctttttagggcattttacataaacgtatacattttcttaattaattataaaaaatgtgacaaaaaaaaattaattgttacaatgtacacatttaaaaatatttttacataaaatcatacaaa

SEQ ID NO: 370624 - DNA, 968 bp, Cannabis indica
tccgaaggccggaaccagctggatgtaatataagctgaagggcctaagggaacgggctccggaggaccagaacccatccgggaccgacctaggaaatctcctaagttggaaaaataaaactccttcaaatggtctccccaccgggtcgagggcatcctaaacctataaagacgctcatcgaaccctacaggcctaagactggcatactcgccaacagaagggacataatgaactgctaaaggagacttaccaccggagccggaagtgctggcaccaggagccccagtgttcggctcctgagccgaaggctgtggcctgggagcccttctctccgctgagtccccaatatgaaggggcttcccggcgatcgcctggcttcttctctcgaccgggctccccacgcgaagtggcctcccggaagctgcctgggccttagagtatgccttctcctgagccttccggtagagatattcctggtacttcttctcggcagtggcgatgatctcatcccggaaggtcttctccgcgaccggcgccctcacgttgggacagataacccgggaaaggttagagtcctccacggattggtgcggaaggatgagttttgccttcctgcagttctccgtagtgaccaggcccccgacgtcaagatcagcccggtcataagaggcaaaggcctgggctctccgaagaaagacctgagtaggtgcggtccgttcgtaaggaggaatcctgacccactcagtgaggagctccggatggtccactgcccggaacccggaagagaagaaaaaacgatggcgatactccttaacatgagtttgcctattatacgggaccaccccttcattggcagggtgggcccggaacccgtaaaaccgtccttaagtttgtccccttcttgggacagaacaagttcgtaaaataaatatttccgccgggcggggagagccccatccccgggcgga

SEQ ID NO: 370625 - DNA, 626 bp, Cannabis indica
aaaatatcttgtgttgcggtctccatgggctaaccaaatagctctactcctttgtttccaaaacaactcttccttggctaggtgaccgttgaggtctttttctagaagtttaagcttggagaagccatcagttgaatgatcattagagtacttctccacatctttttttagatcttttattttagcaaggttggtcttcctttggattgtattccattgatctaacatagtaccacagctgttaatcatttcttcaaggtctgaagccgagttaattggattgccatctttccatgtgccttgaattatttgatggcactcctccttatccgcccaagccttttcataatgaaatcggcaaccccaccgttgtttcttttgatctccacaaggaattgtattgaaagttagtaataaggggctgtgatccgaacaccatcggctaaggtgtttgactttggctatagtgtagatcttccaccaattattgttcaccatcacacagtccaacctttcatagatcatgttggcagcccttccattgcacaaataaattggctgccctcataatctatttcccgcaacgcacaagtatcaatagcatgattaaagtttttcatgagatg

SEQ ID NO: 370626 - DNA, 618 bp, Cannabis indica
caccaaagatagcacggcaggtgcgctcagacggaataggaaggaccatatcaagtgattgaatttttcgaatcaggagcatacaaactgggtaagtataacaaaaaaatgcaactcgttctagtaccaaggtattcaaacggggaacacttaagaaaatactaccagtgacagtaccaggtcgaatgaccatcgtaagtacgaaacaaaagaacatttactctcaagtgaatggccttcttggcagaccacgcccaaaggttcaaatgaaatgacaaagtactcaggtcgggtgacccctaatgagagtaaattttttattttatgcaatttttttgtttatattaagctaaagatcggaccagatccaaataatagcttataggtaagttactacggtaacgagtgtattcccgaccaagaaatgaataaagatgtttattcaaattcaaattgagtcaagtttattagcaagttaaaaatttaccattaaatgcatacaaaaggtctgctgtatccatagacccgaacagacaaaaagaaaacttgtgaaaaacaactgaccaagagtcaaaagtctgctcggtcacttggggggcacctatacttgtacaaagc

SEQ ID NO: 370627 - DNA, 649 bp, Cannabis indica
tctttaaacttggaattatttttcattttttcgacaacaagctgaccgggcagcttttaatcccagtcttacgtgattttgttatctttattgaatttcatcctctgtttataatcatcgtgcaactatgtttgtattatctttaccaaatgctttgtacaggtataggtgccccctaagtgaccgagcgacttatgactgttggtcacttagaatttttttcgagtatacttttttgtgtgttcagagttttgggttcgaccagaccttttgtacgcactggatggtaaattaactacattctagtaattttgactcaatttgaattttaaaataaacatctttattcatttattgatcgaaaatgtgtttgctattgtggtaacttacattagagctatttgatctaatctgatcttttagcttatcatgaaataaaacaaattgcagaaattaggaattgtactttaaatgatggtcatccgacctaagtacttttcaattttgtgtgaaacttcaggtgtggtccgcccagaaggccattcacttaagagtatatgttcttttagtacttaatatggtcatccaacctggtacttctattggtagtattttctaaaatgttccccattccaatactgtggtacta

SEQ ID NO: 370628 - DNA, 722 bp, Cannabis indica
aaaatagagatctaaaatagaaaaaaaataataaatctatagaaaattcattatataattttaagacaacaatcatcatcgtatctcatttataatcaccactgtatttaaagttgatgtcatcaccgtatctgactcttgtaattatcattaatattctttctaataagtttgctttgtacataaaataagttaaacaatgatcagtaagtacttacttttattatgcgagggaacagagaatgataaacataatcattttagacttttgatatttttgacatattaattaataatttttttaatatattatattagttaatattaactatatctctttacttaaaaaaattatatgtagattaatttttttaatacatatatatttatttattagttattatatataaatagatagttgtttttttttaatttttaattgattaatgatctctaattacataaagcagaataaaaaattagaaaaatgagaaaattaaggagagaatttaaagtagaacaaaaaaattagaaaaatgagagaattaaggagagaatagatatttagaaattttaattttttgattattaataattatcataaatttaaaaattataaataaatagtttgatttttctttgttagttattatgtatgattagatatattttaattatctatatctttatatattaaaagtgcctatctaacggcatttctt

SEQ ID NO: 370629 - DNA, 831 bp, Cannabis indica
gaaatgacataaatgtaaataaaaaagtaatgtatttatttaagtgtaaattttacatcatagcaaatattgtgccaaatttggcacaaaatttactacgtgtcaaatttacatcactttttgacatactattgaagtacactttttgttaaatgaataatattttagcttttcactacttatctatttatttagagatgttgttaccttttaacatttctcattatatatgtgtgagttattaaaagttgggtttttgtgccatgtctactgtcaatgtctacaatagtaggaaagaattgagttcatatctataatcattttgtatatatataattaaaaacctacgagaacaacctcatttttaacagtttattaataatatttttgtgtctttatataacgacaattaatacaacttcaaattttgtattattttgtttggttatccacatttgtcatttagtatttacaaaattaaatgccatcgagggtagacatgcatatctctctcaaaatatataattaagtaattaaagcaaagaatatatagatctttccattgattgatcatcattatcatcatcagcactactagtatatctatatgcatactttgttcaataattttatacacgtgtgtgtttgtgcaatatgatcagtagtactccttaatgcaagacaaattaatgactgtatagcgaaatagaaaaagtgaaagaaaaagaaagaaagatatatcaaagaacatatatagagacaaggcatggacggtaaggtaagcaaaaaaaaaaagggcatgggtttggacccttttattattattagctt

SEQ ID NO: 370630 - DNA, 666 bp, Cannabis indica
aataattgcatcttaaaaaaaataactctctctaactcactcatctctctgctctctctttctatgttaaataaaaactcattaacgaccacgacgaccgacagtgacagtagagattccactaaagccatgaatcacgcacaataaaaaatcaagatcgatctttaatgtgttatagataaaaatgagataacagataataaaaagttagaaactatttgtgtaaagaatccttcttatagttatgtgtcggttatttttatatttataaaaattataattatgtacaaccaattaagtacattttaaaacacatgggagtgaaggagtgatcactttaattgcatttaaaccataacactaatggtatgtttactaataagtaataggaatcaatagtaaggtaattattcccttacatttgtttacttacattattaaaattacgaaagggagaagttgattaaataagggagaaaaaaaatggagaacttctcccaccaattttgtaaggaatgccattaagggtaatggatttttattatttttattttattttttaatattaaatatataatgacaattttgtcttttaaaatatgtcttgcaaaataactactatataataatagtttaactcaaaagggcaatttagtcaatttaagc

SEQ ID NO: 370631 - DNA, 662 bp, Cannabis indica
gaggcatccatcttgctataggatgtcacgctcgttggaccttcactaatcaactccagacatctttcagtgagattcacagttccgtcgagtcagctctcttggatagaagctgacattcaaatgatgttggttgttaaagttcaccttgtcgccaagaactacgattgtcagatgaagtgttatgtcttcaagctcagaagcgacaagatttaaattattaacatcagaaagatgtgggaaaagctctagctcgctaccaggctaagttcccagcgagatgtcccagaatgatacgatttgcaatgtatttaatacacgtttacattgacccagtaaaagcagaccaatcacagttgtgtgatttttagatcttaactgcacttattttacgtgggatataatcaaatcccacaatttcaagggatacttgttgtaaaatatcattcaacactgtaattaactgcccgcctatgtaattataaatagggcaagttaattggaaaagggacgaaaagatcatcaaagaaaaatgtttgagagttgtatcagaaatctaaaaggtttgagagttgtatcagaaaaaggttggactatgcacaattttaactacaaaaccacgtaaaaaaaaaccttttttgttcttatcttttctttaccag

SEQ ID NO: 370632 - DNA, 533 bp, Cannabis indica
ctttttcaattgggtttgggtcgcgtccgtcggacccgcgtggctgaaaaacgggtcaaaacgacccagtttggctgaagaagacgacccaaacgacatgtcatttccacagtgtggaaaacgacgtgtcgtttttcaagatttttgccgtagtcgtttgttgtaaacgacatgtcgtttttcgtcttgtgaggcagccctttggtgagtaaaacaacgtgtcgttttcacatgtattcagcgcccttcagaatggaaaaaacggcgcgtcgttttgctttttgcaaaaacgacatctcgtttaggcagtgtaattttaaaaaattaaaaagaataaaaatggaaaaattccaaatttatttacaaattttatttatttggaatattaattattttcctaatttgtgttaaattagtcaataaattgcatttagtcagttttctatttttgtttaatacatatatttagtaaaaattgaaagtggaaatttgtttaatttggtaatttattacatgatttatttaggcatgta

SEQ ID NO: 370633 - DNA, 746 bp, Cannabis indica
tctctctctctctattcggccctcttggagcagcaagaagctgaccagttttttcttggatttcaagctcattttaacaagatttggtgatcatgaagttgttggtatggttcttgaacttgtcttgttatttcatgaattttttgaggaaagtggataggttgcatgctagtttttggtgttgttgctgctgttagttgttgtggttgtttttgttattaaaacgctgaattaaatgagattagataggttgaaatacatgctagttacccttgttctaatttgagaatttttggttcaaaagctatggtttttcaaagttaaaatgtgagttttgttgctgtgtttgttggggtcgatttcctgtgttttcaaaagtttttatatgcatgattgagtagatttaaactggttttgatgcttgtgggtgagctttagccaagtttgagttttgaactcaaagcttggagctcacatgacatttttagtatctgtgggttctgggttgtgttgatactttagaaatgttctttggggtatttagaacaggtctggaagggttggggcgaattggtttttatttaagggagttatcaatttttgagtgattcctgggaggaactggaattccggatgtgcaaccaaaatttcggatggggttcaggaattcccaaaaccagaattctggttgtgcaaccggtctgccggttgggggatttttaggaaccctagtgtttctcgttttt

SEQ ID NO: 370634 - DNA, 423 bp, Cannabis indica
aaattgtttcctttccattccattccatttcattacctccaaccaaacgccaccttagagttttaaggttgtgggagatatttattttaaacaagattttggccaaaattttaggtgctgggtgacataatttggagtgccatatattaacatcagtattcacattagaactggtgtaaagacaaaagggagcatcagaatttatctcatttttattaatagcagtaggattataagattgggcagctgttgaaacagctgaaggacaatgagaaacacaactcttagactctaaactagggacattggactaagtattgtctgaggcagatgacaaagtagtggccatgtgacattgaagctccagatcggggtttgaagtatgttgctggggaagcatgtacatgttggaattattttacc

SEQ ID NO: 370635 - DNA, 635 bp, Cannabis indica
tttaaataattaaaaattaaaaaaaattaatttattctgataattagattttatttaaaaatttggattctacacaaaattctaccaaaatttgaattttgtttcaatgaaaaataatttttgaaagtcaaaatatcacaaaaacaagatttggcccaatgcatgctccctacgcggggatgggagcatattgctgaggaagaggctgcaatgcagccttgttgaccatgtatactcagcgtgacatgagcttaagacagcctgtgtgtgaaaaacctcggatagggcttgtctcaatgctcggtcatgaccgagtgacaccctcagtcctcgcgcacgtgctttgctcaatttcacatattttcattcaaattcaaaaaatcataactaattcataaaaaattcaaattgatttttgcaaaaggctaaatttattagtttttcatttgctttcctgaaaaaatattttcagaacgaattaaaaaatattgatcaacacaaatttcgatttccatgcaatcatcaaatatgaacataaaccaacatgaagacatcgaaatcagtacaaacatcgttttaaatccataattcaagaaagtaaatcattaccatggctctgaggccaattgttgaaa

SEQ ID NO: 370636 - DNA, 628 bp, Cannabis indica
ttcgcttaggcaggaggagagaactaggtctatcgctgactttaaagtcttaagcgagataaggatatacaaactatattgcctcatgcattgacaagaaaccatttcgcgttagaagacacaatcataagggtgacatctgttgtacaaagtcaggcaccaacctcgctacgtataaagagatgaagacgagacatgttaaaacacttagcgtataatatatattatacaaactaagcataacagttgaacggatccaagcatcgaatagcgaggcatccatcttgctatacgaaggcacactcatggtaccttcactaatcagcttcaaacatctttcaataagattcacaactccgtcgagtcagctctctcagatagaagctgacattcaaattatgttgattgctgaagttcaccttgtcactaagaactgggattgtcagatggagtgttatccttcaatagcagaaatgacggtatttacattattaacatcgggaagacatgggaaaagctccagctcgctgccagggttatgtttctatcctagcgaggtgacccagcgagatacactttgtagcgtatctaaatccacgtcagcattgatccggtaaaagtggataaa

SEQ ID NO: 370637 - DNA, 643 bp, Cannabis indica
attgaattatttaaaaataacatcaaatccgatttgatcacaattggatatccggtatttggcggtcgattgtaattgggttgatcaattatcactagattggataatttatacacacccctacataagaggagttaaggtgaaaaggaaagaagaaataagtaactgtattttctttttagggatagataactctaatcttacttcatgatttatctctaaaaaaaaataataatttccattaatccaaatcatacttataagtaaaatttgataaaaaaattcttcaatctaacaatattacactactataaatatcagaatttacgacagtcttaaaaacgatttttttcggagaccgtcgttaaaaaaattaagtaactatttaaaatcgttgggaaaaatttagtattcccgacggtttgaaatcgttataaaaaaataggcgacactttttaataaaatgtgattttttaatggatccttatacccgacggtttaaaaccgtcgcctatactatacttgacgcttttaaaccatcgggtataagggtccattaaaaaataatcacatacttcccgccacattttccacgtgcccacttacttttttttctattttcccacatgcccacttatttctt

SEQ ID NO: 370638 - DNA, 649 bp, Cannabis indica
acttgcagttaaaatcaacagaaaaggacctgacaaaacatcctttgtgcataaatatactccccaacacaacaacaacatcacaaactaccttttttttacagaggttgacaaagaaaatgaagtccacatgcttgaatatggaactcaatcagggggaacaccaacacatcaacaacaagaaaaccaaaaagcagataatgatgaatttgactttcttgactatgctaagataattgctgcagaaatgatggctcaactaacaagacagacaaaggatgaacaagaaagcaacgatgaagaagcacttgtcatcacagataaacatcatccagaaattgagaaagggcaaatgtacaaagataaggaaactttgaagaacgtactcaactactttgcaataaaacaacaatttcagtacaaggtgaaaaaatcttgcacaaaggaatttcaaattgagtgtttggataaagattgcaaatggtcactaagagcttcaaggaatggggcaacagagaatttcataataagaaaatacaatgaaaaacacacttgctcactaagcatcagatttggagatcaaaggcaagcatcagcaaaaataataggggactgtgttaaatacaagtttttgaacataaagacaaca

SEQ ID NO: 370639 - DNA, 632 bp, Cannabis indica
tcatactcgcgttgtttcacaagcaccaaaggatcgatgggaagatggagagtgggaaggagggtgtgaggaccacgaaccagaagatactccgtcacttttggattcgacgacggttcagcaagtggcgacgctgttctttggtgggcctgatgatgaagagacgatcgcgtggagtaagaggatcgcgtcgcatcaaaagattaatctgacggttgttaggtttctgtcgtttgaatcatctcggtcaaggagtgagagattggatgatcgtgacgatgtggtggttttcatgtcgttggcgagtttggagactgggaaggatattgataatggggacgatgatggggctgattttgggggctagggtttcaaagatgaagaagttagagagagaagaagaaggaggcgtgaagatagaagaagaagaaaaagaaagaaaagagaaagaaaagaaaaagaaaagaaagaaaaaatataaaaataatttttttaatttttaaagaaaaagaaattttttatttttatttttaaaataattaatttttttattttaattttaaatatgggttatttgcggcaaaaccccctaaagtagggaggtttttgcaactaacccccaattctaaaat

SEQ ID NO: 370640 - DNA, 845 bp, Cannabis indica
tatgtcttatttatgaattttcactacgcaagggcttaattgtgaagaaaagaggttttgatgtttatttgttaattaagagactttgttaagactaattaacaaataaaataaatagtaattttatttgataattaattataattgttaaataaataattttgacatttatatgattggaattggaaaatatgatattattaaaagaaaagataaatagttgaaataaagtggcaaaattataattagtgaggcccactatgtatggttgaccactagcttgaatttggcccattattatatctttttttaatccatataattaaatctcaaaccctagttgaaatactataaaatgaacatgatgctctcattctcatccaactcaataatccttcaattaaactaaacctagttttctgactttgtcagacaactagtagatgaaagactccttcatagtgatttcgaactcctcttgcagttcttcatcaatcttcaagcctttagtgatagagtaccatgcccacacatagcaagtcaagtacttaatcatagtgcggaagacggtggttaaccaatccggaaaagagaaggagatccatgctcaaatcttgttattactctgcgatagaaaggaacaagggttagagatctgagcagaatgagtcatattattttgctgccatcaatgtaagattttctaaactttatgcgtgtttattatttcattgttttagagaattcatatttagggtgttaatcaaacatgcatgttagtaaatttagatcttggtaaaaatatgttccaacaactggtatcaaagccatggtaatattttact

SEQ ID NO: 370641 - DNA, 521 bp, Cannabis indica
tttacaatactcgcatatattatacactatattctttgagtactcgctattctaagtgagtacacgcatatctattttttggtatccaagcagcccttgaatactcgcacaaaactggtgttgcgaaattcactcgacaacagttagttttaaatttttttatgacttttcatttaattttactaatataacaaattatgctcctaaattttaatatctatcaaatcatatcatcgaattttgatatatatcaaatcatacctcttaattttttataaaaattcccttaataaaaaaattagacaaaattttttaaatctatctaataatcttaataattaggaagtatttttaaggaataattacataaggcaccattttttgtaaaatatttacatttttacgttcaaagaatgtttttttacatttttacggttttccaaaaagtaacacgaaaacaacataaaatcaacaagaaaacaacataaaaataacatgaaaataacaacaataaaacaaca

SEQ ID NO: 370642 - DNA, 350 bp, Cannabis indica
ggtgtggtggtggtggcggttcatatttttttcttcggttcataaccgaagcaaaaaccttttggcggcggtgtattactattttcttcggctatgaactgaagcaaaaaacttttggcgttggttaatgagtgaagcaaaaatatcaatatttgtgtctacggttatagcgatttcaccaactaaagaaattctttatgcatcactttgaaaatgacgctaaatgtgattttttagtagtgagaattgttaatgttgatactgctttattgagtgtaatccatatgtttcatgaatatgttatgtcagatctcagtcacacacattctctacttgcttcatgaagtgca

SEQ ID NO: 370643 - DNA, 657 bp, Cannabis indica
tttgccaagtggagagacaaagagatggaagcgttaagggctcataatacagagattgaaaatcgtagtccgcaagctactgtgctaatacgaaaagcctaccaaactgtaggtcagcaacctccgagtgtcatccttgtgggtgagacgtacgaagatccagcgatgaatacttcccaaactgcaaatggtcagccgccaaatctggtgaaggtaagttttatacgcatgagggtttctagtttagggagcataagttgtgtgtgcgtaattgttctttacgagatttgttagttcgggaatcccatggaggagggcttatgggacattttggagtttctaaaaccttagttatattacaagaacacttcttttggccccacatgaaaagagatgttgagcgaatttgtggtagatgtgtaacttgtaagcaagctaaatcgagggttcaaccaaatggtttttacacacccctacctattcctagttcaccatgggttgatatctcaatggattttgtgttgggtttacctaggagtaaacgtgggagggactcaatttttgtggtggtagacagattttctaagatagctcattttatcccatgtcgtaaaacttatgatgcttctaatgttgcagatttgtttttcagggaga

SEQ ID NO: 370644 - DNA, 780 bp, Cannabis indica
tcttggaatttgtctaagaccgtcgcttttgaattgtgcgagctaatcatgtattttcagatatgctatcatcttttctcctcgagcctcgtattctccggatacatgatttaccactagttgtgaatcactgcagatttcaatgtgttcgccgttcatctcctgggctagtcttagcccagcaattagagtttcgtactcggcttcattgttagatgctttgaacctgaacttgactgcagcgtgcaggtgttgctccccaggcgtgacaagggcaattcctgcaccagatagttgatctgtagctgacccatctacatgtagtttccaggtcgacttgtcttcattgttacttggctaaggtgtttgtaccagctcgggattgctttctagtatgctttctttcttgcctgtgcattctaccacaaagtttgctaaggcttggcctttgattgctgttcgggattgaaaagtgatttcatactggcccaactctaccgcccacttgagtagcagtccggaaacatctggtttttacagtatttggcgtagtggctgctcggtgtatacccgaacaggatgagcttgaaaataaggcctcaacactactacaaaaagggctttttgcttcactttttaagtgatatataaagtattttctccagttggtccaaccgacattataaccgtagacgcaaatactttttttttttttgctttagttacgaaccgtacaaattgatttttacttctgttatgaaccgaagcaaaatttttttt

SEQ ID NO: 370645 - DNA, 523 bp, Cannabis indica
ttgtattataaaatgatgtttctaaattgtcgttcagcttttcaaaagggaaatttgggttatgtagggggattaaggaaaaaactagagtatactcttcaaaaggagtattttgagacattctaaaagagttttttagtctatttttttttataattgtatatgttataattatttaagaccaattgtaaactttagataattataaataatttacatgctgaaaatttagttcaaataatatactacccacatgactattttttattatacatagtgactatttactttaaaatgtttatatcaataaaattattattttttatattttatatgttattatttttgcctgaaaaaaataaaattattatttttaatagtgtaatttacggtgtaaatacctacgtttaactctcggttgtagaaaaatactcaagtttaatttctgacagtaataatacttaaattatattttttgaatttctgtaagtatatgcccagtaaatgttaagtcattatccac

SEQ ID NO: 370646 - DNA, 1223 bp, Cannabis indica
ctttctctctctacatttggttcggcccgagaagaaggagagaagaaggaggtgcgattggaggtgtgaacagaggtgggcctggggtctatttggagggatttttcggtgcgattggtggtcggattggagggagagagaggtgtgttaggtttaggttagggttttttttagcagagaataagatagaagaagatgaggaagaagaagtaggaggaggaggagggtatgagggaatgggatagggaatttaggttttttttaatttttgtttttttaaaatttgtttttttaatttaaaatttgtaaattttaaagaaaagaaatttttttattttgtttttaaaataatctaattttttattttttttaaataatttgttacgtggacgaataaaattgtgccacgtgtacactgtgtccagtccaacatgacacttaatatctaaaatggacagaaatgttaaattgctaacaaaatgcaagtatttgagcgtttacaatccaaatttgaattttggagttaagtgaaattaaaataaaagttttagggattttttcgccatttagccaatactaaatgttgcatatatagaaatataaatgacattatatgttatatttcaaatagacagattgataaattgaaaatgaaaaaatgaataaaagaacggtaacaaaccatgttgtgaatatcaatttttagtggagcccataattgttattatttaaaaaataaaatattaatatataatataattaaaataactatttactaactttttttagccactagacatgtccaaacaaaatttttcggttatgaatgattcattcattatatataaaactgaatggagggtaccttgtgtcaggcaatatcactaattttcggttgtcattcttgaggggaaatttgaaaaaatatgcataaaatactttaaaattttatccataaattaatatattttaaaatttaaaaaatatgatcactttataataaattcaaaaatacccctctcattttcaaacctcaactctctttcttcctctatctctctcggttctctcttaacatctcatcctcaccaaaactgaacccacccctcactgcctacacagattgcctacacagacgaccaccgtgagacccgactacctccgagatgttgaagggtcaaaaaatggttagatctgagttttgggcaaaaaattgatttttt

SEQ ID NO: 370647 - DNA, 595 bp, Cannabis indica
attgaattctcctacaacaacagctaccaaaacacaataaggatggctccttataaaatgttgtatggtacaacaacaactaccaaagcacaataagcacaatacattgggacaaaactgaagaaaggaagtactttggtccataattagttcaaaagaccaatgaagctatagacaagatcaaggctcagatgcttgcttcacaaagcatgcggaaaagttatgctagtctgaagtgcagagatgttacattttaggcaggggaacatgttttcctacgggtttctccggtgaagggtattagacgttttgggaagaaaggcaagttaagccctaggtttattgggccattttagatactcgagaaggtcgggcaggtagcatatcggctagccttaccaccagcgttattggctgtccataatatatttcatattttaatgttgaggaaatgtgtttcagacccgactcatgtcttgagttacgaatcccttgaactacaatcagacttgtcctatgaagaataaccagttcagatccttgatagaaaggaaaaggttcttcgaaacaagaccatagccttggtcaaagtgct

SEQ ID NO: 370648 - DNA, 761 bp, Cannabis indica
gctcctggaaagtttagtttatggaaaacctgctcggggctgaacctctataaaaattcttgtgtctttacattgctttattgtatatcaattgctataaatcacttatcgcttactaaatttgactcgttgtcgttggctaaaagcgaggtcaacattttggtgctttcattgagagaaggatcacgaatcgctctttattcaacatctaaccacaaatacgatggtgcaaactcgtagaggcctgactgatccagcaaattcacagatggtggatcctgcattgcaaaacccaagaaacacaagtgttccgccagctgttaatccaggacagctagcgaacatggggaatggtgtaacaactcttatagattaaatcgtgcctggtgtgcaagagactatgaataatagttcctcacccaacaagggcactaataacacaaccgttccgcctggaaccaacacctagacgaccatcagagatgccactgagttacaaaatctccgtgacactctcggagtcatgcagggtcataacaataccccacatcatgatcaggacgaactccgcgctgtagtaaatcttgcactcgaagaacaaaggcgtatgtttgcagaatggagggatagagagatggaatcattaagggctaccatgcagggatcaaaaatcgtagttgacaggctacggcgctgatacaaaaggcctacaaaattgtaggtcagcaaccgccgcacgtcattcccctgggtgagacgga

SEQ ID NO: 370649 - DNA, 636 bp, Cannabis indica
ttatgaacattattaaaataagcaatgatcatgtagcattatttatttaaaaaaaaattttttatcaccaatcaatttttgagagaacatgtaattataaaatttagttaaaaagtggtttgtgggatcataatgagcaatttttagagttgctcactattggagtaatttttataaaaaaaatatgtcaattatgagtgttgcctaccattgcaattgtttattgttattaaatgttcaactaagagaaaatatatgtatgttatatatatatgttaagttttcataattacatattttaatattatttttttatattgtttttaggtgttttatagtttttgaatggtattagagtaaataaatatcaagttaattttgtttttaatttagttgatttttattttgaatataacttttatagatataatataaatatggcaagattatggtagaacctagaaaaagttttctacaagtagggaacttttcttttaccattgattttagatcttgtggttattataatataaggtgtatacttttactataggactgcttgtatacagttaaaactttatacatattattataatatttaatgtatatatttattttaaaaaaataaaatgatat

SEQ ID NO: 370650 - DNA, 1190 bp, Cannabis indica
ttttgttgatgagtacttcatggcgaaagatccgaacatcatccggactcagtttcagcagattctgacatatcaccgtcctcccctcacccttgctcttagggatagagctcagaaacttgcccggctgctggaggaagacaagaatatcatccagttgacctccgatgataatctggtgaagtatgggctttacccagaggacttttctcctaagtccgttgcgaggaagaaggggaagtctgatgctggccggcctgaacgagctcataaggaggatgagctccttcaacttaagcgggaggataagttgaaaggaggcgccagagccaaagagtatgctcaggagcccttgaatcctgaagatgaagccgaggctgaggttgaggctgagcaggtgaccccattgaagaggaaaaagaaactcccggccacgcccaggcctgttgaacatgcaattcgcataagggagcccatttcacctgttcgaccatcttatccctttgctggaaaagggaaggctgtcatgtctgagataaacgcgatgtcaggtgatgatgaacttttgatcttctgggcgggcagtcactctgcattttccttctttttcagcttcttgactttcatgctttgtatttcctgctggctttttctaaccacgctgtttttgttttgtgcagacatgtctcggtagatgcttgatgctctaagaaagaggatgggcggaagctctagcgcctcccctccggccaagaagcttaagggcggagaggggtcctcgtagaagagaccttctagagaggttattgacctttccgaggagctgaatgctgcaaatccttctactcccaaatctgccaagtctaaggagtctggaccaccaacgactgggtcagaagtggtcaggagggtccctgagcgggtgcaggcaccaacttcacttttgtccgtgctgctagaggccaaaaaggtcaaggagatgctggcccactacatgaaacggatggttcctgaggtcagtgagcaattgactggtgctgatagcgactcatctttggatgtgttggtgggcggagtcttgaaggagctcaccagggttgtcttttttgataattcccttttaactttttcacacttagctccatatgctgactttttccttgtgcaggccgtttgagttggcttacact

SEQ ID NO: 370651 - DNA, 642 bp, Cannabis indica
atgttatgtattataataattataacatgttatctcttgtaatacatgtctttattatcatttttaacgtataatacgaattctattattttagtatgtatatgatacatacatattatacattatatatgtaaaatcgatctaatcagattctactaattaaaataataacattcaatcacacaatataaaatctagtagttttactataaatttgcaaggattattaaaagtcaaaatgtacaaattaaatcaagacagatttacaagtttcacctgccctagaaacacattctaggcggctagtgcttaggttccccgaacttgggtaaataacctccaataagaatcaatgtcaagatacaaactctagtttataaatcaaatgtatgtaacaaaatacatcaaagattcttacaacaaatttaccctaagatcttgattaacaaatcaagattcaaatctaagtccccttagattcgaagacaagctatcttgcttcgattgagctgaaatcccttcagctatgactctgaactcccttcagatgaaacaacctccattatcacttcatcacagaagcttgaacttttcaacaatagaggaacctgtaagaaacaaagaagaagaagaaaaagattt

SEQ ID NO: 370652 - DNA, 767 bp, Cannabis indica
ttttctattttcggtaagtttttgaatttcaatatgtgtgctgaagtggcacattgatatgtgtgcaaataattttttttaaaagtatttttataaataaaattaattttaagtataatattgaaaaaacttcatttttaatatgctatatcatatgtcgaaaaaaaaagtatgccccctcgcttataaaaaaattatattctccctcaatttaaaatttgagtttgtcaatgtataaaatatgactatatatttatacccatgtaaaatttaaatatggtatgaacttattcatatttttctaaaacaaaaatcatattaatatcaatcttttcattatttacatattacgaacaaaaaaaggtttacataaattaaaatttaataaagtgtcaatataatagtataaagttttcataaaacaaaggcaaatatatagaattataagtgataagaaacagagttcgtgtctgatttagattgtaattgaatcaaaacaagccattaattattttgatttcttgactgtaataaataattaaatcaatcatgaccaaattttaataaaattaaaatatttgattttaaattaatatatatatatatatgaatgatttctaaagggaaatttcattaattgaccctaataatacaacttatatcaaaaattggacccttttattttttgtacaaattgataccactaattcaaaaagattcctaaaatacccctaaaattaaatttcactcattctctctgactttcc

SEQ ID NO: 370653 - DNA, 514 bp, Cannabis indica
cttttcattattttctttgggttaagttaaattttggttgaatattgtgaattaggttgatgtgattatttggggatgtgagattttatattttggagttaggattgatttacttatgtaattttgagccaagatagtggcttatggtgagaattgttcaagatagagtttagagaacttaagttgggtcactaatggtgtttttaattgttgagttgttggctaagttttattgcttgatttgagtttattggagtgtatataggtattttggagagtattataaagtttgggtgaaatttgtggtcatggggacatttttcgagttctaagtacagaaccggtcgaccagttctaagggacctataccaaccggtcgactggttggtacccaggaattggactttcggttgggaaccggtctgccggttgggtcattttctagaaccctaccttctctattttgtgttatttggggtgttagcatcttgttcatcgatagggttattcttag

SEQ ID NO: 370654 - DNA, 572 bp, Cannabis indica
ttggtattttccaactttacaatttcgtcttttagcataatttatatacatatattattttatcattaatataattaaattaagtataaattatatataataatcataaataaaaattaaattgaaaagttaaataaatacacatttacataatttaagtgtttatatattaattatctttttattaatattttatatttgacattatgtgtttgtatttttgtagtatattagtatattttttataatttttctaagtttatattttgtatgataattagtatattaaataataaataatagtgtaatattttttaatttttattgtaatttcatatttttattatatttaaatttttctaagaccaataaaataaaataaaattaatagtatttatttttaatttagttaatataaagtcattgtcgagatttgagaattgagaacattgtatttgtattatatttcaaagaagtatttgaagttaactcaagtggtcatagagtgtataggagagtgtgttgggtcctggtgaatgtgatagaatctgtgtaatgtaatgtatatataa

SEQ ID NO: 370655 - DNA, 737 bp, Cannabis indica
aatatgtgagaaacatatatttttctatctaccaaaaaaggacgactaatattaaaagtaaacttttttgtttctttttttatatttttagactatattatgttattttatgtttaagataccttgtaggttacttttttttttaatgtaactcatatgatatttcagatacttttcaatttatttacaaattattttataaaattattaaattagttttataaaaataagtttatttttatttaatcttataatgtctaaatataaaaataaaaaaaataattttttagtaacttattaagttgtttgatatatattcaatattattcatttatttattaataaaatataaaaaaacttaaaatatttaataataataataataataaaaagaatgtttgacaagtgtaaatcattattaaaaaaaataacttcactgtctattcatgagttacattaagacaaaacaaagtaatcagcaaaacaaaaaaaaaacaaagaagaaaaaacgaaagaaaaaagcgaaagaaacaaaaataaaataaaatgtctatcagcatgataattgatttgttacataacacatataagaagagagagaatataagtacgtatacacattcctaaaagaaattaattaaacaacgatatattctaaaattaattaggtagttttaaatgtggtattttttacactattacgccactcagcgtaaattcctcttcttttttttttt

SEQ ID NO: 370656 - DNA, 477 bp, Cannabis indica
atcgtgttttagcagagaaaaagaccaataacaattttttttcatggacatgctgtatttacgacatatcttatcgaatggacagaccttattttgcgcacaaattgagatatttgaatcagggtggaatttatggagctatttatatatcaagatatccattcaactatgagaaatctgtatggagagctttttctgaactctggggtcctctgtctaacacatttcatcataccaacagtgagatgggaatatctctgtatgacttgaaggttattggagggttacctattttaggaattccttatgaagagttcataccacctaacaaaaaattggttggtggcactccatatccttctactactgcagagcttttaaggctccacactcaaatttataactatttgaaagtgtcaaagtttgtgccaaatcaaataatataaatgtatcttgggagcagtggatagaattttt

SEQ ID NO: 370657 - DNA, 548 bp, Cannabis indica
gaacagaccttactctgtccatcactattatacctcctatacccccacttgtatttgatttactactagagactcactatttataattccttagtcagggatctttgattcttacttcccatactacctttaagcacaagtcgatactttatttaagcagttcattttatatccaagcgcaaccaaattatcaatacctatcttgttcttttcttcttatttccccacttctagttggatgatcttcaattgtttgtatagacgtttgttaatggagtattctgactttggaaagtccatctaaaagtccccatgactagccttccaggtcgagaaaatctcctaatatttgtcaaaattcttagatcttaatggctttatctttctaagagatttgttgtcattctcttctcgagcactataagacctaaaatgccacctctttaaccaaaaattggcactcattgaaagtttacctcttaattctccttgcggtgacactccaacatacttatgctattttccatgaatcataagtagattgtagt

SEQ ID NO: 370658 - DNA, 551 bp, Cannabis indica
cccggggatggggctctcccagtccggcggagattttgtatttttacgaacttgtttcagtccccaaaaaggggacaaacttaaagacggtttttatggtttccgagcccaccctttaaatgatggagtggtcccttacaatcggcaaacccacgtcaaggaatatcgccatcactttttcttctcctctgggttccaagctgtggagcacccggagcttctcacggagtgggtcaggatccctccatactagcggaccgcgcccactcaggtatttcttcagtgggcctaggtctttgcgacttatgaccgggcggacctcaacgtcgggggcttggtcacgacggagaactgcaggaaggccaagctgatcctgccgcactagtcagtggaggactctaacctttctaaggttatctgtccaaacgtgagggttcctgccgcggagaagaccttccgggatgagcttattgccaccgcagagaagaagtaccaggagtatctctaccggaagggcctaggagaagtcttattccaaggtccaggcggct

SEQ ID NO: 370659 - DNA, 1120 bp, Cannabis indica
atccacattgactgtccttaaaaaaaaattaaaaaaaatatatttgtattttaattagttacaacatatacttataataaaaaaataatatttatatatagatctaattgtaggtttgatgtagtggttaaacctaaattacatgtatattagaggtcaaaataaattaaatcttcactataacaattacttttttttaagtttacttttgtccctgctttacaaaaaaaaaaaattacactcccttcactttaaattcttggtctgccattatatatatagatgagattttgtataataaacaaattactatatctttctaagagtttttacggttaaatccttttaactattattttatttgcagttaatcctctaaattaagtttaaaatttaacgataaaccctctaaaccattgaattagtaataaatttaaggtgtcatcttttttcactgcaatatatttaaattatttatgtgtacatttttatacatgtgtcacatttatattggccacctaatattattatttttaaatattttatttttataattttatttaatttcaaaataaattttgaaaataatttttaaataataatattaggtgtaccaatataaacgtatcatgtgtacaagagtgtatacataagtagtccataatgatacttaatcggatgacactttaaatttgctaccagttcaataatttagagagttttactgctaaattacacttacaggagtaatacaagtaaaactacaatttagaaggtttaactaccaaaaaatctatttttctctttatctgagacaaaagttatcaagtattgttggcaaacaaaaccgttagtcaagagaatataaagtattatactatttattttaaaatatatgggattcatacgccaataacaatacacgttttcaattgagaattgttaaagggtacttactaagagtatcaacgtggtacctagtgttgtttgggaagcagttaagattttttttttttttaaaaaaatatcatgtttgaagattgttgtcattttcatgttttacagctaattaaactcattttcatgtaatcatgttttgtaaattgtatgagacgtataa

SEQ ID NO: 370660 - DNA, 518 bp, Cannabis indica
ctgcaacatccatatacatgatatttcacagatttcttgtgaaattgaatgcagtaaccacgagacaacaaggttgttgcatcgattccaggcatcatagccttcatcatcttcatcaggttgactgagtttttgattcacaaatttcatcttgttcctcgcaagcaatgcaacagtcattgtacgcttccatgagtgataattatcacttctagtaaggattttagggacaagattggcactaggatgatcgttgttagaaagataatacggatcacgattaggatcgttgtgagacctagaattaggttcaagaacagataaaggattcgaatcctcagaagtagtcccttgagtggtctggcttcgagtattagtctttcctcgcgtaatggacaatcagcaacaagagattcacaagaaaaactagtaatcataaccaatcgaataactgagcaccatgattaacatggctctaataccattttaggagaagaagaaggaaatagagagagaga

SEQ ID NO: 370661 - DNA, 523 bp, Cannabis indica
gcataaaacccaacaatacagtggcctggatacaaatattgtgttcaagacaccatatgaaaagatgggactccaactcaaagatctgatcccctatacccaacaggtgtatggcttctccggctagagtgttgcacctttggggcaaattcgcttacccctccttgttggaaaagctccgaggagcataactgtgatggcagaattattgataatcgatcttccattagcttttaatgttatgttaggccgaccagccttatatgacctgaaggctgtcacatcaattttccatttgtgcattaagttcgaacaaagaatggggtagggtgcctaaaacagaatcaataagttgcacgagaatgctacaaccttgccctaaccaaggccaaaaaggaagattcctcttgccagagttcggacagggggaaaagcattggcaaatagggaatcgcctaacgcggggatgaggatgtggatccatatgtaagcgtgttctatatttataaatttatatatgcta

SEQ ID NO: 370662 - DNA, 679 bp, Cannabis indica
cttgtaatagaaaacatttggttactccatatgcagtgttttaaccatagttctcttgcctttgcttcttagttccttattctgactatctattacatgttaaaactaataatggatttaatcacaggcatctcccaagtcataacaaggtgagttctttgaaaccctcccacaacgacaaggtaccgcgactatctatctaagaacttaagtggtattttccacatcggttgtatcaaggcaatagaggtagtgggaccatcgtatatagaataagatgataaaacacattggactcaaaaaaaaatatctcctctagattgctactttattttcagatttattcctattcttaaaaaagtagtatttgttgaaataaacactttcttatctaaagaccatgggatggtccaaccctaatcgcttagaatagctatcaaacatgcaaacctaagttaacagtcttagcttttgttaagttcacaatcaagacatctctgaatcttgtaatggtgtacactaagtacacaaccattccatcattctgaaattgtcctatcactagggtatttccaagaagacttaggcaactactagtaactaatcataacctttcactttcatcaacatgcaaactgaatttctagggaggtaagtttgaatacaattcgaagttcaa

SEQ ID NO: 370663 - DNA, 434 bp, Cannabis indica
aatttctaaaaaatatctaatttaagttgttctaaaataactaaattttacacttaaataatttttcaaaatttaattaaaaaacaaattaagtatcttgaactaatcaccttaattttttaaaaaagaatccatatttaagttgaactaaaattaacaaattttcaacttaaaaatatttttaaagaatttctgaataactaattttatagaaaatttcacttaattattaatttcaaaatattctaatttaagttgatcctaaatcaatttgaaaaatcaatttttaacttaaatgtatttttttatgaaaatttaaataattaagtatctagaagaatctaattagttataattttttttatttaattaagaaaaatacatatattttatattgaattaatttcattaaactaagtgtgtttttcataaat

SEQ ID NO: 370664 - DNA, 633 bp, Cannabis indica
gttagagttttagtatttttgcaaacatatctgattacttgttattttctgaacttgtgtatgaattttgaaccaaaaacttacttctgtttattgatatttgtagtgccgaaatgtacaacccacatcccaacactcatctagaaattgcctttaggaatgaacttgaagatgtgaataagatcctggtcagagtaatacttcacatgtgctcatgatgaacatgaaattccagaaagcagataagctgggaattgttcactctgaagagcaaatagttcatagctccatcaatcctactaattcaagctcagttgagaagattagagaaagtgattccacttcctcaaattatacttcacaacagatagaaccagcaataacaacaattcgaaaacaattaagcagtgatgctttagtcttcgaatcatgtgttttagagaatgataaatccatttggattcttgattctgggtctacaaaccatgtaagttgttcattgcaattgcttgaaaaatggaattatttgaaatccggagagttgaaacttaaggttggtaatggcgaaatggtatcggttagagctagaggaaaagccaaactcaagtttcaaaacagaattttggaattaga

SEQ ID NO: 370665 - DNA, 688 bp, Cannabis indica
ttacttttcaattttataattagaaatcaaaatttttaaaacaaaaaaaaaaaatcactttcaattttttttaaacagtttttttttcttaatcaatcttttggattacgaccagacccggacccaaatcccctccccacggccctggcgctgaactcggcttttaacttgaacccgaatccgacccccgacctaaacccgacttaaataaaatcaaaaaataaaaataaaataaattttacagaacacacttttgtttttctgtttttaaaattgaaaaacaaaagtggttacagaacgcatttttatttttcaaaaataaattttttaaaaacaaaattttactttcattttgtgattaaaaattaaaaacaaaagtagttaccaaacggcaccttagtaagttaatatagttttactaatttacattatatctcaattagatatgctttttatatcattgaattattcacgataccttctaaattatatgcaatattttagtatcttgatgtgattatctctaatggtgctctatatttttttaccaaaatttaagttaaaatagctaaaaactaaagtagagagtcatttttattatttttgctttaactatacgttccccattttagttagcatttgattattttactaatattttataatttaaatttattaaatataaatt

SEQ ID NO: 370666 - DNA, 631 bp, Cannabis indica
tttagggattcagataactggaatcccttgggtagtcgagcttgtcgtacttctgcggtaaaaggagaggtcccatgcagcttgtatatgggctttctctgctgctcgagtatttttaaagcctgcagaagcatgctttgatcaatattcccagctaagggagcagtgactggtgctgctgcaggtgctgttactactgcagcgaggtttgctgggatattaaccccagtagtcgcaactggtgcgataggcagattagtgtgattatttatgccctgatcgcccattcagggatcacgggactcttcaacgtcacgaggtgcctgggagcgcgccctgaaaatagtgttaaggtgatcgcgtagatcgctcctgtgaacctgatatcgtcctccctgcggtgtctccatagaacctgacctagtgtacctgctgggtgtgcgaccatgcgaggatgaggaggctgattgaacgtcattatctcgcaaatggggtctgctgcgaggattgcgtcgttcagggtcttccttagtctgtgcctcctggttaggatatctcgcggattggtccctcgatgttggttgattcaagtcgagttcttctgggttggcccttcgttccctgcgagtac

SEQ ID NO: 370667 - DNA, 712 bp, Cannabis indica
tctgaatttggaattgttagacataggactgttaagcacacacctcagcaaaatggtgttgctgagaggatgaatagaaccttgttgaacaaggttaggtgcttgttgattagttctggtttaggtaaaatctactggggagaggctttgatcactgcatgttatttgattaataggagtcccagtagagtgattgatttaaaaactccctatgaaaaattgcatggcactacacctaaactgaatcacttgaaaatatttggctgcactgcatatgcacaccagaacttgacaaattggaacctagggctattaaatgtttctttcttggatatcctaagggtgttaaaggatatagactatgtcatgttgaaaatggaaaacctaagattatcatatctagggatgtagtctttaatgagcatgatttcatgcacttgacagccaaggaaggcaaaggttctgatgttgcaggtactaacagggatgaccttgctgagttggagatcaacactgacaagattgaagtctccattgatttaccccacacaccagaagcaaggacatctcttgaggtggaaacacagggtgcagacacaactgaggctggtacagatacagctgaggtggaaaccagtcaagatgatcaaccagatttgaccaactatcaattggctagagacaggtcaaggagagaaattagacctcccag

SEQ ID NO: 370668 - DNA, 619 bp, Cannabis indica
aaaataaaacaatatacataatacaaaaagaatagaagcaatatttataccttaaacgaggttgagattcaaggatttctcaagaaaaatgggtggccggatttcaaacccaaactttactatttgggttcggatgacactcaaagagggtaaaaaattaaaactttttaggtgtatgttattaagtatcgaaaatggaggattttaaaaaaaatgggctaaaaaggttgagaaatgggggagatatgggtggtggaggcggtggccgacgagggtttcgagctctggtttgttggctgggctgctgtgtttgttcgagtgaagaagaaagtgaggaaatgagagggctgggttttcttataaacccctatggcgtcggttcctacataagaaccgacggcatagggtacacgtgtcaaattatcgtgtaccctatgccgtcggttcttatacaggaaccgacgccatagggttatttttcatataaccaaagtattttatttcccaaccgactctaaatggtataatacaattttatacctacggtttttatcaaaaaaccgcctctaaatgtcaatttcgacaaaagcgggtattttcacaccctttagcttccctt

SEQ ID NO: 370669 - DNA, 543 bp, Cannabis indica
ctactcaagtaggccactgaactgagcctatatgtgatcacttaccagccaagagtggctataaaaggccaagctctcgctgacatgtagctgaatgcacaagcatatctcctaaaatctctcaagattaaggagaaaagcaagagccagaaaagaagcgatagcaagagtgagaaaatttagcctataagttgcatgctgacgggagctgtactgacttcctgtctggtgcaggcatttccctcattacacttggggtaaaaagttggatgagccaataaagttcaattttaaagcctccaacaatgaggttaaatatgaagctctaattgttggccccaagttagcacacgaagtgtggtcagattatcgtatacaatgactcccagttggatgttaatcatgtcctaggtgaatatacagctcaaaggagaaaaaatgatagcctatttgagcaagatttaagacttatttagtcagctcaaaggctacactatagggcaagtccctagagaagagaatgcaacaattgatgcactagca

SEQ ID NO: 370670 - DNA, 415 bp, Cannabis indica
gggcataaaacccaacagcaagagcttcggatagccaagtataattatgcccttgacgagtacacccgagggccactgaggcggaggccttgaggaggattttgcgagaggaagtgcaaaactctcttaacgaggagaactaccggaatccgtgggatctgaacttggaccccctgacggactggttcaaccgtttcctcgggcccaccttggcccctttcgccgccaagatgactggtgagtacgtcgcccagatgactcggtgcgtgcctaaacggtacgctgcttgtgcatccttgaactccatctaccaggctcaggacctcaaccactccttggccacggtaagtactttgtgatttacttctttcctcattattttacttaaggccttcactcactcttgcttcctttt

SEQ ID NO: 370671 - DNA, 603 bp, Cannabis indica
gaaataagtttatttaaaagagtacttgtttccgccttatcgctttttgcaaagcgtttctcaatttcagcaaggaaagttgtggcatcggtgacctcctcggacatcgcacccctaaaagcctcaggtatgccacacttaatgatcataagactcatgcggtttgaatggtcccacttctcatatatcctccgttgctcggaggtactagtattcgtaagaggagcaggacgatccatccttaatgcaaggtcaagatccatgccgccaagaacaataaaaatgttctctttccagtccttaaagttattaccattaaggaccggtaccgaattaaggttagcagatacactagcaacaactgaaaagaacaatacaattacataaataacatgctcatataagaatctaaataaaaacaataaattcaaataatggtcaagcccatctcaaaataccaaacacaacattaatattaagtctttggacagtaatattaattgtaagcggtactcttgttgtagtgatcaaatattgacgataaattttgtcaaacaatatgcaatctttggactaacatattattcacacaaaataccttat

SEQ ID NO: 370672 - DNA, 548 bp, Cannabis indica
gtcttctttttggaactggaaaattgactttgtatcgtgactctatgttgattggaaatggattgtggaaacttatataagcttgatttacatgatgttgttcctgttactcccccttcttgttctttttcttcttctcttaatgttgttgttggttctaaacgtgcaagatcaaatttgaaatcttccatgctttggcacaaacatttgggccatatttcaagagatagaatggagagattggtgaaagatggtgtgcttcaggatcttgatttctctgattttactgcctgtgttgattgtataaaaggaaagttgactgccaaggttagaaagagtaagtcaaacagatgcgcagatgtgttagagtttattcataatgatatttgtgggccttttgttccaccttctatgggtggttataaatacttcatcaccttcattgatgatttttcccgatatggctatgttgagctcattcgtgaaaaatatgaatctttagatgcctttaagattttcaagaccaatgttaagcttcaaaagggaaa

SEQ ID NO: 370673 - DNA, 459 bp, Cannabis indica
atcacggggagtctgtccggatttatcggtgaaccttcctttttttcctgtttccttgcttgtggttgttgcttgaacgcttgccacttgaatttttggaatagttggaaagttgggcggatgttccagttgaaggagccttcgttttgcctagcttttgctcaccttctgctcgttgaatggcttattcgagcttgatgaagccttcggctcggtcaaggaaatcactcattaagtctaccagcccgttcttccttatatccttccatagttcaccaaggacatcaatgctcctattatcgcacataactttccatcctcggttacccgcgaaactttggtcgcttctgtgactccgtcatgaatctgctaatgtatgcccggagtggctcgcctggtcgttgctttacttcgaccaaatctcccaaaagaaatgggagctgacgcgaggaagagaat

SEQ ID NO: 370674 - DNA, 515 bp, Cannabis indica
tggattggatcggatgggtccaaatccattagatttgatccaatgaacacccctaatgattagcttctcgatcataggtcaatcttttgtgggacgaaggttctagttctacaggcaacatagcttcatagacatatataggccatagcaaaaagagtttgtccagttgtgcggtatgaccataatacttttggtagttcctccggctagttccccttagcttcttcaagtcgtttttttcaaagtgtcttattgactgctttgacctgaccatttgattgaggatgtgccactacagagaaattttttatgattccatggtttgcgtagaaatctaagaacaattggctgtcaaactatttgccattgtctgagactattttgtgcgggagtctaaaccgacatattatatttttcaccacgaagtccaatactttcttagatgtaattctcgccaatggctcaacttctgtccactttgtaaaataatcaactgcgaccattgcatatcgtac

SEQ ID NO: 370675 - DNA, 822 bp, Cannabis indica
agtctagttccacttcaggtcccaggtcctggtccggctctgcagtcggattctgggtctcagtcccagttctgatgcccgtgtcctaggtccaagtccccaatctaggttcgagtcctaggtctgagtccaggacccgatccggattcaaatcatggtccgagtctgggtcagagtttcgatcttggcttgggtccagatctcgatttgagtctagctccaggtatgggtccgagtcctgagttctgatctaggtcggggttcaatggcccaggtcaaggtccaagtcccaggtcttggtgtctgggtccatgttcgggtttgggtcctagtcctagtttcaatttcgatttagtgtctgggttcgggtttgggtctgagtctaggtcggggtctgagtccttgtctgagtcttggtccgagtctagatttaggtccaaatcccagtttgggtctaggttcgggtccaggtcggagttcgggtcccaggtgcgggtccaggtcagggtctgggtcacggtctcaatctagatcttggtcccgagtttcgatctcggtctgggtccgggtttgggttcaagtccaggttcgtatccagatccctatctaggtccgagtttgggtctgggatcgggtcctaggtctaggtctgggtcctggtctcggtcccggtctgggtacacaactgtgtccgagttagggtccaagtccaagtgaaggtctcggtgcgtgttcggtactggtccttgttgatgaggacatcaaggaccaagtatcaagtccaattccagtgggtccagtgactagggcacgagctaagag

SEQ ID NO: 370676 - DNA, 594 bp, Cannabis indica
aattaaccctcttcaaagatttaatttgtgtatttaattaattttaagttaatcacggatcaatttaaaacaagtcacggattaattctctatatatatatattattactttcttaaataattaaaattaaaaaaagaaaaaaaatcacgggtgggaatcatactcccaatatatctctctataaaaattttacataataaaaaaataaattattggtaaagacagaaatatattcctagatgcaatttaacagcaaaatcattggatttaatgttaagaaaaaaaaaaaacacagatgacaattattttctacttatttttattcaaaacaactaataaaaatacgcatagtcctggctaacaaattaaggcaaataagaatatgcatgtatttcccttttttttttaataataaaaatttggttggtaataacaagtattaaatgttagtttttttttaatttttctttctataaaagtatagagaaatgaaaaaaaaaaaaacgtattattatttttttttttgtaagattatttttttttttttagtttagtattatttattattttattttatttttttttagttttag

SEQ ID NO: 370677 - DNA, 539 bp, Cannabis indica
taacaatactaacaattcagccagagaaatttaagagaaataagtacaattcaatcacagagaaatatttattattgaaacaacaacaactgagaaagcaatagataaatggaagtggttgaaacggttaaagcctttcgagtttcaaggaaagaatcctgagtttagaatcaaatctctttctcaaaaaattgaaaatccattccaatatattcttcgtatttcatggatgcgaatatgcgactgtgaaagaagttgtacaactcgagtcgattttttttttaagttttctcacctgatttgcagaatatgccatctgaatattttataaatgcggcttgcgacgattaggatcgggttttcttgagaacgatgcttggatcggagcaggtgagaatgaggtgagagaacaaaggtggtagtcttcaatcatataaaagaccatctcatcataatcaatcgtataggataatgaggacacaattttcaaatttaaatttaaaatagaattttttttttaaaaagaaaaaaaatcagaa

SEQ ID NO: 370678 - DNA, 713 bp, Cannabis indica
atctattgaactctagattatattcataactccacatgatttctatatcacttaggggtggattaaactattgaaatatgtagttcatttcaaactctagactatactcaatacaccacaatactctatggcacacatatttctgattaaacatggatgtaatataattagcaaattatttagaacttattcttgatatgaatttatgttccaattaatatattactgttgtaatagaaattgataccaatagaaattcttcgtcatagtatcacagtaccttatttgagtgggagaattttaaaattctaagcccatcttcatttggatgacacttgtgataggaactttagaattcaactgagaaagtaactctaaccattcatatggatagagataacttatcagaattttgagaataagatatagaattttttgcatagtttattcgaatgacttaggcaaaaattcctaatcctcatgaaatatttcatggtatctctaattattacttaatcttaagcaagtattgaatattaatgttaatactagattgttgtgttgatgacttagtctagaaggaacttacagtttcaaactaagataatatatcacagcaagataaccctgaaaacaatattaagagattaaatgtacttctatgtatgaatttaaccagactcctgttgagtgggagccatctgagatgtaat

SEQ ID NO: 370679 - DNA, 574 bp, Cannabis indica
ccccttcaaccagcaaaaacacgtcaaggtgtaccgtcaccgcttcttcttctcctccgggttcttggctgtggaacacgtggagcttctcacgtagtgggttaggatccctcagcggactgcgcctactcagctcttcctccaacgggccaagaccttcgccacatatgacaagaaggaccttgacgtcagggggttggtcacgacggagaattgtcagaaggccaagctgatcctagggcaccagttggtggaggactccaacttttccaaggttatctgcccgaacgtaagggttccggccgcggagaagacctttcgggaggagatcattgccacggctgaagagaagtaccgagagtacctctacccaaaggcccaggagaagggttatactaaggcccaggcggctgcttggaggcctcttcgcgtcggaagcccggtagagaggaggacccaggcggctgccgggaggccccttcgtatcggaagcccggtagagaggaggacccccagacccaggcctactgtccaggtgccgaattgttacgccccgatattttgccttatttta

SEQ ID NO: 370680 - DNA, 528 bp, Cannabis indica
tatctgcgtctcgcgagataagcagattttcatctggagtcatcccttctatcaggaaatctgccaaggcttggcccttgatggatgttcttgggtgataagttatgtcaaactaccctttttcaattgaccattttatcaatcttccagaagcatatggttttgacaaaacttgtctcaggggttgatcagttaacacctttattggatgtgcctggaagtaaggccttattttgcgagatgcatggattaggcatagggcaagtttttcaagaggtggatatctcgactctaccccctgtaaccttttactaatatagtaaaccggttgctagtgctttccctcttctcgcactaatgctgcactaatcgcatttttagagatagccaaatagaggagtaaagtttctacagttattggtttagcaaagagtgggggggttgacagatgtctctttatgtttgcgaaggcttcctcgcactcggctgtccattcgaactttttgttgcctcgcaatacattgaaga

SEQ ID NO: 370681 - DNA, 735 bp, Cannabis indica
tagattaaagtaaaacctaatttagcggccgtctaaacaagattaaaacaataatcataacattgaacatagaagaatagaagcaatttgatataatggaaactaaaaattaacattcaataatgaaattaagaattcatgttttgggttttgaaataacccttaactaaaaaaaactactcaaaactagacattataatgataatcataataaatagtaagagtttctctctctaatttgtagctttttagacttattcaatttgtagtctaagaggtcttatttatagtaatgggaaagttagatgaatcctattagaataggattctatttatggtggatagataaatccccttagaattaggattctatttataatagtattaggaaatatctcactaaaagaaaagataactcatcttttgaaaaaagataagaaaatcgcaactctacttgaaaagctatctttattttcgctatcttttctccagaaatttcctgctgcaacgactgatagtattttagccataactctctccatattactcgaaattggacaattaaagatgttctagaaagctaagaacgagatctaaaactttcatgttgagatcaaagtccaatttttcctctaaggtcgtccgaacttgcaattcagttctgccttgtacaatcgagctcgccgacttccactattttccaccaaaatatgctaaaatccctccaaaagactc

SEQ ID NO: 370682 - DNA, 533 bp, Cannabis indica
tctattaagcaaagctcaaagaaaatcatcatatcacttttatctcaagatagaagctatagattccatatctatgattagtgttcctactcaattgtactaccatgttcccaggatgtaaattgagtcgatccaatttgtcagctttaacgaacaactctgtaacaccctaatctataggaacgccacgtgtgtgatttttataaactagtttaatactaatagattaattaatattaaaatatgtgataatactaaaaacttaaccaaaataaaacactaaaaatggacattataacggcataaaaatgtgttccgggaatccctgttacaagaagttttgctaaagaaatatatatgacaaccatttaaacacaaaatcagaatacacagcagatacaaccagtctaaaacaactcttggcaactcggcacgcaggtcagtgaggtcaatatgtacattgctggagaagactgtcacctcatggttgatctagcttttctttgtctttacctgcatcacatagcacccgt

SEQ ID NO: 370683 - DNA, 692 bp, Cannabis indica
ggatcccctccgaggcggaggaatacacagtgcctctcggcattgtgttgactccgattcctggagacgaggagaggcagaatcttcggatagccaagcacaactatgcccttgatgaatacacccgggggcatgccgaagtggaggccttgaagagggtcctacgggaggagcagcaaaacgtcctcaatgcggaggacttccggaatccgtgggacctgaatatggatccgctgacgactggtttaaccgcttcctggggcccaccttggctccttttgccgcggagatgaccagcgagtatgtctcccacatgactcaattcccgcccaaacggtacgctgcttgtgcatccttgaactccgtctaccaagttcaagacatcagcaacgccatggccgcggtaagcacttgattcatttctttcctcaatattttgtctaaggcatttgatctcactcttatctcctttttcagatttctgcagagaccagccgcctctccaggaccatcgtcaatcatggcttcgtcctgtccgaattcgggggcatagacgaggtcgtgaggattctacgggacctatccgctaagaggcgggcgatccaagaggaggctgagccaaaagaggccctcgctaaggcgaagctcgaggaggaggccaaacagagggaagcccaggcggaggcgatgct

SEQ ID NO: 370684 - DNA, 459 bp, Cannabis indica
agtggatcctggtcacagaatataaaactcaaattccatatatagacatactgtttggatccattgacaaaaaataaaaataaaaacttgtgaaagttgtactgtaatgttcaatgtattcttggaaacagaaactaaaatttttatttggaatctaaaatataaaatcaaagacttaaatttatactaaatatttcttgagtaatgattttttcctggaccaccactattaatctatctctaagtctaagttaccttagtaagtatatacaagtaggagattctataaggtcgagaatttatatcatttcaggatagaatatctagaatatagtcatttgcgccattcaatttcataaaagaaaataggataacatcataagcaaatgatgtataaaccttctgtccatgatatactttctaagaaatttctaaatgaaaaagctaagaaaaaaataa

SEQ ID NO: 370685 - DNA, 688 bp, Cannabis indica
caagctttctttttccaagcagaatttcaattccaatcagcctagaagtgaattgaggtaggtttcctactttttgggttgagaacactagtttttgagttggttttgaggtagggttttgcttttctattgctgtaggaatcaaactgagtttggggtgtgtttagggtaggtttttgagtatgttgggagtggtgttaagtggtctttatggctgtttgaattgagtttggtttgatgaagccaaagttgaatttcttcacttgaacatgtgattttgagttagggattgaatttttgtgttttgaagcttgagatatgttatatttatgttattatactgttctgtaaagtttgggaacaattggttaggtttggagcaagttttgggactttgaagagctgaaattttcgagtttctgctgttgtgaaccggaattccggatggaacagggctgcaccaaccggaattccggatggtcaattttcaggaatcgccgattttcgtattttagccataacttttcactcgggtgtccgttttagacattctatataccgtttcgaagcttatgacgagctctacagtatgagacatagattagagccaaaagatatattttattttagggtgtttttaccataagatttggtagaaaatcctaggttattttatgcgggttttaga

SEQ ID NO: 370686 - DNA, 667 bp, Cannabis indica
ccggttaaccggttctccagcaccctgaaaaaccgattaactggtttttggcaggtagggaagatgctggtttttcaccctgaaaccaaacttgagctacaccaaacctgctcaaacctttcagaacagtttaataatataaagcaatatactcaaacacccaaaactcataaatacctcaaattaaacaaaacaccatgcttgaatcaaaattaggttcaaaattcaatttttttctcaatacatgtttaaacagtcaaagtaattatcaattcaccacaaactaaccttaaatcaggtccaaatatatgttctaagctccagtttatcccacaatcctgaaacctaaagaaaccctaacaacacttaacttaaaaccttaaaaactgaaagaaaatagattggaaacttacctcaaagcttaaggaatccttaaactaagttaaattttaattaactcgtaattaaaaaatatctattctaaaaatggcattcacgatacccccatagttcgataaaatctctgtaattaataaagtatgttttatttattcatttacccatattttcttaattaactcgtaattagtttaagtaggatcctactctaatactcacttaattgcatattcaataaaatatgtctaattaaatatcattatatttt

SEQ ID NO: 370687 - DNA, 708 bp, Cannabis indica
tcttatgtgaaatatttgtggaggtgattattttatcaaagtctctcaattacaaatataattttaaattaataaggtttatttatttttttaagtgaacattttgcatttgataattatataaccaatatatatactaataatcatactatataataaatgaatttattagtatatataattaaattgagacaatatctatctataatttataattgtaataaatttgtaaataattttggagttctatttacactcgtatactttattattaaaaaaattaaatttaataaaaaccttttgtattattcattttataaaattaattaggtattttatgtattaattatttttttctttaaaaaatttaaagtattctattttacaaaaatagaagggaatgtgtgcaaaatatcctaaatatttttaagagccacaaaattaataaataattttggcccttgttaatttacaaaaaaacattgaagactaagaacatttcgaatggagatgcaaatataaaatatagctcactttgtcaaaagtctactctaatgatgtgtgaaattgtgatgcaaatatttcacataacaaaaagtgatctaaatttaaatcaccatatagtatgatgcaaaatttctattacaataaatgctatgattttataattactattatgtcatttttaatattttattataaaagttt

SEQ ID NO: 370688 - DNA, 1236 bp, Cannabis indica
ttgaaacaaaaatggatacttcctttttaaaaaacaatataaatgtgataaatgtagtattagtataggtatcattaacctttttattattgcggcaggggtggcccgggattctcagggtcgattcattgaaggcttcacagttttacgagaggggtgtgtggattcggctatggctgaattggtaggggttaaggaggccttgagttggataaagaggaaacattggggtccggttgagattgaaaccgattctttggttgttgtccaggcaatccaaagtacggtggagataccttctccttttggccttcaggtggcggtttgtcgttctcttttggccgagttgccgttagtctcaattaattttgttaaacgttctgtaaacaaagctgcacattggcttgctcgtagctcttgtttgtatccagatcgtatttttagttgaggatgatgttcctcctgcttttctttctattgtaatggttgaatcttcttattaataaagttaccattttccttcaaaaaaaaaaaaatttaagaaattttttattgttcaatatagtaaaagttttatatatttcaaatatcaataatataaatcccacgattcactcacaaatgtaggatagttgttaaggtctaatgctctcttagttaaaaattcaaaacttgttaaaagatacataaatatatatactgtttgtgtccttttttagttaaatatactatagttataataaaaaaaaaatgaaaatatttttcaaaaatattttctataaaactgtttttacttttcaattttttaattgataatcaaaaattttaaaaaaaaaaaaaacacataataaactttacagaacacacttttgttttctgtttttaaaattgaaaaacaaaagtagttacagaacgtatttttatttttcaaaaacgaaatttttaaaaacaaaaattttactttcatcttgtgattaaaaaattaaaaaacaaaagtgttaccaaacggcaccataattagttaacatattttttagttattatgtttatattatgttctgataaaaaaagagtagattcttagtttaatgaattatctgactaaaagaagtattatttcgaccataacagaattttgatgtatatcggcaccataatttatggaaaaatcacacaaaaacaaactataagattttgttaagtaaaaaatttaaaaaaccaaaaaataaaataatt

SEQ ID NO: 370689 - DNA, 703 bp, Cannabis indica
tgatgatgagaaaaaaaattattattcccttagaatgaatgtttgcaagttgtaagtatttaaaaaaaaatcaatgaaaaatagaaaagtaaataaatacttgcaacaatttaagtgtgggggaatagtaagttttatggaaaaaaagatacaagattgaattgttgaggagagtgattggggaatacaaataagaattatttgagagaatattgtatatgtatgctatggtgtgatttaagcccaaattaaccttctttatctacctttcaccctagccttacattataagcctataaaatcctattgatctttagattatgtgtaattacattactgaagaatagttttataaataagcttatggagtggattttcgttgaaacacacatttattttgagatattgattggtgacatgcatgaattgatttgaatgttagtagtatgatgatttgattgaacacacgcacacacacaaaaattgggtttgaaaagtgatttatcttgagttgaaattctaatgattgaagaatttggattttcttggaattataaagggatgtacaatttttgaaactaaaattatttttcataaagaccaattcctttaagcatcattcattttatcataacttactcgaggacgagcaagagtcaagtgtgggggaatttgatgagtccatatatatcttataaatatg

SEQ ID NO: 370690 - DNA, 532 bp, Cannabis indica
aaacgatatgtaatgcggaataactatacacatatcgaaattgtatatgcgatgaaaggaccgaaatacctccggtcattgatgtttgagcttcaatatctacgatatcttcggtgtgggaatttgggcttcctcgctctctcgactctctttagatagaatcttgctgttttgaacagaatgtgtgaagagctcgaggaccgagaccttacaattatagatgagatactttatcaatatctgcgtcacattaattgtcaaaatattttgaaaagtaattgaaaaatcaaatcgattaatgaatatcaaaatttgaccacatataaaatatcatttaattaattttgtccaaatttaattaatataaaaatttatttatctcaaaattaattttttattttattccataattagaaaagattttaatactagactcaatatatgtgaagtcatgaaggtatatatataaacatagataatatatattcattatatactagaaatgacattataatgttggattttatgccct

SEQ ID NO: 370691 - DNA, 540 bp, Cannabis indica
ataaataacaagaaaacgacacagagttcgatgtcgtataacataaaccttaacaataaaaaatattattgttcctctttgctttgctttgctttgcttgttgagttgagttgtctccgatcatctcccttcttccgctcatcattgctaatactcccttccctctctctctaaccagctagggtttctgcaactttacgggttctaaatttcgcttccctcctcaatcaaaatcatttccctctttgggatattgtttgttcatttcttattatatttttttttcccagctgaatttcctaattcctatttgattttggtactactgttcctcctaaggttttcgcagtgtattagatttgttttcgatataactggttgatctgttcttcacattaattcaaataaagctgttttgggtttgcaactttctggaattcttttgactgaggtgtataaattaccggattttatccctgctagggttgtttacgatttggcgaattggaaaattgtctaatttctttttttctttttatt

SEQ ID NO: 370692 - DNA, 544 bp, Cannabis indica
ttttttttttcttttgcatttttacggaatttcacatataaatttctattgcaactaacagagaaatctaaatcacaaccaaaattcatataacaacccacataaaaatcaccggagaaacaataatttaatatcccttaaaaatggaagttatttttgttgttaatcttgcaagtcttgtttatatcacaactttttttacttatatttttgaatctcaagtgtcttttcattttaagcggctgacaacaagcctcttaagatcccattactcaatttaaaatccaacaatagacatttaagaaaatatcacttgtagtctagtaactaaagattggtgagcaaaatggatactatttttagtatatatggtgtttgcataaaaatatatttacgaatattgaaccaggatacttagctaactaaaactaatttttagatggaacttataaatagttgacaattaagataggaaaaaataaaaaaaattaataaatttcaataatataacctactataactagattatatatatatatatata

SEQ ID NO: 370693 - DNA, 854 bp, Cannabis indica
cctctcgccaacttccgttgtatctgagagacctgtttgaagtcaagcaaagaccaggcgaacccctccgcgcatacattagcagattcatgacggaggcaaccaaagtttcacgggtaactgaagatggaaagttatccgcgatactgggggcattgaagtcctctgtgaactttagaaggatataaggaagaacgggtcggtagactcaatgagtgattttcttgatcgtgccaaaggcttcatcaagcttgaagaagccattcaacgagaagaaggtgagcaaaagcctggcacgtcgaaagctccctctactggaacatctacccaacttccccattacccaaataattgaagctcaagtggtaagcgttccaacaacaagtgcaggtaagggagtcggtagaaaggaaaattcactgacaaatctgaacaagctccccaggagaaacaagcaaagtacactgcgttcactatcttgaccgaagacgtagaaagtatttacatggcaactcagtcgctggccccatataagaagcccgggcccatgaagaaagatttcagcaagagggacatgacaaagttttgtcgattccacggagactatggccatgacactaatgaatgcaccaacctaaagcgggaaattgaattcctcataaggaaaaacaacccagacttgctgaaatatgtcaagaccgatcagggtcagcggaatgacaataaccaagagttactacctccaccagtagatgggcatctgcaagtcatcattggaggcccgcatattgcttgagattcgggcaaagctcgggagaggtatgcccgaacaacgcagcacgaacaagaagaag

SEQ ID NO: 370694 - DNA, 646 bp, Cannabis indica
attagaataaaatttaatttttatttaatattaactaacaatccccagcaacggcgccaagaaacttgttgtggtaatttcagcacacaagtgtacgtatcgtaaacaagtaatagactcacaaagagtgaggtcgaccccacaaggattgtagttaagtactttaaaattaaatctttacttctatgcagctatataaaatttaagataaaattaaaactagaaaacaaataaaaacaataaaaacaagaagcaagtaaattaataggtaaattaacgatgattaaaatttaggatattttcaatttcaattgtatctatcgattatggtttaacatgattcaattccaattaccaattatatgcaatagcaggtttactcaagtaatttatagtcttctcagatatataaatctcaattacatgtaaattgtctaggctcgtgataaatcaaacatgtaaaagacattaaacataaaaatcttataagctatccagactatatacatactctcgtcctatatcaaaatttggttatattttactatagcataattgacactcacttctcagattttgtatcaaaatcataaacatttaattggtgatcagacaatttaaagtaattaagtatgaataaaataga

SEQ ID NO: 370695 - DNA, 766 bp, Cannabis indica
acatgacaccattaacatcattagaatccaaaatcattgcattttattttccttccgatttaagccatatttgatttgacgtaatagtaatagtaacaaatcaccacaacatctaatcactaatttcatccttgcattcaaatactcacataaatacgaagttagggttctaaaactctaatttcatcctcaaacctttaaaatattcaaccaagttaaacatgcccatatcttaattcaacaatctagatcagttcatagcatgtttctaatatcaatttacaaacataaataacctaacatgcaattctaatcaattacacccaaacctccaatccattttattttatgttatattattttataatataataagtataaattaaaatgtgataaatatattattatataaataatatatattaagtgtatggtaaataaatgtgtaacctatgaatttaatatatacttttgtaacctatatgttgtaacttggagaggagttacaatttgttattacttgtaactcatgtgttgatcacacattattaatgtaataaaagagttgttacacaatttgatgataggatttaaatggtatgaaatataattgttacaaattatattaaaactcatttatatgagagaaataaagtgttgtgtattttgaattctaagtgtgattacctaaacattataaaaagaagtctttggtgctcatttgagagagatcaagttttctatcaagaaagcactttgctaaaaa

SEQ ID NO: 370696 - DNA, 665 bp, Cannabis indica
actcattaaaatctcatcatcatgttgttgttgatgatgatttttgctattactaccactcattattattctatgatgatcttctactaattcatgacctgaattaccacccctcgattcagccgccgcataacccaccgccaccgccaccccgaagagcttcctaacccagttggggtaccacttgagtgatcccccagcatagaattacaaaacaaaataaaacacacacaaaaaaagaactatatatctttctactacttcttctactaatactttactagaataataataataataattttattattattactctttctctctctcttgctggagaaatttttcttcttcttcctccaaattattactaacatctgatgatgaagatgaaaaaagaaaaatcataaaaaaaaaaattgaggaaaaaataaataatagtaattgaaatcaacccctgaaaaggatagtgaatttatgaagatgagggtataagggtgaatttttaattttttatttttaatttttttttttcttttcggttgtctttggagagtatcatcttagctatacttgtcaatctcaagaaatatatttatatatatatggccacatttttattataatatttatttattttttttacttttttatagctgcggaat

SEQ ID NO: 370697 - DNA, 509 bp, Cannabis indica
aagtagagtgaaaaaatccaagaaagaggagcccatcaaggagatccctgaaactctaccgaaagttgaggtaaaaattccatgtcttgaggtaatcaaagaagagcctcattatgctaacattcttaaggagttgtgtccaaatgagaaaatttgaatggtggtgagaaaataagtatagggaagaatgtttctgttgttcgccaagttgttgccgaagataagtacaattcaatgcacaattggtaaaactaggttttattgttattattttaccagcatcttgacttactaccatgtatgttgtttaacattctaaaaataaatttcgaaaataatggaatttaaacacatataaagtttaaggaaccttacattggttgcagcggaattaaatgactctttctactcaaatctctaacccttgttcctttctctcacagagtattatcaagatctgagcctgattctccttcatatgtttggattcttcacagtcttccacacta

SEQ ID NO: 370698 - DNA, 906 bp, Cannabis indica
aacataaataacattttcttatttaattaaatctcttaagaaaaacatcaaataattaagtgtcatgaacaaatcaacttaaatattaattttcttatttaattaaatatatctagaaaaataccaaaagtttacctagaaaaaatctatctagataattcataaactaaatacttattttctaattaaaatataacatattttagtctaactattttaatcaatccttaataaaaattacttgatttaagttaatctaaaattaattaacaaattaattttcaactttaatataattttcaaaattgaaaatttttgaaatattttcatttaaataaagcaattcaaaatttaagtgggaaatgattattaaaataaaataaaatatattcaaaaaattattctaatttaagttgatctgaatttgaaaaatttccaacttaaatataattttctatttaattaaattcattaaaatataaataattaagtatctagaataaattaaacttaattaataattctaatttaaaatttatgaaaatttagttggtctaaaattaaataattaatttttaacttaaatatattttccaatttaatcaaatttcatgaaatagaaacaaataattaagtatcttgaataacatcattttaattattaactctatttaagttctaagaaaaaatattctaatttaagttggtctaaaattaattaaaattaatttttaagttaaatatatttttcgaaatataagaaaatgtaaatacttgaaatactatctagaatcttttctttaaactaagaagtgtgtttttcttaatttaattatttttaaataatccaataaaaattaattacatttatttcaaaatttattatgttgctaattcaattttaat

SEQ ID NO: 370699 - DNA, 777 bp, Cannabis indica
atgcatggtatgatgagtaagtggtaaatgtgtaataaaaataagtttgtaagtataaatgtagtaataggcgtgtgagggtaattatgtaataaagtgtgtaaaaaggatttttcatgtaaaaatttctaaaaaatattgatagacataatatatattaattatatttttattagtatttttttattgtattgaatttgtaacacttggttattttgtgtatttattttcatgatattttgtttaattttattacttagaaatattattgttttaattatttgaaaattttagttacattacacttgtaacgatggtatgtttatagagtattaaacttaaataaagggtgatacttagtttttacataattttcttcatatttttaagttaatattaaaatttaggtgtgtaattggatatctaattaaaaaactgttccaatctaattagtaattggattggattggattggattggattttgaggtctaattagattgaattagatgatgatttttcaaattcaattactaattggattagattggatgaagagaaaaatgttagattgaattggttgctcaaccccagtaaaacccatatttttttctacatgcaattagctatttttctacccaaagttggaaatggacaatatacatcttcggttgtcaagtccaataactttgtgtgtggtgtggatttgggcctgcatagtatagcccatgccctttggttaaatccagccctggcctgcaacttttcacaccggatc

SEQ ID NO: 370700 - DNA, 477 bp, Cannabis indica
aaacaaggaggaagtgggaacaaaagctgaaattggggtagattgctgaagcaatgctgaaacgaattcagcattctggcagtgacgtggaaacacgagatttagctgtccacgtcagcaagagtgtatttgtcactaaaaatgagaccagctggaagctttgtaaaggggggactaaacctagtgggccaaagtgcaagaaggattgggcttctaaatttagggtgtgatttttgtaccctagggacccaacaactaaaaaatgagagaaaagccaagtacacctaggggtgttcacaaagtattcgattcaatccaatccgcacgatccaatccaatccaatccgcaaaatgcggatatctgcacttgtgcggattggattggattgaaaaatctaaaatccgcacttgtgcggattggatgttgtttgacctcaaaagtaaccgatccaatccaatccgcacttaattctatat

SEQ ID NO: 370701 - DNA, 1456 bp, Cannabis indica
gaaaaaaaaatgaaaaatttcagtatgtagtgtaaaaacttcaaaaagaaacctctttattcaaaacagccaaaacggtaaggcaactcgacgattaacgccgccaaggcacaatccgaaacaccgcctatccacaggcaattacaagaataggaagaagcatccttaaattttaaaaacttaaaaatcttcatcttaaaatttggtaaaaagaattgtttgtgtgtcaccctaacaaaaattaagagaatacttgatgagtaatgattgtcataccctcaatttacacacaaaattacttactatgatgtgtacttaatcgactttacaattaaataattaaatgtgatttaatttttacttcaaaatatatatattataatatgtaattatagtgtgtaagttaagaatgtatgccagtactatacattattaatttttttttttaaatagtgaagttatcattaaaataattgaaaaactcaactcatctaattaggttttttttccattcttgtacaactatttcataagagatcatagaataaggatacttttaaaaaaaaaattattaagtaaacttgcaaaattatgaagtgatcatacactggtataaacataatgccaaatcataaaaagccctaaaactataatagaaaagctgctctagatttttcgcattcacaaaatccacttgaattataagtgtccctacaaaagtaacaaaaaataagaatccatcaaattaattttaagctaaataaattaaaaactttcataaaaattataataaaaaaagaaaagaaaatgagaatcaatggtatgatattgattcccaaataattgtttattaaattttgaaagagagacagtggttctcggaatacattttcttttcataactcatcttattttaattttaattttattgattaaaaaaatatgccggccctttaaaatttataaagaaaaaaataattacatattctaataatatcaattttgtcaaattaaaacattttaattacatttcctaattatgtaaacaaaataatattattttacttttcttttggtacagtttagtaaacagcataataaaatattatttcaaattattttttattttaaatcgattcatttctctcattgattagtctgattccaattacagtttaataaatacgaatctccaaatctctaaagagaaatttacgcacagcaacataattttaaaataattattataaataacggtgactgtttaattgtgtcaacctaccgaatttttttaattttttttgaaaatgtgtatatacatacttacccagccttagtaattagtattactttttctctctcaaaagtttaaaaaaaatttctagtcacactgataattgttgagcttaaaaattatattattacaatctattctttgaggtgatcattttaacat

SEQ ID NO: 370702 - DNA, 655 bp, Cannabis indica
ttttttttttcttgttgctgtttttttatgatgttttgtgttttaaatttttcccccttattgttttaggttatctccgattctgattttgaagatgaagtccctgatttggaagtgaagcgaaagttaaatccaaggtattattacattgaattttttcattatgttaagtttaaaattttaaacaccctatgttttctttttgtttttattttacctgttcttaatgacagttttatggtttgtctcattttttgtgtatttcttttatgtattttttgttgatgttgtttttgtgttgtttatttgttttgtctttgctattaaacagtttatggcattgttgattttttagtggttgataactctagaaattagagttatttttcacatttttttagctaaaattggcttagttcttaagtttttaattaattgagtaagtttttaattatttttggatttattagccttatatttattttatagtttattatatgtttttataattattttatgataatatgttatgtgttatttattttaaattttattttagtttctaatttactttatgtatttttaggtgtaattggtggtgaagattaggaataaattggagaaatattgaagaaatggggtcaaaatacaattt

SEQ ID NO: 370703 - DNA, 631 bp, Cannabis indica
caagccatttaacataacccattacttcttttccctcttactccgtcaaatcatcttcaattaaactcagttctagaggatcatctatcaactttttctcactcacaattgtatcaatcagatcaacaaagtaacagttatcacttgccctttgggtaagtcatcgcctttaacacattaaaaaccacttgttctccttaaactcgcagctttaattcacctttatgaacatcgatcaaagcttggccagttgccaagaatggtctcccaagaatgattgggacattgttatcttcttccatatccagaacaataaaatcagctggaaagataaacttgtcaaccttgactaacacatcctcaataactcccctaggatgagctagagattgatccgccaattgtagagttaccgtggttggctttgcttctcccaactgcagtcttttaaaaatagacagaggcatcaagttaatgctggctcccaaatcacatagcgcatttattccttcaattctcccaacggtacaaggaatagtgaaactccctggatctctgagtttgggagggagtttcttttgcagaatggcgctacactcctcaattaatgccattgtttcatagtcctcca

SEQ ID NO: 370704 - DNA, 708 bp, Cannabis indica
tcgctaaacatatgttgtttgtcgcggcccgaataagctggcaagccaagataagtttcatgacagtttgttattggcatggagagagttcgatggaagaaaatctgagcagccagagttgtgtttggtgaaaaagacatgttggacttttcagcattgatggtttggcccgaagcacggtggtatatgtcaagaacgcgcttgatagcaaggcacgaactttcatcagcatagcaaaagagcaggctgtcatcggcaaataacaaatgtgaaattggttcagcccgcctagtaagcttatatccatggaggttacctgacaattcttcatgttgtagcagccgagagaacccttcagaacaaattaagaacaggtttggtgatagggggcaaccttgtctcagaccacgggttggtgtgagggagcccgtagcttctccatttagcaagaaactgaagtggtttgtagtcaggcatgtcatgataagagctacccattacgaacagaaacccattttttccataacccgctgaataaagcaccattcaactcgatcgaaagcttttgacatatcaagcttcatagcagcaactcccttgcgaccagatgttctcagtttaattccatggattaattcaaaggccacaagtatattgtcagtgatgagacggtttggtaaaaaggcactttgggtctctgagataaca

SEQ ID NO: 370705 - DNA, 947 bp, Cannabis indica
ttgaaccagcccctctcttttctttttcatattttcataccttgagtgatagagtgagtgcccacacacatcaaagtggtatctcaatcattgtgtgtaaggttgtgacgaatccagaattaagagaaggacattcgggcttagatcttggtgatactctgttacagacaagatgcaagggttagatatctgagtggaaggagccattattattccgctgcacccactctaaggttttctgaaactttatatgtgtttatttacattatttagaaattcatacttaggatgttaaataacatacgtggttgtaaatctagatccttgtaaaacatattccaacaactggcctcaatgccattgtaatgattactttcatgaattatgaattaaaacgatgttttgcgttgatttgtatggtttcatgatggtttatgtgcttatatgatgattgtttggaaatcgcagtatatgttataaaaatattttttatttggatctggaaatatttttactggaaagtagacgaaaaattaattaatttaggattttacagatgctaatttggatttcttatgaattagttatgattctttgaatttgaatgaaaatatctgaaatcggatgcatacgtgtgcgcgcgcgggtaccaggcaccactcgaacagggaacctcttcagacacgagctgactgagaattctcggatacaaccctgtttgaagggatgctcacgccgagcttcctcagtcatcagaggctgcatgcagcctcctgtctcgccaaacctccttcatccgcgcgcgcaggggtatgcataccctgtgcctcaatcttgttttcttcatattttctgattcaaaaatcgtttttcattgaaaccaaagtcaaattttggtagaattttgtgtaaaatttgaattttcaattaaaaatctaattattaga

SEQ ID NO: 370706 - DNA, 666 bp, Cannabis indica
gataaagtggtcatatattttcaatgatgatatgtattagttaagaaataaaatattaggtatatgtaagtatagaaaatcaaatttccctattaattttgtttgacaaatatgttggatattcttatattctaatttgattttatattccaatgcacgtaatccaaacccaaagtgttaagtataaacaactatacacgttcttgaccattctattaagtaatgtgtacgtactgcttcttacaaatttctgtacataaaattaattaattattaagatatttactttttctatgaattaaaaaaaaaaaaaaaaattaaatcataataaaaattgtgattaattaaaaattatgtagctaaatataatggtcacaaaaattataatttattttaactaaatgtgattttagtcacaatacttgctatgactaaaattaaattagtaacacaatttgtatctaaatgctatatatattttagtcataagtaatattttgttgtgactaaaaattacatttaaaaataattatttattatggtgaatataccatgtgtgtataaaaattcttcttagtatatatttagtcaaaataaaaagagttttttctagccctaaaataaataaatatagttttgttaattataatagggaaatttgatttt

SEQ ID NO: 370707 - DNA, 507 bp, Cannabis indica
gaactgcttgtgtacaattaaaactttgttcatattataataatatttaaaaatatatttattttaaaaaataaataatattaataaattaaaatttttatgtatttttaatttaaattatcattattttttttaagttaatttgatcgttgttcaatctctcccgaaaataatttttcttttcatattttctaagtcttgaatccctttgatcctccataaatctccattgatgctctgtttttgtactcatgaaatatttttgcttcaccagtataggacttttgctatacatgatgaaatctatttatttatttttatttttatatagcataaagttgatagaatagatgaatttattttatcaaataactgcgagtgtttgtccaaaacgattcttatttattacaatgatggtgatgaagatagaaaataaaaatcctaattttgatatatatgtctcataaattaatctatgatatgactcttatgtcttgagtaagtgag

SEQ ID NO: 370708 - DNA, 689 bp, Cannabis indica
ctaagtcaaagttcaatatcggtcccttccgacgcatactccatgtatccaacctgagctttactttaactaatgctctggaaagaacatagcatttctccaaatgcaagtaaactctgttgtagattatcatatcagtaaaaccttatgtctgataaatctaagaatctttattcacatagtcatgtttactttccaatgtggtgacagcacaataaacagggtcaggtatgtgaaaaaggtttcagatgaatttatacattatgtacatataatcatgaaataaatcatgtgaatcatgcaacattaaatgttatttctgatctatattaataagtaaatctgattatattgaaatgagttttatttagggcataaaacccaacatattttccaaccagatactattgacaccgtgcccgtaggccgtccgaatcctagtgttgttggtacacccattgctatattcgtcgtaacattgccagacataccaaccaggctccatccatgaataggatgattgtacgaactaaacaaactgtgtagaagtcctttcaatctgacccacatgtagctcaaccaccacaatgctgagtgcagaacaggccagcctgctgttgaggaagaagacattactacgcactactacaaaatccactattcacgtcggtcaacgcgacttgttcatc

SEQ ID NO: 370709 - DNA, 591 bp, Cannabis indica
gagagagggagagagaaagaattagaatcctcgtgtgtatagttgtttggatacgttatacaaaataaatatatatttataaattttgttgttgatatgtatggcgactgatacatgcacgaagaagagtgtaacagcttaattaagtaattaattgattttaaatcacctgaaacagacaagaaatttaaatgaaaatatttaagtaagggttagaaaataataaacgagagttttgtctggcagttacagctgttcatgcagggttttgtttggttgtgtgtacgacatagaatctgagattaagatttcaagatctctaataaacaaaagggctggtttgcatgcatataaataaggatagacatatggacttttattatatcaacaagttcgtgtaaggttcccatttacaaattattagggtgactattcaatggttacatttttattatttttattgtaattatatttttctttaagctgtaatagcaggttactaatagtagactttctttttttaaatttaattaattataattaattattttcttaaaataattaattaaatagtagacattctttttttag

SEQ ID NO: 370710 - DNA, 736 bp, Cannabis indica
aggagccataatctgtgtaacaagaagaaatagagtcaatatagtgtttaatgttacccattgatttattatgtaccttgtcgttgcgggccctccaaatcgtatctaccacaatcgaggcatagaggaacagctcatcagtatcaactcctctagatttaagattccatagaaaagtaacccagtcccacattcgggctcctgaatccagaacaggcataaccccccaaggagaagatcgccaaaggtggaaggcaaagttgcaatacaggaacaagtgctctgtggtctcctcagcctccccacaaatagggcaggaaacctcctcaaaacccattctcttagcaagaggggctcttaagggtagagcattggaaaggatactccaccaatggaccttgtgtcgctccaaaatctttgagttccaaagtttgttccatagtgccggagcaatgttgcacaaaggagcccgatcaagggcttgaataagataggcagacttggttgaaaacagaccatttgattcttttgtccagacccatctatcccttccctggccactcggattaccgcctcttaagatgttactaacagtttcctggtcaaaaaggttgtgtagcttgggtgtgtcccaatttccgtcaggtaaaagtaaatccgacactttctccaagccccgctgttgacgataattggacttagggtaaaaatccgtaccatggataacccaagggtc

SEQ ID NO: 370711 - DNA, 609 bp, Cannabis indica
attaatttatatttatataattttaaaaagtaagtttagtaattttctattttttaaataaattcataaataacttaaatattaaaaaataaaaaagattaataagaagaatttatatattttttttaattaaaatataaatcgaaattaaatgaataaaacttttctttaagtttttaagaaataattgttaatataattttatgttggtataaaaaattaagaataatgaataaataagaaaatggtaatgtttcatgaatttgttttataaagataaatttgtaaatttgggaattaagtatataattagtttaaattttaataaataatataaatttttaaaataataataatttgtttaaaataataattattttatatttatttaaatctagaatatacgttttttttatatataaattaataaataatttaaaaattaaaaattaaaaattaaaaagttaataatttaatgaataaattttttatttaaatatgtgtctaattcataaaatattcataaaattttataataatagttaataataaatggaactatattattatatagtatgcatgtgttgtcttttcaggtgtgttctgaca

SEQ ID NO: 370712 - DNA, 512 bp, Cannabis indica
ttctttgtgtgttttcttgctggatttttcaagttcttgtggtctcaactcttgctaagtctcttgcttttgttctctaagattttgaagatatgtggataggttgcatgctagtttttgatgttgttgctgctgttagttgttgttgttgtttttatgtttaaaatactgaattaaatgtgattagataggttgaaatgcatgctagttatccttgttctagtttgagaatttgtagttcaaaagctatggtttttcaagtgaaattatgagttttgttgctgtgtttcttgaggtcgaattcatgtgccttcagaggttataatatgcatgtttaagtaggtttgaacttaattggattgatgttagttagatttaaccaagtttgagttttgaactcaaagcttggagctttaatggtgattttcgattctgtgttttttgggctgtgtagatgctttagaaatgttctttggggtatttagacaggtctggaagttttggtatggttt

SEQ ID NO: 370713 - DNA, 531 bp, Cannabis indica
ttccttcaatcatcaagagggaactggttgtttttgcaagatgggaattgttggaagaatctatggtgcaataaccgatttcagcagctggttttttgagctgctagctgatggccgtggggagctgattgctgaagctgctatggtttgttggagtatttggaatactcgcaacgaagtgcaatggcaaaacaagtctcggtctggtttggaggtggtgaagtcggcaaagaatgtccttggccaatggaaaattactaagtttgaatctcctactgctttattttccacgggagatatttcaaaaagtaattgttggcgtaaacctgatgcttatatggtcaaggtgaatgtcgatggtgcgacttttgaagctcaccaaaaatttggttttggttgtgttgctcgaaataatcatggtaagcttattgaagctatttctgagagtcgatggagctgtgtttctgcagaaatagctgaggtcattggcattaaggaggcactaagttggataaagcgcaaaggttggga

SEQ ID NO: 370714 - DNA, 983 bp, Cannabis indica
ccttcgagcttggactaatagagataaatgaatgaagcgcttacatttttattgaattacattagtttattagaaatatcatttataggttactaagtgttttaaggataaaaaacattgaagggtgaaacagtaattttatccttactcaatgtaaattatttatagaggatcattgattattagaattataacaatggataagtcatagcgtatctatattgtggaacattcagaacgttctatataattgagagtgcaattccaaaatctaagtggattctagatctggttattggaagctcggttatataggcccatggtccccatactagttgagacaaactgcatgtaatactcaattaattgattttagttaatcaattataattctaaagttagactatgtctagtttatgaatttttactaagatatggctttattgtgaagaaataagattttacggttaatttattaattaagagaatttgtggagtctacttaataaatattataaatgacaattgtatttgataattaatttaatattaaataaacagttttggcatttatagaattgaaattgcaaaaagttgtattttgtgaaaaatagataaatggttaagaaaaatagcacaaatctaactagtgttgggccgacatcatagccagccactaggtccttatttggctccacttttatcatttttcattgcaaatgaatcaatcctaaccctaagtgaattagtataaaaacaaaagaaagcctcattatccaactaatgaaaatattaactcttcacctagttttcttcttgtgagacaactagtgagtttgagacttcttcgtcttcttttctcttattctaatttgaattccataaccttcttcacaaaacaatttcagcctttagtgattgagtgcatgcccacccatagcaaattagtcctcaatcatagtgtgtaagactgtgaagaatcc

SEQ ID NO: 370715 - DNA, 744 bp, Cannabis indica
aatattttcactttttcaattttaaaaatagaaaactgattaaaaaagtgttaccaaacgacacctttattttagcactccatttcattatgctatcttttatttttattttaaaattatatatttgctctttatggaattttagtagactaggggttagtttgtcataatttttggaaaagctataagttactttttaaaaaaaaaagtagtgataaaaaagtgtttggtaagcagttaaaaaatagcttattaaaaaattaataaaaaaaactacagctaaaagctaaaaatggtacaatccaactttaaaaaaaagcttttgattaaaagaatctacaataaattattttttactaaaaatttattaataatttataatatattataaaaaataaaaaaaaaaatatcttttttgaaggaaaaaatatttaaaataaataatatttaaatttcttactttttattttattttaaaaagtactttatatttatattttttattttttttattaacaaacaacatcaacttagagaatttcctataaactacagttataaaaatataatttaaattattctaaattatttttatcaaatgtgtataaatttatactgtggaaaaaaataattaaaaatatatatagatttatgattataataaactagattataacattctcattattaaatattatttaaattttattttaaaaagtactttatatttatatttatattatt

SEQ ID NO: 370716 - DNA, 602 bp, Cannabis indica
aatgtctttttcagagaaggaaaaccattgtcctataacaaacacttttcgaaaaagtctagaattttcatcaagaaaatcatcagataagttagaatagaattctttgacaatgtttgcaatgtacccttcgaaaccagtgagagtgttctcccattgatggtattgaatgaacttaacaataccatacaccctatgagcatgcaaatcgtaattcctttcactctcaaactttcgggtagcatacaaattccaatcacgctcattatcacaatagtagaaacaaggacaattggagagagatgtaggaatattaccagaagatgattccttcattggctgcttgcctttggcagcagtagaagccttggctgctgaagatgaacgagcaagtgttggagcagatttggtcagaggtggctctagttcgagttcagtttcctcactgtccgaggaaactccaatgtcttctggaatctccttctcagaatggagagacacggatttgtctgaggaatgaatagagggatcctccatgggttcttctgttaggttttatgccctaaataaaactccaattcaatgtaatctattttattcaa

SEQ ID NO: 370717 - DNA, 751 bp, Cannabis indica
cagtccacttttcttgtggtgtcatgaaattgataccagtagatggacatctattaattagatagcatgctgtgttcaatgcttcaccccagaattttctctctaaaccagctcctttaagcatgcatctaaccctttcaagcagtgtcctattcatcctctctgccaggccattttgttgaggagtgtctctaactgtcaagtgcctggctatcccttctttgctgcagaattccttgaactggtttgagcagaattcccatccattatctgttctaatcttcttgagtttcttaccagtttgattctcaagaagttttctccaattgacaaatgtgttgaaagcctcatctttggttttcaagagataaacccacacttttcttgagtaatcatcaatgatactcatgaaatagtaagcaccaccaagtgtaggaattcttgaagggccccaaagatctgagtgcacatatgccaactgttctttggttgtgtgctttgctggtgtgaatttctgtctgcagcttttgccatatatgcactcctcacagaaatccatcttgcatgacacctttcctttgagaattccttgcttcttcaattccatcaagcctctttcactcacatgtcccagtctcaaatgccacatccttgtcaagtcatcatcacctgtacctgtaacatttgaagctaggccagtaactgattttccattaagaaaatacaaaccatttctatatattcctttcat

SEQ ID NO: 370718 - DNA, 527 bp, Cannabis indica
ctcccaaaacgtctccttgaagtcccaccatcacaggtaactgccacacagattatgctgaactccaatctgattccatcttctgttgatgcaggtcataccaccattcatactctaactcagaaggatttgattgaacgagcgatcgctcggaggttcgaagggatggaagcaatgatcaaacgtatcccaggggttccaacaccaataaagaaaagtctgcctagcagttttgccgactcaccttttgttgatgccattgcattggtcgagatggcaaagaagtttgtgttcccattaatgaggatgtacgacgaaacaaccgatccaaatgatcatatagctagttataagcaaaggatgttcactgctgccatccctcgcgagttgcgtgaggcatgcatgtgtaagggcttcgggtctagcttggctgacccagccctccaatggtatacgaatttacccagtaattcgatttcttcttttgctcaattaacggatgttttgtagacatttgcgagcagcag

SEQ ID NO: 370719 - DNA, 591 bp, Cannabis indica
acctcattcatcttatccccaaattactaacaattaacaacaatttgcatatgttttattaaatttggttttttagtttatgattgtaaaatgtaattgcttaatctttgtaaggtttcagtttgttttgttgaattgcgtgttaataaagtccactcattgtttgacacgtgactcttattactcttcaagttgtgttattctaagaaagtgatatgtcttctgaattacattctgttgtaaggaagattttcataattaattttttattttaaaaaaattattattgactattaatgttaataataaaaaatatgaaattttttaagcaaattattttaattaaatgttgtattttatgttgagtctgattgtctagctgtgatatatccttttcctaaaaaatcttctttttgtaatgactttagttctcttttagatgatatttctagtctacggtcggccaatatgactactcatgaattagctgtgcacgcacttaaggtggatagtaagctagtttggatggaggatttttccttctttacttttcgatgtacctgattttttttcaataaaattttgttcatt

SEQ ID NO: 370720 - DNA, 544 bp, Cannabis indica
aattctaacatagatgaaagttcaggaggcatgattaaatacatataaaagtttgagggacatgatttgatagatatcaaagtctggggagcatgatttagtacttgaaaaagtaaaattgaataaaattagacaaaagtccttatatttaacaatctcaatagttcagggggaatttttaacggtcaaaaaagttcagggggcataatttggtatatgtcaaagttcgggggaaaaattgctaattagcctaaataaaatgtataaaataattaattacattaataagtggcaaaagaataaataaaaaagtaatatttattatggtataaaatttggcacatgtcatattttgtagtaaatttagcacaacttttaacatgtgttaaatttagatcactttatacactacaattggagttcacttttatgaacatggtttgaaatatacacatacgatacttttttagctctctattggaaattctcttagggctcgtttggtacgccgtataagggttgtattgtattagataataaataa

SEQ ID NO: 370721 - DNA, 510 bp, Cannabis indica
aattcagcatcctggcagtgacgtggaaacacgaatttcacttatccaccttagcaacttcggtccagtcactcaaattacaccagccagctgacgtggaagaaagcggtctaaccctagtgggccaaagtgggaaagtttgggcttctattttggggtaggaggttggtacccaaaaaatccaacatctaaacgaagaggaaaaaaaccaagtaccccattatcatcttgtatgtacagtacggggcaactgccattttttctagggaggagctttaattgcagcaggaagtacaacaaagaagaaagaagaggggaccaagcctagtgtttgacttttcttttacactttcttaatagtcttctttattttcctcttttattgttgtttgtacttagtattaaaaacttcttgagattgtaaatttgggcagaagccatggatgaattgtttttagcttggattttaacttcttacttgaatatgagctaaacttttgaggcttgaat

SEQ ID NO: 370722 - DNA, 638 bp, Cannabis indica
ctttatttgtttattgttcctaaataccttacaaccaccaactttgcttagatttatgaatattgagactcccatgagttctatgttcttaagactcgattaagatttcacctagaaatcatttactgtatttctatccacacactcttgagaacataactctggtgtgtcggacccaatcaataaaaaaaaaatagacgtagccttattaccatcgcgacatggggggataaactactataaatctctggtgtatttattgtggttttatttagttaaattattcattgcagtcctctttattttaacaatcttcttagatcagttaacaaaaaactgcatcaacagtttgatgctttcattgagagcactgcagttaaaatttaactatttttcaactggaaaacgcatcaatttactttcttttttttcacaacaatggtgttgagtacgaggaggaccaattttgtggaggatgctgaagtcccaaggggggaagttaatcaaccccaaagtgaaggaacctttatccctccataactacatagagagggaacctttaggcgccgagaaaagcgtcccatgctacctatgctagaagatgagggaaaattccaagattgtgagagttcctcatc

SEQ ID NO: 370723 - DNA, 504 bp, Cannabis indica
atataagacccaaattttagattatttggtctggacgaaaaatatgtagtatcagttacttccaaatctttttttaataaatttataacggagtacgaaaatagagaaaaattaaagttttacaaacattaggtacttatgccactaaaaaaaatcattgggtttatggcgcttacaaactcaaaactttaggtacttatgccgctatttaccctattattaataataataagatatgaatttattaattataaataaattaaaataataataaaatctaaatagtataattttataattgaaactattaaaacatgaaaaattgagattatatattaatttatttatagagtgtgatataaaaatttaagtacttataagtaaattttcaaaattctaatgataataataattttttattataattatttgtaaaatattatttaaagttatataaatataattaaagatttgaaatatacatataatttagtaattataaaa

SEQ ID NO: 370724 - DNA, 529 bp, Cannabis indica
tttgacacaaaaaattagttcagggtcctatttttaccattttagaaaatacagggtccattttatcatttaacaaaacagatggtccaatcggcaacttttacaaaatacagggaccaaaatggtatttactctaaatttaatgatttttgtctaattctgatcaattttactaatgtagtgattgtctatatataaaatcgtactacctaaactttaaattttaccaaattgtgtccacctaaacttttatctacattaaactttccatagtaaaatttggtaaaagtcattgaatttatcaataatatataaataatatcatataatatttttatttcgtttgcatgtattaatatattttccctattcatttacaagattgtctaaacccaatagttcatattttcaataataattagaacaattttcatttttatagtttggatggaaaaagtttgtaaaaatatgatttttcttttctttcacaaaaaaaaaaaaaaattgttttataggaaaaattagaaaa

SEQ ID NO: 370725 - DNA, 754 bp, Cannabis indica
ttttacagaactcgattccgataaaaattgaaagagttatgaatttcggaagattggaatccatggatgtcgagtgggtgattcgatgtgcacgaggcactcggacaacctacatccacgtgcgtacacgcgtgcgcgtgctttagacaatttcttgtttgaacccgtgtgcctggcccatgacactctgcatctgcggaggtccctcggcttctccccctctcgtccgcgcgcgcatggctgatttgcagcctctggaggctgcacgtgcagcctcctgggcagcattcaccccaaatccgatttttatgggattttttcccaaaatccgattttttcaattttcaaaccccaaatttaaaataaaatattatttttaaatatatttgaacttaaatatcatattttaaattaataatatttattttttaatagattattattaattttgatattttgaggtttaaatttaaaaattgattattttaattttttaaattatggtcagatttaaaaatttgttaatttctttaatatttatatattatttaattataagattagatattttgatatttaacatattttaaattaaaagataactttatctttttatttgaaatattatattaaaattatcttatatgacaaattaaataattaataaatttgaaattaacctagatatttttatagatattctaaccataatattttcaaattcaaaagtttgttattttgttaaatatttaac

SEQ ID NO: 370726 - DNA, 756 bp, Cannabis indica
ttccactcctgggaaaaagaaaaaggtgcaggatccgcgaaaggtccgctcagatttcccgaaagggaaaggtccgcagaggggcaaactccaaaaagggagtcttggccctcaggatcgagaggaccgaaagagcgtttctgtgcaccaggaacccggagggagaggaagaaggggccaaaaataccctcccgtcgatctgagacatcagattaacggaaaacacagtcaccaccgggatcacctagaccaaaagaaacacgtgcccgcggtctccacgggaacactaaatgaaggaatcatggctgagcttgccatactctggaaagacattgctcgggtgtcccggagacaaaaaggtgatgactccgactctgactgtgaagatcgggagccatgtgccaggcacatcctggaagcggagctccccaaaaatttcaagatgcccgaaatggcagcttatacagggaactcagacccttgtgatcacctgtcccggttcaaccgggtaatgacagtcatgagagtcagcaatgacgccaaatgtttgtgcttcccactaacattaaggggatctgcggaagaatggttcaagaaactggaactaggatccgtggactgctggaataagctgcaaaccagctttcggagacagtttgtcaccgcaaggaaagttaatctggaggttagggccttgactaacatcaaggagctacctatggaaacattgaagaatttcataaagaggtttaagga

SEQ ID NO: 370727 - DNA, 700 bp, Cannabis indica
gtgtaagtaagctttatcgctgactatcacatcactgtaaatccagtgcactgatgaatcatgggacattatcttttgaagcatataatcacaattaccttccactgtgttgacatcattgtaattgtgaataactatatcttctggacttaacataaatttgtatactttaaaccataaacatgaaaactacatgtaaccataaatgatttctaatcttctattgataacaaatcagattatattgaaataggttttatttaaggcataaaatcccaacatgacaatgataaaaaatcaagatacttctaaaaaaaagtttctttcttgctttctgaataaataaacctaagcaatttcatgtaccgttcatcaccatttaaattatgcttttttttttattctttttcatatcagtagccaaataaaaaaaaagaaaaaaaaagaaaaattaaattggcctccatttatcaaagtcaatgttagatataagttagttattttattgattacccacaattattatgataatcggagcactatatattattagatttagatattagaaagcttagatatataatgctggtgtgaccttggggcagtagataatttaaatttatttatataacaaagcataaaaaggtataaaagaattattattatggtggtggacccacatctacatctgacaagaaat

SEQ ID NO: 370728 - DNA, 837 bp, Cannabis indica
aatatcatttttctaattttacaatttaatttaaataaaataacaaaatttaaaaattagaaaaatatcttatttcaatttaaaatttcatgattaaaataatcttattttaaatttcaaataaggtcattttattaaaaaaaaaaataatttaaaatattaaatatctgaccttaaatttaaaaataagataaaataatcaaattttaaaaataagataacaaactaagcaaaaagatagatttttacctattttcaagcttcaaatttcactaatatcttaaattaatttaattctgataattagatttgaaatatgaaaaataaaaatctaaatacaaaattacacaaaaaattcgaaattaattccatgaaaaagcatgaaaaaatgaagaaaaatgaaaaaaaatggactcgatgcggatggtatgcattgcataccattcgcgcgcgcagaagatggtttctgggcgaggaatgccgtacaaggatgctgtgtgcagcatttttgcgcacgtatgaggtgctgttcagacagcctgggtgagaaacttcggacacgccctgtttgaaacacaagtgacacccgtgtgtcacgtgcatccgcacgcgcatgggtgtggcaccacccctaagatttttctaaatttcaaaaaatcataactaattacaaataaaatcgaaattgagttctataagaaattaaattgcttaattttgtccatactatccaataaaaataattcagaatgaaaatccaattatttttcataaaaatttcacaaacatcaatcaatgatcaaaaaatacatagatcaacatgaatcacatccaaat

SEQ ID NO: 370729 - DNA, 703 bp, Cannabis indica
gacacgtaacatctatctagtacatatataagcttaaaaattaacccaataaaataaaaatataatatttttttatttgagttttaaatatgataatatctataactaaataagttacatttttgtttaataattcttttaattataaatatcttatacaataaaatatttagttaaataattaaaagaatagataaatatttattttaataatattattttataataaaataaccaaacaaatttcatggactttaatatgtcaccctacacttttttgttatattttaaagtttaaaattaattttttaattttgtgctaaataagtttattatttatttttcaataaaaaataattgattaattctcattaatctcttatttaatctagattatctaaatattattttccactaatataatatgtttctctctcataatattattcaataataatattttatttaacttatatatagttttaattatataaaagcaattatttaaatatattttcattattcaaaacataattaaataattatattatttcatacaaaattactaattttctttcaagaattatttatcatagaaactaactcgttctcaatttattcctcaaattaaacattcccatatacagtgttgtatagaagtgatctagggaccatgaacctatatttcgaatctctaataaac

SEQ ID NO: 370730 - DNA, 757 bp, Cannabis indica
ggcaaagacgtttccaactaacccaacttacacccttgcttgtgttcttagattgagacttccaccaaaacttcgccatcattaatccttcaagactcgaacatatctcttggatcaaaagaaaaacgctcatagcatagctaggcaatgcttgagcaaccgacttaattaacacttccttgcccgctttagggagaaacttagtttcccagctaaaaattctttgttgtaaggaaaatgcatttgaattacaatcagctatcattctaggcatatattcccataactcacccataaccaggcccggccctgggcataggcgggctaggcctgtgcctagggcccacccagcccaggggcccaaatttttttttcctcttttaaaattatacattttttttaccgattttgaaaaataccatattttttctaacataagggcccaaattttttttttcccctatggcccactttgtttcagggccggccctgcccataactcatattcaatgcatatatgatatattcccatctatctaattcacttacaccttccaaaataccccatttcctcaataaccaaaccacaaaaacaactcggatagctttttctaaagagcaagacgtttttcttcttgatgttttcttaaatggaagagattatggaaaaactaaaacaacagataacaggaccaaaactcctaaataaataaggtaatcatccaaatactaagttagtaactttacacaaaatcag

SEQ ID NO: 370731 - DNA, 841 bp, Cannabis indica
ggctagatatctgaacggaggagtcatatattccgctgcaccatgtaaggttactaactttatatgtgtttatttcatcgtttagaaagttcaaatttagggtgttaatcaacatacttgtgagtagatctaagatcctggtaaaataatttccaacagaacaacctgggcaaaatgagattccccttgaaaatccaaatgattagccagaaccctctcatagaaatgagaatgggaggcaaccagaaactaatgaacaagaaattcctcatggaaatgaggatgaccctgggactcaacctggggaatgtaggtcacttgcgaggaatcaccagcatttttcccaaacccgtagagagagggcacggacaaaccctatcgtgggaaatatgacaaaccacactcagggggaagaacagagcatgacgaagcaagtatgacctcagggcattcaaggacccacagccgatcaactcgaagaggagagggtgcttgacgagctaatgatcgagaaagcatgggaactagtaaattcgcgagtcactcgaggacaagatccatgagcaagacgaggtccatgagtaggactcagtctgtgagtaaaacgaggtctaatagtaattactcccagctagatctgcgagagcacttgaattggagaaaacctgatcttcgccaacaactcggtccaaagaaagaggatccaatccaattacgaatagacgagttggaggacaagttcaagagatatcaagtgagggaattagggagacaatctggatacgactcagacgaggagctcgagccgtaccatccagatatcatgaatactccttttccc

SEQ ID NO: 370732 - DNA, 576 bp, Cannabis indica
atgttatatatgacggaaggttatatcgcagaagttttaaccaaccgttactcaagtgtatcaacggagaagactacgactatatactacgtgaagtacatgggggtatttgtggcaattatacaggaggtaattcccttgctctaaaaatcatgcgacaagggtattattggcctaccttgcgacaagatgctttcacttttgcaaagaaatgcgacaaatgtcaacgaatagccacatatgtccatcaacctccaagcaacttgcattccatcacaagtccttggcccttcgcagtgtgagggatcgacttaataggcgaactacctaaaggaaaaggcggagtcaagtatgcagtagtcacagtagactattttacaaaacgggctaaagccaaggcactcgcaatcattacagcgactaagctgcgcgagtttatctacaactccataatttgtcgatttgacatctcttgcaagctcatctcagataatggaaagcagttcgattgtaagaagatgcgacaattatgtgacgacttgggaattaaaaaagcattctctgcagttgcttacc

SEQ ID NO: 370733 - DNA, 828 bp, Cannabis indica
tcattacaaaataatattatcaaaaatgacacgacctgaaataaaagcactttagaaaagagaaattattttatccaaaatccttttaagtctattagatataatcttagataaaactttataaaaagtagtgcaaagactaataggcctaaaatcacctagcttattagcatgctgttttttaggaatcagaacaataagagtagaatttattttagagaaatcaatatcattattaagacaatctaaaatagcatgagtaaaatcactaccaagaacagcccaattcttttgataaaagtaagcattgaaaccatctaaacccactgctttatccccagataattggaaaacagccttttttacttcatcagcagtaaaatcctgggcaagaaattcaacatcagaattttccaatccaggacccaaaacatcaaaaattgcagcagcagcatccacactacaaccctgggtactaaagaggtcagaaaagtgagaaacaaccaagttagctatctcctcttgggtattaaccacacgaccctcattgtctttaagatattttatagtattagttttcctcctaagggtggcctgtttatgaaaaaactttgtgtttttatctccagcatgaagccacctcaccctagccctttgcttccaatagacttcttccttatagagaagagcatctaacattgaattcaatttattcaaatgaagtctatcagcttgagtgagaacatcttggttatgaaaattttctatttcctgagtcaattcctggattctagatttgaaaagatgattatgagtcttattccaatc

SEQ ID NO: 370734 - DNA, 456 bp, Cannabis indica
cacataaaaagtattggagcaactaccggtgcaacccaaacaataaattttttttaaaaaaaaagattaaaaatggtatatggccgggtaatttcccttaaacatatgccacaaagatatcacttacgtgaagcaaccaaatgagaaactaacacacaaaaattagctatcgaaagataactaaatcaaaatttgaaactttaaacccagttacgtaataaataaaaccaacaattaaacagaataaccagttacattatacaacaaaatgaaaagctgaaacaaaaatataaaacacctaaacattcaaaagataaattaggacataaaaatcagctaattaaaaaaaaaataaataataagacaatattacaaaatctaattacattaaacaactaattaaaaatctgacataaaaaaaattagttaggtaaagtaactaaattaaaaactaac

SEQ ID NO: 370735 - DNA, 530 bp, Cannabis indica
ttataccgagctcggagagaaagaaagagagagggagacggacgggaggtggtggtggtccaacgtatgagatggagatgagagggacacgaagagaggtggtggtggttcaatgtatgcgacggagaggagagggagaccgacgggaggagaggtgggtggagatcgatggacgagagagacgagaagggagatcgagaaagggaggaaaacggcgagagaggagggtgatggttcggaggcatatgggtggggttttggagagttattaagattttcgttttagggtgtgggaaatgaagaagaactaggtaagaagaaataagtgggcatgtggaaaaataaaaaaaaagtaggtggacacgtgggaaatgtggcgagaagtaggtgacaatttttttaatggacccttatacccgacggtataagggtccattaaaaaattaaattttattaaaaaacgtcgcctattttgtttactacgattttaaatggtcgagaatactaaatttttcccgacggtttttaaa

SEQ ID NO: 370736 - DNA, 786 bp, Cannabis indica
tgggaaaagtaaaaagcctgcatgatccccccaccgagtggggggcatcctaaacttaagaacgcgttcgtcgaatcctacaggcctataccgggaatactcttagaccgaaggaacatgatagacctttaaaggagacttaccggaaccagatgtgctggcatctggagcaccagtgttaggaactaggaccaaagacttaggcttgaagggcatccgacccgtgcctgcttccaggcgaagggtcctctcggttgcagcttgggccttgatataagccagctcctgctccctcctaaagaggtacttttggtaccggtcttccgccgaagcgataatctcagcccggagtaccttctctgcggccggggtgcgtacgttcagacagaggaccttggaacaattaaagtcatccactggctgtttctcggagatcaacttagccttccgacagttctccgtcgtgaccaagttctcgacgttgtgggccttcctgtcgtaggtggagaaggttttagcacgctggaggaacaactgagtaggcgtggtccgaaggaagagagggatcctgacccactccgtaagaagctccgggcggtccatggcttgaaaggcagaggagaagaagaagcggtggcggtactcttttacatttttctgaaaattaaaagggaccgggccctcatttaaaggatgggctcggagtccataaaaaccgtccttaaatttgtctacctttttggggacggaaacgagttcgtaaaagtacagaatttcagccggact

SEQ ID NO: 370737 - DNA, 708 bp, Cannabis indica
cattctcccctccttaaagaaatttcgtctcgaaatttcaaagtacaacctcaagttgaaaattaaacaagtgaggatacttcatacacatctcaaactctaactcccaagtagccttgtcttctctgtggtttttccataagacattgactactggaatctctctgttccttaagacttttagctccctcgccaagatttcggcaagttattcttcataagtcacatcttcctaaagagggatagcctcatactcaataacatgtgatgaatctggagtatacttcctcaacatagacacatggaacacattatgaacatgtcccaactgtcttggtaagtttaaccggtaagcgacctccccaatcctctcgataacctcaaaaggtccaatatacctcgggtctagcttacccttcactccaaatctcgttacgccatgcataggagtaactttcaagaagacagaatcaccaacatcaaactcaacttctcgtcaatggagatcggcatagcttttctgacgactctgaacaaccttaagtctttcttggattccattaatcttttcagtggtactagtgatatagtaacatgctcatttggctctgcccaacacaatggcgatctgcatggtctcccacataaggcctcataaagagccatgcctatactggcttggtagctgttgttgtatgtaaattccac

SEQ ID NO: 370738 - DNA, 757 bp, Cannabis indica
actacaaaaaatagcggatatcatccagacctgaggttttcaggccaagaacttagatcgatcgagtttaactgtaagagaagagttgagggggttttggaacgaattatatgacttttgtcaatgacttcctgataccatgtatgaacttaattatctatacaaactatatctacatcaattaaaaacaatgaatctcaaaagtttgtaacagctactagacttgagagaggaggcctctatttatagagatgtgtttacaaagagctaaaacaagaacaataattaactaaattaattaattgtttacaacaagaaagtaagtaaaaaaaagactaactaacaactattcttattaacatctactaactgtatcaagtttggacaatgacttttatttacccccccaaaaaaaaagtgaagaagaaagaagataaatatattgttcaagaataataagaaaggctagtacttccactttattatttttagggaaatttacaccctgtactgatatttcccattttatttctttttttactgttaccacggcaattattatatttttactgtgtatactgtgttttttcttttttttttttattttttttaattttgttctaaacctatttaatttactgtattgtatgtatttttatttgtactactttctatgttactaggtttttttaatttaatattactgttatttagttttttttatttttaatttttttttaaattttaaaattttaac

SEQ ID NO: 370739 - DNA, 674 bp, Cannabis indica
cgattctatgctaaatcgatggaatttacgttgtattccaacctgcaatcccaataaaatagcctgcaactctagctgaagtggagcaagctctctaatgattactgtagcagaggcatagtgaacccgtcccccatgatcacggacaacacagcctagtcccgatactcctcctccatctttaactccggcatccacatttaacttcatatgtcccaagtcaggtgccacctatttcgcacagtcccgcctaacccgactcccaccagctactccctccccctaaaattcagtcagaaaggacctacaccaatccaccatatccccagctatagggagccttccctccatgaacgatattgttcattacattctaaatgttctaagtaattactagaaaaaactcaaacctggttttatcccacaaccgagccattctcatcaaaaaaagaaagcaggtcctcacccttaatttgtttcatgtcatccttcaacccgctcacaacccaaaattctttactgcgtttgcactcccacaacgcatgagctgccgtactggtgcctaatattaaaatattttaaattgatgtctcacataattaaattatgtaaaattcaattctaaattataacaaaacaaaatattccatataaaatgatagggatattggcgg

SEQ ID NO: 370740 - DNA, 763 bp, Cannabis indica
tctctttctctctctcaaaaatcatagggttgctagggtttgttttgttcatcaattcagcaagttttcatcaaattttagattaattcaagttgaggtaatatttaatcaagcttctctttgttttcttgaagttttagaaaaatgaaatgttgcatgtttgatgaatttgtggctgtggctgttgttattgtttactgttgttttctaaagcttgaatatgtttaattgagtagattagaacaagttttgaggcatgttagttgattttaagcaagtatggagctttaaattcaaaactttagttttgtgggtgaaatggtgatttagctgttgtagttgttctttgagtttgggtatgttctctgtagttatattatggttgtatatggtgaattgagcaggttttgatagctagtttgtgggatgagcaagctttgagtttttgaactcaagcttgactcatcaatggtgatttttgttatgatgcatgaagttgtgtcttgttgctttgatattgacctttaggatgtttagaataggtctggaaagtttggggaggattggggtttaattggttgagttatgaaaattttggtgtttcctgcactgaaccggaattccggttcaaagaggcctggaggaaccagaattcaagttggcttccaggatttcctcccagaacctgaattccggttgaggaaccggtctacaagttggggaaaatttgggaaccctagttcttcccatttttgtgttgttt

SEQ ID NO: 370741 - DNA, 585 bp, Cannabis indica
tcatttcatggatgtatactctataggtttgtatggatatatatgctcaaagacaaatctaaaactctaaaggtgtttcaaatgttcaaagctgaagctgaattacagcaagggactcaaattaaaatggtgcaaactgacttgggtggggagtttagaacctttcctaagtttctgcaatagcttggggtattacataggcatccatgtccaactactcatgaacaaaatagcttagctgagagaaaatataggcatatagttgagaatggactcactttgcttgctcaatcctttatgcctctgaaattttgggatgaggcctttatgacagctgtgttcatacacaataggttacctacccttgttctaaatcacaaacccctttagaattcagtttcacaaataacctgattattcatggtttaaaacctttggttgcaattgctttcctaacatcgaaccataaaacaaacataagatgcaattccggtctagaatcttgcaccttcctaggctatagtttcgaaaccaaaagggtatacaagtgtcttgcatctaatggtaggatataccaaagatgtc

SEQ ID NO: 370742 - DNA, 589 bp, Cannabis indica
aacaccctgtactttcccgtacttgtgctggtatcactgtaaagtactcttaaacaatattcactacgccaatgcactctgtaccataactgtacaagtgttggtagtgcaactaaaccataagcatgcatatacacttaacacatatatacaatcagattttcatattacacattatacacagttctcacattctttccaaattcaagtgtgctggtcgacctaaacggaaagtctcgtgctagatggatgccgtaatcacataatgaaaccgggtaaatcacatgatcgaaaccctactcccaggaaacccaaacctacaaccctaggttctgttatatcatccagggattacactaactcaataaatagggaaacacccaactacgacactgaaatggacgagaattgagaaaatagagcattcggaaaccctgccaaaaccggctagccagttaaaaccgactagccggttcataccaattcaccccaaaatttccatttcttgctcaatcctccaccaaatgcaaccataatttccagaacacctatacaatgcatatacaacataatccaaccagtatttccc

SEQ ID NO: 370743 - DNA, 527 bp, Cannabis indica
tcagcatatgcattgctgcatctatatgttgcatataaaggttagagaaatcagttagacaacaaaatatattaattgtacattagttgtaaagtaaatttataaaatactttacttacgtcatttgtaagtcattcctgtggtatcagcagcttccaaaagaatgatggaccgtaatcaccacttttcaaatcccgaagtcggtggtaaggaatgagtccagaacaccactttcgaaaagtatccaacaattgctcatccggtggcgccaggggatcaaatgtcgaagaaggcctctatttcttcttcatctctgtgtagtcacagaaccatacatggggatttctcttcctcttccgactcttaacccctgcaggttgtgcctctatcgccaaaatttcaccttgggactcgctatcatgaatatcgataaaacctgcaccgatgggagtatctggagctccttcataaggatcatacccgtcaggaaagacctcctcctcttgtagtgggggtgatgcagctgg

SEQ ID NO: 370744 - DNA, 550 bp, Cannabis indica
ttattttcttttatgtttttgtgtagagaattgaaaacatattatttttctttgtaaaatctattaatatgactaattatattgtatacctaaaaatatttaagcaattaaaatatttttacgttggaggtaataaaatagaatggaatggaaatgaaataattttcattccattcttttgtttggttgcattttaaagtattgaaatgacattgtaatacaatgctgaatgactattgtattttaaaaatgaaagaaatactattacaatgtagcaagagaaaaaaattaatgatttttttataaatttttttatgcattttaaattttattttattccattcttatatattcatatttctattcttattactatttttatatttttattccttccaactaaacgtcactttagtttttactaaaacaccctttttgggatgttatccattagttattagttctttatttttagtttataattactttcattatattttgtaaaaaaatgatattcatacagtagtatgtcatatatctctatttttta

SEQ ID NO: 370745 - DNA, 732 bp, Cannabis indica
gatctcactatcttaatatgcaaaatccattatttctctacttaagatttaaatatctttgaaacatataaatttttacttatgtagaaatataatttatgtgagtaatcgttaataaatgagatacaaaatttggtaaaatacgagttctattgtacaagtgttaattgacttgtatgattgctaatatgacagaattctatagtgtactattatagcttgttggtatactttttcttaatgcattccacacaatctctaaataaagttagtaaatcaagtgtaataaatatcccccatttactaattttattctatttatggagatatatttcataatctttggtgcaataatgtagagaaattcttattaataacacatttcttattgtcagattgaatttgtatatctttatgaatgacattattttgtagtaaagacctttaaaaatgtatctaaatcaagtttctaaagaagcttggaacataaaggtctttgataattttaaaacaaagccactattatattgattgttccttaaacttctaaatgtcagactcatcttgtttgtggctaagatttgctcgcagttactaacttccttaggtttctttgtaaatcttgcaagaaattattaatgtggaataaaaatctaaaataattcactctgtgttaataatcacattaactatattagaatgaattcatacaaaataaattgaaaatttatt

SEQ ID NO: 370746 - DNA, 853 bp, Cannabis indica
aatttgacacgtttttcaagaaagttctttgattagcaaagatagcactgtaattgaaaaggcactgtagcgtaccttagcattagggcgttacaagaaagatttgttattttaatagacatcgtgttcttgaagtaattttcctttaacttgttcttagaagaaacaagctccatttcttcaggtgtcgggccaccatcactgtacaatcaagatactattgcaaactctttgagagaaaatctcacaggttttccattaatcaaaaatcataactcacgcctcttttggtaatctaccctcctcaaaactatctaatttactaaggtgccaggagaaagccctttagtgtcgaggtccaagagaagacccaattgggagtaatgtttaaaaatatcctggtcacactttgtgagccaattctttatttggcatattacacttagcgggaatttgatggtaactttagattttgcagttgtattagtagtaatggcacgaggtatacatggaagctctgttgttaatatagttttgggcatctacaataataatgtgtgaaatgaataaaaatatataaacgataagaacataagtataaaaagaattacaaatttaactaaatgaacatggtcgcacgtggtatgaaaatatatagtgcgaacatgtgcgaccctatgggacttgtgcgaccttggtggttgtttatggttattcagagtaaattcaagttacatagtgtaaatataaggtcgttcatagtcgttcagagcaaattaaagttctttaaaattggttgaagaacataaaagaccattatggtcacaaagtataaattcaagatcgtttatgg

SEQ ID NO: 370747 - DNA, 686 bp, Cannabis indica
acatcagtttccgtccaggagaagaatgatagcccacataaaacaaacgatgcagaaagtcaacgcatctgatcctcacgtggcccagctcgccacgctaccatgtgccgagcaagattcgccaaccatggaggagggagatcatgagggggagattgaggtccaggagattgaggagcaggacgatgtccattctggcagccctttcgaggctaaggaggaaggagaggttgaacctccaaactttggagggtataatgcggctggggaaccgatgtctgcggaaggtgaagtctcggtcgaaagggaggactacgtcaccgaggaggttactgaagtcgttccccacaagaggcaaagtgccttaggagccagatgggtgagccttccgtccaaaataagtgaggcacgtatgaaggccttggataaggcttggtatttgggggaactcagtgttacattccttcttcaaatcaccgggcaacgaacccgcagaaaggaatgtgtgcttggtccggtgcccacactaagcaaggggcgatggtgcttttgcacctgtacttcaagagggttgcggactatttttgcctttgtccgacccagttcactcccaaggtcatttagtacttatctgtcttgttcgtcctctatgccattcaaggatggggtgcgccgtccccacacga

SEQ ID NO: 370748 - DNA, 831 bp, Cannabis indica
actagtatggggaccatgagctactatagaattggaattgcactctcaattatatagaacactctatatatatgttccacgatatagatcgctatgaaaatttaaccatcgttctaatttcaataatcaaatatcctctatagatgatttacatcaagtagggacaaatttaccgtttcactcctcaatatattttatccttaaaacacttagcttcctataaatgatgtttcggtaaactaatataatcaccgaaataaaagctcttccatttatctatattaacccaagcttgaaggaaattatcatttcacttctatgtccagatagaagctatagattccatatctatgtttagcgctctcactcaactgtactatcatgtttccaagttgtaagtgtcacccgaaccaaatggtaggctttgactaacaactctaagaacacaaataacactcttgagatcaaacctaaccatgtcaggatattaagatcttttaatctaagatcaatcagtgatattgacttagaaagatacaacggtaagattataatatctttacaaagatcaatatcagtcccaatctaatgtatactccatacatctgatactagcatactttgtcaatgtcctggaaagaacataacacttatccaaggtgtaagtaagctttatcgtcgactatcacatcagtataaatccagtgcactgatgaatcatgagacattatcttttgaagcatataattacctgccactgtgttgacatataattgtgaataattatatgttttgaatttaacagaaattgtatacattaaaccataaaca

SEQ ID NO: 370749 - DNA, 753 bp, Cannabis indica
ataatttcacaaatactattttttctttaagaatttatttctcgtaaaaattaattcttactcaaaatccattcatcaattaaaaccttcccgtgtacagtattgtatagaggtaactccggaaccatggacttatatttcaaagctcaaataaacctaagattgttatcaatcacatcaatagaataatctgatttattaattccattattactctactataaatatagaattgcactctttgacaatatataattatatttacagaattcttacttgtagtctattgatataatcaatataagtagttcgtcctccaattattagtacataattagagttagttaaaattatgttttacccttctaattatctcttgattccttatgtaccattaattcaatgtaaatagttaatctacaatttattatagaatttgatccaactattagcactcctagaattaacactataagggaactaatattcgatctgttaggaaagctttcattccactattgtataacatgttcccagccactcatgttattaagatcacaaaacaaaagttgtaagaatcatcttctttgagaaactttaacgagtgaatcaaagaactcaatgaacacaaacatgagttcatgtatactcaagattcaggctgatctactaatgattattattgtgatatgataaactctttttatggtaaactacaagttaatgaaagatatttattacatatcggtccag

SEQ ID NO: 370750 - DNA, 517 bp, Cannabis indica
taattcatactatctgatagcctagcatacatctgttggcatctcggcgcatctctatgtacacttcactgatgccctgatatgctaatcagagggctataaatttgttatttctgacggcaactaacatgtacgctaaacatgtataaacatatgcataatattatactactcttaccttgattccgaattcaggtgtgccggctaacctgagtggaacaactgctcggcgaattacagactcctaaatcacattaatcgtaacataggtaagcaatacgctaaatcactttccggggacttaaacttgaaactaaaagtttccctatcgatgaataacatggcaataccctaaacatatcaaaaataggaaaaactagagtttctgaaactgccccaactggaatttcggttcttacaggtccccctgaaccggaattccggttcagtgcaggaaagaccaaaaattctatatctcaaccaaaacaaccccaatccacaagaaaccttccagacc

SEQ ID NO: 370751 - DNA, 515 bp, Cannabis indica
tttaatatgatagttaaatatactaaaaaaaataatagaaatgacataaatgtaaataaaaaagtagtatatttattgtggtgtaaattttacatcatagcaaatattgtgccaaatttgacacaaaatttgttatgtgccaaatttaaatcactttttggcacaccattggagcacacttacactttttgttaaatgagctatattttaatttttcaccacttatttacacctccattggagatgctctaataggcacaaaccatctctaatgaagtatcaaaaagtagtatattactatattttaacatacttaagaaaaactattactctaatggtaatggtattgtgaaaaatgtattaaatttgacatatgttaaaaattgtactaaatttaatacaagatatagtgttgtgtcaaatttagccttgagtagatgctacttttttatttactataatgtcactagttattatgatttattcactttttactaaattttatattctttatt

SEQ ID NO: 370752 - DNA, 696 bp, Cannabis indica
atgacatggaccgatatgtaattcaattatctttatcaaatatgttgtgtactataaagacctaattcatatcatacaaatgatcaatagtagatcgacatgaattctgagtaatcatgaatccctattcatgttattagtttatttgattcaatcgttaaagtttcttaaagaatatgattcttacaacttttattttgggaatctaataatatggatggttgggaacatgatctataattatgaaatcctgactttcctaactgtaatatctcgaaaacctaattataaataattaaagtttattatatattatgagttattagagaggattatggtcctactattttaattcaacgtaaattatgaattttaccataagtggatgaataagcgtaatttattaattatagagatatatttagaatatgtgaatataatgtgagttattggtgaaataaaaatatttgtaggttcggcgactttggagacccgatcgaaagccaaatatgtcacaacggatttagttaaaattttaatgggattatcaatataagccgattatagaattaccggggtattttaggtactcgaattgaccaaatacgggttagaaatttcttagtggctaagaaataacaaaaataacttttattaataaagttttatcattatcttgttattattattattatt

SEQ ID NO: 370753 - DNA, 664 bp, Cannabis indica
ttttcaataaattattatgggtgggattaagtaggtgtgaaatactaattctaattaattctttactgaacagcttattttagttgataaaaattgagataaaatattaccaaaatcaaaaaacaatactaataaaactactaagtaacaactctttcatgttttacattgagctcaaaacacaagtagcagtaactactgatttttcactatgcattagaacaataaaagagacaattcttcttttgaattactggctacaaattcgatcactccacaaaaaatgttaaactgggccaattttttaaaaatattaaaatacaacacaatccatatttttttagaagagatattgacggcaaaaccacctatactttatattttttaacaattaaccacttaaatcgattttttggtgacaaaactacccaaactctctttctattagctactccttccgtccaaaaatctcagttaactggcccggtagactttttacgtttttagtggtccacataatattaataaaaatataatttaaaattataaaaaaattataaaaaaaaacttaaactttactttcttcttctcttcttcttctactagtaaaaagtaaaacttaacttttttacttttttcttttttctttttcttttaccttaac

SEQ ID NO: 370754 - DNA, 612 bp, Cannabis indica
cagctatttaccaaacacttatatacaactttttcaactcacggctgttttaaaaattatatttaccaaacactcaatagctttttctcacagcacagctacaactataactgctttttcccacagcacagctgtgccaaactggccccaaatcaaataatttatttgatttaatttataaaatataattaattatttactaattaattaaaatattataattatggtcagatttatttactaaatatttcagttacttgatttaatttcttgaattaattgtcaaaatatttaattgtggtagagaccttgatggaaggtctcaccttaataaatatagggtctcaatctgcgagctaactactcattatgtaaaacacagtaaatccatcaaaagagagtatagagagtttggaagaccgattacccacactaattaatttccttttcttttgtgttagacttttatttgggcttacattaaattttattggttttattaaaacttgggttgattggatagttctttgctgtgttagcccatgttgttggtgatcaattgttaatgggcttagcatctgtgagtaaagtctaggtgaagcagaagtgtgg

SEQ ID NO: 370755 - DNA, 605 bp, Cannabis indica
cttagttggggggcaccgtgtgtatgtggaacataggcatgaggcagtggttcaggagaaattgcagcagaaagatgcagagagtgtgcaccagtagcagcagtggcattgtgagcatctgcaggtgaatctgtgggcagtgtgatggtgggaagattgagccttcctgtactcagcaatataattattagcaaattgcaaaatttgcaaagcagattttggagtcttcgagtgagtctcagcattccttgctgtccaaatgcaccagagaatagtgatgaaaagttcaaccttatccgattgcaattgagaagaaacatatactagaaagtctgagaaagagcaagattttgacaaatgccaattaatttttgattcccaattcctccagacttgtctagcccgattgcaccagaaaaaagcatgattaatggtctccaaatgcatctgacaaaggggacattgaggagaggttgatatgtggtgatgttgcaaagtagcagcagtaggtaaagcctcatggtaagcacgccaaacgaaaattcgaattttagaaggcaatttaaggccccagaaatactgccaccatgttgcagatgtgagtg

SEQ ID NO: 370756 - DNA, 705 bp, Cannabis indica
cttagtccacgagtctttcttatgtatgagagtaattttacagagaatgttcttgatgaagctctctctctcttctttactctcttacattccttaattaatcgaactaccccttttccattctgtctatggggtatttatagtgtttttggggggatccctagaaagggatcacttgtcttattgtgttagcctcttaggggcacaaattcctagcagatacaaaataggaaagacatgacctatatagtaggtatcttagggagtaggtggatataatcttttatcctcccttgattgatgtgagtcctcataatgtagccaccactagactcgtcgattgttgtgtaatcgctgtaaaaaggggcttacgccatctgccaaatcctcttatggaggttctgatacgtttccccccatgcggcactaaatgtgaagtgactgttcgaacttcccagagatgccttgttatagttctagcctcccggagagtaggggcgtgtctaatgctctcctccgggaggctcactccattagatgcacttccctgcccaagacttcattgattttcgtaagtggatgtcctttcaggtccacgtgtcaccttcggccgctgccacgtattttgggaaaaatctgaggcaacaacaatatacttactttaatttttttttaataaaatattaggaaaaataataaaataaa

SEQ ID NO: 370757 - DNA, 515 bp, Cannabis indica
tgtgtaaaaaaccgaccaaaccgtcgttgctcaccctactcctttggaatagtaacctactgccaagaagaatacttgggaaacttataatcacaactatactccttgtcagtaagaaggcccactgatctcagattggcctcatttaaaaggaagtcgcatgacctaaggccatgggtaagagtcatctgatgcctgtgccgactgaccatctcgagggtaaggatgggtctcgtcgagagagctaaaaaaacaacaaaacattggtgagaaaactgaaagacaaggattaatgtaactgagcatgaggaaaacaatcacttacgaattctgcgagaggtggttgtgccgattggggagagaccagatgtccagaagaagttgtctttgaaagacactttgtttggcaagtccacaataatgttaggcttactataatgagtaccaagataatagaagccccccccccccccccgcccgcattcttcctcactggaacgaccttaaccgaatag

SEQ ID NO: 370758 - DNA, 850 bp, Cannabis indica
ctggtttttgtgtgtgtaagggtgtaaagatcagatcattgtagatctgatctttttgcttttgtgtttgggatttctgggtttctagggtttggcttcgagtttctatttgagaatctctctgctagggtttctagcatttcagagagaaaggaaggaaatgagaaggttctcgatccattcctaggttttgttcaaagacaaaacggggtcgttttggggttaactttgaaaagtcaaagtgaacaggaaaaggtcaaaattgaccttggaatttgattcgtttgtttgttggtgtagggggcaagatagtaaattcctatcttaaaaattcctacagttttctattataaaaaaattaattaattataatttcttttttcaactttatctcactttgtttttctaatcattttctcacatcattttttctctcacattttctctctttgttagggtgttattagtactatttttaggttaattttagtttgttttttaatttatttttactcttgtttggagaaattttacgcttttttatcttttatttttgcagatttaaaatgaaagaaaagtgaaaaatatcgaaggaataagatgaaaaaaaaaaagatatcaagatcaaataaaagataattgtgcacaagatagcggtcatgcctaggcatggaaatcccatgcctaggcccgtgtcaaggcaaacctgaaagacgtgaggatttgcaacacgggccgcgacataggaagtgcatgccgcggcccgcccatctaattcaaggtagattaggattctttagcgtgggttatatttttctatcttttttatcccttattggctataaaagaa

SEQ ID NO: 370759 - DNA, 682 bp, Cannabis indica
taaaaatatatggtggaatatttcttttcaaataaaaaattttacgtcggtatttatttgaagtgttttgaatacacgtggtaaattgaaataacagaaattttattttcaatattataatttatttggaattgttcaaacatttatagacataatactgtaactataaagaataccattataaaaaaaatattccggcatgtaatttcaaaaatagagattgaataacagattgtaataaatgttatatttagggaaatttgaattactattcatccatttggacaaaattagtacactgaatctaaatatatcaaattaattagatatttcatttttttttatttaaatccaaaaatactctttcataactcaccccttctctctctccctcatctctctcgctctcttcttctcatgcacacgaagaccctatcaacccacgaaaaccaaccatcgcacctccaatcgaagaccaccaacccaccgacgactaccaacccaagacctaggatctctgaatcacgaccactgcgccaagaatataagttctccattttattttcttgtattttgtgtgatttagggttgaaatgtatggttttatttatagatttattgatttaagaataaattgtatgattaatgtatgttatttgtaagttgatgttagatttaaagt

SEQ ID NO: 370760 - DNA, 671 bp, Cannabis indica
aatacccctagagtttaataaaatctccagaatcgagaaattataactctaatatttatttctaaatattggggtccagaattaaataaattcacaaataataataaaataatcaaataataaatattagtgctaattgcctttactaatcaaaaattactagagcggtcattacattgaccaaccccaacagtcgttattttatatgaacataggatattagtatcaccaaaggataatgatctgggagcttataagcagtttatcagctagaggagctttccaggagccaaacctttgaagatcaagaatctacatttaagtacaaatagataataatcccagtcaatcaatctcctttttaattcgggatagaactatactatatacacaaacataccatgaggtgacataggaactgggttcttcaatttcctatagaagttatttagccaagtacctactactatgttctgtctttcccacataaactttttcatcagaacttatttcacacaaggatgtgacaaatgaatgagttgagaaagaacatatccccattactgagaaatgaaaataaacaccatacattttaatttagtgtactttttggaaagcattaaaaaaaaaatatattttacatctttcgaagccagctcgcaaactacatt

SEQ ID NO: 370761 - DNA, 849 bp, Cannabis indica
catgaagacgaacaatttctctaacatataactcagcataatgatcaatggagaacggtccggtagactcaatgagtgattttctcaaccgtgctgaaggcttcatcaaacttgaagaggctattcagcaagtagaaggtgagcaaaagccatgcaagttgaaagctccttccactagaatgtctgcccaactcccccattacccaaataattcaagctcaaacggtaaacattccaataacaacaatagacaagggaatgggaagaaaggaagttcactggaaaaatcgagcaagctcccccagagaatcaagccaattacactgcatttaccatcttgactgaggatatataaagtgtttacatggccactcagtcgctaaccccgtataagaagctcgcgcccatgaagaaggatgtcaacaagagagacatgtccaaattttgtcgatttcatggagactgcggccacgacaccaatgaatgcgacaatctgaagcgagaaattgaaatcctgattagaaaaaataacccgcatttacagaagtatgtcaaggcggatcagaatcagaggaatgataacaaccaagacttgctacctccaccagtagatggacatctgcaagtcatcattagaggcccgcacatagctggagattcgggcaaagcttgggagaggtatgcccgaacagcacagcacgagcaagaagaagcgatcctggcagttgaagaaaggaagcctaaaatcccacgtgcaggagggcctaccataaccttgaacgacgaagatgctgtcaaaatcaggtttctgcacaaaaaaccattggtcgtagaggtccagatagccaa

SEQ ID NO: 370762 - DNA, 507 bp, Cannabis indica
ttatttaaaccaatttttgtcatttattctcaccacctacccgattctatttccttgtctgccttgtctatttattgttcattgtgtctcgcagatcaccatgatcagaacaaagaacctagggcatcccaaaaaggtggttgaaaccgatgcaaccccctcgaatgctcctcctgctgcttcaaccgtgcctcctgctgctgcaaaaataggagattcatcgcttcctcagcgtgaatctcagcccgagaagccaaaacgacttcctaagcaagtggctcgaaaatctgtgcgcccatacaaaacctggacttcatcgtcttcatcttcaaaggaatctcctccacctgctacaggttctcctcctgctgcatcagttcctgcctctaccccaactggtccttctactcgcactcgtgcgcagcaagcttctgtcgagaaggaacttcgatcatctcgaagtcgtgacaagccagcacctccagccaagaagcttaagacgaatcc

SEQ ID NO: 370763 - DNA, 637 bp, Cannabis indica
aacctagttcccatagctttttgtaaactctcccaaaacttggaagtaaatttgggatcatgatctgaaacaattgactttggggcaccatgagtctcactatttccttaatgtacaattcagcatactgttcaaaagaaaagtcactcgcacaggtaaaaagtgcgctgacttggtgaatctatccactatcacccatatggaatcatataacccagtagtcctaggcaacccgactacgaagtgcatagttaagtcttcccatttccattcaggtattctcaagggctgaagtaaacctgtcagcctttgatgttcagccttaacctgctgacaggttaaacactttgaaacgtattcaacaatatcactcttcattcccggccaccaatagattgccttggtgtcatgatacatatttgttgtccccgggtgtagggaatacagagtagtatggacctcatcaaggatttctcttctgatatgatcatctatcgaaacacaaattctacccttatatcttagtagtccactgggagtgacaatgggatggaaaaatgacaaaatggcaaaattgcaaagtggggcccaatccacatcctatggccggccacttagtgtgaattttactatttat

SEQ ID NO: 370764 - DNA, 550 bp, Cannabis indica
gagaacttgaaattggatgttgtttcattgattattgggattgagagtttgatttttcatatatatgggaattaaaatttgcctttttgtttcattgattgaaaaatattagtaggaagtttatggaacggtaattttaaatatatgagaatagaattgaaagatagcatttgaagcgagaatcaatgtttattgttaatatccttacaaaaaaaagtttatttttaatctgtaaagataatatggcttgaagaagatggaaaaattaatttttatttcatttatcatgtatataatgtttcttcttttttgaataatatgaatttattttaattaatttttattttcttatattattttttctaaaagaatttttagttttgccaatactatatttacatgtaccacttcattgatcaactaacagaacattaaatttggtgtaaagtttagaaatttgaagatatcaataggaactacaatgatggcatcaagtttatatgatcgagatataaaaataatgcatgatgaaaaagtttgattcataatc

SEQ ID NO: 370765 - DNA, 687 bp, Cannabis indica
aatgggttttatttagggcacataacccaacaaacttttcactcaggtgttcgttttagacgttttatatgctgtttcgaagcttgcaacgagatctactatatggtgtattttttagagccaaaatataagttttattttagtgtatttgaactacggggtttggtaggaaaccctaggttgtcatttgcaactgttaagtagtgttttaggataaacacttattagtctattattgttatgacatagagcctgggatcatcgattgtactccaagtaggtcggccaacatacttgaatcgaaacttgaggtaagaaaaatatattgtactgcatagtacattatatgtaatacaattagtatttttatgaattgattaagattgagatatagttaatattgttatataatgaaatgattgattggttaagcaatgataatataatgatactatgaatgtgatatacaggctcacctgattaggtgatgcgatgctcccggtgatgtaccgggcataggtacgggcgtcagtgacatatgagtaccaagcgtaggtacaggctcacctgattaggtgatgcgatattcctggcgacgtaccaggcgtaggtacgagtgtcagtgacatatgataagtatcgggcgtaggtacgagttcgtttgattaggcgattactcctagcgac

SEQ ID NO: 370766 - DNA, 625 bp, Cannabis indica
agagctataagaaaaggaaacttctaccttgttcttaagtcaatacaaataacgaggattaggctattaccgaattgctcggggctgaacctctataaaattcttctgtcttattattgctttcttatatatattctcattacaacatatcgtttatcgcttattaaaaagactcattgtcgttggctaaaagcgaagtcaacattttggtgctttcattgagaggagaatctcagattgctcttttcgacattcaacacgatggtgcaaactcgtaaaggcctgtctaacccaccaagttcacaaacgctggatccgacattgcaggacccagggagttcaagggttccacccgctgtcaatcctggacagacgggaagcatggtgaatggtgggaaaactcctgttactgaaactgcacctggtgtgcaagagactgggagtaacagtttcgcacacagccaggtcgttcataacatgactattccactaggaatcaacgcccaaacgaccattagagacgcaactgaattgcaaaatctccgtgctgcgctcggactcatgcagggtcatagcaatactctacatcatgatcaggtggaactgctgttggaaattattttac

SEQ ID NO: 370767 - DNA, 784 bp, Cannabis indica
attcagctctttccagtcttgttgagtcaatttgagaatctctatcccaattcccaaatgcatctctttaccatatctctaggaatataaactatgaagctcatcaaaatgcaaggaatgcattacagcttgataaagatttgatttggagagtctagttttctccactcggttgtgtagctgtaactttggacgtttctttcccttttcagttagttacaattacttcaaaaaaaaaatgagatataatttttttcatttttttttttaatattattaggttagaatgaaaaaaatgaataatttgagttgtacacgtgtccaaagtactgaaaaagttagtgggtaccaatgaaaatttaaaaaaataaaattttgaatttaatgctgccttttttaaaattaattacttattaacaacaagacaaataaaataaatatttatgccatatatttccaatatattatataactctttcataattagcatatagcagctcaatgatataagttaacatattccaagaaaaattaagctgtaggagtgctcattcgattcaatccgtattttttggtcaaacaacattcaattcgcattaagtgcggattttatattttggatttaatccgatccgcataacagtttaaatccaatctaatccgcaatagtgcggattgaattggttattttttttaatgataaattatttaacattaatttcatagaaaaaaaaattaaaaaaaaagaactattatttcttaatcttcaataataatctatttc

SEQ ID NO: 370768 - DNA, 449 bp, Cannabis indica
ttaagttctagcttaattgtactatacaggtttttgacttgttcattactagcttaattgtaggactagtccatacttacatcttgggaattccgtaatgcaattgagtgggagcattaatcataggtatgaaatctatagcttccataactatttagaagtgaaataatggtttcttttgagcttgcctaaacgcgataaatgatagagcactcattttagtagttatattagtttacaggaatatcatttacaagtagctaagtgttttaaggataaaatacattgaaaagtaaaccggtaaatttgtccctactcgatgttaatcgtctatagaggatcattgattgtttagattaaaacaatggatgattcatatgttgggttttatgccctaaaaaaaactctatttcaatgtaatccagaatattcaatatcaataaagtaac

SEQ ID NO: 370769 - DNA, 630 bp, Cannabis indica
tatacattaaacataatcatgaaataaatcatgtgaaccatgcaacataaaagcaatttcagattttttattaattagtaaatctaattatactgaaatagattttatttaaggcacaaaacccagcagaagaagtctcaaaacactagatgtctatgagaatgaaaactaggtttaaaggtgtagaagcattagtttggatagtgagaccttaatcttttttttatactaatgctcttagagttaggattgaattatttgaaataaagaatgataaaatagagcaaaaatagcacctagtagacgaccctatgtgggtccatcattagttagatttttgctacttttcttaatcatttatctatttttgacaaataccactttttgcactttcaatcttataaataccaaaactatttatttaataattaaaataaaccttaaaattctatttcttcacaaacaagccatatcttagtgaaaattcctaaactagatatagtctaactttagaattatagttgatttaataaaatcaataaactgagtcttacaagcagtttgtctcagctagtatggggaccatggggcctatataaccgagctttcaaataagcagatctagaattt

SEQ ID NO: 370770 - DNA, 1017 bp, Cannabis indica
ttaatttttgaaaaaatcacataaacatacatatataataaattgtatctcacactaacacaattttaaaaactttatttctaaactaattaaatccctcctatctcattctcattcacaataaatatatatatagacatatatattacttagaatatatacaatataattaaagaactttacataaataatatatacacacaatacatatataaatatatattcaataaaatacaaaataaatatatatatatattataaatcaagttaataaatatttaccgtataagcgcaatttgacgaccaattgcgacaaaaatctggccaccatgcatacacaacaacataatgttaataaaatgaaaaagatccaaaaaaaaaaaaaattccaaaaaacaaaataaaagcaaatgtacactaataaaataaatagaaatcgtatttataccttaatggacgttgagattcaacattttctccaccaaaatcggtggccagagttatactaccacatttttttaatgggttcggttacagtgatagaggggtaaaaaccaaacttttttagagtatagttttatgtatttaaaaaagaagattttaaaagaaaaatggggtaaaatggtgtagaaatgagagagatatagtgatttttagtagtggttggcgagggtttcgtgggtttttctggttctgctatggtggctgcttatcgtgctgaaggaaggaagatgaattggaaaagatgaagtctgaatgttgtatatatatactctatggcgtcggttattagaaaataacagacgccataggtgcacacgtatcaataaagtgtgcacctattgcgtcggttatttctaataccgatggcataagtgtaagaaatatactaaaaaatttctaaacccccaacctaactataatgggtataattaatttctagagctacagtttttaccaaaaaactagcctctaaatgtcaatttcgaacaaggcggttattatcacaccctttag

SEQ ID NO: 370771 - DNA, 511 bp, Cannabis indica
gtttcaatgaaggtggtcttgttcatctcctagatttggtagtaggggagtcaactccttaactttacagcgtaggaggccttcaacatcccatcagctttgtagccgaggaggccttcaacatcctatcggctttgcagcggaagaggccttcatcgtctcctcaactctacagtagaggagatctttgtcatctcctcgacttcacagtagaggaggtcttcatcatctctccaactttacagtagaggaggtattcaccatctcatgggctttacaacagtcttcttgacgactgtcaacgatgtgtgtagcagtcgctggctgttctttggtcaattgaggatgtgaccaactcctggattaatatacccaatataaggtgatgtctttctgataactctagaaattagagttattatatctcattttttaagctaaatcagtttagttcttgagtttttaattaattacataagcttttatttatttttgaatttattagctttat

SEQ ID NO: 370772 - DNA, 663 bp, Cannabis indica
taacaaaaaaaaaaaaaattaatatttacataaaagtactcaaaattatatttttttcttatattttgactaattttttagttatatttttttaacacaaataatgttgttttcatgttataacaacaaagtataatataactaataatgtaaaattaaccatcacaataataacgtagtgataaattattttttaaggagagaaaaagatgaaaaagaaaaacatatatacatattgaaatacacttaaacaaaggaaaaaagttattaatacttagtcaaattattttttaacaattagataaaaataagatgtaaaaattcctaaaatttatatttggtgtgattaagtatataaattgcgtgggtatgtgattacataaaagttatgctttctgttattaaatttaggctaattaggatttttgtcccctgaattttgataaataccaaatatgcccttgaacttttaaagtcgttaaaaataccccctgaattattgaaattgttagatttaaggatttttgtcaattttcattcaattttactatttcaaagattgtttatgtactaaatcatacttccaaactttgatatttaccacatcatgcccctcgaactttgacgtgtactaaattacgccctctgaactttcatccatgt

SEQ ID NO: 370773 - DNA, 620 bp, Cannabis indica
ctagttgagacaaactgcttgtaagactcagttaattgattttgttataccaaaaatttggctacaatctcagtggaagacacgtgtcgagataaaaggaatacggatcgatgatgtcacttttagtggaataactcattaattgcctaagtagcagagtatattcacaacccgctgactgtaaagttttctgcgaggaaaagatatacaaactgttgcttagtatattaattagaaaccatatgtcattgaaggcatatagcgaggtagcaagtacgttacatctggaaagacgaaagcgacacatatggactgtggaaacacttagtacataacgtcaaactaagtataacagtcatgttggatcgagactcgataagcgaggtgtctatctcgctatgggaaggttcattcctgtaaactcccccagtaaacttcatccatcttctcagtgaggcttacaatcctgacaagtcagaagctaacattcaaacaagcctcgaagaactctttgtaataagaaccgcgatcgtaacaaagaagcgacaaggcatacttcgttgacctcagaaggataaagaaaaagggtccagctcgctattacggtcactggaaccaag

SEQ ID NO: 370774 - DNA, 916 bp, Cannabis indica
accggaacatcctccaggtgaaaaatacggtcaggatagaataaggatgattttgcaaaaacatgatattttttgatattgaagtatgatattttttgcaaaataagtaaaatattttctttttacaaattaagtaaaatagctggtgagactttaatatatgtattttatggaaaaaaaacgtttaaaatggtatgtttatttttggcttcaaaaatggtatatctattgaaactgaaaaaatgagacctatgtattattgtattgtttttatagaattatcttcttctttactcttttttttttttctatttttaaggactaaagaattgtagttatgtttatcttgataaaaataaggctaattaaaatttttgccgcttaactttaacatgtactaaatcatgctctctgaatttttctacccgttaaaaatttcccctgaactattgagattgtcagatttaaggacttttgtctaatctcattcaattttactatttcagtgattgtttatgtactaaaccatgttttttagactttgatatctaccaaatcatgcccctcgaactttgatatgtactaaatcatgccctctaaaatttcatccatgttagacgttttttactaaaattatacaaaattcttaaggtggcgtttggttgggaggaatgaaaatatagaaatatgaatgggaatgagaataggaataggaatggaatggaataaaatttaaaaaaaattctcttattacattggatggtctttccttcctttttaaaatgaaatagtcattccaccaaaatggagagggaaatttgaaattctatgcttaaaatgccattttattttttccctaaatgtatagttattaaaattgttcctatataccaacttttctaattttcctaaacta

SEQ ID NO: 370775 - DNA, 636 bp, Cannabis indica
aaatctgcatacgacaatggaaaatagtataaccgaataaccaaagtaaaaaaaagaagagagagagagagagagaagaggaggaagaaagaggttaaaaaataaaaacccagtaatagagataaggagattaccgggagccccccagctctggttaataaatggggccgtaggatcgtcggaaacaaactcaataggaccccgggcgaaaaagaacttttccttccaccctttatgggaagtctctaagtcagtcaacaaggagcgacttttcctaggacgaagatgataacgccccggctctttttccatcagaaaatagaagtggatgacgtcggacacttcccactgaacgcccgccttatcccctaatacaatcagacccaaaagaatagcccacacattagggagtaactgggcaggagcaagcgaataatgtataagaaattccttaataagtctaggaatgggcaacctcagcctaatcttcgactcaaaccagtatgagtgtaggcatacccactcgttttgagaggaatccgccctctcgtgctgtttaggaagcctaacttcgacccccgacggaaaaccacacgacaaaactaaggaatcgagctcacgttgggtgaggaccga

SEQ ID NO: 370776 - DNA, 817 bp, Cannabis indica
tctaacttttagaattataattttaccctttttctctgtgttttgctctcgcagcttctggctggtggctatggctaaaacgaggtctaaaactcagggaaaggtgagatcggtgggcaagaaatcgaagaagaagcagttccaatcgactcaggatgctattgtgactggggctcgatgtgaggatactggagtcgaaccgctggaggtctcggaggaagaggaaactgcagatgatgatcctgctgtggtcgatcttttccagcaacctttgtctcccagatcgtctctgaaagctatacaaaggcaggatgatgttcagaaggactttattcatttccttcacgccaataaccaatgtaacagtgaagtgaaacaaggtaaatccccaatccctcctgttttgagatctggtattgtgcgaaatttagatacttcgtttaaacagtctgagagtgtaaacaaagtgaagattaatcttgatgatattgaggaggaaattaacttttggcaagcctccattgtttgttatgtgcttggtgcgaatcctccattacatgtactggagggatttgttaaaagagtttggaaggataagatagatagggtgaagttgctatcacagggagtttttatcatcaggttccactccatgacagaaagagatctgatcttggagggtggatacatctttttcaatcgaagacctgtcatcatgaaggcatgggatcccaatgtgaatttcaagaaagaagatgtcaaaaaggttcctatatgggttcagattgaagacctggatctgaaatattggggacaa

SEQ ID NO: 370777 - DNA, 357 bp, Cannabis indica
gataactaatcagattgtaaagagttttatttaaggcataaaacccaacaatatattttagtcaatcaattttaattaatcattaaatgaaaaaatcattgatttaagttggtccaaaattaaaataaataatttttaactttaatctatttttcaaagaaaattcgaaattttattcaaatttaagttgttctgaaataaaatttccaacttaaaataattttctattaaatctttgaaaattataatatttaagtatcaagaatgaaatcaacttaaatatttaatttttcaatttaattaaatgtattaaatataagaattaaataatcaagtttaaaataaactcaattatta

SEQ ID NO: 370778 - DNA, 492 bp, Cannabis indica
aaagagtaaaaaaaatcaagcacacggtttaaaattttaatccattccacaaataacaacagcagaaaaattgacattagcttaattaacaactaaaacaaataaaactaaacaatgaaaaataaaattaagaccttcccccaaacttaaaatttcacattgtccccaatgtgaaataaaaatttaaagagaagggaacttaccttaagtccatgccacatcaacaagtggttgacgcccataataagcgtcatgctggacaacttgaaagttgtttttaaaaattccctcaagcctggcatgcaatgagtttgaaccaaaagccgcaccaacaacacaagactttcgatgatgagcttggggagaaaccgttgatagctcgtagagaatacaatatggagaatgcagtattagtggaaaataagggtccattagttgttcataatatagtgacgttgacgacctcaaatcaacaactacatgtgattcttc

SEQ ID NO: 370779 - DNA, 583 bp, Cannabis indica
aaatcaatttagggtcctatttgtactattttagaaaatacagggtccattttgtcatttaacaaaacacagggtccaattggtaacttttgtaaaacaaaaggtccaaaatagtatttacctattttttttatgcccactaagattttggactaacccttatcataagtacactgaacactattcaaaacctatatatattgtaagaaaatctataaatataaattgaaaattgaagtataaagttgttacctaaacacgtaatttataacggtaatacaaattataaactttcatgattaagaataatatttataaaaaatttatagataagtttatacgaattaatatagtctagtttactatttaattttttgaggcaccactgattcatgtttgtcggtcggctaataaaactgttcatgaattagttgtgcatgtacttagagtaaatggtaagctagtttggatgatgaattttctttcttttcatttcaatgttattggagaacattgtcccacatggattaaatgtaaaagtattgagccatatataaaaacatgggctactccactcattgcc

SEQ ID NO: 370780 - DNA, 744 bp, Cannabis indica
tattctttccagtaaatgagactacaatgtaatatttgccaactttccgactgcaaactcaatctcagccttagccatatcctcacccaatcttggagagatttccttcaacccataaacctaccctgggcctttccggctaagtgcatctgccactacgtttgctttgccgggatggtagaggatttcacagtcgtaatccttgactaactctagccatcgtcattgtctcatattcagatctatttgagtggaaaagtattttaaacttttgtgattggtgtaaatctcgcacttttcaccatataaatagtgacgccaaacctttagggaaaaaaccacagctgctagttctaaatcatgagtggggtaacactgctcaaaatccttcaactgcctagaggcatagacaatgaccttccctgattgcattaacacacaacccaaaccttgtcttgagtcatcaaagtatatcacaaacttttcatcactgactgacagacttagaattggtatagtaatcaatctcttctttaattcttgaaagctattctcacatttatccgtccacataaactataactctttcgggtcagttcggtcaagggagtgaaatcttggcaaaaccttctacaaatctatagaacccaaccaaacccaagaaacttctaacttcagttgctatcttaggtcctggccaatctcgaacagcttcaatcctcactggatctaccagaattccat

SEQ ID NO: 370781 - DNA, 361 bp, Cannabis indica
taggcatgaaatgacttagatttgtgcataaagttaaaatggcataaaatccccaaggaataagccctatgcgcccactgccatatggaaatggcagtgctctccaatttttggagagcactaccacaaggaaatggcagtgccctctactttctagagagcactaccctaagggaatggcattggttgctacatgcaaatcaccaaggggaaattattcaaatgtgttccattaacagcaaggagtgcaaaaaatgtaagagaaaccatttctcacaaaggaccaaccctagccgaccactgccatctttgtggcaaaatgaatggaagtggtcggcataaagaggggagtgagattttt

SEQ ID NO: 370782 - DNA, 884 bp, Cannabis indica
atattatttatttttaactttgacatttataaataaatatatataacctaaaataaaactaaatatacgtgcattgcacgtaaactttcttctagtttaaaaaatatatatataaatatagcgatatgattttgtcccgtgatgtactttcacggaatgtattccgtggtacattagatgagtctcagggtacattaaatgagtgtgagggtacgtttctactttttaaccttaattatccctagatcattctcaaccgtcagattaaataactccttcatctgacggctgtcgtacatcacggattacaatttgtgaaagtaaaataatacgacaaaatcatatccctataaatatatatagacaatcgtcatattaataaaattgaatgaaattaaataaaaaaatggtttaatttaataattttaataacttgaaaagttcaaatgtcaaaatattttgagaaaaaatcttattcttttagaaatcaatgaatattaaaaataagaaaagtgtgaactcttaagagtaaattaccaaagtagtgtcttccattgtaaattgtgcaatacttgctccgatatagggactacattgctgatcagagacttacaataaagctttttcaaactcgttcaagtccaaggttagtcctctcttacgcttcatctgccttttccaattttacctctttaagccctaatttcttcttcgtagtctttgttcttccagatcttctactatgatttttcagttctcagccagttgtttctgcaatgattatctgtaggagtagatatttacttatctgtttaaattgattttttcattctgagttttttttttttttttttttttattttttttttaattttttttaagtt

SEQ ID NO: 370783 - DNA, 1216 bp, Cannabis indica
cagtacttgatttgtttttaattctacatatttacgttttcgggggaaatcgaagctattatagtttttaattgatttacacaatttttactaatttgcttagtaaatagggtagaaaaatcctcattaaaccactttttaccatttttcttgctaagtaatttcagagcaaaagtaagctttttctctcgactctgtcgttgaatttttagcagaaagatctgattagcttcatccgaacacatcaaagcttcgaatagtgagtaagtttcttatctttctctcctttaatttcgtatcttcaatttttgggtttccattgtagaaaattcaatcgttcttgacttattttaaaaaatatagaaaatctaggctcaagactttgtaattttaactgtaatagatcatatgacttcgtggtttgtgacattttgactttaacctcacaatgttcgatcttcactttgcccattcgaggtttaatgaagattaacccttaattcaaaattttcaaacattgggttacgaacttaacctttacaacatttttcatctttttaatctgtcgagtagacttggtcggtatattctcttgtttctgttcaatatcccagccaaatactcatctcgtgtattgtcttttgtagatgaaccctggtgagttttggggaggcgaacactatatcgaccagaatcttctttaacttttgtacgaggaccaacctcgtcttcgcgccagtccgtcctcttcgagtgacggactttctaactcaagttttgaagattgggaggtgagtagtgaaagttcacctactccagaacccgaggtgcagcatcacttttactccgaacagattgcagaagaaggctacggacgatttgtctgggagcttaggaaggggtggagacgttatctcccatccaactggacatatatcgtctggcccggtgttggtgagactatgcttgtaggccgtccaagttctggtgccttcggtattccaattgctgctcctatcgtgaccgttgcatggcacacacacaaatacccgtataggaggaggatgatggcccgcacgaaatagatggtgcagagaattaatgcaactgaccctcacatggccctgcatgccacgctgccatgcatcgaacaggacctgtccactgcagagtaggaggaatatgagggggatgttgaggtccaggagatagagga

SEQ ID NO: 370784 - DNA, 828 bp, Cannabis indica
gaggaggtttctccatttgggttgttgacgtggataaatctggattaaaagtaagaaaagtatattgtactgcatagcatgttaattgcaaatcaattaatattgttgagaattgattaatattggaattaagatacagttattattgttatgtaataaaaaagattgcctgattaggcaatgacaatgtgatgataccatgaatgtgatatacgggctcacctggttaggtaatgcgatatactcgtcggtgataccttattaggtacgagcgggattgatctaattgggtcattacccacagggcgaggtggagcaaaatacacagtggtggcagttgacttcttcaaaaaatggacagaggttgaacctctggtttccataacttgcaaaaaaattctcgactttgttattaagaacatcatttgtaggtttggaattccaattaaaatagtatctgataacggaactcagtttgatggtgaattgttcactgagttttatgaaaagaataaaattattaaaagcttctcatcagtatcgagacctcaagcaaacggacaagtagaaattgttaataaaatcttaaaagatacaattaagaagaagttagatgctgctaaaggaagatggatagacgagctaccacaggcactttgggcccatagaactacagaaaaacagcaatgggacaccctctattttcattggtgttcagctcgaaagcaatgttaccagtagaagttaacattgcgacccacggacgtgaattttataatcaagaggaaaaccaagaacttttgagtatgtcattggatctacttgaag

SEQ ID NO: 370785 - DNA, 927 bp, Cannabis indica
aggctgctattggcgtcatccagtttggggatgtatcaaccatttcaacctcttccatgccagtgatactaggttttttgagctaatgcatcagtagttgtgttttctcggatttggacagcttgtcatatctctgttatacgatcccagatttatagagattgctttcgtgcttcacgatacaagcatggccggccagagggtggggcagctggggcctaagccctaggccccacaatttcggaggccccaaaaaaattaaaattaatattatgtatataaaaataaaaatataagatatgtatatatataaaatttggttcaataattttcataaaatggtttatagcacaattggtaagagtgagattttgtgttgatgtgtgggtgctgggttcgattcctagctccctcacattttagttgttttaaaaattcaaaagtattggttaaagggcttttttcaattttaaccaaaaaaagtaacaatattacaaaaatacttccagctaaataaacaaatatacaactcaaataaaaaaaattacacaaaaaccacttacacacaccttcaacccaggatccatgctttctgggcaactatcgcgcaaccacgtagcaacccaacacaaccgaaactaaaaattcaaccagaaagagaaccaccattaattctggcaacttcacctgagaagacggccagaatcaatcaaaaaaggggttgttttgaattcataaaacaaaattgttgaaaaactactacgaaactaaaattaaaccaaaaatccagtttaatttgcataaaactaatattctgacttcaatttttaaatccatgaaagacagatctcaaaaagttgatctggagttcccaaacaatccaactcaagtataataaaaaaaaattacatcaatactatagtaaaa

SEQ ID NO: 370786 - DNA, 525 bp, Cannabis indica
tctattttgaattggcaaaatagtaattatttatttttgtaataaataaataatttttcaaattaattaaataggaaaaagataaaaattattaagacaatatttgttgaggcaaaagttgttaggacaaaagacaccatccttatcctaaacaagacatggtaggtgcctgtcccgatggagtttatctttttggattaattaattcaatcagataaatatttaaatttgaaaagtggttaaagatatttcaaagtagttgagagattctctcataaatattagtaactaaattctattatcgatatttatttatttttataattaaatataatttaattaatgagatttaactattataaatagaagtctgaattggaaatcagaagatgctttttcataacatcatttttaaaatatactggagaaaaaggaaacatttttttctctcaattattcttgctcatgtgttgagaaacaaacaagaacaacattatgcaccttatcctaatagctcacactatt

SEQ ID NO: 370787 - DNA, 750 bp, Cannabis indica
ttaagtttttttttaaaaaaaaaaatagaaaaaagtgtgatatttttttaaaaaataaaaagtagtacaatttgagttgaaaatagacacaagttgggattggaagaagttgtgcaatttgaggaaaagcttctcggttcaagacataaaagctgctagtacgaaagggattttttagagcttccaagctctataactctcagattattcagcagccgaacccagttccaagggctatttggtgtggactgaatgttccaaaacagagtttcatcttgtagcagacatcccactctaacctactcacaagagacaaactcaccatctttcacatacaagtaactgatacttgttgtgcaatttgtggttatgatagtgaaaaccatcagcatttattcttcaactgcaggttctcaaagctagttcctgatgcagtctttgcttgggtggggtttagaagttggtcgactgattatgggagctggaataattggctttggctaggaaattctagcttgattgggagattgctggttgttattttggcagccacaatataacatatttggaggaataggaacaattgtatttttttgaattactctaatactgttacttgtatagctagcaaaattaaacaagatgtcaaatatagattgtatcttctcaagaataggaatggatccaaagtagagatagatttactaaagagattgatttgtaattaagtgaggggtgaggttggtctcc

SEQ ID NO: 370788 - DNA, 613 bp, Cannabis indica
attgaagaattaaaaactttatgggaagttggagttgaaacttttgatgcgtctacaagaaaaaactttatgcatgttacgagcaacactatcatggactattagtgattttccagcatatgcaaatttattatgatggagcactaaaggaaaatatgcatgcccatcttgttatcaagatacttattctttgttgttgaagcatagccaaaagtattattatatgggtcatcatcgttggttagaaaataaccactcatttagatatgatgaaaagtctttcgacggtacaaaacagaaaagatttgctccaataccattaagtggttcaatgatactagataaaagtaagaacacgaaggtttttttatgtggttttgcagttaaaattctgcatatgtctacgagtcaatgttattagatttctgatacagttctagggccttctctcttatgaattttttgtccccttttttagtacaacatgcctctatttataattacatagtccgacagttaattacatagttgtcggatatctttacaacaattattccctaaaatcgtggggtttgattacataccacgtaaaataaatgcgattattgttgga

SEQ ID NO: 370789 - DNA, 591 bp, Cannabis indica
ttttttaaaaataactacatcattagttacaagtaaaatttattaaattcagaaactgatattattatttatttattttcttataaaaacatatacagtttatttttgttaattccacaatttctaatatttattacaaaatcatcatctttctctgtattttaaaaatagcacattatatttctcatttcctactattagtttgtttaattataatatccacgtcaaaatattatattttaaattatatataatatatgcagtaaacactctatctaaaaatattctattcacaaataatctctgatttgttatatatatataaaaatcaagttccaatttggctcacgtataaataaaaataacttctaaattataattagttatacattttttaaatctcatactaagaaagtatacatctatatgagaataattatattttaataaaatatatacatatagtttataaatttatctatgtaaaattaataattaatacacgtataaatattgtatttactcaaaaataattttattatgatatagtattaagaattatttattgttcactacaaaaattttactttt

SEQ ID NO: 370790 - DNA, 398 bp, Cannabis indica
aattacttttgtatgttaatcaacatttaatccgtacaagtgtggattttaaattttataatcccgcatacgtgtatatatccacactttgtgaattatattggattggatcgtgcatattaaattagattgagtatttatgaacaccctcaggagctgtttggtacacgattccttactcacgaatgggaatactaagtctaacctgtttttggtatgttctttcaatttttttgaatgcagttttcatttactgtgatatctttaggaaaaattaacatttctcaaaatgttgtgttttatttgcctggaaaattaacatcttttagtttagcttggcgaagtcatagccgtcccattcctcttcatccttcttctgttgaactctctctctctct

SEQ ID NO: 370791 - DNA, 1287 bp, Cannabis indica
cctaatgtcattaagataaaaaagtgtttgtttcaacaaagactactcttctaagaatatgactaaatctaaaaataaaataagcaaagtagaggagataatctaattccacagtattctatcatcttattctatataagatggtcccactgtctctattgtcttaatacaaccgatgaggataataccattaaggttcttagatagaagtcagggtaccttgtcgtagtggaatggtttcaaggaactcaccctattatgacttggaagatacttgtgattaaaatccaagttagtttaaacaagtaatggatagtcaaaataaggaactaagaagcaaagccaagagaactatggttaaaactattcatatggagtaaccaaaagttttctattacaaggacaagaaagaaaattaaaaataagtctattcaatgtacttaacaaaactttatgatccaagtattataggtttgagattaacctatggcttatggtatacctagtgattgaattactctagtgtaagcaacttactttagtaagatgctgaagtatttttttaatggctaactctataggaagtcttttgactcctagacatagattttatttatctaagaaacaatttcaactatttcagaaaagataaaggccaagaaaagaattccttaggatcaacaatgaggggtcttatgtatgcattataccaaacacttgctattgaatgggagtaatgcgtaggtatcagaataatccaggaaaaaaaatgttggaagataatcaaatgaatcttaagattaataagagaaactatatgttagtcgataagggtggtatttgaatactcttagactacaccaaataaagtttctagacttgtgttagtgctagaaagtctactgatgagatggtgattactttggaggtggagtagtgattttggagaagtgtaaaatctatctgaagtctctaactctactagtgagattgaatgttaaagttgcaggaatgatactaatttagcctttggaaaattctatatatatttttttggcgttgtaccaatagtgaattaactactagtgttacttcctgactaacacagaagtagttgccaaaaagtaaagaatccaatatccttataggagtagacatatagagaggaatttcacaatatcaaggattttgtgattaaggatatgtaatggtggagaaagtttgtattgaatataacttgtcaaatcctgttacagagagaatactacatactacacttgatctaga

SEQ ID NO: 370792 - DNA, 609 bp, Cannabis indica
aaatttttaactttttttcttttattctgtgggcgattttttttttcaaaaatactgtgtactgtttttcctcagttattttttagttgttccactgctagtttaattattatgttttattattttactgttattttataaaaagataatatttttgtaaaaaattccgtgtggtaataaaattgtaaatttttattcaaaatctaatatttttgtaaaaattcctaaaaatttggatgattaaaaataaatatacaattcatgtatagttaattgttctaaatttctaataaatatacaaataaatactcaatatctcattcgtggtggaaaagtttcatcccgtcccagttctcgtgccccttgcgattgagagaaagagagagagaagaagtttgagatttgtgaagatagaagagaaagaggcggttaacgcgcgtcatggataggtagtatgttttccacggtcgacggtgaaagcaaagtcggagtattgatcgtgtgcggcttagtcttctgtgtcggccgggaagaattatgtagccatcaatcaaagggtacttacgatcgtgttcaaagctctgttcaggtttttcattccaactccta

SEQ ID NO: 370793 - DNA, 600 bp, Cannabis indica
tcttatgtgagttttaattaagttaattaaattagttttttaagttatattggctgaaatggtttaataaaacaaggtttatttattcatttttcaaaaaaatagaaaaattagaaaaattggaaaattctctctttcattctctctctctctcacgaaatccctaagcagctagggttctgaaaattttgtcttcaatcttgccattttacagcagtttttagtgattacaagcaagggtaagcttctagacaaccttcctttagttttcttgaaatttaagttatgaaatcatgcatgttttgagagtttgagtcctttatttgctgttgatgtttgatttgagtttctgcaattaaattatgatagaatatgttgatttaggcttgaattgttagttgtttgaagctttagtcaagctttgagttttagaactcaagcttgaagctttaatggtgaattttgattctaagctttgattgttgttctgttgcttggaaaatgtctattggggtctaatatgcaggtctggaaagtttggttgagtttggaaacgttttagttgggggtttgattgttgttggttttctgggtaaaacc

SEQ ID NO: 370794 - DNA, 516 bp, Cannabis indica
agtaaaaaaaaatctaaaaatagttttaaaaaacttaagtcaaataccattaaatttttaaaatgataaaactatttccttttttcatttttgaaaacacaattctgaaaactaaaaactaaaaacttaatcaaacaacctctaagtctccacagtagatggtttttcccaaagctaaagggatagcattcacatagtttgattcaataactacgtttttcaaatcaagttgcaaaatgagcaatacgagtgttcacagattgatttggtctagatttttaattttttttcaagccaaacctgcataacggttttttaaaaattcaaaatcaaacaagaccaattaaatgatcaaaccaaacgaaaccaatttactcaaaaacatattggtttggttcaaaaccataatttgtattttgtagttgctccaaatttttttaacaataaattttcattttttcgataacttttctacttttagttagtttataattattgcggaagaaattaaagtgt

SEQ ID NO: 370795 - DNA, 1108 bp, Cannabis indica
agaataattatacaaaacactttttttttaaaaaaaaaaaaattatatttttattttttatatatttttacgattttatatagaaacaacaagaaaattatataaaagttacaagaaaataacatctaaacaaacaaaaaataacacaccgataacaaaaattcaataaattaacaagagtacaatataaaaaaaaattgtatttttagtaaataaaattataaaaatcctaaaaatatttaaaattccgtacaatcatattttttgtaattttttttattctttttatgtatttgtgaaataatcccttatttttaacctttactttttttttttttggaaaaaaaaaaaaaaacacaagagataaattagaaatatggtcaaatttgtttcaaaaaacaaactgaactgatgttccataacaaaaatatttaccgcaaaatctctttaacattttcaattgttacatatatgattctaaataaaaaaataactaacagcaaaattattttatcttatgattttgttgtaatcatgccctgtttaataatgttttagctgttaagtaccaattaagcttattaaatgtcagctcagaaacacatgacgacatatttcattagtttatttaatacatggtccaataatcactacaaaaaactgctaccttttgtgacaactttttagtcacaacataattttcttgtgactaaatgtgacttttagtcacaataaaatattacatgtaactaaaacatagtatttagataagttgtcactaatttagttttagtcccaacaaatattgtgactagaaatacatttaatcataaaaaattgtaatttttgtgaataatacctgatcaccacaaaaatattacttttagttacaataaaattaatttttgacaaattaaagtaataaaagttgtaactaattataaattgtcattcttacattaatgtgactaaaaagtttgtggctaaaagtattagtcacaaaaattaaatttgttatgactaaatgtatttttagtcatactacttgttgtgactaaaactaaattagtaacaacttgtaactataaatattatgtttagtcacaag

SEQ ID NO: 370796 - DNA, 704 bp, Cannabis indica
ttcatcagtttgtctctcaccacgtactttctctgtaacgtccattctttaagcctccattggcccttccaccacatatttatggctcttatacacgagtatgtcactcttggctgcttcttagactgacgactgaccctacatgttagattttatgtcttgaaaaacctgtaaagacatttctaattattaataagaggtgaacgttttgatatatgcatgaatgttaaattatttatatttagtattgaataacttatatataaatatcaaaaaaaataatatatattcatacatgaggttgtacttgtattgtacagagaattattatcacttagtaattgataaaactcaataacatattaaagtttaggaatctttaatcaatgattgctagcacagttcattgatgcctgttattcggtgcaagtaatctcaattcagattactgatgtatcacgacatctaaatgaatgtactgtatattatagagattatatatgacaaggaccgatattgataactctagaaattagagttattttcacttttttttactaaaaattggcttagttcttaagtttttaattaatttagcaagtttttaattattttttgaatttattagctttattgtaattttatatgtttttatgtgtttttataattattttattataatatgttatgtcgtatttattttt

SEQ ID NO: 370797 - DNA, 629 bp, Cannabis indica
tcatcataacgattgtaacaatgtgcagctgagtgtatattttccacacacttgacaagtgggttttggaccatttgatctgcctcctcttcctctaccaccaccagatctgcctcgatttccaccattaaaaccagatctgcctctgttgttttgttgactgggactgtattgaccaccaggaccattcttgttagcaaaattagcagtaggagatgagttatttgaagacttactgctcccagacagagtactcagtctgtcgagtttgctatcaaagctaaggagaatttcttgaagagtttgccaggttgttttgtctcttgcttcaacctgcagaacaataggtaaatattcgatatctaatccagacaatacattcgataccagtaatgcttcaggataaggatcaccagccaatgctaaaacatcagcccattgtctctttgtctgagataatcaggcatagtcatagctcctttcctcactgtctggatttttgttctgtactcatccatttttgctttggaatgagcaccaaaggagattcaagggcagtccatacttcagctgaagagcagcagcccattacttctgttgcaatgatttcagtcatcgatccgtagagc

SEQ ID NO: 370798 - DNA, 1068 bp, Cannabis indica
tcaggaaccatgtcagattgctcctccaaacgccctttttcacacttacagaattaacatccatctccatcttacgcttccaccccaccaaccttcggactcaccttgcatttagcatttgcaacaatgacatgagacaacttgggactaataggaaaagtggccaccttagataccccatgagggccacggccctttacagaattaagacgcttccaagtcttagatttttgtgcttgaattatcggctcaaatgtttgttggagtgcttgacgaaacgagagctcatcatgatccgaatgaacaatcacaccctttcccttatggtctttagtgccctttggcactcggtggtcactcacatctcccacaccatctaccttaccactagttgaacccccagccacatccgacgaaaacacctttcccacttgctccgtcccactaaccttctccgccatcacctcacccacagctggcacactaaccgaaggtgcaaaagaaggcaagagcacctcctcaggcaccatgggatcaccattcagcttacccaactcagtctcggtcacctccgattgacccccagcaaccatgggatcctttgctttcgtattggccatggacgccatttcctcatcacgttcccgagcctctaaaactgaggtaggagctaactcctcaggtgtggggccagagtaacgaactcggcttctctgaacagccgaaactatctttgaggcttctcccatagtcataatcggcctattggagggggaagtctctctctttttttggtacctagtccgatcacgtggcggagaactcggagcacacatccacgaaccatacctcccactatcaaacttaggattaaccccaccaaagtcccgcaaaggacaatccaatgccttatgcccgatgattccacagtcaaaacaaaagtcgggtaaatgttcgtattgaaatagaagtgaaacctcattaccttgatcatcgatcgccacacgcaatcccctcttcagaggctccgtaatgtaatgcgcaccctcactttcatggtaccattaa

SEQ ID NO: 370799 - DNA, 585 bp, Cannabis indica
aattaaaattaaataacagacgcacttattttctcaataaaaaaaaaaagtgttgaatctagttatatgctagaaattaatttcgagtgataaaaatatgtgctaatattttgtataccaaaaactaatggtgtaaataccaaaaatatgttgttctatacttctattctcatattcgtgttatgcctacccggaccagcctattttctatataagtttaaattggtactctatttttttcagattttatttttataattaacaaaataattactataaactatgtatcttttatagttcaattatttttatctagtttttaataaatgccttgatctttccttttagttttaccttttctttgtttagtcccaatatttaattttcattttattctacccatacctcatattcttttttttaggaaaccctatacctcatattcaatgaatatatcactttttgttcttttatttatttctcttttttaattttcttttcaaatggtttcctcaataaccaaaccagaaagataattcggacagttttttttaaaagagcaagactcttttctttttgatattt

SEQ ID NO: 370800 - DNA, 522 bp, Cannabis indica
aataattatttatgttgttatatttgaattctgaatgcattttatgtcatatagtgaaatttcataattttgcattatcggtgcctagcaacatggaacgcggtgtatggctcagtagaatcacaatttagtatttttgtatagcggggcagtttatttagacattgggaatgtcgggattagtcgggaatttagagttttcccaaaacacccttaagtgcttttttaacccttttagtgtgggaggggcaaaaaagtcattttgccccataagcctttgtccttttgtggacttattattttggtgataatgtgatttatgtaatgttattttggctaaaataaagaatagattatgcaatttttatcatttattcaaaaattggaaaatttggaaaataaggaagttttctctcaagctctctctctctctctctctttcggtttggcttggggctgctagggctgggtttttctttgcaattcaagtattttttagcaattctaagtgttgttcaagct

SEQ ID NO: 370801 - DNA, 504 bp, Cannabis indica
gaagaatgaagaaaagaaaaatttggaaaaaaaatcaaggggaaacgcaaagaagaaaaaaaaaagaatgtaaactagaagaaaattaacaaaattaatttttcattatttgaattttttcaaaattgagaaatattttttaaaaatttaaaatgaattttgaaataattttttataatttttaaataattatattactaatataaatgtgtcaggtgtacatgatggtatacttagggttgtacatcaaaccgctcaaaccgcccgcaccgcaaaaaaaaatgcggtttgaaattcttcacggtgcgattgcggtttgaatttttcccaaactgcgcggtgcggtacggtttgcggttttgaattattaaaccgcaattcaaaccgcaccgcaccgcatgttttaaaattttaatttttatatttatttaattaagtccatacatatgagcccaacccaagcccataaatcttagggcaaaatccataactcttcacaaaccc

SEQ ID NO: 370802 - DNA, 595 bp, Cannabis indica
tcttaccttctttccgaattcaagtgtgctggccgacctgaacggaaagtctcgttctagatggatgccctaatcacattaatcacaacataggtaagtgacacggtaaatcacttttcggggacttaaacttgaaactaaaagtttccctatcgataattaacatggtaataccctaaatatctaaaaaaaatgggaaaaaaactaaggttccaaaactgccccaaccggcagatctgtttccaactggaagtccggttcctgggaccaaccggtcgaccggtttctacaggtgttagaaccggaattccggttctgtgctgggaacacgaaaaatgcccccatgacctcaaaattaagcaaactttaccaaactttccagtatacctgtacaatgcataaacaatataatccaacccgaaattcccagaaaaagtcactaaatcaaaggatgccattaaagccctaaacttgagcttcaaagctcaagcatactcaattccatctccatacaccaaaactaatatccaaatctaaaaaccaactcaaaatcaacctagaaatcagattatacaaactttaaaccttaacagcc

SEQ ID NO: 370803 - DNA, 1400 bp, Cannabis indica
gcatctagcgctgcaacctaaatcgcaacaaaaaatcgtatagcaacccacatagaaactaccggagaaaccactttagaaacccaaatcgtaaatttagaaaaaaaaaattaaaaaaacagtatatggagtaattccgtttaataatttggtatcatatatttaattacttattagtattgtattaatttaataatatttggtatccaaaataatttgttataatatgcattatgttactattatataattaatggtatcatatataattttgtattacttggtatccaaataagtactaattggtatataaataaatcaaaaaactcattagtatatatctaaacgtttaactactaagtagaagtatatattttatgctatataatgtccaaatagaatgaaagtatgttagatttccatgaaggataataataacaaattaaggatcaatattcatataaataaactactaaatgttatttaaaattatttttttttctcacttttattttggaccattattcttttttattttttttttgaaattaaactcttattaacaacaatcagagcttaatacatcaataagaaaagaggaaaaatcctcaatccaagccaattcaccatccaccctaagtgcatgcacagctaattcatgagcagccttgttggctgtacgacgaacatgaattagggatgcctcaggaaaactggaaagcaaactagcaatatcatccaataaagaaccaagttcattacaaagggaaaaacgctttgggagagccgaaaccaaggctaagcaatctgactccaccacatgaagaggaagaccaagagtgagagaccaatccaacgcaaccattaatgcaacagcttctgctaatatgactgtaaaatttcctacaaaaattaacaaacagagaataagtgaaaaaaaaaaaaagtgttcaatcctaataaatgaaaacaacaacaaaagaagcaaaattacaaatccggtaaacaaaaaccatacaccggagggaaaagtctccctccggtccaaccataatcccaacacaactactccacaccctcctatcttaggaatatcataatattttaaagtcataaactataccaaataaggatcataatattttggaccattattaaagtgacataatagtacatacttttttttttttttttttttttatttttctaaggaatttcatatcatggcacctggtcgtcgcatcactcgatctactgcttatagtcaacaagttgaaccagtcattgatcctcaagctccacctgcccaagtcgttcccactactcgctcaactttacataatcaacaagtttgtcgcactactcgttctagggtacaaagtcaacaacctagaactacc

SEQ ID NO: 370804 - DNA, 719 bp, Cannabis indica
attaagctcagggtcctatttttactattttagaaaatacagggtccattttgtcatttaacaaaacacaaggtccaatctgtaacttttacaaaacacagggtccaaaatggtatttacccaaagtaaatcataataaaattcttagtaaaataactcgtacgagacaaccaatcaagaaataaatatatatctaaagcaattttattagctatggcacaaatataaatatttattaaaataaatatatttttatatattaaaagtggctatttaacagcagtttttagtttaatgttgttaactttttttgttaaattttaacaaaatattccatcatttaacagaatattcttcctgaatttatatggtaaaaaaaaaaataactcatgtttttaatttgctaaccctaattatcattcgctccctccctccctaattataacccgttggagagaccgtttcttattttgtgcagaagtaatttataaatcacaggctgaaatatggaaaatcaaaggacattacttgaatgctactgtgtggtaatggtatctatactgactatataccaattttacccttaataaaattataaaattacaataatactaatatttctgaacttctctctttatagaagtttatcttgttttgtatctgtgacagtcagtagtcccgtgatctgtaaggggaaacaccgggtaagctgtgcaatc

SEQ ID NO: 370805 - DNA, 549 bp, Cannabis indica
taattattcaaaataaaatttcataaattactattttgtccttatgaatttatttctcatagaaattaattctcactcaaatttatagaataatgaagtttattaattccattatatttccactataaatatggaattgcactctttgacaacatagaattatatttatagaattcttacttgtagtctattaatataatcaatataagtagttctccctctaattattagttcataattagagttggtcaaaattatcattttacccttttaatttactcttgactccttatgtaccattaattcaatgtgaatagttaatctataatttattatagatttggatccaactgttagcactcccaaaattaacactataagagaactaatattcgatccgttaggaaagcttggattccattattgtataacatgttcccagccactcatgttattaagctcccaaaacagaagttgtaggattcatcttctctgagaaactttaacgagtgaatcaaagaatataatgaacataaataggagttcatg

SEQ ID NO: 370806 - DNA, 576 bp, Cannabis indica
aaaataatttccaacactctccccgtatacatcttccacgtcggcattttgaacttgtggggtagtggcaggagattgatctccggcgagaaaggagttccacgtgcttggtcaaactcaagatcattgtttctttgtccagccatgccgtgaaacatatttttcagttcgtctagctgaacctgtacggctgggctgatctgctcggcattctggtcaacttggattacgtcagcatcattctgatcatctgttcccctccttctgtttagatcattccttaggtcatgggttgttcctaaccttttgtacacagaagcgcctggtttccttagcgattgattcgcttggttgatgggtggaatggcaccattgatctggttggagccatcaggtatgactcctcctaatgaattaccagacaaggtctgctcgcctgtcgctgggcccacgagcgaaactcgtgaccggggattgggcggctaaccatttgtagtctgggaagtgttcatcgttggatcctcgtctgtttctcctaggggaatggcattcggcgattgctgacctacagtttgg

SEQ ID NO: 370807 - DNA, 981 bp, Cannabis indica
ggactgaccaatgctcctgcagcttttatggatttgatgaatagggtattcaaggatttcctcgatatttgtgttattatatttatcgatgacatccttgtgtactctcagtcagatgaggagcatgagcaacatctccggatggttctgcactgacttcggaaacataagttatatgtcaaattcaagaagtgtgaattttggctatctcaggtgtcttttcttggacactgttttagaaaagatgggatcaaagtggatccgggaaagatagaatctgtcagagattggctaagaccgaaaacagtgacagaagttagaagtttcttgggtctggctggttattatcgtcggttcgtagaagggttctctaaaatttcaacacccttaaccgagctcacaaaaaagaatcagcgttttgtatggacggataaatgtgaatcaagttttcaagagctgaagcagaggttaattacagctccagtgttagctctgccttctcacagagagaagttcgtggtttattatgatgcatccagacagggtctggggtgtgttctgatgcaagccaatcgggttattgccaatccctcccgtcagttgaaagattatgaacaacgatacccgactcatgaccttgaacttgccgcagtggtgtttgctttaaagatttggcggcaatatctctatggagagagatgttaaatttacactgaccataaaactcttaaatatttctttacttagaaagacttgaatatgagacagagacgttggttagagttggttaaggattacgattgtgaaatcctttaccatcttgggaaagccaatgcagtggctgatgctttgagcagaaaggtgttggaaattattttacctggatcttagatctactcacaggcactactcttacactaagaatttcgaaattcaggagggaagaaagagagagggagtggtcggccagatagggagaga

SEQ ID NO: 370808 - DNA, 710 bp, Cannabis indica
atatttttattgaatttctaattatttttctttacttttaagataagagtttgtaaatataaataagtttaattttcttttcacaaaatcttagtttgttatttaaattagttattggataataattttagtttgattttttaagatatgtgtttataaataaaataaagtttgaaattattatctttttaggaataatttaagttttttaagtgaacttaatatatagtttttttaatttaatacttttattagggtttttttaattttttcttttttcaaaattaatagaaaattataatttttgaaatctaatttttttaataaaaggggacaaaattaagggggtaaaaatattaatttttaacggcaaaagaaatagaacctaacagaagcgacttgattatgtaactgttatattttagggagaatttttaacaagacatatattttaggagacagaattatgaggttgtatcaaaagtttaggacgaaaaaaatactaattcttctttttatacgacatcattaattcatcattggacatactattacttttttaagaaaattttaaataagatttaaatatctagttacattacatgcatattttttttatttttgtaacataatttttttacatcatgaattattaaaaaaaaaatacaaaacatataaaatatctattatatcaagtcatatatataatg

SEQ ID NO: 370809 - DNA, 489 bp, Cannabis indica
ggaaggagtcattaatattccgctgcaatcaatgtaaggttttctaaaactcttatgtctttaatttcattattttagagatattaatatttaggatgttaatcagcatacttgttagtaaatctagatcctggtaaaatattcccaacagaaggttggctagacctgtgttgaattacagaccctggctgaacactcccaagcatgggtgttggctctagttggccaggcctacactagacagtcgtccatggctagccagacctgcattgggcagggcctggctgcccaatactcctccatggctagctagaactgcataaggtagagtctgtccacccacgactcctcagttgattgatgttggcaatgtgttgataggagatagatcgcactaattgctggagtttagtggatctaggtacctgaagtgatcaatttcacttctcaaattgttgttttgggtgtttcatatttaggatgttaatc

SEQ ID NO: 370810 - DNA, 557 bp, Cannabis indica
ccaaatggacggaagccaagcactggcaaccatcacgtccaaaaaagtgcaagacttcattgtaagaacataatttgtctgttcggattaccatacaagatattctcggacaatcgcaaacaatttgacagtcaattcttcactgatttctgtgcaaaccatggaatcataaaaagtttcttggcagtggcacatccccaagcaaatggtcaagttgaagcagtcaataagacattcaaggacaccctaaagaagaaacttgaggatgctaaaggaaactggccggaggaacttcctgaagtactatggtcataccgcacaaccgagaaaacaacaactagcgtacaaccaagaagttaattatgtactccttgcagaaacacttgatgaagttgaagaaaaatgaatcgtagcaaacttgaaattgatagcccatcagcaaaaggtagctcggtattttaataaacaagtgagagcacgaaattctttgtggcagatatggtcctaaaaagagtatttttgaacaccaaagacagtacggcaggtgtgcttggacc

SEQ ID NO: 370811 - DNA, 563 bp, Cannabis indica
tgacaaccccgaaaccaaacggatcccaggaaacaatctccagtcgcacaccccaggaacaaacaccaaagcagaatccaaaatttcattactcagcaaaataaaacagaatacactaacaaaattcagatttatataccaaaattcataaaaagaatcttaatggtgagaaataaaatccggtaaaaatatacatctaatataaaataaaaccaaatcaactgcactcatatctcaaaattacaaaatgaaacttcaaattctcctaaaattatttatatttcttcagattcaaaatttcttacgatagaacccatgactcccgtcgatgcccaaatctctgccaagaccttagccaaatctatgtcagtccgcacaaagagaaggatcccaagggagagagaaagagaggcagagatatagatctaggggttttcaaggtggtaaaattcagagtcgttctgtctggctctgagcagagagaggtcgagaaagagaggagagagggaatggagagaactcgaggaccatagactgtcggagttgctctctggctctgcgca

SEQ ID NO: 370812 - DNA, 302 bp, Cannabis indica
gaccagacccaaacttggacccacactcgggacccccacttggacctggaccctgatctggacacgaacatagacccagatcagggtccaaacctgcacacaaacccggacacagactcggacccatactcaaactcgaacttagaccaggatcagaaccaacgacttagacccagaattgaatccagactcagatagggattggaacttaggaatgctgaacttgaacctaggacccagctcgtgacccggcacaagaaatggaaccagactaggacccgaatgttggaaattattttacc

SEQ ID NO: 370813 - DNA, 835 bp, Cannabis indica
gctgcccaaactactcaagaagctcagaattgggaaaataggtttgcagaaatgcaagccagaattgaggagcaagataatgaagtccaacgattgaggcagcagggtgcttctgtagtgcctgctctagaaattccagtggcacctgcccctgttgtcctggccgaaccagtgattgtagtgaatcagatggaacctctgtatgaaatgttctgtaaacaagaaccttcaatttttctgggaggtccggatgtgatgaaagccgagcaatggctaacagtgattactagaatattgaatttcatgggtgtcacgggaaatgacagagtggtctgtgccatttttcaatttcaagaggatgcgttagtttggtgggacatggtgtccatggtacatgatattactacaatgacctgggagaaattctaggagttattcaatgccaagtattataatgaggcagtcagaagtgccaaaagaaaagagttcactcacttgacccagaaggaaaacatgagtgttacagagtatacgacccaatttgatcggttggcgaggttggctttggggatagtgccaaacgatttcagtaaaaaggagaaatatctggatggattaaatgcgaagattagacatgactaatgattactacagacgacaaaaccacctatgctgaaatggtggataaggcactgcgagctgagggcgcagttggatgcaagacagagtctgttgggactccagtgattggcagggctcctacccctcctgcatcaggttttagcaggggaggtagtggttcgaccatggatcaaaaaggaaagcatccactgca

SEQ ID NO: 370814 - DNA, 557 bp, Cannabis indica
taaaaaaaaaaacttaggtagagttaaacttaagtatttacaccgcaaattacactataaataataaatatcattaacttaagtattttatgttataatcctactagtttttctctaaacattcttgagaccattccttaaaaatcttgaggaaatttgattgtatactcactttattttacttgttttaatttttacctttatttttatatcatttgagatatacttacttttaaatatgatgtctctactataacttttaagtttatataaactacgtgctagacttaagtagagagtaaaaatatattgggcaaattactcacaaaagtaagtacatttaaatgaaatataatatgagggtattttgattaatagatacaaaaagaggtattcctcaactcttccctaaaatcttggctctaatgtgtttagctgggcttagtacatttgaatgaaatgaaatataatagaggaaattacactctataccctttttatattgtcctcttttatttttacctttttttttaaaatctatcatttttacatctttt

SEQ ID NO: 370815 - DNA, 539 bp, Cannabis indica
gaactaagatataatcactgaaaaaagagttcatctattgaatagcactcctgagattaagcctaagcttatcagaatttagatcttttgatctaagatcaactagtgatattgacgtggaaagatacaacggtaagtattataatatcttaactaagctcaatatcggtccagtccaatgtatactccatacattcataaatagtatacttttccaatgttctagaaagaacattggtagtgatggcctcaaagaaaaagatgatgcaaacactttccttcactaaaaaatttgagccatcttctctatattcgaatcctcctgtctctctctctactctcttcaattcgtatcctatggtgattagagtaagtgcccacacacatcaagtggtactcaatcatagtgtgtaaggctgtaaagaatccaaattcaagggaaggagaatcgggttgtgatcttgctgatagtctgctacagaaaggatacaagggttagagatctaagcgcaaggagccatttaattccgctgcaacca

SEQ ID NO: 370816 - DNA, 644 bp, Cannabis indica
cttgtcattcctacttgctatgtgctaataatttcaaaatgagattttgtgttgaaccttacttgatttctatttattgttatttgtagtatccaatatgacaatgaccaatcccatgttgtcactgttgactgataataagctgagtggatctaacttccctaaatggaaagagaacattaacattgctctcataggtgaaagtgccttgtttgtgttaactgaaccgtctcttgaacagtcgggtgacaatgcaaccaaagctgtaaaagagaagtacgagcgttggcagaatgccaacaacaaagctcgatacttcatgctttctagcatggttgacaccttgaaaacaaggtttgcaaacactgtcacggctgcagaaatcatgacacagttaactgaactattcggaatggcatcaatccaatctcgctttgaagcgacaaggaaatttatcaatgcacggatgagtcctcatcagaacgtgcgtgatcaccttctccaaatggcaagttatttccaggaagctcagaatcatggagctgaaatggatcagacaactcaagtgagtcttatcttgaatagtctgactccagcctttctgccctacacttcaaattatgtcatgaataagaaggaacaag

SEQ ID NO: 370817 - DNA, 1032 bp, Cannabis indica
agagcttacagcttctttgatccacatacctatcagtatcttgaaagactaatggaaattcagaccacataattcatctcagtatcttgtgtttgctttcttttaacatttatagaggacgcaaaaagtattacccagtgtctacttaggacgcaaaaaagtttacctttagacaaagctacatagaaggattgtttatattatgagataaagaaccatagtcaacataactatttataaataaatacaaaaagtagctatagcagttatttattattatctcatctgatgtaaatatgaaacgtgaagattgtccacatttcatgaacggttacagggataagatcccaaaggaatacctatcactctaaaaatcctataaatagggacaaaacctaagggacaaaggagggccaatttgagaaaaagagagaattattcaaacattttcttgtgtacgatttataaaatcccataataagatggtactcgtggagtatgaagaattaacttcaaaactgcgttaaaacccttcttgccattaattattattatttttaattatttatgcttgagtttgtttattgatatattcgtttcccccccccccccaaaaaaaaattccatgcgggaaaagttcctttttattttaaaccttttgttagtacataattgtgccagcaaaagctttgaaaaaccttcaaatgatgtatttgaccaaataggatcatctagttcccatagaccctatcactaaaatacaactagagagtgatagggctaagaggagtgaaaaaggttttccatgatatgagaaatgaaaactattagccccataggaggtttgtgtatgagtatttgtctaaaaatgagaaagtaatatccatctttctgctaaacaagatgtgactcacgatgcgaaagctgaaattgctaagtgttggcgtgctgttcagattgctcactactcggttaagaaggctttgtctaagcaaatatatgtggttctctgttcggcatatctcttgcaag

SEQ ID NO: 370818 - DNA, 682 bp, Cannabis indica
acttttaaatcctcattcagcaagggacctcttggccgggtaagaagcctttcttatgggctatccaagggtcatgccaaacattagaatccttaccatccattattcgcttacaggcacccttgcgaataattgctcttgatttagtcacattcttccaaaaccacgagtccgaggctttcggattgcaatccaaaaagggtctgcctttaagatatttagcttccaagatccgacagcataaggattggtttcctgtcagaaggttccacccccatttagccaagaaagcctggtttatttcttttgatttccggaaacccaacccccctaaagacttggggaggcacaacttgtcccatgcttttaggtacagcccatgattacccttctcagagccccaccagaagtcacgaaccaagccgtcaatcttcgtagcaagacggttggaaagcttaatagtttgcatagcatgcataggaagagagagacctaccgatttgataagcatcgctcttcccacttttgaaagagtcttagctttccaaccatgtaatttcgaagtcaggttatccagaatgaagttaaagtcagcatccttttgcctcgatctgaaaagagggaggcctaaatacttgacatttccttccggagatcctatacccagcatagccttgatccc

SEQ ID NO: 370819 - DNA, 827 bp, Cannabis indica
gtaaaaccggctagctggtttacccccaaaaaacacaaaacaatccaaaccctaaccaaatcgattccaaacctcccggacctgcatattataccccaatagacattttccaagcaataaaataactacccaagctcagaatcaaaaatcaccgttaaacctccaagtttgagttctaaaactcaaaacttggttcaccctactaacagccaccaaaacaagcttaattcaacagaaaacaacataactaaacatcaaaaaacaataccaaacaacaacaacagcaacagaacacaaatacccaaaatcatgcaatttcactaacttgaaattcaaaaaactaaaaggcaaagtgttgggagcttacctagagcttgagatcacttagaacttgctgtaatttgcttgaaattgaataaaactagaaccatagcttgttctatagggttcgagcaggagagagtttagagagagagagtttaaatttttctaactttgtattttataaataatgatttaatgaaaaatgggttttttttattgcaaatatcagcttgttagtcattaaaaatattcagattaaataaacttaacataaacccacaaaatgacaaaccataaattggcaaaatgaccattttgcccctcccacactaaaaatcataaaagatcacttaggggtatttttgttaactctaaaatctcgactattcgtgacattcctaatgtctaactatactgccccgctatactaaaaatactaagatgtgattcttatagccaaataccgcattccaatattgcattctgagttcaaataaatcatc

SEQ ID NO: 370820 - DNA, 1632 bp, Cannabis indica
ctaacatgcttcctaacaggcttttcttaaatcatacttattaaaataaactactaaagcaataaaagcttactgaaccgtggaacgagctaactgctgatgatgattgtacatgtcgtgacgatcttcggaagacaacctggcggctctgataccaaattgtaacaccctaactagcctaggcgtgttaacgtgattttaaacttgctgtgcagctcgttgctaatcaacgaggttaatgaaaaacgtgattaattaaaattttcttatttaattaaaacttataatattacatacaaaatatttcgggatcccgtttacaaaatactttacaaaagtttgctattcatttacaaaatatttgtcgcccagcgactaacaacaaaagccctgatgtcccgaggatcgtacgctccaggcctaaccgccccgacatgtacaacctccatctgctcgtcctcacgattcctcagctttggccttgcccttacctacacacataaacatagctctgtgagtcgacagactcagtaagaaaagcataacataaaacatactaataacccgggttataacctggcgcccatacacccgatcataaccctaatccccgtgtcccacacggtactgagtctagaacgttcataagacaatactatcgaccataaatgtcagcctatactcaatatgctagtcatactctagccatattgatgtgacagcatcgatcagtattctagccaacatacatttatcaataatcagtacaactctatgtatactattattgctatcaatgtaatctaacaggcaaaaacaacatgtacgctaaacatgtaataacatatgcatgacattatactaaacttacctcaattccgaattcaggtgtgctggtcaacctgagtagaacaacagctcaacgaattataggctcctaaatcacatcgataacaacaagggtaagtgactcgctaaatcacaaccgggacttaggtttaaaaccaaaaccctatctacaacatcttaatatggtaataccctaaactagcagggaaccaaccaaatagaaacctgaaactgacgcgaaacgacaacctgaatttttgggtttctctgctgcaaaatctgggtaatcggttttacaagcattgtaaaaccggttagccaatttaacccagaaaaaccaaaaagcttcaaaccctaatcaaatcgtttccaaacccaaccaaactttccagatctacatattataccccaataaaccatctccaagcaataaaataataatcaaagctcagaatcgaatttcaccattaaagctccaagtttgagttctaaaactcgaaacttggctaaactttcatacaaccactaatccatgcttaattcaacataataaatcatattttaactacagaaatcaatatctaacaactacaacaaccacagcagcaaaaacaccaattcatgcaaaaattcatttctttaaaataaaagaaagctaagaagaaggttactaaagctataccttcaaaggatcctccaagcatcaacctaaaacaaataaaaaccagctgaaaacactccaagttcctgcctttcccaagggttgagagagagagagagaga

SEQ ID NO: 370821 - DNA, 708 bp, Cannabis indica
aaaaataaataacaataataatagtaaatatgaaataagtgcgagtactcttcctagaatggcgagtatttaaatcaggaacacaaatacttagaaaaagactgggaaaatcatgaacacaagaggaatatagtggttcagtcagatctcggtctgcttagtccactgttgcaaagattctgtctcctttatttcatggtagatcactcttttatatacaaagcaagtgtcctatcatttcaacaaggattgcattcattgtcaatccatttatacattgatttacaataattaagctaaaaacgtaaacataataaatgaagaatagtttccagtttaatctactaaatatagcaatgtatgcgacttttttagtgcgagttggctgttcatattcttgcataagctcgcaggcttaagatgcattcgagaccagtcgagtctgagatgcatgcgtccttgtaaagtcacttttccagacatcatatatcaggctgatagaaccaagacatgcgtgtctatatcggtttatcgaggctgttaggtcatcgggaccagctcgcaatatagagaatcgatctctatgtttttgcaggaggatcgcgaagatactcgcatatatcttgatatatgcgggctaaagtcgttccttggtcctacataatgcgagtcatgcgaatgcaattagacttggtcatattcgcatca

SEQ ID NO: 370822 - DNA, 523 bp, Cannabis indica
ctgcctattagagtgacacctagtactagtttactcatttaaaggttaagtgaattaatccttaatcatttagaaagaaataggaaaaattaaagaaaataccaaaaaaatcaagtggaagctctctttcctttctctctctcttcaaaaccggcaagaacaaggggaattgttgctgatttgtggtgattttaacaaggaaatcttaggagaatcaaggaaaggtaagccctagaagaacccttctatagtttgtgagtttttcttggtttgagtttatgattttgagaattagtggttgttagggtttgggatgtttaggattcaaattttagggttcatttgagttgattttaccttctagtagctgatttagtggtgttgtgttggatttatgcaagttggagcttcgaactcaaagctttcgtctttaatggaaagttgagtttcatttgatttttctgtgaaatactggctggaacatattgtatataccctaattaggtactcttgaaggtttggt

SEQ ID NO: 370823 - DNA, 1072 bp, Cannabis indica
aagaggactcatcataacttctctaaatatatatataaagaacccaaatgttatattacttttaaataatataatttatagattaaatatatataataaattaattaataatatgtaagatatgaaaatatatattagttgtcatcattttgtaatatatagtgaagttatttgttactatgagtaacccttacaattatcatcaatattaagtgtgtaaaatgtgttacacacactacaaaaaactgtaacttttagtgattaattttttagtgacaacattaatttttttgtgactaagtgtgacttttagtcacaacaaaatgttatttgtgactaaaatatagtatttagttacaagttgtgactaaattagttttggtcacaacaggtatgatgaactaaaaatacactcagtcacaataaattgtaatttttgtaactaatacttttagccacggaccttttagtcacaacataggaataataatttataattagtcacaattttttcactttcagtaacaagttttgttgtgactaaaagtaagattttttgtagtggcatcttaatttgtaaatattcttaatgttataggagttatggtgtgtgtgtatgagttacatttaatttgagtccataacatccataggggttatgagtttgattttcaaatgattatcctaaacactatataaagaggtttaaagtgttcatattgagatgataataagtttactattaaaataacacttagctagaaaatctgaaggcttgataattctcaaagttatttttatgagagttctcttagtgtttagagataaaggaaaatattaaggttttggacaaaggtgtaataccttgttcaaatcatggtgatccccactattctacactcaagattgtgagtgagtgatcttctttttcttcttcatattctatatatatatatatatatatgttataaaatattgtgtaatctattcatctcttctacttttcatatatatagtgtacgtgttgtaacatttatgtaatcaatctcttagttcttgtattattttacaa

SEQ ID NO: 370824 - DNA, 511 bp, Cannabis indica
tcttcttctgaacttgaacttgagaaaccgagggaggattggtcttgagtttcttcttggctggagggattgccttatcacgactttgagaagctcgaagttccttctcaggagtggtggtaaggactgatgcagcaggaggaggaactgccaacggtggaggagattccttcgaagattcagacgaagaagtccaggttcaaagagtcttaccgatttgcgagcaacttacttgggaggacgttttggcttctcggcttgagattcacgctggggaagcgatgaatctccaaactttgcaacagcaggagaagggactgaagcagcaggaggtgcattggaaggggttgcaacggtttcctccaactttttgctgtgccctagattcttaggaggcgtttggtagggaggaatgaaaatataggaataggaatgagaataggaataggaataggaatggaatggaatggaataaaatttaaaatgcataaaaaaaaaaatgataagaaaa

SEQ ID NO: 370825 - DNA, 556 bp, Cannabis indica
taatttccgcgcttatttttctagtaataccaattaggggattagggtttcataagtttattggaaagcgtgcctaattatttagggcgttacaataaccgtcaaacgtggtgagagaaaatcggatttcgaagcattaattgcgttagagcatttattggccgaaaactaaagagatgcctagtcagcctcacatcgaatcgcgaacagatgcacctaacacgtgtcactcatccaaacgtaaagactgctcggatgaagtctaaacgcaacttcggatgtcccgtacagacttggggggcaaatgttatcgcaaattttgcactttgatgtggcatcacacgatgctgacacgtggatcaactctaggtacatgctcgcaagaaatatgccgaacaggacaccacatacattcgcttggacgtaagtccttttagctgagtagtagcaatccgcgcaacatgccaacacgtagtaaattcagctttcgcatcgtgagtcaccaaagaaaatccctataactttgggatcagatgacagagatatggtaagctgt

SEQ ID NO: 370826 - DNA, 720 bp, Cannabis indica
ttaaggtcgttaaaaatatctcttgaactattgagattgttggatttaaggaattttttccaattttagtaaaaaaatctaacatgaatgaaagttcagagagcatgatttagtgcatgtcaaagtttgagggacatgatttggtagttatcaaagtctggggagtatggtttagtagataaataatcactaaaatagtaaaattgaatgaaattagacaaaagtccttaaatctaacaatgtcaatagttcaggtgtcatttttaacgactgtaaaaattcaaaaacataatttaatacatatcaaaattcaaaggacaaaaattctaattaaccttacattaaatcaaacaatgacctagctgcaatcgaaaagagtacatgtgaattccacttgtccggtctgcaatatggctccggaaactattgaacatgctcttttattttgttcaattgcagcagctgtgtgggatcgggtgggtattggcacagtattgcagcaggagttctcttttttgggttggtgcatgtatcattttgaaatacttgatttggatgatgcaaacttgctggtggccttgtgctgggcaatttggaatgctaggaatgataaagtttggcaagacaaagttatggagatcgaaggcatcgttgcatctgcatcaaactgttggaattattttaccaggatcttagatctactcacagtatgttgtttaa

SEQ ID NO: 370827 - DNA, 602 bp, Cannabis indica
aataaaataaaaaatattttagttaaagggtttattcccatgtttcccgccatcatttgtaatctcatcgaacggacaaggtttcgatactaatcccattattaataaataaacaaataaaattgtaattttaataagagcagttctatttgcattcataaaataataaatacaccccattattaaaaaaatataaaatttaataatttttaaaaattactcttaagattttttttttaaaaaaaaatttcacattattttatgttaatttcaatgcttattttgattttattttcataatttttctaacttatgtatatatattttttattctttttaaaaaaatttcatataagtttttattttaatttttttgctataatatttaaaatataacttatttttgtttgatgggtatattttttaagaaaatgaattggaagaaaaaagttaaaaaaatttagtacaattaaagatataaatttatataaaataaaattattaaaatgggtgtctttagaaatttttggggtgtaaataaaataataataataaaatttatatatatttcaaataatttatatattagtatatatttatat

SEQ ID NO: 370828 - DNA, 654 bp, Cannabis indica
aaaaaaatgcagaaaaacaagcgctagatgggtcagaaaccagaaaaaaatgctgtggtcgtgggttgtcttgggtgcttctcgtgggtcgtcgcgagtcgtcatgagtcttctcggtcgtgggtcgtcttggtcggtcggagctcgtgaacagtcggggcttgaaaggtttggggctggatgggaataacagagagagagagaggggggaagttagacagagagagagagtgggagaagagagcttttgaattataagggtaattttgggattttaagatgtttggagaatatttagagtatttatttaaagatagtatattaaaagaatagtctaaatttctaagaatattttaacaaattttccttttattattattattttcctaaaacaaagtcctttattgaaaaaccaagctcaaaacatgttagcaaaaccgctcaaaccgcccgcaccgcaaaaaaaatgcggtttgaaattcttcgcggtgcggttacggtttgaatttttcccaaaccgcgcggtgcggtgcggtttgcggtttggaattattaaaccgcgattcaaaccgcaccgcaccgcatgttttaaaattttaattgttatatttatttaattaagcccatacattgagcccaacccaagcccataaa

SEQ ID NO: 370829 - DNA, 678 bp, Cannabis indica
aaaaaaccatatgtcgctaaaggtgaatagcgaggcatcggagaaaagtgacacataccttagcttgcaataagaaaactaagtgtaaaagtcttatcggctcgaagaacaagtatgtgagatgaccatctcgctatgagaagacttcctgtagcttcatctaactaacaggcgcgaggctcataaccctggcaagtcagaagatttttttatacctgcgatcgacgtaagatatacattattgaccttggaaagaagaatggtcccagctcgctattgggatcattataatcaagtttctgtcgagatatctccagattcagtttttaaagacgtgtttaatacatgatattcttgacccagtaaaagcagaaaaattacagctatacgattttcaaaatcatacaccgcatttacatttcgtgatatgtaatcagatcctacgattttagggataatggctgtaaacatattctggtcaactttgtaattaactgccactatgcaattataaatagtggaaaacaatatcaaaaaagaaacgaaaagctcttatgaaagaggccctgaaaaaatactcaaaaatctgaataagattgactcgtggactatgcagaattttaactggaaaaccatgtaaaaaaacactgtgttcatatattatttttctatatcttt

SEQ ID NO: 370830 - DNA, 636 bp, Cannabis indica
taataattaattaattacaaaaaaataaaaaaattaaaaaatgacccgtcgggtccgattggtccgacctatcagacccagcatcggaccctcttttaaaaaaaaatttaaaaaaatccataactcaatcgggtccgatggggtccgaccatcggacccaggttccaaaaaaaaaaaaaattcaaagaaataaaaaaaagccattgggtccgatggggggtctgaccatcggaccatcacccctgccaacaaaatttttcccagcatcggaccccatcgggcccgacgaaaaaaaatgcagaaaaccagcaaaattccagttttcacatgcagcaaacattataacagaaaaaatagcaaaataacagcaacaatccacagatcaagcaacaaacacaacattcttaattaaatataacaacaacaaacaagattttaaaaaaaaaattaattacttacccattgatggagcttgtagtgttctagcttctaatgtggtggattagtgtggtggcttgtagtgtggaaggttgtagcttctagtgtattaatgagtgaagagaagaaaaaaaaatttggtggtggtggaagatggaattcgggtgggaaagggtgtgaaattgatgagaagagagg

SEQ ID NO: 370831 - DNA, 770 bp, Cannabis indica
gaacaataaaataacacatgcaataataataatcatcaaataaaaagtttgtcaaataaaaaattgaataataaattttgttaaataaaaatatcacattataaatggatgaaaatttttgcactaatactgtgaattgtattgtaaataaaattaaatgtgtaacctttaatttttcaagtgtaacctttctatacaggtgctgtacaacatatttctgtggttgggcattgctgggtggtctttggactacgataggtggacagtttggttgggttgttcaagaccgaatttggtggacaggataagagtgctaatccttgcagctgtgatctatcacttatggagcaactgaaacacttgcatattttctttctactctaatactgtgaattgtattgtaaataaaattaaatatgaagtgaagtatagactcttattgattaaagataggaagtggtctagggaggagaagaatttgattcttaaattgatttgtaagtagttgactttgtgttggttgcttctcttgtagaagtgttattggttgtatttggtgagtagattaatgaagttttattcttcttgatcaaaaaaaaatttccactaaaaaaaatctaaatgatttcgatttaccatcgatctcatataaatttgataggctatgacaactttggataattatgaggtgcttcaaacatactgtaaatgatcaaattgctacccttgtaaagacataatttttttattatttattattaatttaactt

SEQ ID NO: 370832 - DNA, 606 bp, Cannabis indica
aattccgtcccaacacagctaaaaatgcacataaattggatccaaaacataggctaaaaatagcctaacacaatgacgtttctcgacttaaagccactggaacgggttgagccatgaattgccacctttgataacagccgtacacttgagccgacaccgctctacttccacaagtagtatcatatctattttgataatctgatctcgattctcttcctataactaacgatgtcgttttaatattaatcgagttgatgaattctttgatacgatgttgtaattagtattagtaataccaatagattggtggggtggaatagaaacgagtataaataaataaaggaatgttggttatttatgttattaattactaatctatcgatatagtaacatttgattagcaaatctaaaattattttttatataatggagttatttatgtctttttttctttttttttggttatgtatcaacattatcaatatagtaattaatggagttatttctgttattaattactaaattatcgatatagttttataaaaaagattatcgatatagtaacatttcactaacaaatctataattactaattatataatagat

SEQ ID NO: 370833 - DNA, 752 bp, Cannabis indica
aagtattgaaattaacataaaaataatgtgaagaaaaaattttagaaaaatattaagagtaatttttaaaaattatttaagtttatattttttttaataatggggtgtatttataagtttaaggggtgcaaataaaactccccttatacaatttataattatttaaaacaataatttcataaattactattttgcccttaataatttatttctcatagaaattaattctcaatcaaagttactcatcaaataaaatatttccttgcacagtgttgtatagaggtgactcgggaatcatggaactatatttcgaagctccaataaatacttgattatcatccatctcatatatagaataatgtggcttattaattccattattgctccactataaatatggaattgcactctttgacaatatataattatatttacagaattcttatttgtagttcatttatatactcaatataagtagttctccctccaattattaggtcataattagagttggtcaaatttaccattttacagtaacttattatagatttagatccaactgttagcactcccaaaattaacactataagggaacttattttcgatccgttaggaaagcctggttgtatgacatgttcccatctactcatgttattaagctcccaaaatagaagttgtaagaatcatcttctctgagaaactttaacgagtgaaataaaaaactaaatgaacacaaacatgagttcatgtat

SEQ ID NO: 370834 - DNA, 634 bp, Cannabis indica
ctttttttttcttggattggatgaatccattccaatccaatacatactggacctaaaatattagatggatccaatctgatacaaaagatagtaggtataataaatccaaattaaactaataaatatacaaaatacatccagtggatagaaccgatccaatccaatatccaatagatgttggattgattggatgactgaaaataattggatcagatcgggtagtaaaatctaacatccaagatataattggatcggatttggatagacctaaaaatattagacgtggtccaatgaacaagcctaagtaaaagaatgggatgagtcaattgtttctcattaattggtaatagagtacaaagatgtttatatacaatgcacacacaactcatttcaagttatgagtcaataacaaactcacaacttaaaatcttaaatcttaagttttcagtcactaacaaactctttgtaaagactgcttagttttaatttggaattagtataattagggcttaattatgaaactagattattaattaagatttataatttttatgtagatttaattaaattcaagttgtattatttatgccatatataaattttatgtttttcatgttttgtgtccaacaacatt

SEQ ID NO: 370835 - DNA, 577 bp, Cannabis indica
gcttttttttttttaattttgtttcctttattttgtctttgttttatttggaaagttgtctttcttttagtttccttttttttcttagttgtaagttggctatataaagccttgtaaacactttgaaaaatcagaatattttggaataagtttttgagaggttttcttcttgacttcttgagtttttgatacccactcttaagatcaatcttagaaaaaacacaagaaccatgcaactcatctaacatatcatctaaacgaggaatggatgtcgatattttactgttatgttgttgatggctcgacagtcaacacacatcctccatgttccatccttcttaggaatgagaattactggaaccgcacaagggctcatgctttctctcacatgccctttggtcatcaatccttcaacttgcctttatatttctttggtttcttctggattagttctatatgctgggaagtttgggattgacgcacctggaataaaatcaatttgatgttctattcctcgaataggttgcaccccatgtgctacctgttggaaattattttaaccaggatcttagatcta

SEQ ID NO: 370836 - DNA, 1061 bp, Cannabis indica
tttaatgcctaataaatcttaacctaaacctaggtggttgcctataaatagatagtgatggctcacactaaatgataatgaaaaatcacctccagtcaaattttcctgagccttgttttctattaatttcgaacctcattctcttcttcttctcttcatattttcataccttgagtgatagagtaagtgcccacgcacatcaagttggtcctcaatcatagtatgtaagactgtgaagaaaccaatcaacaagaaggagaattgggctcagatcttggtaatactctactacagaaatgatacaagggttagagatttgagcggaaagagtcatttaattccgctgcacccactgtaaggtttctcaaactttctatgtgtttatttagattgttttagaaattcatattaggatgttaaaaacatacatggtagtaaatctagatcttggtaaaatatttccaacagaagggtctcccaaatagagttgatgtaggattgggatcaccctcatcctccatctcaattatgtagaaattacttagaatgataagtccataagcttgcacaaaaacatattgaactatccctaagggataagagttagtctgattagtcaattgaattaaaacctgagtttctcttaatggaccaagatttaaataagaaaaattggaatgagacatattattaataatttctcctaaatctatcatgcaatgttcaaacctggttttactaattgtgcaaggtaacaactttctttggagaacaacagaaacattccccaacacttattttctcatctccattcaaatttttctcatttggacacaactccttaagaatgttagcacaaggaggctcttctttgatttcctcaagacatggaatttttacctcaattttggtaagagtctcagggatctccttgatgggctcctctttcttggattttttcaatctacttggaaaaggtggaggagagacataagttggtaatattggattgtatggctttttcagtgatggtggaccactaacgtaggagattcagcctt

SEQ ID NO: 370837 - DNA, 617 bp, Cannabis indica
ctctctatttatttctctctttcgatctctctctctttctttccctctttcgatctctctctttttcatttgatgttggctttttttagggttgtggtggtgcgatggccatgggtaggtgcgatggtggcggtgcggtgttggcagtgcagtggtggtggtgcggtggttcagatttatttttattttttaaaaaattcttttgctttggttcataaccaaagtaaaaaaaccagtcagcgtcagtgcactattatttgcttcagttatgaatcaaagcaaaaacttttttttatttaacattttgtgtcggttctaaactaaagcaaaaaatatgactatttgcatctacaattaataacacgttggttacagtctgtgcagtgacgaactcagaatttaaagtgagggggtgtatttttttttttttttttttgtaaaggaagggggcaaaaataaacttaaaaagaaaaactacagtgttgttactaaggatttgaaccttctattatgcctataaatattatcttttattataaatatatgttgtatataactaaaatacatatactttttttttcttgattattttttttttttttttttattttagtagg

SEQ ID NO: 370838 - DNA, 450 bp, Cannabis indica
ttttttctaaactaaaaaaaattaatattttaacaccatactattatgacatgaacccatctggattcgggttcgggtatgatttcggatctaggatctgagtatgcgagtaaaaatataaaatataatatgttagacaaaaaaaaaaattgtttatgaaaattgaaaataatattttgatgttttttgtaatctaatttttttaaacttaattttaaaaaactatttttaaaaatttttaccaaacggtcctattagtttttaaaaacggtagtttttaaagtacgaagtcaaacaacctctaaatttctctttaaaagaaggcaatgcatgcaaatgcaagattagcctgtagaaataatatactgcgtattcccgaagtggtatttctatctctaagttgacaaaaaaaaacaaatgataaattgtaaaatagtaggaaacatagca

SEQ ID NO: 370839 - DNA, 600 bp, Cannabis indica
tttatacttatacatcaagtagaataatagaaacaaagtatggttgataacatatatttaatgcccaaaaaataatctttattaatggtgattgtcgcataaattgggcagtcgattcgacaaatatgttattataaataaaaatattagtagaaaaaaataaaaaaataacaaaaaaaaaataaattagttttgcatgtataatgtggtgttaagtacttctcaatgccaatgattttcaaagaaaaatttacatcgatacacattcagtaaataaattctaaaaactcaaataataaaatttatataattgagcggagtttgagaagatttaaactaattacttatttttattgtcttcaccgggtttcaatctattttatttaatttcttaaaatatggtgtaaagtaattgttgtcttagagagagattaagagacaatagaagagagagaaaaggaaaatgaaaattgggcatagccttcgattaagagagaaaaataaagtttgatattttatattgattaatattatattaatagcaaagttggtaactaaaattatttttaaaaataaatacctatataaaaaaaattaaac

SEQ ID NO: 370840 - DNA, 533 bp, Cannabis indica
ggaatgaaatccatataattctaacttcataaaaacattaattagaattaaactaataatagtaaattaataaataaaaaataaaaatttgaaacggaggacgtcgttgagccgaaccgaaccactctcagacgactgctcttgaacccttcacagaagaagacgttgatgtgggaatgagaaaatttttggcatcaattaagaagatcaatactataattttctccttcgataatgatctagggtttttttagttgatgattattgtatatatataaaacttgataattaattatactaataataatagtatgacgctgaaattgttagtattaatagtattttttgataattttatatatatatatgtatatattttattaagatataattattcttatataaatatatattttttaatacgagaatgaaaaatatattactaattataatttttaagttattcttatttatagctagtctaagatttaattttttttataataaattaaaattattcttaaataaaatat

SEQ ID NO: 370841 - DNA, 954 bp, Cannabis indica
ttttttaaaaaaaaagggtaaaatgggaagttcatgtaattaatggactaaatttgtacaaattataaaggggtataaattttgatataggttgtattattagggtcaaaaattgaaatttcccaactaaaaatgctttaagtcaacatcaattatttgtttctccgactttgtgtattcgacttttcataatggcggatcccaatcgattaaaaatttctatttaaaatacatcttaggaaatcgcataactataattaaaaataattagaatcaattcttaaattatgtctcctccaattattagagagctaactatataagaaactgccaagagaatttaaaatagggagtacatataatgtaagccacacttaaaaacaattcttgtttggattttgtattggtattgatgggtatcctttaccaacccactaagcagtttgtgattgattatcaaaagcctactaatcagggctacaaccagaatggtatgccatgctgggatgttggcacttggcaatgccatgtcctatgtggttcattttatcaaagttaagcataactttgatgtgtgtgcgccacttttttttatttgttttgtgaattatataccatataggcattaggcactaggcagggccatatgactgaaactcactgtgtccctcaacttatcataacactatttaccatgatttgatgtatttatttttacaaaaaaattttacttataataaatgaattttatttagagtaatttgcggtataaatacttaaatttattttccagttataatttaatacttaagttaaaattttggcggcatacataccttccgttacactttcagacattttgtaggtacctcgttgttatcttgcactgtacaccaaatggcatgccacatcatcttattaaatagttacctaatattaactattaaagtaaaa

SEQ ID NO: 370842 - DNA, 747 bp, Cannabis indica
aaaaagtaaggactttcatcgtcaaaaatgaatttttttgacaattctacccaaaagaaaaaaaactggtataattgtaatggcatacaaaagtaaaaaaaatgatccctcgtctacatcaaagccactgcttagacgaaccccattgttggctttactactattagtatggagtgaacgcccacgagggttgcgattattgttgtgggttgtgattctccaatatttaatatctgttcaaatattaataggatttgttttattattattttattattttattaaataaaaattaaaagtgacccataaatttctcataaaccaagaatttcagttatatagacacactttatatagaatagatacggtaaataatttttttaaataatatttaagttctattttctattgtacttttcttgacatgatatatgattttattagcatcctatttatttttatttttatttattgttattattattattatatatttctattgtaaggtatatattttctgttatatggtatataaattttattttatagtatatcattttattttagataatgcatgtttagtttttattttattatacataattttgttaatatgatatatacaattttgttaataatattatattatattattttattttttattgtcagtatatacattttcttgtgtggtatatggtttttgttgtctatagtatatcatttatttaagatgatatttaattt

SEQ ID NO: 370843 - DNA, 558 bp, Cannabis indica
tcaaggacccatcttttcttcgcatattgacattcgagggtttagagtagactttgtcctctcgattttttacccttttttcttttctttgcttattcgtaatgtcaccatatgtgggattcttgcacccgactcttgtcaaggaaaaccttctaaggttttctttttgacaagtgtccggaggggcctctttccagcggttaggggacccccattcccttttttgacttagggtttggtttagggtctgactgctggatttttccatctttttcagaagtaagatgtctgcatccggttctaaatcctcgaagaaaggagagaaacgtctggccaccctggaggaagctatgaagggtctagtggcctaggaagggtacaagtcccgtgccaacgggtgggaagcggctgagcttcactctaccataacctaccctcaccagctggaacacatcgtggtggtggcaggtatcaagcctgcgacctccgggacataccaccggccgccccgggacgcggagacgcccaaccataactacgggggcttcggagcctgga

SEQ ID NO: 370844 - DNA, 552 bp, Cannabis indica
ggtttatgtgcttatgtgatgaatgtatgtgttgtacgaatttttttccatgaaaaatattttttctatttttgaaaatattttatttgtattccttgtgaaaaattagcaatttcgttttttacggaactcgattccgataaaaattgaaaaagttatgaattttggaaaatcgggattcaaggttgtcgagtgggtgctcgtgagcacaaggcactcggactggaaacccatccgcgcgcgtgatgctccgtgtgcaccctgaagcacgctcggacgaccctgcatgcgccagcgccgagttttctcgccgtgccctcctccttccgcgcgcgtttggggctgcttgcagcctcctgggctgctgcatgcagcctctccgggcagcctgcctcccaaaccgctttttgtgggtttttccccaaaaatcaaatttttatgggattgtttcccaaaatttgatttttccaattttagattttttcaatttgaaatatttccaattttaaatatttcccttttgaaatattttaattttaaatatttccaatt

SEQ ID NO: 370845 - DNA, 604 bp, Cannabis indica
ttggaatccttgtgaaaaattaaccaattttggtttttacggttgtcggttctgataaaaattgagagagttatgatttttttgaaaatcgggttgaaggggtggcggggggtgcacgtcgcatgcaccagtcactcggacaaggtgctcatgcgcgtgtgtattcctctaacatctccctgtctgaaaccgtgtaaggcccacatgatgctgcttcacgtcgtacctcacactgcagctgaccgagatttttcggttaaggaggctgcaactcctccttccatgtgcacaaaggggctactagcagcctctcgatggctgcacgtggagccttgctggcagccacaccttaaacccgttttttgtgggattttttctattttttttttttttgtaattttcccgattttcaaaccctaattttaaaataaaatattatttttaatacatttaaacttaaatatcaattttaaattaataatatttaatttttaataaataatattaatttatgatattttgaggtttaaattttaaaaattgattattttattttttaaattatggttagatttttaaaaatttgttaatttctttaatattt

SEQ ID NO: 370846 - DNA, 331 bp, Cannabis indica
tgggaacctgtaaggctttttataaattttctttacaatgaggtcacaattaaaattttttataattaaattgggcggtgaggtacgatttatgattttaaattattaatatgcggttcaaatcgcaccgcatattataaagatttcaatttttatatttattaaggtctaatatgtaaaagctcagtccaaattccactaattattatattgttgaaattaaattttttaaaaaacttgtatatgtagatttggtttgaaaaaatagtcaaaccacatcacccgcaccgcgaacagccctactcacaactaacaaattagttattgacct

SEQ ID NO: 370847 - DNA, 251 bp, Cannabis indica
ataatgatgacatcaactttataatcttacacacacttgtttcttctttacataatttcacacatgtttttttttttttagttttcaattcataataaattttttcttataaaaaaaataatttttcttatattctgcaaagtaaaaaaaacttacatacatatatatagttatgaatatatatataaataattgaataattatttaatttaatttatgtttatgtttattatgatgtatttttaaaaaaa

SEQ ID NO: 370848 - DNA, 947 bp, Cannabis indica
attcattgtgggctgtataaatgttgattgggccggcccacagtaattttgtaatattttaccctttttgaaattttcctgtttttttccctatctttagtcctatttatttatttatttttttttttttgctttacgtttaagtaactattaattttttatgtatgcatgacacctcgatagtaacatcaataaataacataaagatctcaatttttaatatttcttcataatatggagacatacaaactttttttctttatgtcaacaacttcaccgtcatcatcgatgtcttcaaattattcatgatttactcattagtatgaattatttgatgtaaaaaagtgatggaaagactattgtaattttttcttcttcattcttatgtgatactctctatttttcattatatttctatcgctctttatatatatgtatagatatattttttttaaaaaaaagataactttagtttatgatttataatttttaggttgatattatgttttagttatataattatgatttgttttaaatataaataaataattatggtttgttttaattatatatagaatttttgttccttcttacttaattatatcatggttcagtacatttatctattcttttcttaatttttcaattttttcacttttttatactactttttttttttaaaaaaactcctaattaagttaataataataatcaaaacaaaataatctaactaatggaaattatatcaacataggactactacgttttttttttcaaaatacatacgtatgtattttctaagttttatttttttaaaatatatataataccttaataataaatagagaaattacttcatatactatttttttaaccttttcttttttcaaatttacggtttgggttgctgcggtggtttctccaatagtttctatgtggttgctatg

SEQ ID NO: 370849 - DNA, 712 bp, Cannabis indica
gatacttatggtacaataactgcatggaatattcttatctacattgcataattattaatatgcttcatgatgatgatgttgaatagttataatgttgtaatatattatatgagcttttattcatttatctaattttgaaggttactaaatcttatattcattagtttagcaactcacaatcacatccatatcttaatagatattattaggaaaatttaaattattatatttaatttttttatttaattaaaaaaaatactcattattatattatataggctaaataaatctatgggttgagaaaaaaaattaattcaacaaagaaaatagattaaaaaaaattaattttaattatatattttatataaatatagttttaatacagtgtaaaaaaatattttttgatattttcttaattaagcaactaaattaaatataaaaactaaaatgtactttttattattctcatcaaaatctaatagtttaatatttttaaaatagatatttaaagttaaattttttaataattatgatatatacttataggtgtgttcattggatcacatctaaagtttttatgtcaatcgagatccgatccaacaattatatattagatgttagcttttactatacgatccgatctataattatttcagtcatccaatcgatccaacatccaatagatattagattagatcggttttatccattg

SEQ ID NO: 370850 - DNA, 700 bp, Cannabis indica
agatgtactttcatccactgacctacaaaatccaacaagtttagaattaaccatagtatcaaatagtatgcctcaggcttcttatgctcatcagagaacgtcattatttgtcaaagtaattgcaaatctccattgttttgttcccaacatttgtgaaggttgactctttgccaaaatttacttggtttatttttacaaattctaaagtgtacactttttctagatgtactgattggagtttaaaactttattcacagaacaggagaggaacctttttcttaataaattcatggagtgcttgcaaattgatccatctaatgcattgtcgggtttttcctatacttctgacattcctaaagctgcttctgtgtgcaggaatttgcgtaattatctctgtcagattattttgtttaaatttacagaaatttgtttgtttcctttcttacactttttatgggcaggttctttgttaagtcatgcagaatcattgactcctaactttttgaacgatgaggatgtacagctcttgaggtgattttattctcctttactattttttgggtagaattttctgctcaattttcttaggatttcctgacatctatactcacacaatggtttggggtaatttttccccagattaagttaatacacaatgtgaagctaatgtaatatactatgatgttgctttgtgtgcttc

SEQ ID NO: 370851 - DNA, 654 bp, Cannabis indica
ttaaataaaagtaaacaaaaaaatgacatgtaacctgatattaacccgttatttatttctttaaaaaatttaattaagattaattatatattaaaattaattaagtataattattaattaattttttgcaatttattattaaagaatgatcttttagcaattttttttacacttaaattatataaatttttttaacaaaactctttataatttaaaattatacacacataatttcataattaaaattttatataatttcataattaaaattttattatatttataattttaatttaaaattattacacttaattatttaatttttttttatttaaatatttaaaagtaaaaaataaaatagattagagtgagaaagaagagagtgacttaatggcagatggtttgaaattgtgtttgaagattacgttcattgcccggttgtccctcactccttgcccaagaccacgtccatcatctcttacaaaatgacgatctatacttttattccaaaacctctacactccactatttatcgtgcgccaaccatctatatatttatgtagttttggttgatttaaactttgttgacaatggataataattctatataacccaccattgaagaaataaaggcaagtgcaattgtattcattt

SEQ ID NO: 370852 - DNA, 531 bp, Cannabis indica
gcaatgcactatgagtttgaaatccctctggagtaactaagatgagtccagcaccataatcgtgctcgttggaagagccatctacatatagtttctaggaaggtccagttttttcctgagttgcggtctcaggcatgtggacctgatcttcacaaatcatgggattgtattctttgaggccagtacatttggtaatgaagttttccaatgcttgccctttgattgttgttcaaggctggtaggtgatcttaaactgacctagttcaactgcccacttgagtaggcaccctgatgcttctagtttcatttgaactttcctaagtgattggtcagttagtaccttgactgtgtgtaggggtgttcataaaatagtcaatccaatccaatctacacgatccaatccaatccaatccaatctacaaagtgcggattggattggattggaaaatttaaaattcgcacttgtgcggattggatgttgattaacatgtaaaagtaccaatccaatccaatccacacgtatttataaaa

SEQ ID NO: 370853 - DNA, 675 bp, Cannabis indica
tatttcttttataaaaaaaaattgtacagatattcacttatttataaaagtgagtagttaaataattattttatttttttttatatatacaacaaacatattgaggttacgcctagtgttgactggatttctagccaacggacgcagagtcgtaataaatgagatttaaaccaaaatcacaataataaatgcagttaataacaccggaattcgtaataaatgtaaataaaagacaccagaatttaaagaggttcggctccgaatgtcgttagtagcctactccccttgacttttattgatctgagttgcaaaagtcaagaacaggctcttgattgcaaacgataagaagtgtttatttttctaagtgtttgagattgtggatccccttcccaggtcatgggtgaccccttatataggggagggggtcggtgcttctcgcttcaggagacgcgaccaacgcggagctatctcaactgtttcagttggagtctgatttttaggataatatccagctattttcgtgggttgacaactgtctttgagcctttcgtgggatttgaacatttgaaggagctactgatgacaagggtcccttatgggtgtgacgtggtcgtcaaccacctttagggattaagccccatacttggggggcaacacccccgggacgctcgtcgg

SEQ ID NO: 370854 - DNA, 1034 bp, Cannabis indica
acatcgtgtaatgagctgatagaacctagacgcatgagtctatatgggtttatcgaggctgtgggtctttaggaccaactcgcattataaagaatcgatctctatgttttcgcgggagtatagaaaggataccccgcacatatcctggtacatgcgagtggaatcctttcttggtcccacataatgcgagttacacgaatgcgattagactttgatcatactcgcatcatctcactgattctagctcaggcgaggtttaaactcgaggagtctctcatggatatcttagctttttttggaaaactgaatacacatgtcctccaaataggagtctggtctcgagtttctaggtgagagaaatctcactataatagagagttttgctataaaaattttaataatttaaaggcaaaaaaattgctaaaagatcattatatagtaataaattacgaaaaattaattaataattataattaatttaagattaaaatataattaatcttcattaaattttttttaaggaaattattaggtgactattaggttataagttaattattatttatttttatttaatttccaaattaatcacaaccattcaatagtaatttaatgactaaaaaaatacaaccatgatgattacatatttaatgtaaccattgaaacctcctctttatatatatttataaaactaaccttactaacatagttaaatttaacgggatattcttatatttttaaaatattttattaaactaataaaaatcgttaaatagtcacattttatgtataaagatatgatttctttaaatttagtgtgatgacatttataattaaaataaataatatattaaataataatgtgtgagatagtgataacattcttaaaaggtgttatgctattcaagtatttttaaaagtaaaaatacaaaataaaataatgtaaaaataaaataaaataaaatattattgcaaaaatttggctgtgctactcatattcttttttagttaaaacaaataatatatcaaataat

SEQ ID NO: 370855 - DNA, 996 bp, Cannabis indica
ctcttagccttacgagtctcgaccttatctggaatgggtctttctagtaccagaaggctctggaacatcacccattactttcttagcaatacgcttcaaccccatcttaggatcgactttagataaaatagttgttgcaggtttcttagaatttttagtatttttcttagatgaagatggggacttcgaaccacttctagtggtggccatttatataagaaaagaacacaatggaggagaaagaacttacagatacaattaagaaaaatggggataatggcatagaatggaggttgaggaaagtgtgggttagggctaggagtgggtgatcgtgggatagagaggttgaagaagataggaaagagaagcagagaataaaaaaaaattacaaaaaaaaaaatggtagttatggagaggtggcgtgtacaaatacataaaacatgacatatgcatgctacaaggtaaaattgtaattattaaacttttggaaaactaaaattgaaaaattaaaaatgtaaaaaagtttataaaaccaaagaatagataaaaatagtaaaaaaaaaaaaaggtaaaaaaataggcattgggtgtaatattctatattccctttaaaaaaatataactaaatcattggtaggtgatcattatttgcatattgtccaagaatctaccaaagacaaatgacaatttaaaaccacaacaaacacaggagaacatcacaaaaattgacacacctgtatacataatatatacacaattttggactctactcgacccaccaaacactcatagacacccacaccgctagctcggttactagccgagtccaatccattgaagttaaacaatatatataatcactctattattaacttaccaaaacttgactaggcctctcaagtctgaaacataatcgaaacagagctaaaaatttggaggaaagcgaagtcactcacttaaaataatgctttcaaaatcatcatctatagcagcaca

SEQ ID NO: 370856 - DNA, 575 bp, Cannabis indica
gatacattttagttacctctaagacttatttgtatactaatcaattagtatttttaaattatattatggtagattataatttaaaatatatttaagtgattactttaaaatttatgtttgaaactaatgagttgtcatgtagtatagcaagccatcttttttatataccaattatttcatatatttttttgttattttgaaagctaattagttattctataatataatataattcaattaacgaaattctataatgaatgttaatttggatataaaaaaattataaaataataactaatcattatattagtaattaaatgatttttttctaaaaatagcgaaacaatatatgctccttatattttaaaatgttcacatcaattaaagagaagagtagatcaaaatggtattttttcttaagctcatccgagtaacgatgtgacccaaaaattatttttaaagtttgagagtaggaagagaattaaaaaagatagagagaagaaagagaaagaaaagtataaataagggtattgaaatatgactgctcaattttttttacatttttgatttatatt

SEQ ID NO: 370857 - DNA, 508 bp, Cannabis indica
atttcagagagaggaagagagagtgggctttcggggtgcgacttttgggcggtccgagagagtggggctgggtcggggtgttggtgcgggtggtcggaggtggcggtgagggtcggaggtcggaggatggaggtcggaggtggtggtgagggtgggcggttgggatgtgagatagagagagagatgatgcagagagagaattatgagaggtatttttggagttttgaagaaaaatgtatagtttttttagagtttagatttttggtttaataataaatttttttaattttttaagtatataaaatcaaaattcccaaaaaaaataagaaagagaagtggtggataaaagaggccacaggaaaaatgaagagagggatattattggtcctattaatatattttctttcataaaatttagagagttttatttccacccataaatacacatcattattaaaaaaatataaacttaaataatttttaaaaattacttttagtatttttttaa

SEQ ID NO: 370858 - DNA, 820 bp, Cannabis indica
tctaatgagttagtgaaggaatttatctattaaaaaacaattcttactcaaaaaataaataaacaaacatttatataatgtatatacattagtgtaaatttgcatacatttataacacaaataataaaaaaaaaaaacaaatcaaaagaaaacacttgtaaataaataaaaaaaaaaaactaatcttcttattataatttttataaacataaatgtttaaaatttgagtatattgtatttggataatagttttatagggaagaattaaatagtgatttaatctaaatacaaactttcaatatttgtaataatggttgatttttaaaattatttaaaattatataaaaaatatataattattaatatatcatcattcaataactataataatgagtgataataaatcaaataatcaaatacttaccatttatatattgtataataaattgaaaataattttcttcataataaataaaatgtatgattatataaaaataaagtattatgcacatatattgtaataaaattatataatgtatacattagtgtaaattgccctaaaatatttcccaaaaacttaaacattttatttggaaagtttgcaataattgacttcttactagaattatgctttatccaaaagagattcggttatgtatctaaattgtcattactgtacattcaaacaatcctacttatatatagtgctaatgcattctttatggaaaatttacatggtatactaacttttgccattttttttacaaaaatattgtgaagtattttttactattttactgtgtttttttataagtttcat

SEQ ID NO: 370859 - DNA, 738 bp, Cannabis indica
taatatataaatattaaagaaaataacaaatttttaaatctgaccataatttaaaaaataaaataatcaattttttaaatttaaacctcaaaatatcaaaattaataataatctattggaaaataaatattattaatttaaaatatgatatttaagttcaaatatatttaaaaaataatattttattttaaatttagggtttgaaaattggattaattggaatttgggaaaaaatcccacaaaaatcgggttgggtgggtgagctggcagctaggctgcacgctgcagctccaggaggctgcaaatgcccaggacgcgggcgcggagggagaaattgcaggatggacgtgctgctgggctcggcgtggtgcaggattccatcgagcgaacgtgaaacatctcttgggcgtgcacacgggttcagacaagggagctgtttgaacgtgcacgcgtgtaggcgtgtgtgtctgagcgcctggtgcactagatgcacctactcgacagccatgacacccaaaatttccaaaattcacaactttttcaaattttaatcggaattgaagttccgtaaaaaagaaattacttaatttttcacaaggaattcaaataaaatattttcaaaaaacagaaaaaaaaaaaataatttttagtggtaaaaaatttcgtacaacacatacattcatcacataaacacataaactaacatgaaaccatctaaatcaacacataacatcgttt

SEQ ID NO: 370860 - DNA, 519 bp, Cannabis indica
aaggataaatatgcattttgtttttaatagagaatgaaaattggaaaaattaggctcaaaatgggacaataaaggataatgtattaaggttaattttttggctcaaacgattcaaaaaaaattgtcttaatcatctctacacaacaaagatttaggatttcgcctcaataaattaatcacacaagttctagttatctcaatatcaaccaagtcaaatcaagtctgcataggcacataaaatcacaatatatagaacaagtataataacacataactcatatcacaatatcaaaagcaagcataataggttaagcacacaatccaaaagtttttcacacataataaataatatcaaagagttcagcataagttcatcatcgaattcccataggtcataagttaacgttaatacaggcatccaataataataaataaaaccttgaatctacccataaaaaccaaaataatttttttaaaaaaaagtgaaaaaaattaaaaacatgaaaattgccttcccat

SEQ ID NO: 370861 - DNA, 502 bp, Cannabis indica
gagaagagaagggaaggtgagttttgtgacaaataattgggtttttgttaattgtaacatgtggggaaaaccacacatgtataccaaactcaattattattattaaattaaacaacctcatttggtttggtgatttagtttttttttgttgtgttttttaatcattggtcattaaaatcattcaagtaataatatgtgtaatagtttttttttttttttaaaaaaaaaaaaaaattttaatatttaggttgagaattgctaaaagtactatttaatgtgtagcattctcttctgtgtcatattgttattggtgtagttaaatattgagtctcatataacttaagaatatagtttttaaaatatatcgctaactaattgtgacacgtcacctatagaagatgttcagcactactgttgtgctcttttatgtttcatctataattttacgtcttaaagtttttatttaaaaaaatcaattttttttaataaaaagtaaaaaaaa

SEQ ID NO: 370862 - DNA, 592 bp, Cannabis indica
tttaaacctcttgatacgaaatgatccttcacttttttccctctcatttttacttctctcgtttttctctctgatttttgaaacttcaaaaacccctttcatacttcctcttttctctcctaggaaaattctaaaaagtttctgaatccttgaagagtatcgaaattctcaaggttagtagaaaattgtttgtaactatttttccctttattttgagaatcaatccatattctgcgttttaggaggtagaaaatgcatgagatattaggaagtatatatatgtgactttattttctgataaaactgggtatttatttgggaaatatgggcctgaaatttaagtaatcaaaggttttaggaagaacactttgagtattcgtatctttcttgttgagtattctgaacactcgtgagaaataaggaagaaaatattgaatactcgcatatatatatatacctgaataatttagcaaatatgaaatttagctatcttaatccttgcttagaactagggtttattcttagccttccgatttatatatgcttttgttgcgaattttggttgagtcttttgaatggtgggtgcgtcact

SEQ ID NO: 370863 - DNA, 630 bp, Cannabis indica
aaaaaaattagtataaaaattttttttggatgccgaaacaaattaagagtatatcagtacatctcttttaaggggtgcattgtagtatcactcaaaaaatatttagttactaatatggtaattagttactattttataaattatttttttttaacaaaaatatataaaataattggtatataaaaatagtatcttgttatattacatgaaaatttattaatttctaaaatatttttaaagttatctaaatatattttaaattataatctaccataatataactcaaggaaattcaacaatgcactcccttaaaatggatatattgatgcacccttatctattttagcacccgaaataattttttagtcaatttttttttcatggtcatgtacgttatattatttaagacatcctgcaaaagaaatttggaaaagtttaacacgccgaaaaatatgttcaaacagtgtgttgcacgcgtgactattttattttatacgcatgtaaaataaactgtttgaacattattttctatattgtaaattattctgaatttctcaaaattttgtaggttatcttaaatagctataacatacatgaatatgaaaaaaaaaattagactaaaaaaattct

SEQ ID NO: 370864 - DNA, 487 bp, Cannabis indica
tttacatgtatttttcatgtttaaggtttaatatacaatttctgttaaatccagaacatatagttattcacaattacagtgatgtcaacagagtggaaggtaattgtgattatatgtttcaaaagactatgtccatgattcattagtacactggatttacactgatgtgatagtcagcgataaagtttacttacaccttgaataagtgttatgttctttccaagacattggcaaattatggtagtatcggatgtatagagtatacattagactggcagcgatattgttcttagtaaagatattatagtcttaccattgtatctttctaagttaatatcactggttgatcttagatcaaaagatcttaatcctgatatagttaggttcaatctcaagagtgttatttatgttctttgagttgttcgttgattagttaattagttttaattaatcaattacaattcaaaaattagactatgtcttattt

SEQ ID NO: 370865 - DNA, 585 bp, Cannabis indica
aaaagaaaagacatccactgcaaccagtggctcgggtgagaaaaagaggtttttggggaaccaggatcgaggcaatcgctagagtgtaaaaggcatcatctgagggagtgtttaaggcaggggtgctttcaatgtggcatgccagagcattacagaagccagtccttaagtggtaacaagtcagctctcgatcaacaactcttatttctctgtgctttttgactctggggccactcattcttatgtggcagccagaatctttagtaaattggatagatcgcacgatagttatgaatcacggtttggaactctattacctggcagagagttagttatctccaaaaggtggattaggtttatgtcgatcaggattgacgatacggagttaagtgctgacctaatagaaatgaggttagcagattttgatatgatactgggaacggatttcttgtccaaatattcagccagtattgactgtaagaggaagatgataatcttccaaccagaaggtgaagaaccgtttgtttttgtcggttcggttcagggatcgcggatcccggtaatttcggtcttagcagccaaaga

SEQ ID NO: 370866 - DNA, 460 bp, Cannabis indica
ggaataattaatgcagaggattttaacgtggttagaacattaatgagctgtagtctacgagtctttgttattaatgagagttcttatacagagaatgttcttggtgaattctctctcttttttctttctcttcgattgatcgatccccttttttctttggttcctgggtatttacagagttttgtaagaatcacttaaaaatggatcacttgtcttttagtgtcagtcccttaggtaagatatatgaaataagacatacatgacctatgtcgtaggtatcatagggattaggtgacagtaatctttatcctctcttgattgatgtgatacttcataatggagtcgtcactagactctttgattattgtgtaatcaccgtaaacgaggctgacgccgtctgtcatatccttttatgggtgttctaatacgtttccctcatgccgcattaaatgtgaaatga

SEQ ID NO: 370867 - DNA, 805 bp, Cannabis indica
ttatatggtaattatatattggggttgaatataacttttatctttagcaattggttagtggttttccatattatttattaaattaaattatgtgtgacctaatattaaaatgtactaaaaatagtatatacccttttgtgtcacttagctattttttttttttgagatgcttgcccaattcaccctctcccatcccatcatcctcttatattttcatagagagtaagtgatgttttccttcaattttgcattgccagcatgtagttacttgaattattttgtcatctttttcggttggttattgtttggagggaaaaaaaaatgaattaaataaaaaaaaaaagatttatagccttcaggccaatgtaaaaagaagcctattagattgaataagacttatgctcaaaaaaaaaaaaaaattaaaaaaaaaataagcttaaaagcctataaaaaattagatagtaaagataaaattgcagagaaagtccaagcccgatcaaagccaacataaagtctgaattaaaatataaaggactgatagcacttgaaatcgtgccgagatagaacaataacgacaccatgctaagatagaccaaggatggcatcgtgccgagataggccaaggacagcattgtgccgagatagaccagggttggtaccatgccaagatagaccaaggacaacaccgtgccgagataaaccagggtcagcaccacaccaagaattttttttaaatactcttttttttatgttttattttacaattttacgactttagagtttttatttatagaaatacactttt

SEQ ID NO: 370868 - DNA, 648 bp, Cannabis indica
ttaaacagagcattaagtttagtaatgtcccagcccccattggggagtaaaagatcagccaccttagagtcctcgttaccatacgaaacaactggcttcggggaaaaatctttaccatgtggtatccaagggtccctccaaacgctagtatcttgaccatcaccaaccagtttacaggcacccttcctcagtaccacattcgctcggatcacatttttccaaaaccacgaatccgagctcttatatttatgactcaagagatccttcccttttagatattttgcttgcaaaatccgacaacaaagagaattgcacccgttcaacaagttccatccccatttcgccaggaacgccaagttcatctctcttgtcttcctaaatccaagacctccatgggacttcgggagacagagcttatcccaagctcttaagtgcacaccatggtttcctttgtcaaaaccccaccagaaatctctcaccatcccatcaattttgctaaccagacggttggataatttggtggtttgcattgcgtacatcggcattgaaagacctactgatttgatcagggtagcacgcccagccttagaaagggttttcgccttccagccttgtaacttagaagtgaggttctcaataatgaagtta

SEQ ID NO: 370869 - DNA, 600 bp, Cannabis indica
catagtatttatttgactctgaccctttttgctcaaggcatcagcaaccacattggctttaccagggtgataaaggatttcataatcataatccttcaccaactctaaccagcgtctttgtctcatattcaggtctttctgggtaaagaagtatttgagacttttatgatcagtgtatatctcacacttcttgccatataggtaatgccgccaaatctttagcgcaaataccaatgctatgagttttagatcgtgagtagggtacctttgctcgtactattttaactgccaagaagcataggctattacctttccagcttgcataagcacacagccgagaccctgtctcgaggcatcacaataaaccacaaacttttccttatctgaaggaagagttagtactggagcggtaatcaagtgatgctttaacttcataaaacttttctcacaccgatcagtccaaacaaactttaagttctttcgggtcagctccgtcaaggatacaacaatcttgaaaagccctcaacgaaccgacgataatacccagctaatcccagaaagcttctaactttagtagctgactttggtgttggccaatcc

SEQ ID NO: 370870 - DNA, 1552 bp, Cannabis indica
cctcgctatctgttatcttgactagtcacactatctatactctgtttgtatatcatataatatatgctaagttgtttttagtgttgtcattttctctttcatgcagcgaggttgaggcctcgtcatgcacgtgtgcacccacatggtttctcgtcaatacataagttagcagttcgtacgtttttgtctcgtagaaggctattcagccagccgagtcataaacataccctgggaattatatttccaacgagttgttccatgctaagtgtactttttcgtttgcgtgtttgagttcttcattcttcccagctcgacatgtgtcttcctctaatgtgcttaccgaatttcgggtatagcagtaatctaccaaactttttgattttcgagtagttgtcaattctgcctcgctatagcagtaataatctgccttaagcaaacttaaatatactttaatgattctatcactttgtatatttttaatttgctcgtatgaatagttatattatctatccattttttaggttcaagtacttttatcaaggtgtcgtgatgtctcgttttgtactttcctagctcgtgtgaaccgctagtattcaattttatacgcgagttataacttttgattttcctttcccgtcagataggttataaataaaaaattatagttgtttgatcccttctttgtcaaaaaggtttgatcaaggtgttataacgattcgacctctctctcgtcaaaaaggtttggtcagggagttataatgattcgactccacttttatcaaagaggtttagtcgagaacctttgaatttcaaaaaaaaaattcaaatgacaggtttgcattatacaatgtatttccagatgagttccgattaatcattcataaatacaccttaagtaattttaaagaacgaaactttgtaattacaaaataaaaatgattctctttattcataactgaagtttaaagttcagtaatgcaagttacatcatttatttattggtagtagggtagcaaatgttctacgttctagtagttctttattagcgagccatcgagtcgagccaatttataaactccaactccaagtactgcttcgatgacatatggaccctcccaattcgggttgaacactcttgcagatgcaactttcagaattgcaaagactcgtcttagcaccaagtctccaacattgaatagtcttttcttgacttttttgttgaactatctcgtaacttggtgctggtatgctgcgttggtgatttgcaactcagttcgtttttcctcaagtagatccaaggacaattttaaaagtttctggttttcttcttgattataaaactctcttctgtgagtcaatatgttcacttcaataggcagcattgcttccgagccaaatgctagcgagaaaggagtgtgtcccataggtgtcttctcagtagttctgtgggcccaaagtacctgaggtagctcatcaacccatctgcctttggcagagtctagcttcttcttgatagtatcctttagggttttattaacggcttccacttgtc

SEQ ID NO: 370871 - DNA, 700 bp, Cannabis indica
ataggtttacccaattgttaatgcctaattactattccagttcttgttgtgaatgacagattattcaaattaccctagctcttttcagatcttctaggttctagatctcctgctctctaattaatctctttattagaatttcctaaaatctgcattcagcaataatctaagaggtcacaaaagtcacgtaaataccgtcgttccacaaaaacttaggttatccaaattttagcattctcaattctcacttttcagattttgaattgagatcatagacatgcaaaaggtgatcaagctttaacatggaaataacacaaataaggataatacacaatcaaaatgaccatgaatggcaattaccattaactagggcaaactttaaccaatattcatcatcttccctaaatggaagattagctcatgttcaaatccataactgtaataccctagagttatgaaatggattagcaaaacccttattagataattatgaataatttaggaattatattattacatagttaaatttttgtgaattaatatgatttataacatggtaagaccccgttggtaagctaggggcattttggtaattatgacacgagaagggtaaaatgataaacttaatttaattacgtgcttaatgaaactatattattatatagtatgcttgtgttgtcttttcaggtgtgttctgaca

SEQ ID NO: 370872 - DNA, 926 bp, Cannabis indica
attttttagtgtcagatagtgggatgttgttgtttaagactggagtttgtgttccatgtagtgcggaacttagaaatgaaattcttgaagaggctcataccactccatactcgttgcatcctggcaccaccaagatgtaccaagatcttaaaccttacttctagtggagtgggatgaagaagagtgtagtagaattcgtatcgcaatgcctaacatgttagcagatcaaggctgaacattagagaccagcaggtttgttgcagcctttgacacttcctgaatggaactgggaagatatcatgatggactttgtggttggattacctagaactacgggtttatttgattcaatttgggttgtggtagatcgattcatgaagtctgcacattttctaccagttaagacaacctatacagtggatcagtatgcagatttgtacgtcaaggagatagtaagattacatggtgtaccaaagtctatccttttggatagagatccatagtttacctctaaattttggcagagtcctcagtaagctatgggtacctgactaaaatttagtacaactttccatcgtcagactgatggacagtccaaaaggacaatccagatactagaagatatgttacaaacctgtgttatggattttgaaggctcctgaagtaagtatctaccactaatagagttctcgtataataacagttatcaaagtacaatagggatggctccctatgaattattatatggtagaaagtgcagatctcgcattcactgggatgagacaggggagaagaaatacttaggtccagaatctgtacaacagactaatgaggcaatcgagaagattaaagccataatgcttgcctcttagaggaggcaaaaaagtcatgtagatccaaaatgcaggaatgtagagtttcaagta

SEQ ID NO: 370873 - DNA, 598 bp, Cannabis indica
attgtcgctggaaaaatcactgaaaaaatttcttgatgaagaaaccactttcttagtaatttttccggtgacaacttttctgacactggcagctactccggcgactttttcggcaccgacagcaaactttggaaatgtcatcgaaattggcatagtcgccgaaaaaattaccaagaaactagtttcttgatgaagaaaccaattacttgataaagaaaccagtttcttggtaatttttccggtgatttttttgacgaaaatgccaattctgacgacttttctagcgttggcagcaacttcgacgactttttcgacaccgactctactccggtaaatttttcggttccgacagcaaactccaggaaattcatcgaaattggcattgtcgctggaaaaattaccaagaaacaagtttcttggtaattttttatgatttttctagcgataatatcgattccgattactttttcagcgccgacaacaactccggtgactttctcagtgccgactgcaactctggcgactatgccgattctgataacttgtttcagttaactttattgtttagcattcaaatttcgttatgaatttcatagtg

SEQ ID NO: 370874 - DNA, 615 bp, Cannabis indica
aaactaatgtcctgacttcaatttttaaatccatgaaaggcagatctcaaaaagttgatctggagttcccaaacaatccaattcaagtataatccaaaaaaaaaaattacatcaatactatagtaaaatatttatcctggtgtattttcattattttccaaatttttaatactaaatttgttcatattaaatcataaagacagagttacgtacatggaaacattgttcagatttttaatgtttcacaacagttgcattacagttgcataaacattttgctaacgattatttcgtttgattgaaacctttgtctgatacaatttccgggcaaccacccagcaaccacccagaaacttccgtctgattgaaaccttcgtctgatgtaaccttcggccaaccacccagcaaccatcatctgattgaatccttcgtctgtgcaactaccacgcaaccacgcagcaaccaccctgtaaccattgtttgattgtgtaagtgatagtgtaagtggtattttggtaattaaaattaatataaaaaagtataaaatgttgtccgacactttatagtaacattttttgtaaataaagtatcaatttatatttgctatgtaataat

SEQ ID NO: 370875 - DNA, 674 bp, Cannabis indica
atcctgatccaaaggacaggtcaaaaaagagaaatatgtggcaaaagagatcacatataaatatcctagcccacagggcaggtcaaatatatacaagtggcccggggacaggccttaaaaaattgtctccccttcaaataaaaaactgctacctaaatatattgtcccaaggtagcagcaaatatatacataaaaagaaaaaaataataataataaaagaagtgggtggaatcttggttgtactgggttaatctcgaagcagctcagtcaatacgcggaggaaggcgaggtccgatacgcgcctctaccatggcatcaagcttcttcttcttctcccgaaatttggcaatcatttcctcaggtttggggtagaaggtaagcttgatattttggtcgttggtagaccaagccatgaagactccatcgtcgaagcgctttgggcaccggccgcaggaaacgggagaaaggagctcggctctttttgccttcttggtggcttgttccttgaagtccctgagctccttcagctccgcggctagagcggccctggactctaagtttgcttggtgagtttcctctaaagatctcaccttggcaaccatctcgtccaaggcttccctggcctcccggagctcccgcttggcctttgcagcagcctcactttccgccctcag

SEQ ID NO: 370876 - DNA, 933 bp, Cannabis indica
aggctcaacagatgagtaagaacattcaatactagggtacagccactataccacatacaccacgtacctcactgtacgagtgttggtagggtttgcttcgtaccctgagtaccactgagtgatataccacacacacccagtacttcccgtacttgtgctggtatcactgtaatgtactctcaaataacatacactataccaatgcactctatatcttactgtacaagtattggtagtgcaatgaacagtttaagcatgcatatacacataacatatacatacactaagatattgatatcacacattatacacacttcctaccttctttccagattcaagtgtgctggccgacctgaacggaaagtctcatgctagatggatgccctaatcacattatgaaatcgggtaagtcacatgattaaaaccttaatcccaggaaacccaaacccacaactctaggttctgttatacattctaggggttacacaaactctgtaaatagggaagcacccaaccaagacactaaaatggacaaaaattgagaaaacgaagcatttggggaccctgccaaaactgaatagccgattttagaggtctggtaataccagctagctagtttgcaccagttcaccccaaaattttcatttcttgctcaatcttccacgaaatgcaaccaaaccttccagagtacctaattagggtatacacaacatattccaaccaataattcacaaaaaaactcattgaaacaaattatgccattagagatcaaagctttgaactcaaatctcaaacttgcataaaacctaacccaaccaccaaaaccagctgctagaacttaaaaccaactcaaattaagcttagaattctaactacaactcaacctaaccctaacagccactaaatcacaaaatcacaaactcaacctaaact

SEQ ID NO: 370877 - DNA, 711 bp, Cannabis indica
agagtctggaagccacggttcaccaagaactgaaatagaagtgccattaccaattgaccaacaaaccccatgagtcaaaagttgacgagcttcaagaacactacgccaaacataacttgggttatttctaatttcagcagtgaaaaaagtaccacgaggataataccttgctttaaaaattcttgaaacaagagtttctggtttagtgagcaaatgccacccttgctttcccaaaagagccaagttaaaacttctcaaattctgaaaccccatgcctcctttagttttatgtttgcaaagctttttccatgacatccaatgaatacctgatggagaattgtttgatgattgccaccagtaacttggacatcaagcttttccatatctcgtgtgacctcttgcgggatcaaaaacacactcatggcatagcttgggagagcttgtgcaaccgttttgatcaaaatttctttccctgcccttgaaaggtaactttgtaccataacctaggagtctactcttcactttgttttcaaaaatcccaaggctgccgacttcttcttcccatagagctaggtaaacccaagtacaagcttccttcagtagccgtgaccatacccaagatggaattgattcgatctttcatagaattcaaaagtattagcactataaaagattgaaccatttagctagattcaccttctgaccagaagc

SEQ ID NO: 370878 - DNA, 635 bp, Cannabis indica
ttgtatttccctgtcatgcattccactaaagtagacagcagttttggtaggattaggatgcaaatctgaggataataagaatagcttcagtccttgtagcatgagataaacacttttgaaatcacccttactgaacaagagcacatcatctgcgaagcttaggtgatttagtttgatcccctcacatctttcatgaaaccgaaaatcttctttagaaccaattctttgcataattctagacaggtattccattcccagtacaaagaggagaggagacaagggatccccctggcgtaatcctctttttgactcaaagaatcgatgtagagtaccattaaacatcaatgagaactttggagttcttacacaattcatcactagctttacaaactgactagggaactgtacggcttccatcatttcttctataaagtcccaatccactgtatcgtatgccttcttaagatctagctttatcatgcaattttccctggcattctttcttccataatgtctgatgagatcttgacatatcattacattgtgagcaataagtcgtccttttacaaagccactttggttttgagcaataaggcttggtaagatgtcttcaatctagagcaaatcattttggt

SEQ ID NO: 370879 - DNA, 1132 bp, Cannabis indica
ttatttgttttaatgtgttgttgaagacataaaataactataatttgttttattttgttgctagttatgtgaagaaaaaaaatattttttttcataataaccaatccaaaataacccatccaatccgcatttttgcggattggattggatttgagatattgtacggattggattggatctaaaaaatgaaatccgcacttagtgcggatcagatgcactataagcaaaatagtgtggattggatttgatgaacacccctattaggaattataattatagaggttccaccccaattatgtactaataacttactcacatttctctgtatttacttgttagaatatcaagatcacaagaattagagtcaagtgactttctcaatatttctaaaaattacagataataattttgacggtataatagttctcttaaaagtatgaatttagcccttcaaaatagtgagatgagccactatttataaaattacaagacgaataaaatgatattaatttgcttaaatgtaatttacgcaaattagatgtaatttttaaaaattaattaaatattcaaacttttatttcaaaaggggtggaaccgtggaagtctaaattttgtaaaaagaaataaaattttattgtaaatattatagttaaatggtttaaatgttaaaaatgttataatgaatacttaaatgtaaacataaattatttataaatattaattgctaaaaagggtcatgttaaatatttaaactaaaattaattattttaggaaaattgttaattatgattaatttaattctaaaaaataaatttttacctattggtaacctataattataagtaaaaaaaaaatagaaaccatcatggttacaataaaaatgtaaccactaagtagtcacccacacacacatatatatatatatatatatcaatcacacctaaagttttttcattaggggtgagcaaaaaaatccaagaaattgaccaaaccgagtacacctaaccgtctgaaatatcgaaaaagccaacaccgaaaaaaactgcattcggttaaaactacctttaacacggtcgattttagtgttgatggcaaaccgaccgaacatatatattctatattatacatatat

SEQ ID NO: 370880 - DNA, 730 bp, Cannabis indica
caatgaaagaggagataaatcaagattttaaaaatacaaggataaaacattttgtatgaaagttattcatgggtgagcatgatgataaatattatgtgatttactattttatacgatagtaatatatatatatatttatgatatatatattgacgcggtttttcatcaactgatctaagaagattgtaaaaatatacaggactgcgatgaattaattttgactaacaaaatcgcaataaataaattagacaacagaaatttatagtagttcacctccatgtcacgatggtaatggggctatgtctatttttatttttattgattggatccgacacactaaagttatgttctcaagagtatgtgcataaaaatacaactaatggtttctaggtaaaatcttaatcgagacttatgaacacaagactcacgggagactcaacattcataaatctaatccaaattggtgattgtaagattcttgggaataataaactaataaagtataaaaaaagaaatgtgcatcaatggcgtttgaggtcttggtgtcgactgagtatggtggactcaataaagaagatgaaagaataagtatggtgtccttggccaccggtcaagtaggtcttaagagaaggttcagaggaaatgtaaaaaaagaaaggtcaaaaagagggtccctatttcagcttcttacttctccttatataggttgtagggtttgttagtgatcccc

SEQ ID NO: 370881 - DNA, 297 bp, Cannabis indica
tcacataagtataactaaagagcattcttattaggcacgagtggtgcccaatgcctttcttaggtggaaccttacgatcacatttttttatatatttttttaattaagatatttaaaaataattatcacttttttttaaaacgtgttagttaataataacagaacaaactaatgaattttctttaatgtcttaaaaatattaaaaatatatttaaaattcgggatgaaatctaaaattaagatatagatttgagaaatacaatagtgatgactacaagtgaaatacggtaatgacaa

SEQ ID NO: 370882 - DNA, 691 bp, Cannabis indica
tctctttgattaaagctcattatttaaaataatgtatttttaattaatcatttattttaatttatataatttaataatgaaaattacttaatttaagttcatctaaaaaattaatttttaactttaatttaattttcaaacaataatttcataaatccatttataaatgaatatgaaatttcgaaattatataaatagaataaaataaatttttgaaaaatatctaatttaagttgttctaaaataacaaaatttacaacttaaataatattttaaaatttaattaaatatcaaattaagtatcttgaactaatcaccttaattttaaaaattatctttatttaagttgatccaaaattaataaattttcaacttgaaaatattttaaagaatatctgaataactaatttttttagaagattctacttaattattaatttcaaaatattcaaatttaagttgatccaaaattagtttgaaaaactaatttttaacttaaatatattttctatgaaaattcaaataattaagtatccagaagaatctaattaattataacttcttttatttaattaaatatagaaaaatacatctagtttatcttgaatttgaatttcatcaaactaagtgtgtttttcttaaattaatttcaaaataatctgatgaaatattaatttcatatatttcgaaa

SEQ ID NO: 370883 - DNA, 691 bp, Cannabis indica
tgaaaaactttcaacaaaccaacgataatatccagctaaactacaaaaaactcttctaacttcagtagtcgatttttgtgttggccaatcccgaacagcttcgatcttggccagatcaaccatgattccatccttatccactatgtgccctaggaaagagacacgcgacaaccaaaatttacacttcttgaacttagcgtacaacttatgatctcgtaatcgttgcaatactgatatgagatgcagttcatgttcctcctctgacttagaataaaccaaaatgtcatcaataaacacgatcacacatctgtccaggtaatccttgaacacccaattcataaggtccataaatgctgctggggcattggtgtgtccaaatgacatcaccagaaactcataatgtccataccgattacgaaacgcagttttcgggatatcttcctctcgaattctcaattgatggtaacctgagcaaagattgatcttagaaaaaaatgcatttccgttcaattgatcaaataggtcatcaattcgggttagaggatacttgttcttgatagtaagcttgtttaattctcgatagtcaatacgcatccgcaatgacccgtctctcttctttacgaacaacactggagcaccccaaggggagtaacttggtctaatgaactccaagttaagtaactcctggagt

SEQ ID NO: 370884 - DNA, 1024 bp, Cannabis indica
taatgtgtgttatcaggtggtaacactagagtttaagctatgactagaataatgtcaaaatctgtatagaacttttcataggctgaataattatctactagccttctgggccactttgacattcagtctcactggtagagttagagactttagatacgattttacacttctccaaaaattactgctctgcccctaaagtaatcaccatcccaaatatagacttttcaacattaatgcaaatttagaaatatgagtcagtgcagcctaaagggtttcgaaatacatcacccttatagactaacatataggtcctccttgatcttaagatttacttgattgtcttccaatgttcccatcctggattaaactgaaacctacttataactcccattcaacagcaagtgtctggtctaatgcataccagagcatacataaaatctctcactgttaatgcttaaggaattctttcttggaattttttttttttttggaatagttgaaattatctggagccaaaagacttcctttagagttagccattaaaaaaaatactccagcatcttactaaagtaagttgtttgcaccaaagtaagtaaattactaggtataccacaagtcgtaggtttagatggtctcaaacctttgatactaggatcgagaagttttgttaagttcattgaatatttattatcaaaatttctcttcttttccttgtaatagaaaacttttagttgttcatgtgaatggtcttaaccgtagttctcttggctttgattcttagttccttagtaggactatctattgcttgtttaaactaacaatggaattttttaacatgagtgtcttccaagtcataacagggtggattccttgaaattttcccattacgaaaaaggtatcatgattttctgtctaggaacattagtggtattgactagggctgtacaaaaaaatttataaaccggctaaaccgaataacccgcccaaaccgaaccgaaaaaaccgataaaaattacaaaccgaa

SEQ ID NO: 370885 - DNA, 551 bp, Cannabis indica
ttcttcacagtcttacacactatgattgaggaataacttgctatgggtgggcatgcactcaatcaccaaggctcgaattttgatggtgaagaacactaagaatttcgaaagtagtagagagaaaagaagaagaagaagtctcaaaacactagttgtttgatagaatgaaaactaggtttaaagctatagaagcattagttggatagtgagaccttactcctctttttatactaattatcttagggttaggattgaattatttgaaataaaaaatgataaaaatagagcaaaaataggacctagtggccggcccctatgtgggtcaatcactagttagatttttgccatttttttcaattatttatctatttttcacaaataccactttttgcacttttaatcctataaataccaaaactatttatttaataattaaaattaatcatcaaataaaattgtcatttatattatttattaattagacttcataaagtctcttaattaacgaatcaagcctaaaattatatttcttcacaatcaagccatatctt

SEQ ID NO: 370886 - DNA, 1496 bp, Cannabis indica
atacatacaaaataactttatatataataaaatagaaactaaatatcatcttaaataaatgttatactatagacaacaaaaatcatataccatatagcaaaacatatgtacctacaataaaaaataaaatcatataatattattaaaataaattgtatataccatattaacaaaattatatacaaccataaaataattatactatacttacaaaattatatatcacctttatatataataaaataaaaactaaacatgcatgatctaaaataaaatgacatacgtactatacaatacaatttatacatcatataataaaaaatatataccttataatagaaatatatatatatatataataacaactgttatactcgaaattcggctacttatttcattggaagacacatgtcaaattaaagagaatatatggatcaatgcgtgtaacgataattacatttaatggaataactcattaaatttggaggtgacagagtatattttcaacttgcagactataaggtcttatgcgagataaagatatacaatctgttgccttgtgtaataacgagaaaccatacgatattggatgcacaaggcgagacctcaacctcattacgtatgagtagacgtaagtgagatataataactatgacaagacttaacgtataatatacaatatacaaactaagtataacagtcgggtgaacccaatcagctaataagcgaggcgcttacctcgatataggaaggcacgctcctgttactttcaccaatcaacttctgacatctttcagtgagatttataatcttgacgagtcagaagctgacattcaaattatgttaactgctgaagtactctttgatattaagaaattcgattgtcaaaatgaagcgttgtaccttcaagcgaagaagcgacgaggcgtacattatcaacctcagagagatagggaaaaaagcttcagctcgctatcaaagtcattagtactgagttcctgtcgagacatcccaggacgttgcgatttaaaacgtgtttaatacacgattatcttgacccagtaaaagcggattaatcacagctatgtgatattgaaataataaccgcatttatattacgtgatatgtaatcaaacctcacaatttcaggagataattattgtaaaaattacagtcaactctgtacttaactgcctaagtatgtaattataaatagagacaagttataaggaacgaaaaattcataagagtaaagagaacaatatcagaaatttaataagattgactcgtggaatatagagaattttaactacaaaaccacgtaaaaaaaccttcatgttatcattttcttttgagaaatgctaaagggcaccagtggtgcctaacaccctcctatgtgtcaatattactattgatccaactaagtatcgggtcacatataatttaatataataactttatggaagatcgctagccaatcgcaacgcgacatatcg

SEQ ID NO: 370887 - DNA, 642 bp, Cannabis indica
gaacagtaggattatgaggatcggattcagtgtcacattcagtgaggtaggctcttggattcgggaaagttggtttgggtgtaacccaagatttgtcaaacctatagtgacaaactgctgctgaatgtcctgatttcatgcaaacttgacaaatgagccttgagtttgatgatgaaccacggccagatcctctgccttgtgttcttggcaaattatcataaggaacaccacgtccatgagtcatggggggtctgtaatagccacttcttgatgcaccagtagcaagatttgcttgcatcttgagagtaacatccgaaactgtgttatgatgatcgagcctactttcatgggccattaacaaagcctgaacttcctcaagagtcaattcatcacttcttgatgttattcctgaaaccacaggatcatactcgggacctaatccatttaacaattggaggtataatatcttgagtttcaacattagaaccagctatagaaatggagtcaagatagcacctgaattttatcgatgtagtccaaaattgataaagatcctttgcgtatcgttggagaattggcctttgagttgagaaggcgagcacgagagtgggctggtgaatttctgttccgaatgctttccat

SEQ ID NO: 370888 - DNA, 478 bp, Cannabis indica
gggagccatgcggtatggagccctagagattggtgctgtgcctggcgctaactcaatcacaaattctatctctctatctgggggtagccctggtaggtcttccgaaaaaacttcttggaattcacatactatgtggacattctctggcttgaggttggtttctcttgacttgtctactatgctggccaagtatgcttgacatcccgcacgtatcatcctttgtgccttcagggctataactagcggtaagcttgacttgactttgattccttcacatatgaatgcctctccagattcaggggtgagagtcactgtcctctttcggcagtctattgttgctccatgtcatgatagccaatccatacctaagataagatcattatccctcatctccagctctatttgatctccactaagttccttgtctgcaatccttattggcgcatcccgcacgcctctagatgatatcataacctcg

SEQ ID NO: 370889 - DNA, 523 bp, Cannabis indica
agaccccaccatcaagaccgtgggccggagtatcagccctccgaggccgcttgggctcctcctgggcaatcattttgcctttacgtttgcgaatcagagcaatttcttgctcttcttcaccttcttcagcttcctcaggaagagcccggagccctcctgcaccttcttcaacttcctcagaaaagccccattgcttttcttgaccttctcccggcagcacctcctcgtcatccactaaatcaatagtgtctggaggagcactggaagaaatctttaaagcgggggccatcggggaagaagtaaagggaggaggagcctcaggagtgtgaaccccggcaagttcggccaaaatggcgtccatagaagcacctgctacaacaaaagaaagcaagtgttagaacatccgtgggaaaccaccaacacaagatatggcaagcaagctagtcctaccctgactctctaattcggccctagcaaagttccgaattttgatgctggcagcatcatctccgagatagctgtc

SEQ ID NO: 370890 - DNA, 545 bp, Cannabis indica
atcgtgtttgaaggctgggcatgacacggtttcaaaaaaattttgtcccctatacacgtgcactaatggtgtcttgtgcgaagttctgcgtgcgtgcgtgcaccaagcttcaacacctatggcatccaattttcaaacctccataactttctcaatttttatcgaaatccagttctgtgaaaaccaaaatttcttaatttttcacaaggaatctaaataaaatattttcagaacaaaaataaaattatttcatcgagaaatttcgtaaatcatatacattcatcaaagaacacataaaccaacatgaacacatccaaatcaacgcacaaacaatattcgttgttttaaatccatatttcatgaaagtaaatcattaacctggctctgaggccatttgttgggaatattttaccagaatctagatttactaacaagtatgttgattaacatcataaatatgaattctctaaaataatgaaataaacacataagggtttaagaaaactttacattgattgcagccaaatataatgactccttacgtt

SEQ ID NO: 370891 - DNA, 507 bp, Cannabis indica
ttggaaactacatctgtcttagtcaggaagtaacactagtagttaataaattgttagtacaataacaaaaaaaatgtatagaactttctatagactaaataagtatctttcctacaatttttagcattcagtctcactggtagagttagagattcctgatcagtttttacacttctccaaaatcactactccacccctagagtaatcaccatcacatcagtaaactttcaagcatcaacacaagtctagatacctgatttggtgtggtctaggagtattaaataccacccttatcaattaacataaagttccccttcttgaccttaagatttacttgattgtcttccaatgttcctttcctggattaatatgatacaaactcattgctcccactcaacaacaggtgtcttgtctaatgcaaagcatatctaatacatctcactgttgatcctaaggaattcttttgttggcttttatcttttttggaattgttgaaatttttcctta

SEQ ID NO: 370892 - DNA, 543 bp, Cannabis indica
tctaataatcatcctaacatatatagataaaaatacatgaatattatgtgtgagcagatacaattgttaaaaatatgagttcaaaaatttgtgttgtcattatattatattattaattttatacaatgatttagcttacgaaaatttaaaactattgtaaaaaccgcgcgaagcgcggattagttctctagtgtctatataattgcttttattatataataaacatacttatatattgaattgttaatttatttatttgtttcttttactgtatttctgggagataatactggacactattttatgttaattataataattttggattcctcacatttagggtggtgttcacggattggtttggtcaggatttttaattttttcaaaccaaatcactattacgattttttaaaaattcaaaaccaaaccagaccaataaaatgatcaaaccaaatcaaaccactcaaaaatagattagtttggtttgaaccattgtatttcgtagttgttctaatttttttttacaataattattcatttttt

SEQ ID NO: 370893 - DNA, 500 bp, Cannabis indica
aaccagtggtacatttaattatcacttttagtcaaacactttgtcaggggaagagattattctaagataacctttatgaaatatgctcacagcatgtttctaatattccattattcttctcaggttacccacctttcaagaataaagaatcacactatttttttgttaatctccatggttctcaataaccatctttaattcttaacatgattgtcaaagatatcaaccttggaatttcacaagattagactattccttcgtatgaattccatatcctcatttattgtataaattctctatactaatagacagcatatcaactcggtatgtccaattgttactattcagctgaaatcataagacccaacaatacataattcataattatgtctttccattccttatatgagacctcttaagttgacctactgacctagcttaataacaatttaaaagttgtgtaaatctttacttgttaacacattctttcctcttagaaa

SEQ ID NO: 370894 - DNA, 904 bp, Cannabis indica
gtcttatagtaaaagtatataccttacgttataataaccacaagatctaaaatcaacggtaaaaaacctacaggtagtaaacttttgctcggtcctactataatattaccctatatatatctttattatattaaactagttagtatggtatatataatatatgataaataactttaacatgataaaaaaaatataaattattatggacataaacatgttccatacttctcctcacaaaggcaagaggagttccaagttcgattctttcttcctaaatataaaaaaatatatatattttaataataaaaaaatatgtatgttaagtaatattttaatttaattattttattaatttaatataaatatttgtagttgcattggatttttctttttgaaattgtagttttttcggttaatttataattaacagataaaaagtagggatgaaattttctctgtcattagttcgtctatatagggggagagtttgatttgacgaatgagatgagaaagaattaatttctataagaaataatttttataagcaaaatagtaattttgtataagttattattttaaataattatatcatttatgaattgaataactaaaatgatatttaattatttagttttatttgataaaattatattaactagttaaatataatattattcttaaataatatttaaagagagaaaaaaaaaagggaaagaaacaggaaaattccaaaaagggtaaaatatacaaaatactgtggccggcccaatcaacatttgtacagcccacattgaatatattacaaaataccacttgaccttaccttcagccgcacgtcacaacggagaggatgaaggaacctccatcgatgcagtcggctacgcaaccagaatgaaaccagatc

SEQ ID NO: 370895 - DNA, 555 bp, Cannabis indica
gttcctcgcaggaaactatcaaaaattcataactctttcaaatcaaatccaatttaaaccaaaccttccagacctgttctaaataccccaaagaacaataccaaagcatcaaaacagcccagaacacatagatactaaaaatgccattaaagctccaagctttgagttcaaaactcaaacttggttaaatctaactaacatgcatccaaatcagttcaaacctacttaaacatgcatattataacctctgaaaactacaacaaacatcaacaaaacaacaacaacagatttcaacaatttctctttgaaaaccatagttttgagtaaaagttccaagcttgaatcaaagcaacaatcatgcatcataacagctctaacctactcaaataatcaagattaagctacagaaaacaacatcaaaacacagcagcaactaagaatcaaactaagcatgcaaaccattttctttccataaaattcaagaaactaaaagagcaagctacaagggtcttaccaagcacttgaagaacacttagattgaatgaaaaagagctt

SEQ ID NO: 370896 - DNA, 681 bp, Cannabis indica
ttaagttgttctagtagttttttgatagtttcaatgtaagttgctatgtggattttaattgcgatttaagttgctcaattagttactatgagaatttttatgtggaattctgtaaaaatttatgtggaattctgtaaaaatgtaaaaaaaaagtataaaaataaaaaatcgctatatttaatctgtgagttcggtaatatgtaatttttatatatatgcagtatacataaataacatagtaataaaatatataaaaatatttattttaataaaaaaatacaataaaatttaatatttactaataaataaatatattttcttaatgaataattattttatttttatgtgtaattaacattaaatatatataattaaaaaaaattattttaatttttaaaataatatataaatttcttgtattcaatcaaataactaaacaatgtaattcaataaacggaatatgattacatattaccttatacaactaaatacagtttacacatttctctacaattatattttgtttcataatatttcttataattaaattattttaacactctcgtaccaaacgccccttctataaaacatgaattctattgttcattagtaatagttttattttttgtctatttttagcccttttcaaaggttgtactatcttgtataattttatattat

SEQ ID NO: 370897 - DNA, 597 bp, Cannabis indica
aataagaaactgtactttaaagtagtctacccgacctgagtacttttgtttctgaagcctttgcgcgtagtccgcccaaaaggacattcacttataagcgaatgttcaatagtactttaatgtggtctacccgacctgagtactttgaaatggtctatttgacctgagtactttgaagtggtctacccgaccatagtactcattggtagtatttacttaaatgttccccattccagtaccgtggtactaaaatcagttgctttttttctttgtacttacccagtttgtatgcttaggagtcgagaactttgaccaccttatagggtccttcccatttgggtcctagtacgcctaacgtgctatctttggtgtttaggaatacccttcttaggaccatatctccgacaaagaatttctgagctttcacttgtttgttgaaataccgagctactttttgttgatgagctaccaactttaagtttgcagttgctcgttttcttcaatttcatcaagtgattgtgcaaggagtatgtgattggacctttgatcgtacgtcaaccttctgtgggatggtagttcgagtttgacgagcagcat

SEQ ID NO: 370898 - DNA, 221 bp, Cannabis indica
tcttgcacaccaggcgcagtttcagtaacaggagctgtcccaccattcaccatgcttcccgtctgtccaagattgacaacgggtggaacccttgaactccctgggtcctgcaatgtcggatccagcgtctgtgaatttgctgggtcagacaggcctctacgagtttgcaccatcgtgttgtatgtcgaaaagagcgatctgcgattctcctctcaatgaaa

SEQ ID NO: 370899 - DNA, 602 bp, Cannabis indica
gggtggttcctccaatatggggtcctcctgagatcatggccactctcccattgggtctgggtggcagaccggggatgtgctgggcatctccggcgggagcaactggagccaatactcctgctgcaccccctggtgctccctgcggcacaacccctgtcgcctgacccggattaaggtgaggcagccgattcttgatccactcatagaggtgccccaatcggatcaggttttcaatctcatccttgagatttttgcattcattggtgctgtgcccaatgtcgttgtggtactcgcatcttttgttgggatccctccgggagctgtctttgtacaagggaggtggtctccggtagtgcgtattttgcctagtagcaaagtacacacgctcttgggagtccgtcagctccgtgtactgggtgtactgtggagtgtaccccctcttttggcgtttctcctccgtccgggtgctgcctttggaggatcgtttactcctcgagccctgggaaggacctgccaggctggcggttggagcagagtgcgagggagcttgtccatttatccctgagggatttccaaaatgggacgatgcgagggccaaggcc

SEQ ID NO: 370900 - DNA, 502 bp, Cannabis indica
gtgtaaagaccgcttaaactttaatttaaaaatttgcagataattagggtttaattatgaaacttgcttattagttttgaattattaatttatgaagagttatttgaatttagaatgtattttatatgtcttatatgggatttcatattattttgcatgttttgtgtccgacaatattggaacacgatgtttggctattagaatcacatcctagtatttttagtatagcggggtaatatagctagacattggaaatgtcgggaatagtcaaaaatctagaagtgaccaaaatacccctaagtggtcttttatgatttttagtgtggaaagggtacaatggttatttttctaatttatgatttgtctttttgtgggtttagattaagtttatataatctgaacattaagttgtttttaaagtaataaaacctagttcattgatttttatttttaaaagttaagaaaattcaagaaaagcatctttctctctctctctctctct

SEQ ID NO: 370901 - DNA, 712 bp, Cannabis indica
aaggatcacatccatctgaaggactttcgggctcagatcttgattatactctgctacagacatgaatcaagggttagagatctgagtgggaggagacatataattccgctgccatcactgtaaggtttcttaacttttatgtgtttttatttatcgttttagaagttcatatttaggttcttaacttgtgagtagatctaagatcctggtaaaattaattccaacagatatgtaggaaaccctaagtttagaaactctgcgattttcctttgcaacgattcatgcgacttcatcattcataatgcttgctttttgaactgcataatgcttgtctttcatctggcttattctaagcttcatgaaagtttttgccctaactcacaaaatttttgaacttttgagttttagcttttcgtcgagtatttttattctttaatctgttaagtactcctggtcgacatatttgcctgtttaatgttcgatatcccgaacaaacactcatctcgcgtgttgtcttttgtagatgaacccaggtgagttttggggaagcgaacaccaaattgaccaggacctgcttcaacttttgcacgaggatcatcctcgtctttgctctagtccgccctcttcaagcgatggacatttttgatttaactttctcgttcaaaccaaagaataatggctcgtaattaaacaaacaaatgcgtaaagccaa

SEQ ID NO: 370902 - DNA, 610 bp, Cannabis indica
caagaccttttttgttgatgaaagactttatttctatagttccaaatagcccaaacaaaacaaaacattaagtctatctgatgggaatcaaatgtttcaaaagcagcaacaaaaaaagtatctatagaactaggcaaattattagtatagaagtcaatgaaagttgaatttttccaggctttcctagcatatttgcactccaagatggcatgtttcactgactccgtggtttgatgacagattgggcaaacaggagatggaatgatatgtcgaaaaaatagagatgaggcaacagggatggagtgagatgagactctccaaattaaatgtttgactttaggtggaacattggaagaccagaccttagtccaaaatcgttcgctattttgaaaagaggaacccgaagctatgctacgattggttaaggctaggtgataagcactcttgacactcaaaattcctgaagaatcctgtccccagatgagtttatcagaaccactaatgccagagattggaacatggaggatattgggcaaccatagaggaatcaaaaatgttgattgagtttggctaagtcccagccacctgagggagaaagaagaagaaagag

SEQ ID NO: 370903 - DNA, 1288 bp, Cannabis indica
  modified_base (1264)..(1264): a, c, t, g, unknown or other
tcatcccttaaatcgtgggatctagttatatattataaaatgtaaacgcggtgcatgattttgaaaatcatacagctgggattttccctcttttactgggtcagaaataacgtgtattcaacacgtctttaattgctgattctgagatgtctcgacaaaaacttgattgtagtgatcccaatggtgagctgaaaccattcttctatccgagatcgacaacatacgacgatcgcgaatataaggaaatctactgacttcccagggttgcgagtctcgcttttgctagttggatgaaactataggaagtttccttgtagcgagaaggtcgtctcgcattcttatacttccaagtcggttcgacttttatactttgtctgcttatttgtgagttgaggtatgtgttattcttctatggtgcctcgctcttttttagccacatatggttttttgttaatactctaaatactagttcgtacattgattcctcacctaagactttacagttagcgggttgcaaatatactctagtagttacataattaatgagttactccataaaagatacggcaccgattcacattccctttatcttgacacgtgtcctttagtcgaatttcgggtttaacgataattatagattaatttataaaagcacagacacgtggcgtccctggggttgagggtattacaacatcgtatcagagcgaccgaggtttaaagattttgaagactggtttgataagtacattggcagtgaagactcgtttgactcatggtatagtaagtgttaattattagttgattgttagaatatttttttaattcgcttgaattacctatttatttgaaaatgtttaagctgttagaaaagcacgatatgttataaataataagtgttatgtataagtatgtatggaaatgcttattagcattgattatggtttaggagatactaaactatggaaagttatggattaaggtgtattagatctggcccccgagggaatctagtaggggtaatcgcgagcttttctagctcggggctagcggtgagggtgcagatccttcattgccataaatctagaaagacatatatgctgcgatgcaagagaccatccgacagcaaggtgtatagattagagaactaaaggagctacgagctcagcctgctcccaaaatcccaaactcctaaactcctctagcatcgttgtaaaggggcccacgacggatgcgagaaaagtcatttagagccgttgtcgaagcngttcaggaagcagaatctgtaagt

SEQ ID NO: 370904 - DNA, 472 bp, Cannabis indica
acatccgaaactagcatactttaccaatgttttggaaagaacataacacttatccaaggtgtaagtatactttatcactgattatcacatcagtgccaatccagtgcactgatgaatcagggacattatcttttgaagcatataatcacaattatattccactgtgttgacatcactgtaattgtgaataactatatgttttggacttaatagattttgtacacattaaaccataaacatgaaaacatacatgcgaacataaatgacttctatacttttattgataacaaatcagattagattgaaatgagttttatttagggcataaaatcataagagacaatccctacaattatgggatagagcaggctgcattaaaatcctataaatagtgatctagcttcactggtaaagggaaggggggggggggggaggaattgttttagagagagatctaagagaattactcaga

SEQ ID NO: 370905 - DNA, 653 bp, Cannabis indica
ttaaatacaatttaaataactcgttctaattaaatacaggtttgatagaaatattcaagctcactgactacttagtcttatgcgagacaagaataataactattaaactagaattgacgagacaaatgtccgcctcgggataaacatatagtacaaaaagtatactagacaagatatccaaaggtattgtgagttgttgacttacgtacacgagcatggtgaaaataactacactcaattgtctcgcatttttatgcaacgaaatcttgcataatcaatatgatagaaaattacagcaagatgaagcgtttctatacttagcatttcttcttattaagatggacaaggaggataactcgtattcgacgagatgtatgttgggttttatgccctaaataaaactctatttcaatgtaatctttaacttttaaatatcaataaagaaacagaagtatttttcatcactttgtgtgtcctttggttcatgttatcatttatatgtttatttgatttataaattcatccaaatccatatcacatttatattcttgtttattatgtcatcagcacagtggaaagtaaatcaagattatgtgattaaatatatattcctagatttatcaatacaaagggtttaactgatatgacaatct

SEQ ID NO: 370906 - DNA, 541 bp, Cannabis indica
ggtttgactctttaccttacttttaacatgataatataatagtataaatttaaaaaacccctacgctaaaagagatcatgtatatattttgaaaaaacataaatattaaaattctttaaagtttatccagataaaatccacttataattatttagttaaaaatatttaagttgtagtcacacttgttattattacatccttttataccttcataagtaaatttaaaacataaacctaaaactaaaaaatgaccaaaaatgatatttactatattattgtaaaattgtacgtattatccgagtcctttctataagaaacataatacttattaaattggaatgatttaccttgtagtggtttagataaggctaccttcatttgtttgtctgaggagaaaatgattgctccaaaaccaatcacattttgaggggttgatatcactgcgtccacatatagtttatagctaagaacttctgtctctgcattactttgctcactagtacacccagttgaaactccttttttagttttatttctttct

SEQ ID NO: 370907 - DNA, 1427 bp, Cannabis indica
aagattgagtttgtttgtgattgtgttagtgaaacttaagattttgttagattgtgtttgtgaaagtgttagattttgttaaattatctcggatctatgaaaattttctgcttgaggaagaagaatacccgatgggtccgatacatgtccgatttgggttcgatggtacccaaaaattcggttttagaaataatcggaccgatgggtccgatgctccttaaattttgtttggaaaggatgcgtctgatggggtccaatgctcccccaaattcttttcgaacgggtcggaccgatggggtccgatggtccccccgatggggtccgatagtcttcaaaaaaatttgtttctaacggtcggaccgatggggtccgatagtctttaaaaaaatcgtttctaacggtctgaccgatgggtccgatgctcgaaccgattggggtctgatgctcccacttttttagttttttacattttaaatttattattttatttttttattgtttttattttttattaattattaattatggttttattattaattattaattacgtttttttagtaattattcattatggttttgtgaattactttaatttttattgttttattaataattgttaattatttttttattattaattattaattattatattattttttattattttattaattattttttattgttatattattaattattaattattgttttatgaattattaattatggtttttttattaattactaattattgtttaattattaattatgaattattgttttattttttattgttttcttaattagtggttatggttttattaataattattgttttattttttattgatttattaattattactttattttttttattgtcttattaataattgttaattattttttattattaattattaattattatattattttttattgttttattattaattattaattattgttttaatttttattgttttataaataattaattatggttttttattaattattaattattgtttaattattaattatgaattattgttttattttttattattttattaattagtggttatggttttattaataattattgttttattttttatttgatttattaattattgttttattaataattgatttatttttgtttgatttaattcttattttttttttctaaggacctccacatctaataattccagtgacggaccattgacacaggccgtgtcacatggcgcagcggtagttattactacccgaaaattaaggctaaattgaagaattcaacctatgggatagggtgaggggaatcccctttcaaatagttttttcgagagagagtcctatacaattttctaggagcattgattcatcagttgatgctgcacaaaatcaaa

SEQ ID NO: 370908 - DNA, 895 bp, Cannabis indica
gaattatttacacaatacacttaaaaaatagattttcttttattatttttacagatttttttatacatacaaattttcacttgttattttttagagaaaaatattaccttcccattataagagcaacgtcaaaataaacaaaaaaaacaacactcttagttaaaaaaaaacatttgtagaaatgtaaaattttgttatttttatatatttatgagctaaaagttctatatttatatattaaaatatttgtttaatgaaatatatttctatgatatgcaagccctaacaattaattaattggtgcaaatagtcaacaaatttaaaccaattaactacgtacgtacttattttactttttgcatattaattgtatagcatatatatatatatatatgtatatatacatatgttcatgctgcatgtgcatgtgcatgtgcatgtgcatattcttacacgattatcgaattttcaatctaaattaaatcatcaattaatgaaatatatatataatatattttacattaattaaaaatttattatctcaattatattacttttatcatatttaagctaacgcataatatactctatatatattgccatgccacaaaaactaatttcactttacaatttttgtattaacttgaactcctaaattattattatttttatttatatatgatacatataattataaaataaaaactgtaccacatacattatttatattttttaccatactaacaaattttaataaaataaaaataaaattttcaattttactaaaatataaatttcaaagtcaaaatttttcaaatttttcaattttcaattttcattcatcacatatcatgatatatatatatatatatatatatatatatataatcatgag

SEQ ID NO: 370909 - DNA, 505 bp, Cannabis indica
ttgcactgctaatagaattttgagtcttgctgaagggttagttagtgaggggaagcttgggggaattagagtaggcaatgtgagtgtagaagaggggaagaagaatacaactgaaatgatgcttattggtagttttatacttgttttgcctgtcatacaatgggatgatcacatcattggtaatggtaagaattcctctacattcaaaacaatattcctttcccataacatcttccttatgtatataatttagggtgtacgtcggtcggtttacgttagattttatttaacctaatgtaaagattttatttaacccaatgaaaagatagagttacaaaaatttaagtgcaactcgcccaattaagaaaaaagaaaattttaacccgcccaaataaattcgtcggtttagtcaggttaacccgtccaaaccgagcattaatattttttttttcacattcaattgttatattttagttattgttataatgagataaatataaagatt

SEQ ID NO: 370910 - DNA, 585 bp, Cannabis indica
ccatcgtcaggtatctcctcactcgctcatcttctcttaataatgctaaatctttgatagtttatacaagataatatgactttgtttttggaaacaggggtgtatgttccttcgcaaaagtcgcgtcctttagcaccctccgaagtctatttagttgatgagcgtcatactcctgccaatcttaatatcgggtccataggagatgatgtaattgtagctttagtaggtaaaccttctaacgctttgggtggtaactctcacaggaatgatgtagcagttccaccaaactttgaaccacgacccttccattgttcaggaactaatggtgacagcgatgctaccacgaacttgattagtagtatgtatatatatatatattttgcttatggtaatctattcgtagttttcaccatatatatatttttacatttattattatttttcattacatatccctttttttttctaatttcaaggtcactacagatacccacttgtcccttcttctagtagcagcacaattcaaagtactatcacacatgaattagctcccacaactgcacctttaaaggtatggaagtcttt

SEQ ID NO: 370911 - DNA, 514 bp, Cannabis indica
aaattcaagaaataaataattaagtataaaggaaacttaattattaattctagtttaatactaggaaaatatacttaacttagattgtaccaaaaaaataattattaaacaattaatttttcaatctaaaatgttttcctattttgatattagaaaaaataactagtactagaaataacatctagaatatatttcaatttaactaagtgtcttttctaaaatttaaaaaaaaaaataaagttgttatagaaaaaatctaaaatatccaacttaaatatttttcaaataaaattaattaaatatcgaaattatgttgtaaccacctaattaaaaaaaaaaataatttcatttaaagttagattttaaaaaaataaacttaaaaaataatcttaagaatcttcaataaccaattcctagaattcctcaacttaattttgaatttaaaagatattgaaatttaagttgaaaaaaattagttagaaatcactaattttacaacttaaataggaatatt

SEQ ID NO: 370912 - DNA, 578 bp, Cannabis indica
aaaaaaaaacattaaatccaattttatgggccttgtaaagcccaaaccgtttcaaaccgtttataaccgcggtcggttacggtcggttttttgatgttaacggtcggttacggttttgtgaacaatcaaaccgtaaccgcctggtcggtttggcagcaggtaaaaaccgaccgtaaccgaccgaatttcacccctaatcattgtaccataaccgaataaatttttagatgtataaacattaaatctaaataataaaatacaagataagattatatacctcttgatgaatatcagtgtatccttgaaaacgtctcgtatgttgtatcctttaataaagatgatgaggatgatgcaaataaactcacaccagtgtcttccaaattgttccaccacacataagaaatagtatgggctattaggataaagtgtataatgtgttcttgttgaattctcaacacatgagcaagaacaattcgagagaaaaaactattttctttttctcctctaggtatttcgaaaatagcttatgaaaatcatcttttgatttctcaaattaagcttctatttatagtagttaa

SEQ ID NO: 370913 - DNA, 519 bp, Cannabis indica
tctctctctctgagtcttattgctccaccccaaagcctcaaaatccatgagctgaaccaccctcaaaactcccaaaattcctacccatcgctagagttcacaactcgctcattttttgcatttttttaagtttttgacgatatcgcaaaatacttctaaatttcgctatatcgcgaaatatcactaaatgtctttaattcacaacatcactaaaatcattgttgaatgtcgtgaaatcacactcaagttttcacaatgattagcgatgtgatgtgcatcttttagtctcatatcaaaaatacatcgctaaacattgctaaatacacaaaacaaacctcaaatttagtttatcattacaaatatattgctaaatatcgcaaaaaactagaaaactagaagaaaaaatgcaaaaaaacaagagagtctgtgagagaggacaacggtgttcaacaacaggggttctgggtcggagagtgagagagttagagagagaatttttttttttgaaatgtaagggta

SEQ ID NO: 370914 - DNA, 745 bp, Cannabis indica
gttaattttgaaattttaattattctattttatttatttattttaactataagatcagatattacttattttattattaaaatttgaaatgaccttattttgatattaaaattttaataaaacttagaaataatctagttaaaatctcaaattttctaaccatatcagatttttcaaaatttgttactattgaaatatatttttattaaattaaattataagattaaataaatgttagttttgaaattttattttattagatatttattaaaaaattgattttatgtaaaataacatgtaaattttgaagtttgttaatttttggtttgaatagaaattttagggtttgtaaccataaaatttttaaacttagatattttttttatttaattattagatgaaattgataatatcttaaccatctaaaaatcttaatttttcaaattatttattttgtaaaatttatttattaaattataagattagaaatataatatcagaaatatctaaatttcaaattaagatattatataatttaaattattcaaataaattgaaaaatttgaaaatttattagatatttaattttcagttagaattttagatatttaggagattcattagattttaatttttttttaaatataatctagcaacctaaattttaagttctagttgagatttttttaatatttcaattttaaaatagaaatatcttaacctactttctagatatttgttacat

SEQ ID NO: 370915 - DNA, 489 bp, Cannabis indica
catttttttttgattaaaaaaaaaactagtttcttaataaaggatctttgttgagttttgctgtgaccaatcgtcgctaggtggataaaaaactttaaaaatcatatatttacttctatataataggggtgttcgcggtgggtggtgcggtttcgtaccaattttttcaaaccaactcgcaaatgcgattttttcaattttccaaactgcactcgcaccgcgaaacttaaaaactgtaaaaaccgtaccgcaaaaaatagtgcggtgcgggtttctgcggtttggactatcaccaaataattaaactatcacaaatacaacaaaacttgagcaacgcctgtcaaaaataccgtaaggcttgaaaataaatatgaaaaaaagtttcaagtttcaataatacaataatacaataattagtgagctttgggctggaccttcacatattagacctaaataaatataaaaattagtgtttttataatatgcggt

SEQ ID NO: 370916 - DNA, 845 bp, Cannabis indica
ccatataatatagtttaactcaaaaggtcaatttagtcaatttaagcattccgattacgtttcctaataaagtaaacaagataaatcacaactattctatttctaaaaatttttagtaaacaacatattacaaatattgattccgattatttttcatttattccgttacatttctccattaatttattccgattctgattactgtatagtaaacgtgcctaaaatgtaaccaaacgaaggaatggaataaaaattgtttcctttccatttcattattacctccaaccaaacgccaccttagtgttttcttttctttgagtgtagcgtaatggtattttacaatcagttaatagcttaatagtttcaaggtcctaagttcaaacccatgacctcttccttttcctacccctctctcaccactaaactagccttagtggcttaaacctaatgttttcaaatcagcaatacaacttcaaaggaaatttttgtaaaatttgttacagttatgtttaagattttttttgggaagaatcattagcctaatattttatatttaatattttatattttgtaacaaaaacacagctagctacagacatttttctagcattcctagaatttgccagctaatattttctcccatttaattttaataataaaagtaaataatatgtcggcattaatattattgtcattacaattgaaaatcttatataactaaatagaatatttaaggatacttgggtcgaatatacattttctatttattttagtattaacacattctgtacaaaataagagatttaaaagaatttaacatattaaaaatagaatttaaatagcct

SEQ ID NO: 370917 - DNA, 984 bp, Cannabis indica
aacccagcaatgtttcaacaagttctgtctctactagagttgataactcaggggcctctagctcaaaaaagaaaagacaattttaaggaatcgtcaacggataaaaagaaatagaagaagcacgataagtacgtgccagtgtataatatttataccgagcttaatgaaactcgggaaaatatttacctcctgcatgaccataaggttgccttcaacaagcccaagcccatgaggcatgcaaggcacaaaagagatcctaccaggtattacaaacaccataaggacattgggcacacaaccgacgaatgtcgttagttgaaagatgagatagaaagtctcatcgctcggggccacttcaagcagtatgtgaagagacagggcaatggacacaaccagcccagtctgcccaacaacgtaaacaacaaggggttacaacctcctcccgttgaaggagaggacatcctagatattttgagagggtcgcatatcgcagggtagagcaacaacacccaaaagagatatgtgaaagaaaataaaaaacgatcagtcgacatttgccctggaacctttcaagaaggtaaaaattggagaacctccaaacatattcacggagcaagatgagaaaaatgtgagatatcctcacgtcgatccattggtgattactattcagctcgccagtaaaaggataaagagggtgttaatagataacggaagctcagtaaacatcttttataaggaaacgttgaggaagatggggctcgaaaaagccaaattgaggccttgtatggtaaatctgtgcgacttcacgtgacagtattgccagtctaggcttaatcgagctcacattgaccttgggcaaggcacccctatccgttacagttatgcaagaacttttagttgttgacctgccatcggcttacaataaaatggtaggtcatccagcactgatcggactaggggcagtgagttcaatcaagcacctat

SEQ ID NO: 370918 - DNA, 683 bp, Cannabis indica
tttaaaaaaaaaataaaaaagtagaattagcggcgaatcatggttccgtcgctaatgctaccactattaggggcggattttgcccatcgataataatattacggctattgataaattttattgcagtgatagtatataataggacgacatttaacttaactataaaatattagcatgtgagtatataatatttattttagatataaattattactcattgtgtgaatatattgctccatatacatataagttagttcctgaaagtttaaatttactaaataaatgagttacattaagttggagtaagttgaaatataccggttttttcattagttaattaaaaataggcttattttaaattcaattgaaatgtaccactttaataagtccattaccgattataccctcacataagtcaactgttcagggacgtgaggaaggtttgttcattacataaagggataatcgggatataacaataaaagagggtataaattaaatatatagaaaaagaaaggtaaaaatgaaatgggttaacaaaaaaagggtatagggtgcaatttcccctattaagtttacatttttggtctaacacaaaattcatgattttattaaagagaaaattacactctataccccttttatattgtcttcttttatttttaccctcttttttaaagtct

SEQ ID NO: 370919 - DNA, 815 bp, Cannabis indica
atttctgcaactttagagagagaaagattggcgttgtgtgatttcccgccaaaacaactacagtcagaacttcactgtgagaatggaaaatgaaatattgagtttacctttaaaaaaaaaaaaaaaagaattatacaaataacaataaattaataaaaacacagtataaaaatatattaaaataccatatttttttataaataaaattataaaaatattttaaattctatataatcataattttgtaatggaaaattttatttacactctaaaaatttctaagaccctctattttaataatttttattttatataaaattaatatctttagttatactaaatttttttaatttttttcttctaattcatattcttaaaaaaaatatatctatcaaacaaaaataaattgttttaaatattaggacaaaaaaattaaaataaaaaattatatgaaattttcttaaaaaaaaaattaaaaatttgcatacatgaattagaaaaaattatgaaaataaaatcaaaaaaaatattaaaattaacataaattaaagtgaggaaaaaaatttaaaaaactattcatagtaatttttaaaaagtatttacttttataattattttaataataaggtgtatttattattttataggatgcaaataaaactctccttttataatttgtttgttatttttgtttatttgtgaaataattcctattttaaaatagtagtagaggcataccatagggaaatttatatggtgtactaacttttgtcattttttttacaaaaatattgtgttaagttttactagtgttc

SEQ ID NO: 370920 - DNA, 700 bp, Cannabis indica
atgaacttacattgagtcttgccaaagaaattagcgtagaaaaaatattgtctttacaccaaaattaataaagtaaaatctgatttttgttctcctccatggtcctatttatagagccaaaattccaaaacaggtatttttcgtgttacacttagtggaaaaaatggcactaaggtgtttggaataggttaatgttagcaaggggatggtaatgttaaacattaccttgtttgtttggaaggtttaatattaaaatgtcattcccttggtaatataaatacccttgaagagggtaatgttgatacattaaaaaagggtgggattagttattcccttccattatattaatttgaataacatttttaaattaataaataaatttaaataccattaatattatgatttattataaataaaatattacgatatatatatatatttagtctgtaagatcggtttttttataactgagttatttttatgttattagcaataacatatatatgcattatacataaattttatgagaatggtgtacataaatgacatagcgaacaaaaataaataacatagtgatatatagaaatatttattttaattaataaaaaatacaataaaatttattattttctaattaataaatatattctttaatgaataattatttatttttatgtataattaacattctataaataca

SEQ ID NO: 370921 - DNA, 693 bp, Cannabis indica
tggtggatgcaataaggaattaataagtcagggaatttacttggtaaattctagttctgcttattggaagctcggttgcataggcccatggtccccatactagttgagaccatactacttgtaagactcagttaattgattttaattaataaattataattctaaaattagactatgtctagtttatgaattttcactaagcaacggcttaaatgtgaagaaaagagattctagggattatttattaattaagagactttattaagtctaattaataaatatattcaatggcaattttattttatagttaattttaactattaaattaatagctttggcatttaagtggttagaattggaaaaatggtatttttgagaaaataaggaaagattgttgtaaaatggcgaaaattctaaagtggggcccatatccatgccctgccacttgtagagtattttccatttaattttttcgatattttaatgcctaattaattctaacctaaacctaggtggttgcctataaatagatagtgatggctcacactaaaagatgatgaaattcaagccttcagtcaaattttcttgagccatcactcctactattttcgaaccactttcttctctttctctcttcatattttcataccctttagtggtaactcaatcatagtggtaactcaatcatagtgt

SEQ ID NO: 370922 - DNA, 477 bp, Cannabis indica
acctctttttttttattattattattattaaagaaaatgcattaatcaaacgaaatgtgataaaaaaagtttgtatcaaaatttcctaaattctatcattagtaacacttaccacataaattaatttttagtggtaaaattttctaaattttatttatgttagctatttagactttaaagcacttacaagagtctttttacaatatggattctcaattttttttttttagcaaaatgtgataaaaaaaatttatatcaactcctttaaattatattatataaagatgtatttaaattaatacaatttgctttatatgtagagaataaacagtgcattctctaaatttattttaataatatataaataatattttatttatgtatgttgtatatatgtttaaaaattattattttaatagtgtaaaaaataagaataatattaattttgttataaatattattaattatgtggatgtc

SEQ ID NO: 370923 - DNA, 563 bp, Cannabis indica
attattatgtcaagtagaaaataaaattagttaaaaataaatttataaattcctaattaaaaaagtaattaattgaaagttattcataaggtaaataagtcaaaaaaaaattataggtttggaaggtgtggagttttgttagctagagctaattaataatatttaaaaattaattataaataataaaaattattaattatgtttaagtttccaaaaattaatttgagccatttgattaaatcaatagctataaattactatacctatcaataagtactacaataatacctaatacattagctccctatagattattaattgggatttttacacttggtatctttttttgccatttttttacattttttatctttattcggttatttaaacatttttcaaaaaattatttttcaatattataatttaaaaagtttgataattacacaaatacctatgcatgcttatgtcataggttttctccaatattacaccccatctcttccaccttcttctctttcattcattttttttttaattttcttttattttctgttagttttttt

SEQ ID NO: 370924 - DNA, 937 bp, Cannabis indica
gagatcggtcgtctttcgaagactctaattgaccatgggtataacatgtctgcgtttgggggcatggaggaggccatgaagagtcttcggttgtcggaggcgcagaaaaggactatccgggaggaagcccagcagaaagaggcccttatggagcggaaccaccaggaggcattgaaggctaaggacgaggcgttaaaggccaaggatgcgactgtggccacatcgaggtgggaccttcgggattctaaagaggtagggcaggaattgatcgccaagctgaagtctctagaagagctgcaccaagtggattcgcaaacgacagccaacctaactattgaagtgaaaggggcttcgtgagtttaaggagcaggctcaaaaggaggtggccaaggcgaagagagatgctctcctggccccagtcacttgtcaacactgcaagaagcgcttcaatggagtcttcatggcgtggcaatccaatggtcagaatcttaatctcagcttttatcccaagcctaaagaagttcttgcttgcttctgggagaagaagaagaggctggatgcagtgctggacgagcgcagggtcctcgtgttcctcctcgggctgattaaatcatttatttatatcctttgttattatcatttattttttgtttttacatatcctgtccttcccctcacttctaagacaattttttttaaggggagacttttatggcccgtccccaggccttttctttttaaggttttcttgttcaaacaatctacattatgttcgaaaatatttagtttttaacttcctgatgctttatctgattatattttcccgtgcgatatgccttagtacccctaagtgacatgaaaaacaatttttaagtcacttagtcttacaaaattaaattagaggttgcatatatttgttcggtacaaattcctttac

SEQ ID NO: 370925 - DNA, 1287 bp, Cannabis indica
gttttttttagtttttaaaatttttgatttactttaaattaaaaaattagaaaagtaaaaatagttttatagaatatgtttttgaaaaatattttcactttttcaattttaaaaacaaaaaactgaattaaaaagtgttatcaaacgataccttaatttaccattttacaaccaaagttgaattagcctagacaaagaagactacacatctattattattccaaacaaattgccaaaggaaatttgcttccacatgtttaagctcctttcacatgttattatacttgttgtagcaattaagcaaattacaaccaacatgtatatagagaaatatatagcgaagctataaaggtttcatattactaattaaattgaacataataagttaagacaatgaccaaatgacaattattttttaattaattaattaagacaatcaccatatagtatgcattatatatatatatatatttatatggataagtaaatgtgtcatgatctctgaatgtattcattagaagagtgtgatgggataaaccagcacttcacttgaatttataagaaggaaaaaaggcatacatatcaaaaagatggatggatcacccactctctgagattaagaataacagagaaaaagaattatcccctctgaacatttaaaagattatcatgacccataacttcctatatcacaattccaatagtggattccttgataatctataaaataataaaatgcagaatctaatagatataattctttgatgcatgagagaaaaaacgtgtggtataactgttaaatcaaaagaaaaaagtttataaaaagggttccaatatcccttatacagatgaaaagaaaaaacttaaagaattagtaataaccactctcaaaaactcaataaccaaaaacaaaataacctctaataaattacattttacaaaaaggttgtgattgaacttttattggtttttagtgttagtgatatttgaaccttgacatgcacttcaatgagttaaaaactaggtcatgaatatcgaagaaaatttaagggtaaataccattttagatctcgtgttttgtaaaagttatcaattggaccatctgttttgttagttgataaaatgaaccttgtattttccaaaatagtaaaaatagaaccttgagctcaattttcacaaaatttattttttaatataaccaattttaagacaatttctgacacgaacaggtacagaaaatgtaaccagttttgtcataatatctctattaaattttattttgacaaa

SEQ ID NO: 370926 - DNA, 648 bp, Cannabis indica
cttgctacttttcttctcaggccaaaggaaaattgatgaaagcattgatagcgaggatgagaagcaaagcaagtcttctaaggcttctaaattgaaaaagtagggtcttttcatttggtgactatttggtgttattggttgaatctattatcagacaatagttagtgttattggttgaatctaggtattatatttggttttatactctggatctggttttaaacttttaggatatttgacattaatccttataatatgtttattctatatgtttgtatcagcagaagttgtatgtttttctaattgttcaagttttatatacagtcgcacaactatatagaaactattttccaactatatacaaacaatgtacttgtattttaaaattgactatcaatgtattttattcactgtttttccattgctcctttttcctttaattacttatgttttatcaattcttatctgacttttttttaaaactttaataaagaagttatttttgtactaaatatttaagaagtgtcaaaactgtaacaaaacgattttgcaactattaccaaactgtttaaaatttttaacaaataaaatcccatgtgtatagaatataacatatcaacctgtttgaattctcacacagaattaaac

SEQ ID NO: 370927 - DNA, 587 bp, Cannabis indica
gcaatagatttcagcaatacctcctttcccgcacgagacaaaatacgcccttcccaaccttgaattctcttccgaagcttatccttaagaaagccaaggatatcattcttatttctcccaaccgaacaaggaaggcccaggtaatagccattttcatttgcctcataaatttccagcatagcacatatagaatctcgcacctcactatcagtattattgctataaaacacagaagacttagcgaaattaattctttatcccgaagccacctcataagtacgcaacagctccttcacattgtacgcttcctcctcagtggccttacaataaatatagctatcatcagcaaggagcatatgagagattaccggggcacctcgagcaagtttacaccccgtgagtaaaccactttgttcaaagctacgcaacaaactagagaaaccttcagcacaaagaataagcagatatggtgataaaggatcaccttgacgtaatcctctttgagaaacaatgggccccaactccttccctccatgtgaaattgtataggaaacagaagaaacacattgcataactaagttaatcca

SEQ ID NO: 370928 - DNA, 920 bp, Cannabis indica
gttaaaaaaacagtctaattttcttgatcattaagtttctatgtgtcatatgtatatatattcaataataaataaattaaataaatgtcttgtgtactgcgccgtgggtgtgttactaggaaattcatcattaaatagtgacaagtgtcattaaataagaaaatagttattaatactactattcacaattctttccattctatctatttctcaaaaattatgaagaatgataagggcgcatttggaaagccacctgggaattggaattggatgtaattggaggtaattacacagtttgacgtgtttgtgtggccacgtaattacatagtaactgtgtaattagaggtaattgggaggcctcaattactctctccaattctcataccccccatgagaattgggtgtaattacataccaaaaataaattcaaattattttaattaattgatatgatattttaattattttaatgtattgactttccatttttctatcaatcatcaaaaaacaaggttggattgtattagcatgttgtgtacttcacaactttattcgcaagtggaattgggatgatgaatttttcgaagaggacatggaaaatgaaataggaaattgtgaaagtttgaacaatattgattttgattcagattcagatgaagaacttggtgacgggccaacagatgatgacaagcaatatatgtttaattttagagatataatagctcaaaatatatggaacgcaagagcaattagatagtcttaaaaaaaattattttaaatatttgctactaaattgttatagttttgactttattttatgaagagattattatttatttatatattaattgatgaaatttattttaaaatattataatattaattaactgtgtaattactaactatcatgccaaacatga

SEQ ID NO: 370929 - DNA, 556 bp, Cannabis indica
atctcatccacttgacactttgtcaaactaatgtcaacctagctatctaaccaacctagacgagagagttctttccttagtgatttctcacctccttcattgttcttcacattcgaaaccttgagtgaatgagtgtcgtgcccacacatagcaagtcaagtactcaatcatagtgagtaagagggtggtaaccaaacccgaaggagagaaagagatccaagttcagatcttgataatgcgctgttacagaaaggaatcaagggctagagatcttgaacggaaggagtcattatgttccgctgcaatcaatgtaaggttttcttaaacccttatgtgtttatttcattgctttagagaattcatatttaggatgttaattcaacatacttgttagtaaatatagattctgttaaaatcttcccaacatgcatctcttacacatttttcattatatatatgtgggtattttagatggcatttggtaacatttttaatcagttttctgtttttaaaattgaaaaagtgaaaatatttttcaaaaacatgttctgtaaaa

SEQ ID NO: 370930 - DNA, 518 bp, Cannabis indica
aaaaccctctgaagaatgcctccagtattgaagtcggtctctgaatttcgtactcatttttctaccttttatttccttctgagttgcttactgaaatcaactgaagttcactccttatatagccattgagggactaaaaagatagaaaaatcgcacatgctaaaaatcgtattcaacttttaattaggccatcacaataagcccacgttgagaaatctttttttctgcttcagactatgggcgggccgcgacatgctctttcttgggccgcaacccgtgtgcaatcttcacacgagggggcctcttttcacgatgtgggtcgcggcatgcccattcttgggccgcggcctctgtgcaatttccccatgttttcaaggtgtgcaatcttttttcctaggcaggatcccaattttgcacagtgatcttttatgcaatcttttatttatttttttttctcttattccgttgatattttttaaatcttcttctattttaaatctgcaaaaataaaagataac

SEQ ID NO: 370931 - DNA, 578 bp, Cannabis indica
tttaaggtgcgaaggaagttgacaagatgaggaaaagtgcgcgtggaactccgatgagaaggcattccatgagttaaaccttcttagaggcaacttgaaataccattgttgtgcggcctctgcgagtgtgccaagaaagatcctacactgtacatcacctcttaccccttgcaagtccatctgcatctcaaaatacttcaagtgtgataaaggatcttcttttcttgtatccatattctaggttggtattttgaactttgaaggtaattcaaggacttcaatttcaggggagaagggtgatccacgtgcctagtctagttcgagatcagtgagtatttggccggtcaggccttgtaccatgtttttaagttaatgcagttgtgcttgcacaaatggatgagggcttgtcacattgggatctcttggaactggatcttgggttcgaatgcctggtcagacagttggtggaacatattgttcgtccaggccccttctacgatttaggtcagtcctgaggtcatgtgcagcacccaacctatcaaatactaaagtaccgggtggccttggtgtaatatccc

SEQ ID NO: 370932 - DNA, 555 bp, Cannabis indica
gacattcgggctcagatcttggtgatactctgcgaaagaaaggatacaagggttagagatctcagcggaaggagacattatattccgctgtaaccactgtaaggtttctcatactttatatgtgtttatttcatatcgttttagaagtttatatttagggtgttaaacaacatacttgttagtagatctaagatcctggtaaaatatttccaacatcctggtcatagtcccattttttcgtaagcaattttgaaaaaaatgttggaagaggctccattgtcgatcatagttctggccaccattttattggctatctggacctccacgaccagcggctcgttgtgtggaaattaaatctcgacaacgtcttcatcgttgaatgatatggttggctctcctgctcgtgaaactttgggcttcctttcttccacggctaggataacttcttcttgtacgtgctgtgctgttcgggcatacctctcccgagctttgcctgaatctccagcgatgtgcatgttggaaattattttaccagggatcttagatctactcaca

SEQ ID NO: 370933 - DNA, 617 bp, Cannabis indica
atttttttaaaaaaattaattaaaatataccaataagaaaatgacacatggataatgacataatattttaacggttaggtacctacaaagttccaaaaatataacttaggccaaaaattaaacttaggtatttatttgcaactttaaacttaggtatttatgccgcaaattactcttttaattatttattttgtttatttacttttctctaatatttttcttgtagaaacgatgctctactttatcattatgttacttaatttgattgcgtatacttatgtatcaattttaccgaacaatgatatgtgtggtcttaataattttacataaaatctctacaaagtctttgtctatgaagtctccatccataacaatacaaagtctaaaaattaattttaattaaagacctaattttagcattttttaccaaacacaaagtctaaaaaaattatttttttaaaacccatgcatttatacaaaacatagggtctaaaaaaaaattaggcacttatttttgttacattttttttaaggaataattacacaaagcacaattttttttttttgtaaaaatttatatttttacgttcaaagatttttttattatatttttacgg

SEQ ID NO: 370934 - DNA, 651 bp, Cannabis indica
tagacttctgctttttgggacttggcgaggattcctctggttcctttccaagtctagcaggaatggctttaggatgcacgtgaattcctgctgcctccatggctttttgcatggccagcatcacctcttgcatctttttggtttgctctttttgggctgcgatttcagcgatttcagtaccaactctgagtagctgccttcatcataagcgtactcatcgaagtttccttcgtactcgtcattaggagttctttcttcttcctcagagcccacatctgctcttgaggccacgtcctcatcatttggatcttgagcatcttgaagagggtgaggttgacgtgtgcttcgagtctccaccattgttgtgttgttgtaatgtattgtctactttcagacgcttccttcagctctcaatgaaagcaccaaagtgttgaccgagaatttcgacaacaaccaatataataatagtaattaagaaagcttaaaggaattaagggaatgatttttacgtggttggggcattaatgagccttagtccacgagtctgtgtatttatgatattatttattacagagattgttcttggtggatttttactcttctagttcttatgaaatccagaattctcgacccctctttaatgagtttggg

SEQ ID NO: 370935 - DNA, 698 bp, Cannabis indica
atctttactattattaatagtatataactatatatattttttgttatacggtatattattttttttaaaataatatttaaattttattttctattgtacttttgttgacatgatatataatgttattagtatcttatatatttttttttataatatatatttcgattgtaaggtatatattttttgttatatggtatataagttttattgtacagtatattattttttttttagatcatgtttaatttttatataattttgtaagtatggtataattatttctctcagaaaaaagtatggtataattattttatggttgtatataattttgttaatatggtatatacaattttttataatgatattatattattttgttttattttattatatataaatttttttgtatgtatacatattttaatagtagtgtatataattttattcacataatatatatatatatttgagtattaatttagtattgttataatctttttgtggtatataattttattactaccgtatattaacttttagtgatacgatatatcaaatactgctgtatatatttaatgatctaatatatttactctattttttttataatataataatatgcaatactataaaaaaaatataaataacttaattatatatatatatttttttaaaaaaattaataatgtgataaagta

SEQ ID NO: 370936 - DNA, 668 bp, Cannabis indica
ctttgggtaagtagaaaaaggtttttaaaactattaatagtagagatgtaatattttgatgaaaatatttttccatgcattgctactaacccaaatgttttaggttcttgccctagtactaaccacgcaggtaactcaatcaactttaatctaagacatataagtgatgaataaggaaagaacactgttcaggtggaacaaggaaagaacactgttgaggtggaacagggagagaatactgttgaggtggaacaggaagagaacattgttcaggaggaacaaggagagaacactgctcaggtggaacaggaaaaaaacattgttcaggtggaacagggagagaacatcgttcatgtggaacaaggaaaacggagggaaagtcaggcagaggacttggaggactaccagttgactagagacaaagctaaaagagcacctagacagaatcctaagtataactttaacatttggaatgaagacattgcctatgcattcttaagtgctttgcaaggacagaagaacaaaccagaaagttgtggaaaagctatgaagtgcaagaatgctaagaagtggaattgtgctatggatgaagagataaactctttgagtaaagagaagacttgggtttgtgttccaaaacccaagggaaagagtgctgtgaaacatat

SEQ ID NO: 370937 - DNA, 809 bp, Cannabis indica
aaaacatctaaataaaatataagggcttttttatttttacattttaaaacgatttttttttttttgtatttttacgaaattctacataaaaatttctattacaactagcgctgcaacctaaatcgcaacaaaaaatcatataagaacccctgttgcaactagcgttgcaaccactttaaaaactcaaactgtaaatttgaagaaaaaaaaaattaaaaacacagtatatggggtaattctcctaaaatatattattagagactttatttatgtttattcattaattattttacatgaaactttataatatttattaacataattaaataagattatatttttacttctatcaaaaaaaaaaaatcaaaaaataaaagtatatttcaaaaataaatatatattttttcttaactataaatatatattagaatttgtcataaaaattatattatggtgtaatttatagcatttggctaaactaaaatttgtgcataaattaaaaaaaatgtataaatccgagttgtatagatagtagattgaaagagagcatcaaaaatagacttaatcttgtacaagaaaggaagttgtgtagcacgaataaaattgagtcgtaagtttctcttttgaagaggaatcctcttgtagatgtaattggtttagtttgattaataaaaattatctttcttgacaaaaaattaataaagcaaattaatttaaaagataattatgatagaattatgtatctaaataaattagtagcgacttaagtaattaattatgttatagttaattattagtataaaaatatt

SEQ ID NO: 370938 - DNA, 572 bp, Cannabis indica
ggctaacactggagctatgattaatctgtgtttcagctctagaaagcttgcttcacacttgtccgtccacacaaaccgctgattctttttagtgagctcagtcaagggcattgaaatcttagagaacccttctacaaaccgaaggtaataaccagctagacccaagaaactattaacctctataactgctttcgttctcgaccaatccgtgattgattctatcttttctggatccactttaattccatctttgctgaaaatgtgtccaagaaaggacacttgagatagccaaaactagcacttcttgaatttggcgtaccacttatgttctcgaagccgatgtaaaaccatccagagatgttgctcattctcctcttctaattgagagtacacaaggatgtcatcgataaatacaataacacaaatatcgaggaaatccttgaataccctattcatcagatccataaatgctgcgggagcattggttagtccaaaagacataaccaggaattcatagcgcacatacatagtgcgaaaagccgtctatggaatgtcctcctctcagattctca

SEQ ID NO: 370939 - DNA, 647 bp, Cannabis indica
aatgggtcatgatgagggaagcgcacagtcttggcgtcttcttccgtgaacgtgatgggttggtccatcagccggggcctttgagctgggagttgagtaacctcccaaacctcattgtgtttcacggcccctgcgtatcgtttgagctccttgcgagtagttcctccgatatggggacctccggagatcatggctaccctcccgttaggtctgggcggcagaccggggatgtgctgggcggcgcccgctggaagagctaaagctaacgctcctgctttactccccggtgttccctggggcacacccactgtcgcctagcccggattaaggtgaggaagcctatttttgatccactcatagaggtggcccaaccggattaggttttcaatctcgtccttgagattcttgcattcattggtgctatgaccaatgtcgttgtggtactcgcatcttttgctcggatctctccgggagctatccttgtacaatggttgtggtctccggtagtgtgtattttgcctagtagcaaagtacacacgctcttgggagtccgacagctccgtgtattgagtgtactggggagtgtacccccttttctggcgcttctcccccgtccgggtgctgcccttggaggactttttactcct

SEQ ID NO: 370940 - DNA, 742 bp, Cannabis indica
gaatggatggttatattattgtgaatgtatgagaggcgatgaatcgctaattatatagtaaaattaggtgtagggttcgttattatttttttcaaagaaaataatgtaagctaatattgggacataagaattttttttatgtaattttattttatgaaattatttttatatataaaaaattttataatgtaatgtacatcgcatgtgagctcaatttctaaacttgaaactcgaccatccacatcgaaatcacatgcatgcaagctcgataatattttacctgaccatgtatagccacccgagtggcttccactacaacaatagtcatcattagcggcgaaggggtccgacactaataattctttctgcggctattgactaatagcggtgggagtccgcctctaatgtcccgccactattagttgaccgctaatagttagtattagagttatttgcggcataacctccttaagtggtcaggtatttgcaactaacccccaattctaaaattttggaggtaaaacctcctaaacccagcttttgttagcagttagccctttccgtcaattttgggtgttaagtgacaggttggaatgtctacgtgtacacaatgtacacgtggcacaatttaattagtccacgtaataaatatttaaaattaaaatataaaaattaattattttaaagatgaaaaataaaaaatattttatttaaaaatcaaaaaatttattttaataatttt

SEQ ID NO: 370941 - DNA, 320 bp, Cannabis indica
taaaataggcaagaattttagaatcatgtgcattgtgatcacaaggttttatcagtttttttaaatgcatatttgctcttatgaatatttattatgtgttttatacattataaaacatatttattatattatatataaagtgatggtataaaaaaggaggtcttttaatgtaaggggtcttgtgcaatggttcaagctccgcatatggcagcttgggccaactctgtataagagtgaaaaattctataaatagatgtctgttataaaataatataaaataatataaagtagatgagaagaaagaagaagaagatgaagag

SEQ ID NO: 370942 - DNA, 776 bp, Cannabis indica
agaacttgatacttaattatacgagtattgttataaagcaccagtagaccctagcactttctcgacatgtcgcgttgcgattggctagcgatactccctaaaagctattatattaaattatatgggacccgatacttagttggaccaataacgatattgacacataagaaggtgttaggcaccattggtgccctttagcatttctctaattacaccaatagtaatatgacacttaaaaaatactaaacaacaataatatttttggatgattctacaatacactttcttaaaaagaatgtagtgttgtaacctctacttatttcagcatccaaaagaatttttttaatttttttttttttactatattcatgcacgttaagtatttaagatatcttacaaaatttgaaaaattttgaataatttacaatataaaaaacaatgctcaaccagtttatttttatacacgtataaattaaaatagttatgcgtgtaacacactgtttgaatgtaattttggtcgtattaaatttttttttgaatttcttaaaattttactagaatatcttaaataactataatatacattaccataagaaaaaaattgactaaaaattatttacgatactaaaacacatagagatgtatcagtacattataaaattttctaataatatagatctatgtatataagtgaataaaaaagaaagaaatttagcaaaaaaaaaaaaaaaaaaaaaagaaaagaacgactcaaacaaaaaaaaaaaaacgaaaaa

SEQ ID NO: 370943 - DNA, 278 bp, Cannabis indica
tgttgtacgcttgactattttattttataagcatgtaaaatagactgtttgaacattattttctattttagtaaattattttgaatttttcaaaatttttatatgatatcttaaatagttataacgtacatgaatataaaaaaattagattaattttttttttcagaatgttgaaataaataaagggtacaataatacattctttttaaaaaagtgcattgtaaaatcacttctaaaatttatatatgctttcaattaaagtagcaattcattatttt

SEQ ID NO: 370944 - DNA, 897 bp, Cannabis indica
acctagttgaaaggacatgcaccagtgacttgtttacattattgaaattgcattaccttcatacaagtgttgcgacattaaaaatgaatacgagtgtgtacacactttgctcaccttattattcgaaagatacatggaggaagacttatgatgataccatcaatcttgctggtgacgaggatgattgggttctcccagaacacatcaagaacatgaaagttggggtacctatggagaatcaaccagtaggtcgtccaaagaaaagtaaggttggaagaagacgggagaattgtttctcgtctagtgataaaaaagtcacgatacctcaaaactgcggcatttgtggcagttcaggccacaacagagcaacatccaaagcttgtatttgagacgtactctactattagttgtaataatatgttttttgaactggatttgtcattgaaaactgcttattttgttcgggtttctgctttaagatcaggttgttagcaagtgggttttttatatgtagaaaaactagtgttttcattgtattgatggtttatcgatggtttgtcaacattttatcgacatttgaatgatttaaaggctggtattttctgattcatgcatctttagatttttcgacatattattgacattttatcaatatgatgtcgatgggaatgtatgaatttaacggtttatgcatctcgagcttttgtcaacgtcttatcgacattttatcgatgaaagctatgttttgtgatttgtgcatgttaagatttgtcgacattatatcgacattttgttgatatgatgtcgatggaatgtatgaatttaagattcatgcatctcgagcttttttttgacattttatcgacatttgatgcccatgcttgcggttcgtccgtg

SEQ ID NO: 370945 - DNA, 705 bp, Cannabis indica
tctttagtatttttttattctttatactatacatatacttgtgttagtttaatttattgacttggatacacatctttaaggctttattagtagatgattttttattttttgtcttaattactattggttttatattacctttatgaattaagagagacaattttaacttttgtgatatgcacctttttatttttatttattatgatttttaatgagtgtgcaacgtgataagagcaaaaaactataaaaggaggctcttgcccttattctagggtcaatgacctttaatatgtaagtttctaatgaattttttttttgaacaactctaataaactatttggataatcacttttatgattttaaaaatagttgagttgggcagactaaaatataaagggtcagagtagaattttaattttttgttatttttagccaagatataagggttaaaatatagttgttgaccgaggttttcggcaactattaaaatatgtttataataatgagctgtaagaaagcgagatgaagactttttacgtggttggggcgttaatgagccttagtccacgagccactgctattaatggatgtgtttaatacagattctacacttgagagaatgtttttctctttaatacagagaatgttcttggtgtagtttttctcttcttactctcttgcaaccaagattctccgacccccatt

SEQ ID NO: 370946 - DNA, 692 bp, Cannabis indica
tgggataggtggcttccctagtttggtgacaccttgcaacctttttctcagccaaaattaagtagttaatttacttagttagaaagaaagaggaattagaaggaaataccaaaaatagtaggagaagctctctttcttctctctctcttctcgaaccagcaagaccaagggaaaggtttgtcgatttcttagtttttagcaaggaattcaagggagaaattaatctaaggtaagccctaatgaactcccctttagttttcaagttcttgcttagttagaaatggtgaatttttgaaattggggttgttaggtttagaaatgcttagggttcggtttttatgttcaatattggttgtttagaggttctggtagttgattttggtgcttggtgtaagcaagcttgagttttgaaactcaagctttgagctttaatggcaagttggaatttattggtttgttctgtgattttctggttggtttaggttataaatgcattgtataggtaccctggaagtttttggaaagtttgggattgaattgagttaagggggttggtttttgtgttcccagcacagaactggtcgaccggttggtgttccagaaatggactttcggttgggaccggtctgccggttggggaattttcggaaccctagtttttcccaattttgagatatttagggtattgccat

SEQ ID NO: 370947 - DNA, 1047 bp, Cannabis indica
atattagagagagatcataaaatggttactacacgtaaaatgaattttgttatgtaacgactcataatattaacaaaataagttgacattatatatagtttatctttgaatatgagaaacttaaaaaaaaaaaataatagaaaacggccataacacctcgaattcaaattattcaactaatccttatcgttattttcatatcaatattctataaatatatataaatatatatataatattatataaatatagcatatcaaagtttaaatccgacaacatatcatttattataccattttacaaatattcttgtgtgagtcgttatttgggcaagtaataattgacaacatatataattggagaagaaggcataccattaatttgaccaaatgttcaattttcaaagagacaacaacaatttaatttttattttctcatgaatcttttcacttggctagaaagaaaaaaagacaacaacaatatttttttttatgtcatttattaatgtatgacactcactaaaatgaaaagtcaatgcaggagaaactcacattttatatttgggaaattaacaaatattgaaaatttaaacttaatttttataattatgaccaaaaaaaaaacaccaaaatgcgacctttatatataaatatatatatattttcatgggcttttactcatattttacatttatttttggattaatttcacaaatgcacaaaaacaacaaaaaaaaacaacaaaaatacggtttcacggaattttaaacatttttacgatttttttgattttatttacataaaatacggtttttttatgttgaaattttgttcatttgttgttaattttttgttatatgtatgttattttttgttgtttttttgttgttattttgatgttattttcatgttacttttatgttgttttcttgttgattttatgttgttttcgtgttattttttggaaaaccgtaaaaaatgtaaaaaaaacattctttgaacgtaaaaatgtaaatattttacaaaaaatagtgtcttatgtaattat

SEQ ID NO: 370948 - DNA, 838 bp, Cannabis indica
taaaacctgctaccaagatccccttctaatcttaagctttccaaataagctctcttagtggagaagcatccatcagctgcattcttccacaccaaagagtcttattcgaacttgtaagccttctaattgagccaatcttttctcccaactatggttcaaaaatttcttcccatctagccaagttccattcagaactattaaccaagagatctgccaccgttttcataccagggaaacgctgtctatccctttccataaggtcaacaaactcgttaaaactaaaccatgggatccatggttgtttccacacgtcaattttgtcaccctttcctagaatcatcatactaccaattctcaaaacatctcgataggatagaattcctttccacaaagaataatcattcccacaaacctcagtgttgtgttagacaacaacctcagcaagcaatcaaacaataactaacaaaaccagaaattaattaatgtattgcaaaaataaaaatgacagaatataaagaacacaacaagattatagaggttcgaacttccttcacaaaagtgaagagcctagtcctctttgaactcccttaggattagtctttattataacacaaatggcaagattacaaactgtttagttgtacaaatcttagaacataaagatgatgaattattccccttgttttagttttaatcttgaagcttgaactccttgaaacaccttgaagcctgatcttgcttcccttagtttctaaccctttagttcttcattgcttcatgattttccctctttaaaaacaagtattcttcctcaccatacatggttctctctctctct

SEQ ID NO: 370949 - DNA, 553 bp, Cannabis indica
gaactcgggcccgtacatggtcgttacccagaccggaactgagactcggacctagacctaaatctgggacccaatcccaaacaaagacttggaccgagatagggatccgaataagagcctggactcagacaaggacccagacttggatcgaaatgcttgacctagatttggaccgagatccggacacagacccaaacttggacccgcactcaagaccccaacttggacctggacccaaaccaagaccttgatcggggaccagaactggacacaaactcggacatagactcagacccgaactcaaacccacacctagaatcaaaccgaaagcaagacccggatccagacccaaactcgaacccatacaaggatcagaacaaaggacttagaaccagaactgaatcactcagatcaggattggaactctggactcggacccaacctagacgaagacccaggacgcgaacccacacccggagcttgatctggacctagaatgaaatccggtctcgaacccaaactcagaccaagactggaactctgacccgaactc

SEQ ID NO: 370950 - DNA, 504 bp, Cannabis indica
tgtagggtcagtcatcagtccatgaagtagccagagtgacgtactcgtgtataagagtcattattccgtgggtgtaaggacccaatggaggcttgaagcggggacgttacaccctctttaacaggtgatccaatccaatagaatatttaaaaataacatctaatccgaccataatttgtggtatagttcttccaaatgaaaagatctccaaaatttattctggttatcgaagttagatgtcacccgaaagagcgttcccgaaagtctaacatgtccatctggaaggagtcttcaagatagctacgcttcctccagaaggaagttctggatggttagttgttccctcctaaaaaagagtcccggatagtaagaatgcacgcgggacgagaaatggacaaagagtactcatcccatatctccattaagaattttaatccccatccccgcttattctttattagggatggggtggggaatctcctaatgggagcggggatggggcaa

SEQ ID NO: 370951 - DNA, 548 bp, Cannabis indica
agattagcgaagaaaatacaatagagtgatacaagaaagagactacaaaagaaaccaacagcaattacctaggaaaatgggaaggcgtgacaagtgcaatgaatacatggataaaagatatcaagaagtgaatgttagacaaaaaagtggtcgaaatggatcattaaatatttatatacagaagaccttttaaagagattaaatgtttatttccaagtgccatggaaaaagtatctatcgatgagtgagtaacaactatgaaactgaaagaatgacaccgtagccttatttatagtagaaaatcaagtagagaagtaagatttttataggtaataacgttcaactaaagaatgtgaatgattaaagacaagtttgcataaggtcttctaccctactctttgtgtttgttattttgtattgtataatgtgttctcaagtgacatgtaaggatgttcatttagagaataaatagtgttactctaaatggcatgtaaggatgctcatacaagaataaatagtttcactcttaatggcatgtaaggatggtc

SEQ ID NO: 370952 - DNA, 480 bp, Cannabis indica
acttgatgcccttgggagtgaattgagtcgaacagagacggaagaagtctgccaccttcctaaagtacgagtgcaaaggtagcagtagtgccacttatttagcacgagcacccgaccaggcacacatctcgctttgagggtttgagtgtaaagaccgcttagtttaaatttggaaattagcagataattagtgtttaattatgaaaaattatttatggatatttaaataattatttatgttgatttatttgaattcaaaatgcatttttatgtcatatagtgaaatctcataattttgtattttcggtgcccgacaacatggaacgcggtgtatggcttagtagaatcacaatttagtattttagtttagcggggcagtattgttagacattgggaatgtcgggattggtcaggaatttagagttttcccaaaataccctttagtgcttttgaatccttttgtgtgggaggggcaaaatg

SEQ ID NO: 370953 - DNA, 512 bp, Cannabis indica
tctatctattttggaaaaaattctctcttcaggtttttgcttgttgttccatgtgtagaaggaccctgagtacttcaaatctgccatgttacagttctccatacaatcttgcaatctcttagatggaatgcattgggctcttcttcctattctttcatctccattcattatctcattgaaatctcccattagaatccatggctcatttattttctttgccaattcctctaggtcagcccataactcttctctctttttctcatcattaaaagcataaatcagtgacacaaagaactttcctacttgttgctgtgattgcacataccaatgcattatttggcgagagcaatatttaatatctattgaatagacatttggttgccaagctataactattcttcctttatctaacgaaggatcattgtttgacaaacaccaaccttggaagaggcttgtataaagagttcccatattcttattctaaacctttatttctaagagactaacaaacc

SEQ ID NO: 370954 - DNA, 962 bp, Cannabis indica
ggtgaactttggaaggacataaggaagaacgacccggtagactcaatgagtgactttcttgaccgtgctgaaagcttcatcaagctcgaagaagctattcaacgagtggaaggtgagcaaacgcctggcaagtcaaaggctccttccactggaatgtccacccaactcccacattacccaaataattcaagctcaaatggtaaacgttccaacaacaacaggcaagggaatgggaagaagggaaactttgccgaaaaatctgagcaagctccccaggagaatcaagcaaagtacactgcatttaccatcttgactgaagatatagaaagtgtttacatggctacccagtcgctggccccatataagaagcccgggcccatgaagaaagatatcagcaagagagacatgacaaagttttgtcgtttccacggagactacggccacgacactaacgaatgcaacaacctgaagtgggaaattaaattcttgataaggaaaaacaacccacacctccagaagtatgtcaagaccgatcagaatcagaggaacgacaataaccaagagttactacccccaccagtagatggacacctgtaagtcatcgttagaggcccgcatattgttggagattcaggaaaagcttgggagaggtatgcccgaacagcgtagcacgaacaagaggaagttatcctggccgttgaagaaaggaagcccaaaattccacaagcagtttggcctaccataaccttcaacgatgaggacgctgttaaaatcagatttccacacaacgacccgctggtcgtggaagttcaaatagctaataagatggtggccagaaccatgattgataacggagcctcttccaatatcttgttcaaaaccgcttatgaaaagatgggactccagctcaagcatctcgccccgtgtctcctgcctgtctatggtttctttagccaaggagt

SEQ ID NO: 370955 - DNA, 540 bp, Cannabis indica
cacacggatgctaagcccattgactattgatcactaacaatatgggctaacacagcaaagaactatcgaatcaatccaagttttaattaataaaacatgttatccgtgttttcaagcaagagatacgtggcatgattaggggaaaagatgtattagttgataagattaattgagataacttataaaattccccgcaaggatatcttggtaatctgggaacagacatctaatgagaagagccattcgcaacacaaatatcatcttcaagacctggcggatcccccgttatacccaattctgaaagaacctggagcctaattaaagtaaatgatctccaggtggagacctcccatggagtggtcccggctcgcaactgtagtctcaaggccaatgaccacattagctccatatagaaattgatttataggtggttacacctttttgttggaaatattttaccaggatctagatttactcccaagtatgtgtcattaacatcctaatatgaattctaaaacaatgaaataaacacataagagt

SEQ ID NO: 370956 - DNA, 779 bp, Cannabis indica
gatagagtggaatggggctatttacaggctattctcatcaaaatggggtttgataatcataccacttctctccttatgaaatgtgtcacttcagctaaataccagattgctcatgctggccgtttatttggctctattatttctgggagaggattacgtcaaggcgatccattgtcttcttatctgttcattatttgcatagaaggcttctcggcattactaaagcattatgagcatagacagcagttaagaggcattcaaattgttcgtggggatctagttgtctctcacatgttctttgtagatgacatctatattttttttggagagccaatgagagagaagctaccaatgttctatccttgctgaatgtgtttgagcaagcttctggtcaaaagataaacaatgacaagtcatcaatctttttttagccgctatactgatgttcatactagagacgccatttgtggtgatatgggtattcatgaggctgatgataatggtacttacttaggcctcccaaacatgtaggaaaaggtcagcaattctggggttcttgaaggagaaagtgcagaagcgtattcagtcttgggatggaaaactactatcaaaggcatgtaaagagatattgctgaaaactatagtccaagccctcctaactatgcaatgagtgtctttttgctaacaaatgaaacaagcaaggaaatggagcgtgctatgtgcaaatactggtggagttcttcttccaaaaaaggataaaaatatccattggatgagtt

SEQ ID NO: 370957 - DNA, 617 bp, Cannabis indica
atttagagattgatttttaattttcttttttatttcacacacatttaagttgtgttttctttagtatttgaacatgaatttttagtttatttttggattatcttaagaacatattacacttaaattatcaagttttcttaaacactataatatattacatccagtatttacttttaattgtcaaaattataaattacattatttagatatacataataataataataatctcacctaataagtaataatattttttctttaatttttaattatatcttttaaataaagtaaaaaatacctaacataaaattagtatacgtgtctcgcacgtaactttttactagtataataatggttatttaaccgtctttattagtttaatagaatattttaaatataatattattaataggattagtttaataaatattaatattatttattttagattaatttaaatatatataaatattaatatattatttgtaatattattatttttttttatttattattttgaatatttcgagtatgttcaattttaatgtttttaaattttatatttatttttcttaaatttttaaaattttaaatattattttttaaaaaaaattaaa

SEQ ID NO: 370958 - DNA, 674 bp, Cannabis indica
atgattgcacgttattaagtgttaatataatcttaatgaattgagtgtgttaatctttggatttgagttcttgagcatggattttgattatagggtattttctagtattgaattatgtgttactgtgatgttttcaaggctggaaaattgtataaatggttgaaggtgatgctcttgttcaaagagttggatgtgccatgtttatgcttgattttgagatggcttttgcaatctgaattctagaattttaatgcatgtaatatgttaaaataagtatctattatgtgttaatatttctataggtcaatttgtgatttggttgagaattgtgagtgaaaagattagattttgggctgaaaattcgaagaagggctgctggttttctgggttctgcacccagatgtcgcggcatgctctgagcatgccgcggcccgccccttgttggtggaccctgggttttgtcccaggtgccgcggcatgcccgcctcgtgttttgggcagttttgagttaatttttgaaagtttgtaacttttaatttcgaactccgatttgggagttctttatatcgttggaaagctcgttctgagctctgtatgattacctgaattgtaaatgccatgcttgaattttattgagttaaaatttaggggttaaccctaagtatgaattatcc

SEQ ID NO: 370959 - DNA, 504 bp, Cannabis indica
tgtactgataaatcataggaatgtatttaatcacacaatcttgattactttccattgtgttgacaacacaacaaacaaaaatatcaatgtgataacgatttggatgaatttataaattaagtaaataaataaatgatcacctgaaccaaataacacattaaataagtaaagaaataaatctatttctttattgataattgaatataaaagattacattgaaatagagttttatttagggctttacatgtttggtgtgcatgtttatgaatgcccgttagttaacatatcaataatggtggtattagtgtacatagaattacactggatactaggagatatatgtttggcaaagtactgattgatgctatcacatcagtacgactagagtaccgagtatagattgatattatggtcaatagtactatcatactaacattctagactcagtattagtgggacgtgggatagggttatgattgagtgtatggttgtctagttataat

SEQ ID NO: 370960 - DNA, 611 bp, Cannabis indica
acttgcactaatataaaacttagaagtatatttcaattaatctattatctcgatattcatatcaagtgtagtgtgtttgactttacccaagtaacatgatatgtaaggttgtaacaagcaataactttctccgccattacttctttttgtgttcataggatattgtggaacattcgtttttttttatctgcattactcctcttggaatactgaattatttattgcctgataagtgcatctgaatctacagaagacacaactttcaccctatccaaaaatagaatagagataaaacagtcaaaaattttcttcaatttgaataactttctagtgccttttaaaagcaacttagttatttagttttactggtggaactaagatattatatatggatttttacacttttccagaataatttctccactgccagagtaatcaccatctcagacattaaattttgagttgatgcagatttaagggttcaaaaaatatcacccctatcatctaacatataggtcacttttaatctagagattctttctagactgtctccttatgttctcttgttagattacacttttgatggctcccactcaatagcagatgtctgg

SEQ ID NO: 370961 - DNA, 688 bp, Cannabis indica
tatttatttctcaaatttttaaacgtgtccacacgtcaactcacacttctgtcttctttcttttcttttctttttctttttttttttttactaaaaattattttatatatatatatatatattatcgacatgtatataagaatttatttaaaacatgtatatattaattaaaaaaattaggtatgtgatctgagcacttctatattattatcatgatgtggatatattatatatagtaagtacagttttaaatcttaataatgcacactgtttcctttttcgtccagaagaagaaaaaaaagaaaagtatatttattatttattatttattattaattgatggacccatttcaatatagaaaagattgtgaaactagaccttaatttcaaaattcattcggatgcagaagacctaataatatataaggacaaaataattactgtatatatatatattgactgttgagcaaagaaaagatcaatattatgttagttgaactttgttgtatattttgaagaccacgtttaattagataattaataaaataaaagtttatataagaaaaattaaattaaaaatattagtgacattggtggggtacgtatgtcgtgtgaattagatgatgatctcatgcatggcgttatagaatttggctgttgaatatatatatgtattattatttaatat

SEQ ID NO: 370962 - DNA, 727 bp, Cannabis indica
ctttattgatgttgaataaaatagattacattgaaatggagttttatttagggcataaaacctaacattttgttgtgcttttgctcaagctttggagctttggttggatgttgttgattaatgttggaattgatgttattagctctctattgtggtgattttttatctgtaagaagttaattttgggtatgttttggttgaggctcgaatatatggaaaagtaggcatgtttagaccttaaaatctagttttctgggtttttcgaacccagtggctgcggccagatttatggtcgctgcggccataaaacctagcagagagccatctttttcccgattttgttttggccataacttttgactcgggactccgtttaggacgttctttatgtcattggaaagcttgtttcgagatctatatgattatctgtattttgaatgccatgattttattttatgaaagtggaattagggattaaccctatttgtgaaatcctgggttgtgtgactaggattaccggcacttgatcaggagcacccaggggtttggaatctctgttattgcgggacaacaggtaagatagttgtttgcacgtatagtatgcgcggtggcgcttatgttgaatatgatatatgtgagtaattgcaaccgggattagggttattaccctaatatgagtggttaatagtctagggttattaccctagtgatatatgttgtgtaatac

SEQ ID NO: 370963 - DNA, 451 bp, Cannabis indica
aaatttaaaaaattgtaaaataaaaaattattttcattttttttattggttcttttcagttttttttttctcatttacactgaatttgttgcattttctcaaataatatcatcacctcaatccacgcatttctttctttgcattccacaagacaatatttctttcttctgtacattgaaacacaatgtatgcttcttcaatcaacgcaacatgaacatggttcccttcattcagagatgcaagacctacacaagcacaaatagcagaagaaaatacaaaagggtctgcttccaattcaaccctatcaaaccctaactctttttttttttttgaaaatagtgtgaaaccttaactcaaaatctagatctgaaagataaaatttcaaccatttaatatttcaaatacattaataaatcaaatttgtgtaagaactgttggattttgtgcccta

SEQ ID NO: 370964 - DNA, 1121 bp, Cannabis indica
cattacaagttaagtacaaagatgtagttttttatattaattaatgtataataattaacaaagtttctaaacttcaaattagaacttcgtgtaatatgtgcattaagtcatatgggctaaattttcaatggttttctgaggtgtactacttctagttgtttaatttggtcaatcccaataagcacctaattatataattaagtaattaatcttaaccttattaattattagtatagtatttactatttttaatgatcatttttcttctaatatactctttttgcacccatttggagagttctcaactactagaataagttggactacttagacttcatattttagaacaaacggcaaaaatagtaattacatattattattattaagaaaattttatttacaccccaaaaacgtttaaagatactctattataataatttttatttatataaaatttatatctttaattgtattaagtttttttaagtttttcttccaattcatattcttaaaaaatatacctatcaaataaaaataaattatattttaaatattatgacaaaaaaaataaaataaaaaaatatatgaaattttcttaaatatatataatttataaaaaaatatatatataaaaataactcaaaataagtattgaaataacataaaataatgtgatcggaaaaatttttaaaaaaatattaagagtaattttttagaaattatttaaatttaatttttctttttaataatgaattgtactattattttatgagatacaaataaaactcttttattattatattctatttttcggagaaattaacaattaatatcttttttttgggggtgattaattaagtgtaatcaagaagactaaaataaccacctaggttgccacatgcatactctactagtaatttaaccaatgaggcccaagtccttagcaaaaagtatttttattaaaaaaatagtggaataatattaataattataattataataataaatgaaatgatattttaattttatttttgtatatagtgtcaatctcaatctccttacaactgccttatttggcttctttctatttgtgggaccagtcttctcataggtgatctaat

SEQ ID NO: 370965 - DNA, 589 bp, Cannabis indica
ataagtcatcataattaattatttttgttttttttttaattttttttatttttataaatcatcacactatgttaattttgaatttcttttttatgtatataattatttgtattcactctctctatgtggctgtataagatctaaactcttctcaaaataattaattaatcattaaaatgtgtatacatagtctatatatatatacacgttcaatattatcttaaataaatgaaattgcattaaaaaaaatattatctcaaataaaaataatatttatactaattataatatatatttttaaattcatatatttaaaaatcttaaggttcctttattaaggttaattatattgtattgtaaaatataatattaaattatattatatttatcatactgtttatttagtatttattttgatataaatcaaaatttataacataatattatataaaaatacaatatattatacggtttaataaaataaaatataatataatatagtataacatagtgtactaaatgaacttttaaatttttttatgaactactagcacgtggtatatatctattttatataaaatgtgactat

SEQ ID NO: 370966 - DNA, 1707 bp, Cannabis indica
agagaagatcaagctgcctgcatttttgtcaagtgaagcacattcattattgaaaggagtaagtaaattatatcaagtaaactcaaactatatacaattatataaatttatacatgtgacttttgatatgacaataattgatgttacttatatttattttgttttgtgggtattgtttttttatatcagctccttaaaaaagatccaagaatgcgtcttggaagtggaccaaatgggggtaatgacataaaaggcacaagtggttcaagacaatcaattggaagaaattggagtgcagagaaattaagccaagttttcttcccaaagttgatggagattgttgtgtggctaactttgagaagcgttacactaaaatggcattggtagaatcaccagcttctaccccgaaattcagtagtggtcaagacaacccttttaaggaattttaataattagcaaattaattatatattggacaagaagaagtatgtaattggtaattaagtaaggtgtattttttaatatgatagaaggatatattgaggaaaatctggctcttgtggctataaatggaacatgtgaaaaatgtaaatgtttaatgttttaatgtaaaaaaaatttccaattgtataaacattatgatttgatataaattcaaaaaataatagtgagatcttgttggtatatctcaatatctgccacacaatatagctatattaatattaagggaaaactacacattttaatgagtttttataccaaaagattaaactgttaattttttttttaaataaaatatttgggaggaaatttaagaaaataataataaagaataaaagattaaatccttttcaaaaataaaaaaaaaggataaaagattaaacttttttatgtttttgaaaattaaaatagtggtggtaaacataagaattcttgattggttgagtgtttttaaaaataaaatttgaatattaggctaacaaatgaaaatactatttttatgttttttatgttttcaaatcataaaatttaaaactctctaattattctcttacttttttattttgagattttcaaccaatcacatatttaattttttaaaacttaaaaatattaaatcaaactacaaccaatcacatatttagaaataatttttcacttacaaaatttaaatttttatttccaaaatacaatttttagaaaggttaagtagcaaatagaaaaaaaaaaatagttaaatttagttataaaaaactcaataataaaaaaaacgagaaaaatggtgatgaaaataataaataaataaatcaataaaacatgtttttaactctaatttgactcatagtcaattttggacatgtaacatgcctatgaacaaccagaataaagggaggagagagtgagaaaaagacaatttgaaaagagataaatgatttcgatcgaccaataaagcaaattgaagagttttaaattgttttaattctttcatttttactttcttcggattgtgtatattttaagtaatatattgagatgataaacgacatcacattaattatagttctaaatacgtgtgtcgtattagtctgatccatattttaaaaaatctgtaataatatagttgtatcgtgttgacccataaatataagtcgtattgtattatgtcgtgccaatactttaaaaggtaagcctaacacatctcgtaag

SEQ ID NO: 370967 - DNA, 387 bp, Cannabis indica
tggaacaatctcagcccatatgatataaaaatgagagattttttttaattagatagaaaaattaagcataaaagctaaaaatttcctaattttacccattcatggttaatacccattaagagtgcacccgtatatatatactaggggactaaaccgcacttcgtgcgggtttgacttcatttttgatacaattgatagcaacaatataaattcattatgattattataactattaattattattattattattattattattattattattattattatagaaacggtaattgatacaaattctcataattagaaataagttgaaaagaaaaagatgtaatctcctaaagagagcacatacatatgttgaattttattttaccagga

SEQ ID NO: 370968 - DNA, 541 bp, Cannabis indica
aactgataggggtggagaaatagttagtagatatgcagttcaaagatcgttaaaaaatcttctgcttgatctttagatttgacatattccactcttacttcttttttccaatgcattctcttatgtaatgatagcgggtgtcgatgtgtttggttcttttgtgaaagactagattctttgctagtacaattgctgatttgcaatcaacacgaatctcagctggattttcttgtggcatgttcaaatccttcaacaactttcttagccaaatagcatgacaaacacatgaagttgcaacaacgtattcggcttcacaagtcgatagcgtaaagattggttgcttctttgacatccaagtaaatgttgtgtttcccatgaagaacacaaatccagtagtgctctttctattgtccaagtatcccactccaatcgctatcactatatccaactatctcataattgttagaaaatgaataaaatagcccataattggtcgtacctttgatgtaccgaagtattctctttgtagttttcaaatgag

SEQ ID NO: 370969 - DNA, 537 bp, Cannabis indica
atatatatatgtaaacacatatattttttcttgaaaggaggagtcacgtgggttcttgtccattttaattttttattatcaattttaagtaaaagtgatatgtctaatcaaatcaacactttttacaaacataaaatataataaaattggttaaaataaatgttgaactgccaagttttaacgaaatagcacaaaaaatgttttaatagaaaaatatagtatacaatataataatagggtagtaaaattgtaatttatgcatgtgaaattgtaaaaaaaataggaaatctagtaccggatgtaaatttcccaataaaatatcacataagatgcatttaaattaggctaaattagtatagggcttattcaatgaataacaattatttatttaatggttaaattcttctcctctgggtcttgtgtgagggagggggccattagtagtgggtacgacatagtgaacacaaccctccctcacacgaagcaccctaattgtgaaggcacatttgccttatttaaataattgtattaggttaa

SEQ ID NO: 370970 - DNA, 501 bp, Cannabis indica
gtataccgcacttggctagattttatttaaattttttacttacacaatattaataaaaattaaataaaaaaataaatagtaaaaaaacgttgccaatatatcaataatgtattaatttatattatgttattattaagggaaattagcacagatactatttttttaacttttttttttctaaattttacggtttgggtttctaataaagtagttgcagcactagttacaataagtagtttatatacgttattttttaatttaaaagtttaggttgtaacgctagttgcaatagggatttctatgtagaatttcgtaaaatgcaaaaaaaaatattttgaagtgtaaaaataaaaaagtctctattataaatgtataaaccttatttaacttatatacttatttttgaatctctgtaaaaaaaaatatattatatattatttcattaatatattatttgcaaattcttaaaaattataaggaataaaatattatacaattgat

SEQ ID NO: 370971 - DNA, 920 bp, Cannabis indica
agggcataaaacccaacatcagcgactagtaaacgaaatgtttgaaaatcaaatagggcgaaacatggagatttacgtcgacggtatgttggtgaaatcgataaagagtaaggatcatacctcacaccacgcggaatgctttaaaatattaagaaagtataacatgaagctaaacccaaaaaaatgttcctttggagtctcctcaggaaattttttgggattcaaagctaatgcaacgggtattgcagcaaatcctgaaataatcaaggcattaataaacatgtcatcccagataaagcctaaggaagtacaggccctgacaggaagaatggcggcacttaacatatttatttcgaagtcaactgatatgtgtgtaccgttcttcaacatattacgaggcaacaaaaagttcgagtggacaagagagtgcaaagaggccttttagagcataaaaaggcatctcgcaacgcctccaattttggcgaaaccaataaaaaagacacctaattcctttatttagccatctcagaagatgtgattagtgcagctatggtgcgagaagagggtaagcaccagcaacctatttactacataagtaaaaggttactaggggcagaatccaggtatccccttctagaaaaactcacgttatgcctagtccatgcgtctcgcaaactacggccatacttccaggctcaccccataaaagtgttaatcgatcagccctggagacaagttttatcaaaacaagatgtttctagaagattgataaaatggttgattgaactggggtagttcgacataacataccatcctcgaagatccatcaagggtcaagctttagctcacttcctgatagaaggtataactctagaagaaatcccatctgatcagcgagatgcggaaacctggaagttata

SEQ ID NO: 370972 - DNA, 482 bp, Cannabis indica
gttcagggggcataatttggtatatgtcaaagttcggagaaaaaaattgctaattagccaaaataaaattctaatacataagtaaaattataaatatattattttattttatattattattgataattttatttattaaaaattaaatgcaaaattttattaattatttttgcccctgattttgtccaaaatacgtggaccaatgcggtcacgacacgtagatctgaggagtatggctttggtataatttgactaagtctttttaaacctggaggatcggctaaagagatacctcccggagaaggcatgagggaaccacgcactctcggagggcgaagctatagcaaagcacttctgggcgatatcagacaccatctgaacagtcatctcgcatttaatgtcgcatgggagaaggcgtattggtactgccataaatattaaagtctgacggcgtaaccccccttctgcagctattacgctat

SEQ ID NO: 370973 - DNA, 564 bp, Cannabis indica
aaaaaaaaaactgaaaaaacaaaaacaaatgaaaagaaaagaaaaaaagatagggaagatattggaagttgattgatggatgatagggaaggcacacgtgtctgtgcatggaaatgatgtgtaagtggtataattgtaataaaagaaagaggaaaggtaaaaatgatgaggtaagcgtgtaggggtatatttataaaaaattgtgtaaattagatttttggtgtaaaaatttcaaatccaaatgataacttaacaattagattaatcacaaattcatatgtaaacagagcttttcaatcacaaaaactcaaccagatttatgtattagagatttatgatttttacatcaatataaattactgatgactaagattgaaataaatataacataaagatggaatgaaatagaagtatcccaatctatatatttatatatatataaagaaaattataatgcggtgatgtggtactctcaaatcactctaaatagttttttctattctctccttaattctctcattttttaattttttaataggtttataaatattaattatctaaaat

SEQ ID NO: 370974 - DNA, 635 bp, Cannabis indica
ggttcgggtccacttttgggtttgggacttggttcaggtccgggtgtgggttcaggtcctcgttagggttcgggtccagggctgggtcccaaatccagaaactgactacgggtttttctaagccctgggtccagatccggatcccaatctcgggtccttgtgtggttccattttttgtgccggatcaagagctgggtacaaggttcaagttcaggtctaggtctggtactaggtctcggtcttaattctgtttcccatgtcaatatcttgattctgggtccaggtcccggttattgtgtgggtttgggtcccggtctaggttcggtttcgagtcctagtctcgattcgggtttaggtctctgtctgggttttgatctgtgatcgggtttgggtttagatcctggtcctgttcctagtcctagttcggttctagttccatttgcaattcttagttcgagtttgggtttgagttcggatcagagttcgagtcctggtctgagttttggttcgggtctggattttagtctaggtctagattaggctccagatgtgggatcacgtcctgggtcttggtctatgtttggtccgagtcccaagttccaatgaaaatctgagtctggattcagttctgggtc

SEQ ID NO: 370975 - DNA, 471 bp, Cannabis indica
cacccaatgtaatgtttctcatactttatatgtgttttaattatattcgttttagaagttcatatttaggttgttaatcaacatacttgtgagtagatctaagatccttttaaaataattccaacagaccatgatagaggttaaggtagcactcaattccaaagaaatacagaaaaagtatgatgaaagatcagatggtgttagggatggtttatttgttaaaggcagaaatgaaccaagagatcccaagggtgggcattgcaagccaaacaagaagaacaatcaaaactaagggtacaacctggggtacaaatccaagactaagtccaaactagtaaaaccatgttactattgtaagaaggaatgtcaatatacagatgaatgctacactctcaaagctaaattgaacagagaaaatggaaaagagagaggtgatgcagtgattgtctttgatggttatgagtctgctga

SEQ ID NO: 370976 - DNA, 764 bp, Cannabis indica
gatctcagcttcatgattaacagtcttttatcttaaaagcatcaattctgtgtaactgccttcgtcgtaggcgtcgtactcgtcaacgttttcctcgtatttgccatcggtggcctcctctcgctcttcggaatccacgttgactcttgaggccacttcctcatcttcagggttttgagcgtcttgaggaggacggggctgacatgtgttgcgagtttccaccattgatgtttaacttacaaggttcttgtctacttctagatgattccttcaactctcaatgaaagcaccaaaatgttgaccgaggtttttggcaaccaatttaataatatatatgagaaaactgtaggaagtctaatgcatgagattgttacgtggttggggcatgaatgagccttaggccacgagtctttcttatttatgagagtatttattacagagaatgttcttggtagtttttcctcttagttgctctctttaattcttatgaacccagaattctcgacccctgtcttagtgtgtttaaggggtatttatagtgttttttctgggggatccctagaactgaatcacttgtctttctgtgtagtttcagtaggggcacatattcccagcagatacaaaataggaaatacatgacctataccttaggtatattaggtgttaggtggatatagtcttttatcccttcttgattgatgtgatccctcataaagtagctgtcactagccttattactcatagcgtaatagctgcaaaagggg

SEQ ID NO: 370977 - DNA, 653 bp, Cannabis indica
tgtatgataaataattatttttcgaagcatcatcatttatttttatttagtaaaaaccaattttttatttttttatttgttattagataacacttattttctatcattgttgtctgtaattgtaacaaaatgcatgaaaattattatatgttttatatataaagttaaaattttagcttgaattagatcaaacgaaattagtttttttaatagtgtaccttctctatctccgaatggttcccttagttttgtgaagaaccattcccaagagcaatcattttctgagtcttttatcccaaatgctagaatgaatatgttgttgtttgcatccatgatagaagcagttaatagagttcctccaaacgatgtttttaaaacgttccatcagttacaatgactgacttgcaatgtttctaatattctattgagtttaaaaatacttgatataaatatttgaaacgatctttcttatctgtttccaattgtgcaattgttttaggatttgctacttttagcatgtgtagatattttggtagttgctgataagattcatcttgccttcctcttgctaactccaaagctttttttcttgctctccatgctttttgatagcccattaaaacttcaaaattatcaatcatgtctatcataat

SEQ ID NO: 370978 - DNA, 610 bp, Cannabis indica
tagacacatcattaccaattttatcccataagtctttgtagaaaccatacccgaacccatccaatcctgggctctttgttgagtgaatgctgaaaagagctttgttgacatcccccttgttaaaaggcttaatcaagtttttttttttgctccaaatccaggcatttactccgctataaacaagccccatcaatcaagctagaagctgaacttttgctgcccataaagttttcaaagttcttgacaaagtgtttaaccacttcctcaaaatcatcaatgatagtgtccccctccatgtacgttgtgatctcgttttcaagtcttcttttcctcataaccgcatgaaaataaattgtattctcatcactaaatttaatccaattaaccttgctttgctgtctaaggttctgctgaaatttgtcctttgctgcctgaaacctctgttgtttgaccgaaacttcaagttgctgctgtctgtcatttggattcaaagctgctgcttcttggattttacaataatcctctttagccttcctgtaatctgttataacatccccccacctcctttctgttgaaatttttttagagcatgtttcactctaaaaaagtc

SEQ ID NO: 370979 - DNA, 657 bp, Cannabis indica
tttcccaacacacatgcctcacaaaatggtagtgaattgagtttgaaatttcctaggagcccttgcttggtcagttctttgatcccttgctcactcatatgacacatcattctctaacacatttccatctcaatttcttgatgttgcataacactagcttcagaaaccagtattgtttctccttgtaaaatgtacaagccattcttcttttcacctttcatgatggtgagagacccttttgcaattctcatctggccatcactagatttatagctgtagccttcatcttcaagagttcctagtgagatcagatttcttctcaactttggtatatgtcttacttcatccagcattcaaatagttccatcatagtgctttatggccacctttccaatgccaattaccctgcaagaattgtcattctccattagtacagtaccagaattaactttcctataatcaataaaattttcaagagtaggatacaacttatgagaagtttcgaggatactctcataggcttcaagaggtatactctaaacattattattttttattattttgatttaatgtacacacatcttgagattcaatgggatatgagacaatgataatcaaataatacgaaattcttccgatgcgtacccgatttagtac

SEQ ID NO: 370980 - DNA, 533 bp, Cannabis indica
gggtctaccctgcatgatgaggattatggttatgcggtgtgaattagatcgcacccgcaatatctcgctggttttatcctgggcgaggtctaaacttcgagaaggctctcacggacacattcagctttcattgggaatttgaatacacgtgtccttttaacgaggagtctggtctcgagtttctaggtgagagaaatctcactataacagattcaaaaaaattattttttttttcttctttactcttttaattttaaaaaaaaacaagtggtttaatttttttttttagtttattgtctagttgtatttattattttgctattacattagggtgtttagttttttttttatttttttattttttatttttatattatttcattttgtacactttttacttttaggattagacacttatattttttaggttagttttagacttttatcctttaggctaaaaaaattgcatacaatttagttcataaaatattttccaaaaaaaaaaaaaacctttagtgtcaagaacaattgtg

SEQ ID NO: 370981 - DNA, 526 bp, Cannabis indica
tgcttccgctaatatttaatcatcttcttctttaatttagcaaacttttaggaatatgtttagatctgtgatttatatatttcttaagtattttacaaaccttaacaactgctaccagagccacttttgttgaattaattgaagatgtgatgattttgtttatgaaatttgggattttttaaaattaagatttcttgatcataaatattctattcctgccgtatggtataaatattttgggtgattaatcttgtgttcgttggtattatatacaattgaaagaatatatatacgtttaggggtcatatacaattgatcaattttttttttaatggattgtcgttgattcaattctattgtgtaagtctttccgccattaatgcttattatatatatataattgtacggctcgaattgtgtgaattcatatcgtttaaattttatatatatactagcaaaaagttacgtgtgaggcacgtatactaaattttatgctagttttttttttttttatgttttttgaaag

SEQ ID NO: 370982 - DNA, 874 bp, Cannabis indica
taatttttttttaaatttttttgctataatatttaaaatataatttaattttgtttgataggtatattttttaagaatatgaattggaaaaaaaaaaaagttaaaaaatttaatacaattaaatatataaattttatataaaataaaaaattattaaaatgaggtgtcttaagaaattttgtagggtgtaaataaaatttcttattcaaaaaataagaaatttatttgcatcccatcaaattattaagggatttttacactagatgtcaaatttgacattttttttacatttttgttactacacggttttttaaacttttttaaaaaatatatttttcaattttaaatttcaaaaagtgtgttgtttataattttacctatgcatgctgatatcatccttttctcctatgttattgttcccttgttcttcttttgtttttttttttttctcttttctgttgatttttgtttctctgtgcataacctgcgacttggccagtgtaaaccgtccctaacttctgccctaacccactatttttccaacctcccatttcagtcacaatctcttctcttccataacctcattcccttctcatttttttctcgttgtgtataaatggctaccactaggttgggttccatgtccccttcccctgctaaaaaaatttcaaagaatcctaagaaacctcattcgaagtcctctaaaggtgatcctaaaatgagtttgaatggcattgccaagaagagaatgtctaatgtggctgatgttgcagaggcttctggttctaaaaaaagcatcttccatctaaggttgaagctcgtaaggcaaagagaatcaagtctttgaatcagttaaggatgtaagttttctatt

SEQ ID NO: 370983 - DNA, 1621 bp, Cannabis indica
attatataataaataaaaaagtgacatgtaatttctacatttaaaccatttttatttttaatataaataaaaagtcactcattgaatttctcataaaccagaattttgttatataggcacactttataataaaaaatagatataatgtattacttacttaaaaatattaattttatttttttataaaagatttactattttattttataagttaaatttagatttttatttcttatcattattcatattttaattgaaattctattttttcaaaagaaacaaaataattcaattaattcgaaattaaatgctgaattttttttcggataatctaatttaatctagtccaatccaaattatgaaaggaccaataatgagtaatagtgtagtgtactctttcattttggtgggtcgttagggtcaaaccaactgaactgaatttttataagtctacaatttcggtggaaccttaggaacgtgcaaagaacattcacaacatatatgaacttacatcacatataattaaattaaaagataaataaaaagaaaatatattattatatatattaagccaatattgactttttcatatatgattattagaataatataagaaaaaaaaatatgattataaagtattccgcagttttaataggctcccatttttcataatcatacactttaaagactaaataatgtatatatataatagtagttgccaaattaaaaagaaggctagctatataattatgagctttatcaaagaaaagagaaaaagtgttgatatttataagagataattattaagtccaccttttcattctataatatatggatttggttttaaaaatcaaactagacagcctcactagctagaagagatgagaaaatgatgatccaatgaggtagaatccactatatttatatatatttatctatataccaccactactacttgatatatatatatatggtgatatatactatataatacttttgaagtagagaactgagttttggttttttgtacatataataaatggccagtcctgtgtttgatgctctatattgatatatttatatatatagatgcattatgcttctttaattgagtcgaatagtcattgtatgttcttatgggatttcttttattttttgttttatatctgttgctcctaaaatcgcccaatatacgtggaccagtcaggaagggacacgtggatcaaattacttgagagagaactgctaagtctttgtatgacaccaggaagcgttattcacatgggtcccggaagatgcacccggagtacaaggtactcccggaagcgagcatagctcaaaggcactccgggatgtgtcaggtctctcccgagacatcaagtcgcatttaatgctgcatgggaggaagcgtgttgggactgtacacgcaataaagtctgacggcacatcccccaaacagcagcgctacagtaatgatcatttaagtctagcgacggctactctgcgaagagtcacgtcaatcataagacaaaaaggacattctccataaaaaccctacagcacctagggatttgaccatgcatcacccatggtatattcatcggaaatgcccaactttatg

SEQ ID NO: 370984 - DNA, 556 bp, Cannabis indica
taaagtcttgcctctcttctttgaaagctctttcggatagggtgcattagggcatgtttcactaggtctagatatggagagctcaattgagatgtttccactaaggactgaagatgagtagttgtgaagataagagcttcatctagtatttcttctctgcgaactctcatttgtgaagcttcatacaagttcaacattcctcgaatgtcactcgaaattgattccttaaattttcctttctcattcttatatttggcaaatacctctatttttacattgacattccaaaccaattaacacattagtattttccatgtgattttgtaaaaatactatcatagtaatcaacaaatttaattatcgaagatagtaaattttctttattatattattaactttgaagagacttaaaatattttatcataatgttgatgataaaataagaagaatattaaacgtgacatataatataataaatattaaagtgaacatcacatttaaaattattattatatatatcacgtttaatattatattactaatattattattatta

SEQ ID NO: 370985 - DNA, 700 bp, Cannabis indica
aaaaaaaaaaaattatgtgatgactattttttatatgtagtaataagtagtgcctcattcacaaaaaagttcacatttctacactccaaacaaaaattataagttcctataaattacagcaaagagcatacaagactagggatgtaaacggggtggggcggggcagggtttacccgatgggagaaggatttccatcgggtacccattacatatatatttttgaaaaaaaaaatgatgtctcaaagagaattaaaaaaaataatcataaaaacttagtaaaacaataaacttaaatggaacagtgtgtatagtaaaaaaaaaagaatataatgaataaaaaaatttaaaagcaatgaagttattttaattataatagttatgattttaaaacttatatatatatacatatatcatattggggcgggtatctattctcttacccccactctgttttcgactcgcgtatgaaattttaaacccatatctgccccgccctcaaaagttaacccctgtacccgccccattaaaagcgggtacccgcaagtataattatcatccctatacaagactgaattttttggccgcgtgacagattgaatagagatttaacctgagagtgtagcacaaataataattaaaaaaaaatagaaatgatgaaataagagaaaaaaaaaactaaaataataaataaagaacaaac

SEQ ID NO: 370986 - DNA, 567 bp, Cannabis indica
tataaaaactcataaaatttgtaataattttacttaattatttttaaaataattagtaacaaaactgtaattaataataataaaaacattttaaccttgtgcaacattgggaggatgttttaatctttgtaatgtattggataggatgatatgaaaagacaccccaacaaaaccatttaattattccattcttttttatagaatatagaagcaagttaatatttgaaaaaaaaaggctaaaagttaatttactataataataaattaagttgatatcttaataattagaataattatcttttttaccccctgtacttatgacactatactattatgccccttaatctattcagcttgttacaaatagtccttgtataattttatatgcatacatttagtccttctgtttattttgtttaaaaataaccgtttgtattaatgatgtggtattataacaaaagatagagtagtaatttcatctctttttaaagagaaaattgactatgaggtggcataataactgacaatgaaagatgattaaaaaatgatttcataaccttttaaaaa

SEQ ID NO: 370987 - DNA, 339 bp, Cannabis indica
tgtcttaccatccttttcacacaaactatccatccttatatatacatacctcttacatacccatctaaccctaaagggttatataacttattgggttaataaggactaattgatggtggactataactcaatgggccaattatagtcatatgggtgctctcatgtgcctctaaataattaatagttgttaaccatcccattatgattgtatgagaaatattaggcacataattaatgattgttgttatagtattatattagtccacaaataaataattctaacattctcccacttggacaatataatcaatcaccataacattgtctactacacataag

SEQ ID NO: 370988 - DNA, 998 bp, Cannabis indica
gtggtgttgagattgctctcacaactctttcatatataatatatatatatatattgtgtttatgtgtagcttattgctttgagttgtaattcttctcctcatctctatattctcttattttatgtgtattattttgtttagagttgtaactttatttagtccgtgtattttttcctttgtattatttgtcattgagttgtagtcattgttggttttgatatttctattggagcacaacaattttccaacagtcaaaagcttatccttcctaccttgttcagtgaaaggtgagaaatcaacatgtgataatacaagggtagaattgtgatatttgtgattttactattttttatatagtataatatatattaacatatttttctatattgagatatatgtatatatatatgagttatatatgtataggtgtatatatctatagagtgatatataatctgatatttgaatatgtcactggttaatatgtatacgtgagatatacatactatataacatgtatatcaatttatatattatatatattgaacaaatgataatataaatttatgatgagaatatttatgtatgtgatacatatataatatatattatgtggagatgatttatattatgatgagtacatgttatatgagatgataataacatacataatatattacttggcataaaatttgggatttataattttatacatgagagttatatatattattagtatatgataatatatgtgtaactaataatatttagtgtatatgataataataatagtgataatgatggaaaagatgtattcatcattttttgaatggagttttgaaattaattttccattagtgattttatctcattttatgagatgagaaactaaactatgagagttactcttttttgggcttatctttcaaaagagtaaatagatcaaagtggatctaaacttgtaaaatgagtcataattggaagagcaattttagact

SEQ ID NO: 370989 - DNA, 697 bp, Cannabis indica
aaataatacaaaagacaaaatcatagattaaataatattataacactaaacaaaatatacacataaaatagagaacagagatgaagaaacgaattacaactcaaagcaataacctaaaacacaatatataaatagcatatatataagagatgtgagagcaatctcaacgccacatacaccacaattgtataatagggaaatcactaaacttgaataaggtcttacacctttgtccaaaaacttattttctccctaccacaagcacttagagaaaaggaaagaatggaaatagctttctagatttatcaagcttatagtttctagcaaggtgctctctttgatagaaactcacaaaaattgtatcttcacaagtgaaccgaagacctctatttatagtgtttaagatcacatattttgaaattcaaactcataaccccatgaatgttatgtaactcctgcataactcctataacattaagaatttcaaattaaaatgtgtaacacctttttacacacttaatattggtgataattgtagaggttacaaaatgtaaataactccacctcttatattacaatttatgtgaatattagatgtatgtaactctcaatcatattatatatacattaatctcatattaatatataatatgtctcattttaatgttttaatctatcttatattataacaatataa

SEQ ID NO: 370990 - DNA, 851 bp, Cannabis indica
caaagagttctgctaacagggcatcttgatgaaaatataaatgatgatcgatagtcattataaaaacctcgataaggtaaaattaaagatcacctgcaatgtgacagatcaaatgtccctcaagaaaatttcaacgattagacaacaacatgtcatcgcaagaactaggggcatgataagggaccaattcccatagtatttccttacatgatcgaaacttgcgagaaggtgcgactgagacagggtctagtcgcacactatgcatcgcatagtaaaaagaataaaagtgggacgtagagagaagttagcacagtcgcgacatatatcgagtatattcgatgacctggtgtttctccctcgagcctatgtaaagattgcatctttaccagcatttggtccagatgaccaatgtgcacgacaactcgaccaaaacccgcgagttctatgttgtcagcacacgaatgcccgatatgcgacccgtttagtcgcaggcattccatgaaataagaaccccgagaggttcgtacacgaatgcccgatacgcgacccgtttagtcgcaggcattccacgagttaagaaccccgagaggttcatacatgaatgcccgatacgcgacccatttagtcgcaggcattccatgaaataagaaccccgagaggttcatacacgaatgcccgacacgcgagccgtttagtcgcaggaatttcatgagctaacgaatcacaagaggttcatacatggatgcctgctacgcgacccagtttagtcgcaggcattccatgaaataagaaccccgagaggttcatacatgaatgcccgatacgcgacccgtttagtcgtaagcattcca

SEQ ID NO: 370991 - DNA, 887 bp, Cannabis indica
gtacttatgccactatttaccaatatatatactatcatgtatatatatatatatatatcttgactatatagtattatatatacatactatatacactctttatatctctactatatatcatctattttatatatattctatattatatacatatacactattagatatatacatgtttttatatagtttacatttgcttatattttttagttttaagttataactcttttcttctatttgtattttgtgctttgggactgaaactttttatttaatatattgtctttatattttgcttagagttgtaattgtcttaattttttaatctatcttattttattcttccattataatctcttttttatttctaacaagtaccaaatgaaccctaaatgccctaaaactcatctcgagcatgacaacagttttcagcttcatgtgtggtcccaaacacacatgtataatgtacgtcagccatatatttatagtaaaatagtatagttatataaatatcaattcaatactacatatgcaagatgaaacctcccataacactaattattattaaattatcaatattaataaattatatttaaattgacgattattttgagtaaagttttattcatgtgggaggttactaaatgtttggtttagtccttaaaaaaaattgtgtggattattgtaagggtcaaaggatgagtgaagtagaatccttttccaaaaaaaaaatgagtgaagtaatggtagatgtaaaatgtgtactatcttctttacctaaataatacgaggaaattacattgtatatccaatttgctttatttgttttaatttttacttctattttcatatttttttttagatatacccacttttatggatgatat

SEQ ID NO: 370992 - DNA, 602 bp, Cannabis indica
tccgcgcgcgtgcttcagacaaaaattgtttgaagcctcggtcacgcacggtctgctcgcccacgtgaccctgcaatcgcccgtgtcccaggctgcaggtgctgagatttctcggcatgataccctgctgaagccccctccgcgcacgcaagggccttgtttgcagcttgtcaaggctgcaggtgcaggcctcctgggcagctagccacccaatttcgaatttttgctatttttcaaaccctaaaattaaaataaaatattttttttatatatatttaaacttaaatatcaattttaaattaataatatttaatttaatagattataattaataatttgatattttgaggtttaaatttaaatattgaattattttttttttaaaaattatggtcagatttaaaaatttgttaatttctttaatatttatatattatttaattataagattagatattttaatattgggcatatttaaattaaaagataacattatagtttaatttgaaatattattataaaatcaccgtatatgataaattaaataattaataaatttgaaattaagcctaaatatttttattagatattctaaccataat

SEQ ID NO: 370993 - DNA, 455 bp, Cannabis indica
gaagactggcttgacatgtacattggctgtaaggacttgatcgactcatggttcagtaagcttttagttaaagatagtttgttaattttcttgattgcctgattatctgaattgtgttgatattggaatggtgtgggcaggactataatatatggaaatacttatcactattgttattactgggaatgtgaccgcatgtgtatagattatgcacctgaggcagactggtaggggtacccgtgagctagctgggctcagggctgctggtgagggcgagaaccctccaccaccacaaaactaggaagagttttatgctgcaatgcaagagactattcggcaacagggtgagcaaattagagaatggagagagcagcgagctcagcctgctctaaacccgaaccctgatcctccggcacctctggtagtgccaccggatgcagggaaccgtttggaac

SEQ ID NO: 370994 - DNA, 574 bp, Cannabis indica
acccggtgtttccccttacggatcacgggactactgactgtcacagccctcgctttaatttaaactggtattggggcgggtatagggtgaatttaagaagcgggtatggggttggtgggagcaatccccgcacccgcacccgccccgccccatttacatccctactatagatattgtaatacatcaattataacttataagtaagaaaattggaaagacaatattaaataaacataaagatatagtgaatgaactaatatatatatatatatagatatataattttttatttattttttctaattattttctctattaattcatattcacattaactcatatatagcactatcttttcattgacatatgaaaaaattattattattaaaaagaagagtatgttcaaatttatacctaaattaaagtaattattatgattttgaatattaatattattcagttacaaaacaaataagaggagtaaataatgaaaaatattatctttatatattaaaagtgtttatttaacggcattttttggtttaacagaatatacttaaaaataaaagaatat

SEQ ID NO: 370995 - DNA, 654 bp, Cannabis indica
ggttttctagggttctaaagattttcaagcttcttcctttttatcctttaatggcagctaggtttttactattatttcttttgcaacttcttctacccatatctaaacccagaaaaaactactcactcacggctccaacctctcaaaaccgaacccagaaaaacccctttaacttcggccaaaaactttaacacaacccgaaaaatagtaagaacacaaacacacacaaagacaaatataaacaatataaagattaaggtgagaaatgcaaacagaaatggtaaatatggagacaccatatttgatctcggagttcgcccaaaacaaccgactacttctccgtcaagccctcaacttgattccactaatcatcaaataacaggttacacttttgatttacaactatttgtatttctctctgtttttctctctttggatactaacaaaactctcttttcgtttacatgaacatatctaggaggagctcataaggagatgacaactctcagccaaaaaggctctcttttctctgttgttatttctgatgttgttctctgttgttgttctgtatttttactccttgttgtatctcttattttgtatctgagaaaaaatacttccttttatagactgatctgtgattctgatctaggg

SEQ ID NO: 370996 - DNA, 536 bp, Cannabis indica
aataataataattaaatttaattgtatttttttaatatataaaatttaatctataagaaaatatatctaactaatttttattttgagtaatctcttttattgattttccttataaatagtgaagtgatttaatagtttaggggggctgaaatatttcatcttttatagagagctcttatgctgtcaaaatatttgtacacttttatcgagattgttaagaaattcacttgactagatccttgtgatcttggcaattcatcaaaataatacaacaaaaaggcgagtaagctattaccactatcacgggactaaacctctataaaaattcttgtgttcttattatattacaaaatgatttgagagggaaaacctctctgttcgaaaatggagaaagaagtctgaatgactttgtattgattaggtttagtttgtacagagaaaagatgtatatatatgtacaatatgtgggtcagcccaataagtatatgggcttaagtaattgggcctattctaatacccccccttcaagatgaact

SEQ ID NO: 370997 - DNA, 637 bp, Cannabis indica
aaaaaaaaaaaaaccttaaaatcacatataatatttattaaattattattttagttgatatttttttcatttatgttattttttttagtttcataatgttgttttattttatttaatattattattttatattttctaatatattagtatttaaattaaattatttaattctattttaagaattaaagtgtaagattaatttttaaaataaattaaaataaaaacttcaagaaaaaaaaaatttttacaacaaattattagactcaaaatttaacactattaataatatagaatttgatacatactaattttttttttatttaatcaggagatttattaaataaactcactcaaaacaatagaacgtacttcagaggaacaatcctccaactaaagcacacaacttgtagagaaacaagagtctcttgccaagcaatgagccaacttatttgcagattgtttaacaaaacataactcaacaaaagatgaagacaaaagcaaattcctaacatcttgaacgataagaccaaactgggaggccatgaacactttactttggactgcttgggcacacaacagactatccgtttctaacactacactatcccagggatgagtcgcaatccaactcaacgct

SEQ ID NO: 370998 - DNA, 1029 bp, Cannabis indica
taaccaccgatccttggctgcctactcttgacagaacaactcctgttcccactgtcccgggacttgagaatttttcggttaatagcttgtttcaaactcatagtcgctcctgggatgctgatattgttaatgacctctttactctcgatgatgctgcaattatccttggcatacaaataaaacaggcggtagaggatgatttttggtactggtttgcggagaaaaatgggctttatactgtccgaagtgcttatcaattaatacaagatcataagcattctccagctccttcagaaggccatctgttttggaagaagttgtggtcacttaaggtgcctcctaagactaaagatctggtgtggagagcattcgaactgcttagcaaccaaggtaaatctctgcatcaagaaggtgttgaccgataataagtgtcctttgtgtggtgtgtttgccgaaaccgagttgcatttgctagtttcctgtcaatttgcttgggcttgctgggagttctctggctttaatgcagctgacagaaactccgtctctttgctgtcatggtgtaattccaacgctgcccgactggatgatgagaagctttgccgagttgtcacgttgtgttgggcaatatggtcagccagaaacgatttgctttggaagaatcgggttcgaagtgtaaaaaatgtggttgattttgcacaatccagtctgcaccagttttcgaaagctcaaggcaaaagcaacttacctcccctgtcgcctcttaaacctggtgatggctcagaggtctggattaaaccgactgtaggcatcaagttgaatgtcgatgcaacaatttttgaacaagatctcaagcatggattcgggtgtgtgattagaaatactgaaggtgaattgatttctgtttttctggtgctaagcaaggcaaagttgcaccagaaattgcagaagttgtgggcattagagaagccttaagttggttgaaaaatcacaactactcccacgctgctgttgaatccgatagtctggttt

SEQ ID NO: 370999 - DNA, 926 bp, Cannabis indica
ggcatttaatgtatcgagacaatgaaaatccaaatctggtttgtgaatcattctaccaaacaagaaataggaaacactagaaatgtggacaagtctctttcatctggagtatcttttgtcagaaagtatatgtgctcctaattgcccatggaagcaacagtatatgctgtcgattatattatcaaaaattaataatcaataaaatatataaaccaatattacttactaaaattagttatatcggattcgttatagattgtattttaaattactaaatttatttaaccgttcaccacatcaaataataattaagatcactaactctactgcattaaatcaatatgaacctaattgctaaggaccagttttattagaaaagagaggcttaacaaataatattctatatatgattattaatgttgagtgtaatacaaatttgtcatgtaattaccttgtcaaaagaaaaggaaaatgctgaagaccaaattaagatgctaagtgttttaagaggtgacttatagtgtatttcaatatcagattctatatatttttaatttgataaataatataaaaattcgttgattaattataggatatactacatcaatatagtgttgttagagcatctccaatgaaaatatatataaataagtaatgcaaatataaaatatggctcactttgtcaaaaatttattctaatggtgtgtctaaatatgatgcaaatgtctcacataacaaaaaagttatctaaatttatatcacaatataatatgatccaaaatttgtataacaataaatgctataaatttatatttactattatgctatttttaatatttttattaaaatttagtttgcatgctcatctacattaaatgatttcataattattattaaattttatatttattattgtatgattatta

SEQ ID NO: 371000 - DNA, 536 bp, Cannabis indica
atctttacagattaacaatatttttttttgtaagtagattaacaataaactttaattctcgacttaaatgctatctttcaattctattttcatatatttaaaattctcattccataaactttctactaatattttcaattaatgaaacgaaaaagcaaattttaatttccgtataaaaaatcaaactctcaatctcaataatcaatagaaataacatcaaattttaagttctcaaaatctataaaaataaaaaataaataaaaaaacacatctcataaacacaaactcaaacaatagaagctcagtaaaacactaaaactcaaacattaaaaatacacacaataaaattcaaaaccagaacttaacgcatacatcagaataaaaattaaagtataaatgaatcaaacccaaactcaaaattgtcttcttcttattctttggcttggtttctattcaagaccaataaattaggtaccaattatattataaaactgttaagtttagaaatttgaaaatttatgctactattttttgaa

SEQ ID NO: 371001 - DNA, 514 bp, Cannabis indica
aaagagttttatttagggcataaaactcaacaatttttgggtataaataaaacttctctaattttatgaagataataaattaataaaccaaataattctatatatttaaaataagtttcttaacgaaaaacgttacaaataccaaaactcatatataaattttacttattttgtagaagatttaagacttgaccatgaacccaccactaaaattaaaaccaacacaataccaaaattaaaacgaattataaatttttgagaagttctaagactcgaccatcaaagccactacacaaaataattaatatccattaaattaaaaaaaaaataagttgcaagaaaagttataaatataatgagaatatttgacaaaattattgtcaccatcagagaaatcatagcgaccaaaaggttattgtagttagacatcgaagttgtcaccaatgttagacgttggagttggaccttgcaatttgacaaagagaaatcaataatatttatcagctaattaaaa

SEQ ID NO: 371002 - DNA, 940 bp, Cannabis indica
gatctgagtgggaggagacatattattccacttcacccaatgtaaggtttctcatactttatatgtgtttaattatattcgttttagaagttcatatttaggctgttaatcaacatacttgtgagtagatttaagatcctggtaaaataattccaacagctttctgtaacttgttcattgttttcttgaagtttatgaaatgagaaattttgcatgcttgaggatttggtggctgtggttgttttttatgtttggtgttgatctctaaagcttaattatgttttaatatgatgattcttgtggttgtttgttgattttaaccaagtttgagttttgaactcaaaacttggagctttaatggtgaattgtgtttctgtgtatgggtagttgttttattgctttagaaatgatctttggggtctaattagcaggtctgaaaattttgaattggtttggggttggattggtcgagttatgaatttttgaaaaattcctgcactgaaccggaattccggttcagggaggtctgtaggagccggtctactggttgacttccaggaatttttcccagaatcaaaatttcggttggggaactggtctaccggttggggaaaatttgggaaccctagttttgcccatttttgtgttatttaggttattgccatgttatttatcaatagggaaacttttagtttcaagtttaagtccccgggaagtgatttagcgtgtcattaatcagtgttgtgattaatgtgatttaggagcctgtaattcgccgagcagattgttccactcaggttgaccggcacacctaaattcgaaatcgaggtaagattagcataacagtatgcatatgtatatacatatttagcgtgcatgttaggaagcctgttagattacattagatatgtatgtttggcttcgtaccatccgacagtat

SEQ ID NO: 371003 - DNA, 575 bp, Cannabis indica
cttgaggaattttttcatgggcagccacctttgatttcttctttggaggagctcgcccatgtttcgacaatggaggagcgaagtcagagtcatcgtcctcaacaacagttcgtttacccttgttcctattagctaaagatttcaactccattttggaattttttttgtttgaataggggaaggagttgatgaagaacaagttacagccatatctatatatggattaggagaaaaattaaaagatgaaaaatgattttgagattcaattaatggaagttgaaagaaaaaaattgaagaacaaaaaaaaataggaaaaatagagttgggattgtggagaagaaaatattcagctatggagattactatttaaaaaaaatgaaaagaaataaggaaaaaaaaaaaaaaaaaaaaagaaaaatagatggatggttgattgataggagtcataggtcagcacgtgaaccaatgctttgaatgagtgtgcatgtggtaaaatagtaataaaataaagaagaagagtaaaaaagttgatatagccgtgtagtagtattggtgtaataaatattgcattttgt

SEQ ID NO: 371004 - DNA, 766 bp, Cannabis indica
aatttgatgtatagcattatctattttattaaccttttctatattgtattaggttagtatattattatagtttattatattgagttatggtcactacttacatttttattgtaatcatgatgattacattttcttttgacttgtaatagcaggctaccgaaaggtaaaaattctttctttaaaattaaattaatcataattaacaattttcctaaagtaattaattttaatttaaatatttagtaagaccaattttagcaattaatatttataaataattttatttttatatttaagtccctattataatatttttaacatttaaaccatttaactataatatttacaataaaattctatttttttttaacaaaatttagacttccaccccttctaaaataaatttttgaatacttaattaatttttaaaaattacatctaattattattttgcaacaatcgcttgacccatcttcctcctttatatataaaaaaaaaataaataaaaataacaattagggtttcaatttgtcccaacctaacaacatgtacatttttcagttcgatacaatctcctacatctatgccacaaatccatttctctatttaaccagctacagttagatttctccttaatttttaataattttcttgctattttcctactgttatgcttatttgtaaaaaggaagtaacaatttcaattaattggtaatgtttgcccctgaattcgcccaaaatacgtggaccagtcgaaatgggacac

SEQ ID NO: 371005 - DNA, 568 bp, Cannabis indica
tttttaatttctgaattgtcttatttaattcataaaagtattcttttaccagatagaatcaatagtataatttagtagtaattagtccaattccctgtggttcgacctcacctgtgtgagtttactacttgattgcgtatacttgcgtagtgtttataaattatagcaacaattgtattacaacaagctactagatccttgtattacgactagctattagatccttgtattacgagatgttgaatgtttatcgaaataatatcccaacaatgttgaaataccttattttatgaaccttgtgatctttatttaaatggagtcgcctcacaggttgagtcttgagtttattcaacctatccacaatgtatttgttgcgagaattattatttatgtcatgtggcatacaatttgacttgttcattaaataggccaaaaaaaatgagtataacacatataatattttttaaaaaacttaatagatcaaatatatatccaatttttatttataaagaaaatataatataaaacaaaattaaacatttttttatatatacaacttttttcttct

SEQ ID NO: 371006 - DNA, 762 bp, Cannabis indica
agaaatatatttctatacaaactaaatattatgtattttaaaaaatatttatatgtaaaaaatttaaataaaactgtaatgtaaataagggattcaagacgaagttatgttcttcgtccctaagtgaatacttggaagaattagggatgaggatgagaatggatagtgtattatgcttattcaatgactctatcttaaaaaaaaaaaatatactcatactctatcctgttagtctatttttttgcggttaaggttgagtatagagtactcatataaataacccaaacttattagttaatacatatatatatactagcaaaaagttacatgcgaggcacgtatactaaattttatactaggttttttctacgttatttaaaagtgatacaattaaaaattaaagaataaatataaatagctattatgtgaaattattattatgtgtatctaaatactataatttctaatttttgacaattaaaagtaaataccagatgcaatatattagtgtacactgtattctttgtggagttcttatctgcagtagtgactggtcaaatcaagactctaacaataaatgttgtttttgcttttgatagaactatagataagtgaaaaacctgttggagtaatctaatatttggcctagacttatttaatcattgcaaaacttaaatcttataaaaaattgagtttgttaaacgaaaagccactattttaaaacaaggatgtggtagagaaataggggaagtagaaacttga

SEQ ID NO: 371007 - DNA, 991 bp, Cannabis indica
atgagagaatttattacagagaatgttcttggtggttttcctctctagttcttctgaaacccagaattctcgacccctgccttaatgagtttggggggtatttatagtgtttttatggggtgatccctagaattgaggtacatgtctttctgtaatattcagtaaaggcacacattcccaatggatacatcataggaaatgcatggtctaatccctaggctttttaggggtttaatggatgtagtcctttatcctttcttgactgatgtgatttctcataaagtagccgtcactaggctcattaatcatagcgtagtagctgcagaaggggggttacgccgtcagactttaagacatatggcagtttcaatacgccttctcccatgcggcattaaatgcgaggtgactgttcagataggatttgacacctcccggagatgctttgttgtagctttgctctccgggagtatgtgaaactcacatgccttctccgggaggcatgttaaatgctgatccctttgattaaagagacttagttgaattatcccagagtttaacctcttcagtctacgtgtctcaatccggttggtccacgtattttggacaaaatcaggggcaacatttaccccccaagccttgtttggtaaaaaagtaaacaaggcttgcttagatgcctccggttgccttattagcttcctggcacgtgccttgggcgcgtggggatgtatttatgaccatcattactgcagttatttgctttttgcagacaacgattcgttttctgtccatttattgatacggcacattaaatgggtgtcagtcgaatactcaaacgttttctaccaccttgatgagcgcttattccaaccgttggatctgtagaattcgaatcgattgccatcctgaccgtacgatgatggtcgatcacagctatctcacacctgttctggcctataaaagccagccttcttacttcatttggttactttca

SEQ ID NO: 371008 - DNA, 747 bp, Cannabis indica
atataaatacatgaattaatatttatattgtgatatattactaaaatttaatataaaattaaaaaaatataaatacaaatatatataaaataatacattttaagtcgggataattacataataaaacactattttttgtaaaattttatatttttacatttaaacttttttttttacatttttatggtgttttataaaaaaacaagaaaactacacaaaagtaacaggaaaataatatctgttgattgaagaatttgccaattgactcgaagtttaataaacactaatgaattaccactaaaaagttagaaataataagtaaaataaaaagaacaccagaaattatagaggttcgaccccttagatcttcgtaaacgacctactcccctttaattttagttgtattgatatcgagataatatcgtgtaaatcactaagaaagccaaagtgaattctagctacaactctcaagatgcttaaagagaatattattcacaaaagttctcttggagtcgagataataattttttaggtcccttccccctgtgaattcattaactatttatagggagaagattattacaattagctccttaaaggtagatgttgacggtaaaaactcgctaactaacttagtggctggaaaatctaagttagacccaaaaataagatgatgataaagatgaaaagatatacaagtattaatggatgaatactctctctctattgcattcaatgtctgagtta

SEQ ID NO: 371009 - DNA, 624 bp, Cannabis indica
acgatttatgaattgtgtttgtgcctttgaatgatgacattaaaagagagatcttgaatgagtttcatatgactccttactcagttcttctaggatcaacgaagatgtatcaagatcttaaggccatgttcttgtggcaaggcatgaaaaatgatattgctgaatatgttgcaaggtgtctaacttgtcagcaagtgaaagctgaacaccaaaggcctgcaggattgctgcagccactaaatctttcagaatggaaatgggatgacattgtcatggacttcgtagttggattgcttgggaccacgggaaagtacgactctatgtgggtcatagttgacaggtttacaaagtcagtgcactttttacctgttcggaagaacctctccattgatcagtatgctgaactgtatgttagagaaatagttcgtctccatggtgtccaaagtccattatttctgatagggatccgaagttgacatcaagattctgggagagtctacatcgagccatgggcactaaattgaaattcaggacaacttttcatcctcagacggatggacagtccgagaggaccattcagattttagaagacatgctttgggcatgtgtacttgactttgaagg

SEQ ID NO: 371010 - DNA, 494 bp, Cannabis indica
agactctggtcttaaacaatagcattccactatctgagactgtaaagtctttggcttgaccagctaagacttcttctttgaattttactaactcgggatcagttaactgagcagttttaatacgttccaacaaatcagattgcagcgtcaagttatgaagtttgcatacaagaaactcgatgcttgatctgaccatatcttctgctagctaggacgcaatttgaaccatgctagctacctgcttgggaccctttctgcttagggcatcagccactacattggctttcccatgatggtaaaggatctcacaatcgtaatcattgaccaactctaaccaacgtctctgtctcatattaaaacctttatgagtaaagaaatatttcagactcttatagtcagtgaaaatttcacacctcctccatagagataatgctgccaaatctttaaagcaaacactactgcagcaagttctaggtcatgagtcgggtatcgct

SEQ ID NO: 371011 - DNA, 650 bp, Cannabis indica
attgatgatggatggaatgatgactaagtggtatatgtgtaataaaacaaactttgtaaataaaaaagtaagtataagcgtgtatgagtaattttgtaataaattgtataaaatggatttttcatgtaaaaatttctaattataactctaattatttatttatgagaagggtagataaagaaaaataatttttggttggtatggaatagcttttcaagtcattttatttaggaaaagtaattctttagtttacatgaattacaattcctatggaatgagttttccaatgacaataaacaaatcacactttaatggtctttctttaggaatagcaattccatttttagtgttttatattaattatataattattttttattaaaaatattgatttatatgatcgtgaatagaattatatgattatatactcgtgtttgctatataatttattttaatagagtaatcgagtatgtaggagtaatttcgagaagacaatctcttaatcttaatttcagtgtataattcattttcatgatatttagttacaatatgtattttactttggtaaggattgtcttaaaaaaataatagcatatatgtatttgattttattaaatttataaacacagaataacatattaaaataatat

SEQ ID NO: 371012 - DNA, 461 bp, Cannabis indica
aaaatggatatatggttgattagctttttctagtaataaaaaattataaatagacgacgcatttaatttttgttttttttttaattctataaaataacaaaagtaattacattttgtaatgttttattaattatcaataataaatatacatgtgtattatattcgaattcatttggacaaaaaaaaaaaataaaacaacaattttttttttttggggcttaaagtaactgccctccgttattacttctagaccaaacgtaggaatgtcataattcgcaatttgttgttccaaatatcaattaatttggaccaactatttgagatcggccgactaaatgaattcaacgtgaatgatttaatcaatctagactgttttaaattctcgtttcgatcacggttttaaaaatctcagtaacggttcaaattaaaccaatccgtataattattatatatatacttag

SEQ ID NO: 371013 - DNA, 604 bp, Cannabis indica
aaaaaacttcatttttaatatgctatatcatatgtcgaaaaaaaagtacacccccctcgcttatcaaaaaaattatattctccctcattttaaatttgagtttgccaatatataaaagggattatttcacaaaaacataaaaacaacaaaaaaattacaaaaatatggtttcaaacatcttttacgatttttttattttatttacagaaaatacggtctttttatgttgtaatcttgttaatttgttgttatatgtatgttatttttattttacttttatgtagttttcttgttgattttatgttgtttacgtgttattttttagaaaaccataaaaatattaaaaaaaaattctttgaacgtaaatataactattttacaaaaaataattgtaattattcctacataaaatatgactatatatttataccgatgtaaaatttaaatatggtatgaacttattcatatttttcaaaagcaaaaatcatatatattaatatcaatcttttcattatttacatattatgaacaaaaaaaggtttacataaattaaaatttaataaagtgtcaatataatagtgtaaaattttcataaaacaaaggc

SEQ ID NO: 371014 - DNA, 1126 bp, Cannabis indica
cacaatcttgattactttctactgtgttgacatcacaataaacatgaatatcaatgtgataaggatttggatgaatttataaattaaacaagtgcttatgtaataagcatgtgaactaaataacacattaaacaagtaataaaataaatctgtttctttattgataaatgaatattcaagattacattgaaatagggttttatttagggcacaaaacccaacaaactttcacttgcattaacagaaaacaatcagtacatttcaattaatcctagatttgttctgtgcttttcaaatgtagtgactgttaaaatcttggtgaatggatcagctaagttgtcttcagtatcaactttttccactagtacgccccctcttgccacatattctctaatgatatggtacttccactcaatgtgtttgcttctcttgtggcttcgaggctctttacttttggttattgcaccagtgttgtcacaaagtaaaaccagtggtttttccatcctaggaacaacaccaagttttgtgaagaaatttcttagccagactagttccttagcatcctcagcagcagctatgtattcggcctccatggtagagtctgatattgcagattgcttgacacttctcaaaacaactgctccacccccaagagtaaataccatcctagatgtagacttcctgccatcaagacaagcctagaaatctgagtcggtatagcctacgggattaaagcacaacccttgtagattaacacataatgtcttgtacttttcaaatatttcaaaacatgcttaacaacagtccaatgttcctctcctagattcgtctgatacctgctcataattcctattgcatagcaaatgtctggtctagtgcacaacatagcatacattggacttccaactgctgaagcataaggaacctttctcatgtcttctatctcttggggatcggtggggcactttccttagattggcgcacacaaaatctagaaggcatcattgcccctttggtgttgctaatggaaaattgctctagcactttatcaatgtaagctctttcgagagagcaagtgatctgttcttctgatttctaatgatttgaataccaagaacataactag

SEQ ID NO: 371015 - DNA, 566 bp, Cannabis indica
aatcacgtaatacgcctatgctagttagggtgttacattatgtttgtgagattctttatcatcctgggaaggccaacgtagtagctgatgaactgagtaggaaaggacaaagtcagatgaataccgtgaagcaaatttctaggcagttagtagatgagatgacctgaaccaagattgagtttgttgtggggtagttggctaatattaccctgtaatctactattttggagaaaattaacgaagcacaattgtaagatccagagtaagtgaaatcccaagataaggttttggctggaaagactagtattaaaagagagattatgaatgaatctcatacaactcattactcagttcatccagggtcaacaaagatgtatcaagacctcaaagttatgttctggtggccaggcatgaagaatgatattgctgaatatgttactaagtgtcttacttgtcagcaagtgaaggctgaacaccggaggtctgcagggttgttgcagccactgaatattctggagtggaaatgggaagaattgctatggacttcgtggttggattacctagaa

SEQ ID NO: 371016 - DNA, 759 bp, Cannabis indica
gcgcaggaggctactggcagcctcgtccgcgcgcgcaggaggctgcttgcagccttcatgtgcgcgtgcaatgggcgtgcatctgtctgaacgtgtgctgtcagaacacctgcgcgcattggatctccttgtccgaatgcttggtgcgagcgtcgtgcaccaattcgacacagtttcaaccaaaaatttcaaacaaccataactttctcaatttttatcggaatcgagttttgtaaaacctaaaattgcttaattttttacaaggaatccaaataaaatattttcatggaaaaattttgtaaatcatattcaatcatcaaattaacatataaaccaacataaacacatccaaatcaacatgcaaacaatattcatcgttttaaatccatatttcatgaaagtaaatcattaccatggctctgaggccagttgttgggaatattttatcaggatctagatttactaacaagtatgttgattaacatcgtaaatatgaattctctaaaataatgaaataaacatataagggtttaagaaaaccttacattggttgcagcagaatataatgactccttccattcaagatctctagcccttgattcctttctgtagcagagtattatcaagatctaaatatggatctctttctctctttcgggtttggttacccactcattcactcaaggttcgaatagtgaagaacaatgaaggaggttagaaacactaaggaatgaactctctcatctaggtttggttgaa

SEQ ID NO: 371017 - DNA, 623 bp, Cannabis indica
ttatttatttgttcaaccaagataaaaatgagtatttatttaatttttcataggtacatataattttgagttagtatacaagtattttgtaattgcttttagttttagttttagtttttttttagattattggtgtgtagcttttatttttgttattgcaatgtggtgttgaaatcaatttaatttgcatattaaagtgtggttgttattgtgttattttattattgttatttagttgtccaaatactataaaaataataatatatttagtttttcatgagtacaagtattaagattgttgttgtgttgttatacagttattttttggttgttaattagctatttaaacatgtattaaggttgtgtatgtgttgtgtttatgttttttcaaggttgtcgattgtattttattaatgtccaattgatttgcatatttttgttaattagtgttgttgtgtagttatatttttgttgtcaaataaaattaaaagtccaatttttgtatatatatatatttgagttttttttatatagttatttgtttactgttagttaattgttttattgttatttaattttaactaagagaagaaaaaatagatacatatggtatatatatatat

SEQ ID NO: 371018 - DNA, 926 bp, Cannabis indica
gaacaagcttcccgggagaatcaagcgaagtacagtgcattcactatcttgactaaagacatagaaagtgtttacatggctactgagccgctggctccatataagaagcccgggcccatgaagaaagatgtcaccaagagagacatgacaaagttttgccgattccacggagactacggccatgacactaatgaatgcaacaacctgaagcgagaaaatgaattcttgataaggaaaaataacccacacctacagaagtatgtcaagaccgatcagggtcagagaaatgacaataaccaagaattactacctacaccagtagatggacatctgtaattcatcgttggaggcccgcatattgctggagattcgggcaaagctcgggagaggtatgcctgaatagcgcagcacgagcaagaggaagttatcctgaccgtagaagaaaggaagcctaaaattccacgagcaggagggcctaccataaccttcaacgatgaagacgctgtcaaaattagatttccgcacaacaacccgctggtcgtggaagtccaaatagccaataaaatggtggccgaaaccatgattgataatggagcctcttccaatatcttgtttaaaactgcttatgaaaagatgggactccagctcaaggatctaaccccatgtctcctgcctatctatggtttctccggtcaaggagtcacacctctaggacaaattcgtctacccctcactgttggacaagctccgacaagcatgactatcatgacacagttcctggttttagatgttccttcagtttttaacgtaatgctaggtcgaccggcattgtatgacttaaaggctatcacatcgatattccactcatgcctaaagtttccaacaaagaatggggtagggtgtctgagaggaaaccagcagactgc

SEQ ID NO: 371019 - DNA, 616 bp, Cannabis indica
attgtggatttaagtgggctggtaatcttagagcatctctaaagacacattaaatttaatgttacactattattaaatttggtcttaaaaaatatttttactccaatcacaatattaaaaattaaactaaaaaaatatttcttattattatattaattttctaataaaataaaaaaattaatattacattaattaacaaaaataaccacaattgttatatttaattaataattttcgggaagttaaatttttttaaaatttttcgaagttttgtaggatgtcttaaataactataatgtacacgaccatgaaaaaaaagaccaaaaagtctcttgaattctaaaatatgtaggagtatatcagtgcgccacttttaaagaagtttgttttcggcgtttaatattttataaatttctcaaaattttataagatgtcttaaataactataatatacactatatataaaaaaaatgaccaaaaaaatatgttagataccgaaacaaaagtttctcttttgaagaagaataccttgtagacgtaattaactcagtttgattgataaaaattatcttttttcagaaaaaaaaaattatcaaaatatcttaaataaaaatat

SEQ ID NO: 371020 - DNA, 572 bp, Cannabis indica
gcatcaatggttgctctgtttttcttttttttttttcagtcggacgagaatgttaaggtattgaagaagctgaaaccgtatttgatgtaatttagtttaaacttaccgtatataagttgtatttagggtgtaatcgtatttttgttatttttgtcctattttagtgcatttgtgaaaatttccctatttgtaaacaataataagttttgctggaagagtcgacagagaagtcaccagaaaatctatcggcgctggaaaagtcgccgaagaagtcgtcggaaaagtcaccgccaccggaaaagtcatcgttgtcggaaaaatcaccgtcgccggaaaaagttactgaaaaagtcaccagaagtcgatgtctcaaatataaacaaaaatagaaccggttataattgaaatataaccagttctgtaacacaaagaataaaaataagtaaaacaaaataactcaaactaattataattaaattataaccagttatataacataatgaatataaatgagtaacacacaataattcaaactgattacaattaaaaaataaaggagaaatcagttccta

SEQ ID NO: 371021 - DNA, 514 bp, Cannabis indica
caaggtgtaagtaagctttatcggtgactatgacatcagtgtaaatctaggccactgatgaatcatgggacattatcttttgaagcatataatcacaattaccttccactgtgttgatatcattgtaattgtgaataactctatgttctagatttaacagaaatcgtatacattaaaccataaacatgaaaactacatgtaaacattaatgacttccaatctactattgataacaaattagattacattaaaataggttttatttagggcataatatcccagcaagaacaccctctcattaactactttttgttgggctttatgccctaaataaaactctattttaatgtaatctctatcatttaaatatgaataaagagacggaagtattttcataacttatttaatgtgttatttggttcgtgttatcatttatatgtttatttgatttataaattcatccaaacccttatcacattaatattcttgtttattgtgtcgtcagcacagtgga

SEQ ID NO: 371022 - DNA, 507 bp, Cannabis indica
tccatgtgttggttcataattagttttaggtctaaaataccattttaactttctaattacttctttacctttagttctattaactttctagtggaagtataattcaagatctcatatgaatttgtgcgactaattttttaaaccagaattaacacattaaggcaaccaacattcgattcgttaggaaagtcaagattccataattatacgtcatgtttccactatccatattaacaaattcccaaaatagaatttataagaatcatcttctctgagaaactttaacgagtgaatcaaagaaactaataacatgaacatgagttcatgataactcaagatttaggccaatctgctattgattaacattatgatatgaattaggtctttatgataaatgacgtgttgataaagacaactttattcatatcgatccttgtcatatataatctctattatatattgttggaaattattttaccaggatcttagatatactcacaagtatgt

SEQ ID NO: 371023 - DNA, 478 bp, Cannabis indica
ttcacgtattgatgagaaaccattttgtgtcagaaggcatactctcaaagacgacagagataacgcataacgagacatctatctcgctatgtataggaagacatactcctggtaagctccaactcactgctagggttattgttgctattgagaacctccaggatatgattgtccagtctgcaaggccttatgatcaaagagcagttcttaagtttgctcggtacattgatgctcatgccatttgtaacgccctaaacacttaggcacgctacttaaatatttttatgaaaccttaatcccctatatcgggattactaatcaaaatagcgcagaatttaaacttttatattaaacaagatgaaaataagacttgcaatacatttaaacttttaaacagttgggatcccaaaaatatttacaaactttattacaagtctttcctttccagccgacctaagcggcaaaatagaatttcaaa

SEQ ID NO: 371024 - DNA, 682 bp, Cannabis indica
cacgaaagccaagaccaccaaaacttttatgttgacaaagcttcttccaactaacccaactcactcccttactagaagaatttgattgggatttccaccaaaactttgccaccatcccttcaaggctcgagcaaatttcttgagtcaaaagaaaaacactcattgcataattaggttacgcttgagccactgacttaatcaacacttcttttccagctttagacaaaaacttagtctcccaactaaaaattttcttcttcattttttccttcaaaaaaccaagaatggcattttgtttcttcccattatgcacgggagacccaagtaaaagctatcatccgaagccacatttaaacgcataagtccacacacatgatcaccgatacccgaagtaacatttttgctaaagaaaacagaggacttagcaaaatttacctgctgacccgaagcaagctcataattatgtaaaagccgcaacacactctgagcttcattctcattggccttacagaacacatagttgtcatccgcaagtagcatatgagccaccataggagtgccccgtgcaactcgacaaccagtcaaccaatgatgcctctcataatgctttaacaacaatgagagaccctccacacaaataaaaaacaaataaggagacagtggatctccttgacgcaaccct

SEQ ID NO: 371025 - DNA, 793 bp, Cannabis indica
taaatactattttaaactggatattacattctaccctccttaaaagaaatttcgtcctcgaaatttaacttaccaacactcggggtgttgagtcttcatgtctttcaccacttaccgcattacctccttatctactatatggagccaacaaatatgcatttaacctatatcttgtcgatcaatccataacacatataatacaaataacttattaattaagtattattatttctctatacattacttaaatatcaaaatgtactccatcataataacttacatatacatgctttaaatacataagttttgcaatcacatgctcgtaatatttgaaaagtttttctttctcttatgaccatccttacatgccattaagagtgaaactatttattcttctatgagcatccttacatgccatttagagtaacactatttattctctaaatgaacatccttacatgtcacttgagaacacattatacaatacaaaataacaaacacaaagagtagggtagaagaccttatgcaaacttgtctttaatcattcccattctttagttgaatgttattacctataaaaatcttacttctctacttgattttctactataaggctacaatgtcattctttcaatttcataggtgttacccactcatcgatagacacttgttccatgacacttggaaataaacatttaagctctttaaaaggtcttctatatataaatatttaatgatccatttcgaccacctttttgtctaacattcacctcttgatatcctttatccatgt

SEQ ID NO: 371026 - DNA, 682 bp, Cannabis indica
ttgttcattaaagtctaccaattggttcaggtcacacatacagatataggacatagtagttcaattgagtgggagcgctaatcattgatatagaatctttagcttctataagtatttagaagtgaaacgataatttcctttgagcttggcttgatagagataaatgattgaggccttatttttcgtaattatattagtttactgaaatatcatttgtaggtagctaagtgtttcaagaataaaatacattgaagaatagaacgataaatttatccatattcgatgtagataatatatagaggatctttgactatttagattgtaacaatggataattcataatgtatctgtatcttggtacatatagagtattctatataattaaaagtataattctgaatatatagtggcgcaaggagaaattaataagctagagaatttacttagtaaattctaaatctacttatttgaagcttgattatataggcccatggtcccgacactagttgagataatagtgcttgcagattcagattattagtttttaattaatcaattctcattctacaattagaatatgtcttatttatggttttttcttaagcaatggcttaattgtgaagaaataagattttaggtttatttgttaattaagagactttgcatgttctaatcaataaat

SEQ ID NO: 371027 - DNA, 525 bp, Cannabis indica
ttatttatacaaaaatataattagagtaatcaagtatttatagtggtaattaataggggtgttcgcagtacgggtggtgtaatttttgaccattttttgaaaccaacatacgtacatgcagtttttttaattttccaaaccgcactgcaccgcaaaaaatgttgcggtacggtgcagtttttgcgattcggactatcaccaataattaaactatcacaaatacaataaagtttgagtaacacttctcaaaaataccataatgcatgaaaataaatataaaaaaattaagtttcaatgataaaataattagtgggttttgggttggacattcacatattgaacctaaataaatataaaaattagtttttttataatgtgcggtgcgatttgaaccgcatattaacaattcaaaatcgcaaactgcaccgcactgcgcagtttaggaaaaattcaaagcgcgaccgcacaacaaagaatttatgtaacgccctaatctatagggacgccacgtgtgtgattttataa

SEQ ID NO: 371028 - DNA, 625 bp, Cannabis indica
tgacagctcaggttgaggccctaacaaagctaatcgcagggcaagctaaacaagcccaagttgtttgtgagatatgtggaggcaaccatcacttttctgagtgtcaggcagatgtggatgatttgccaatggatgaagcaaaagccattggaaattattcgcagaacaacaacaacaattatgggttcaaccaaggaggtaaccgaaggaacagtgggttctatcagcaaagaaatcagaaccagacacagaaccaacagtacactcagcaacaaagctctagtggaaattctagtttgcagacagatttattgctacaattcatgactgaaactagatcttccattaaagatttgcagactcaaatggggcagctagcaacccaggtagcaacccgtcctcagggaaacttgcctagcacaactgaagttaatcctaaagaaaaatgcaaggcaattaccctgaggagtggtaagaaatatgatgggcccgagatgatgcaaccagtggatgaagagattatagataaagcggcaccaactccaacatcaacagaagagaagactactgatagtcctgcaccaccacaacagtctccaccaatcagtattgatcatcatgtgaa

SEQ ID NO: 371029 - DNA, 519 bp, Cannabis indica
ctttgtgatctgatcccaaagttgtagggatttcttcggtgactcacgaagcgaaagctgaatttgcttagtgttggcatgctgcacggattgctcactgctctgttgagagagcttcgtccgagcaaatgtatgtggtgccctgtttggcatatttcttgcgagcagatacatggagtcgattctatgtgtcaccattgtgtgataccacgtcagagtgcaaaaattgggataacatttgcccaccaagtctatgtgggacttctgaagttacatgtagacttcatccgagtagcccttgcgtttggatgggtgacacgtgtcaggcgcgtctattcgcaattcgatgtcaggctaaccaggagtcctttcagtttttggctaattaatgctctgacacaattaatgcttcaaaacccaattttctctcaccacgtttgatggctacacttgattatatttgattcctaatattttctttttggggggaaccgatgcgtctaaggcttttgaaatgat

SEQ ID NO: 371030 - DNA, 504 bp, Cannabis indica
gaagaattggagcttgtgtttggaggatttcggtgtttaagcttggaggaagcatttgaggtagttaatttccttttagtttatttaagttttgggaaatttagtaatttaaattgaatttgttggttttgttgtatggtgttcttgctttgggtttttgaatttgagttgtagtgttatttccgtgtgttgatctctcttttagtcaacgatagtgagtcaattaataagcgattaaaaatataattaaaataaagcaaaacaacaaagtaataaagaacaccaaattttaaacatgtttggccccatgagtgtggtaatagcctactccccttgaattgtattaactcgagagaaagaacaaagtgtttttctctctaaaagctcttacagtgaatctctaagtaattcttttagatctctctctctaaagcaatttttttcgatccctttcacagtgaggataagtcactatttatagggccttaatgcatgagggaaggt

SEQ ID NO: 371031 - DNA, 617 bp, Cannabis indica
aaagatttggatgaatttataaatcaaataaacaactaaatgataacatgaattaaatgacacaataagtgatgaaaatacttatgttcctttattgatatttaaaagatagagattacattaaaatagagtttaatttagggcataaaacccaatatattccttctcttaagtcaatacaatacaaggggagtaggctattaccacacttacggggccaaacctctttaaaatatggtgttcacttcaccttattatttttgttctcttttaattatattattcaatcgctttattatttgactcactgtcgttggttagaagcgagatcaacaatatataataaaatagaagctaattaaatattatttgaaataaataatatatcttacaattaaaatatataaaaataataattaaatttatgtagcatcccaataaaattttatatttatatcatgttgaaaaaattatataccactattgtacatagtaaaataaaaaataaatatcatctaagaataataatatgtcatacaatacaatagaaatatattgtataacaaaatttatataccaacaacccacaacaacccataaatttttaaaaattgaca

SEQ ID NO: 371032 - DNA, 816 bp, Cannabis indica
ccagaattagttcagaggaccaatgaagctattaacaagatcaaggctcggatgcttgcttctcagagcaagcagaaaaagttatgctaatccgaagcgcagagatgtcacatttcaggtaggggaacatgttttcctgcaggtttcaccaatgaaaggtattagacgcttcaggaagaagggtaagttaagccctaagttcattgggccatttcagatacttaagaaggtcgggcaggtagcgtatcagctagccttaccaccagcactgtcggctgtccatgatgtattccatatttcaatgttgaggaaatatgtttcaaacccgactcatatcttgagttatgaagtccttggactgtaatcagacttatcctatgaagagcaacctgtttagattcttgataggaagaaaaacgtcctttcgaactagaccattaccctagtcaaagtgctctggagaaacagcaaggtggaggaagccacctagaaattagagtctgatatgaggactcaacatcccaagctattcaggttagatttcgaggacgaaatccttttaacgagggataattgtaatgaccactttagtaaattggattagtaaaggcaattagcactaatttttgttatttttataattatttacgaatttaattatttgtggaccccaatattaaaaatgggcatttgagttataacttctcgattccagagattttattcaactctagtggtattatttgacttatatatgaattatatcatttttgtaatttttgctcggcgacaacggaaagtgcgatggatggctag

SEQ ID NO: 371033 - DNA, 909 bp, Cannabis indica
caattaaatagtgacaaatattttaaggaaaaaaaacataaaattagtggctaggatttagaaaattttaaaaatttgaaaaaagaaattacaataatacatcaacactaattttatttttgatttttatgttttaaacttttttatttgtaaaaagatttcttgagtaaaaataataaactattttttagttgttttataattaaattatagttttcatgagattatttttagttgttttatagtttatttatagtttttgaaggaatgtgttgatttctcattgtttattagttgttttcttactttttgctgagaaacatatattttcgtaagtataaaattttataagcgtatttttgtaaatacaaatgttagactgtaaaattgtaaataaaacataaaaatatatttttgaaaatttgcctaacatttattttgttgggtgtgtaattaaagttccacattggctagaaatagaaaataatatgggtatataaggatggacactactctattagtatgaggccttttgggaaggtgcccgaaaacaaaactgtgagggtttaggcccgaaaattaatgagagagtcaaggtgagatagcggtctaacaaggtggaagagcggggcccaacaagtggtatcaaagccaaagatttaggagcgctgggatagtgagttgcatttgtgatgtgtgggagaagccagatcagtcgcgagttccgttggtgatagcggcgacacaaggtggtttcgtcggaggaaatgccgcgaatatgtagtccttggtttgaggggagtattgttaggtgtgtaaccaaagtcacacattggctaaatactctattagtatgaggccttttgagaaggtgcctaaaaataaaatcgtgagggtttaggcccaaag

SEQ ID NO: 371034 - DNA, 617 bp, Cannabis indica
gtaaagagaacaaacacaaacttttatctatcgaagagatcaaataggaacctagtaacaaaattactccagaaatgcaagaatatctagattggtataacaaatttgaaagggaaaggatcgcaaacgaatggaggctcctacaacttcaaaaacaattttacaaaacaaatgaatggctgccaacagcaccaggattccccgaagggtgtcgtcattacagattaggttattttaatggcgaatcggtgaagcctggatctttatgcccgtattgcgagtctcacacccacagtacagacttttaaattgttatgttatgattgtttagtggtcagttttaatgtttgtttttttaataaactttttaatgttttaatgtttgtttagtctttatttatgtttaaaaaaattcatttgttttctgtcaactgtttgttttaattttttttatcttaaagttgacaatatatcgacattccatcaatatattgtcgacaaatattgtcgacatactatgacaaagtgtcgataaattgtcaaataaattaagttatcatgtcgataatggtcatcactgaccttcctttacataatatcgacatagcatcgatatt

SEQ ID NO: 371035 - DNA, 695 bp, Cannabis indica
aaaatacctaaacaacaacataaaaataaattataaaataacaaaaagactataaatcaactgaaaaataacaagacatcaatcttgttaaaatatgcaaatcattcataaattaactctgaataaactacaaaatatccaaaaaaatatactacatttattaatcatgtaaaagatagaaaaatataagaggagtgctcttaatttttttgtaagagagataaagtgtattaaaaaaaagattttttttttaaaaaataatgaaaatgcaaactaattacaaaaataccttaactaatctcatcaattacaatattactttgccacatcatcaaaaaatatcttaattctaaaccaataagcctgaaataaaattaatcccgattttttattttatttattttattaattctaaaccaattagttagctttacataaaaaaatttcttttttatgtcatacatttgagatgcattttggttaccataaaacttaattatatatatatattaaaaaataataatcaattagttatttttaagttatattattatggtatcttattattaatatatatttgagtaaatttaaaatttaattttcaaaactaatgaattgtcatataatataacaagttataatcattttgtatacaaattactttatgtatatttttgttactttgaaagctatat

SEQ ID NO: 371036 - DNA, 502 bp, Cannabis indica
atacagattttctaccattaatggcagaaaatctgtatttctctctctctctttttttttttaaaatcccgacgatttaaaatcgtctcctatagtatagggcacggtttaaaaccgtcgcctataccctgttataggcgacagttttaaaccatcgggaagtccacattagcgacggtatttaaccgtcggctattttgcctgttttgcgacggctatagaaaccgacgggaatactttaaatgattgaaaaacatcggaaaaaactattttttagtagtggcaaaatatttatgcaactgtaatgcatttgtaatgcaactgttataaaacattaataattagaacagtgtttccacgtacgtaactctatctacatgtctctttatgatttaatatgaacaaattcaccattagaaatttggaaaacaacgaaaatacacaaggataaacattttattatagtattgatgtaatattttttggattatacttgagtttg

SEQ ID NO: 371037 - DNA, 776 bp, Cannabis indica
cttgtttagccaaaagatcttgattaaaaatttaaaaatcccaaaatccaagtccacccatcaccttaggctaacacgccgttacccatttcacctaagaaatcttcctttgattaccattcgaatcccaccagaattgtcgtacaatagactttaattttttacacgttaccataagaagcttaaagacactcatcatataaattggaatagcttgaagatagatttgataagtacctatcttccaccagcaaaaaagaaactctgtttccaccctcgaacacgcttcctgaccatctcacatattccctcaaacgttctctatttatttctaccaatgtgatcacagtatacattatacttatttagagcacttttctatttaattttttttttgttttatctcacactttatattataccatacattaagctattatattaatttcttttgtatatcatttaaatattatttatatatataaatatatatatatatatatatatctataacctatataaaagtgagaatgattttttgggctttcactaattgaattacacaattaatcttcattatatattcaattataaaaaatttaaactaggcaattgtacactacttactttttttctttctaaactaagcttcccctctaacattttatcttttgtgtaatatttgtgtaaaaattattttgtctttatatttttttttatttgcttatcaataagtatatttttcaaatatttaatgtcttctttatttttaagtc

SEQ ID NO: 371038 - DNA, 720 bp, Cannabis indica
tgaatgcaatatattaattttaagaaatcttgattatctaaacggcaaattgttctcaaattaatccaaaaataaactaaaaattaatgttcaaaatattaattaaaaaatatcgtacttttaagaaatttaaaacattttcacacaacatgaattaaataattgtaattaaaaaaacaacaaaaatattatatatataaatacgatataataaaacaaccttttaatcttcagcttaaaataaaaatctaatcacaacaagctaatagacttttcggttgttgattgagaccaccaacacatctcactcttgggtaaccaccattgcttccaattgatattggtgccacaaagtgaagaaatcaataaaattaaattctattgctcaatacttcatgaagtatagaacttttcacgaaaataaaatgaagatacgaagctactcgatctttaaccaacagtttaaacactttcacaaagttgttctacatttagttgcacacaaattgaaagagaatgaacaaaaaacatcaaactaaatttatacagatatataaaacataaatacaactattgtattgtattgttgagtaaaaaggaacatgataaggtactacaatcagaaccttctttgacaatgagtcaataaatacaataatgatcacaattgtttttttattcattaaaacccaatagccatattggaatgtcaatgttcca

SEQ ID NO: 371039 - DNA, 873 bp, Cannabis indica
tatttataagatctattgacaattgaactatgattaaaatcagatcattggatctgtgaacaagttaatcatatcaatttagatcaaataaataatagacttgtaaaaaatttttgaataaataaatattaaataatcaaacattacaaacaaacatgtaacagataactggaaagtaggttaagatatttctattttaaaatttaaaatatatcttaactagaatttaaaatttaggttgttagagaatatttgaaaaattcaaaaaactaacaaatctattaaatatcctaaattctaacttaaattcaaatatctaacaatttttcaaattttaagtttatttaaaatttaaatttattaaatctctaataatataataccttgaattttaaaatttagatattcttaatattataatttaataaattaaatattacaaatataaataatttgaaaaaaataagatattttatggttagaatattataaatttaaataaaataattaaataaaacaaatatcctaagtttgaaaattttatggttagaaacgctaaaatttctattcaaacctaaattaacaaattttcaaaatttcatgttatttttgccaaaaattaattttaataaaaaaatatctaataagatataatgtcaaaactaacgtttttcaaatcttataatttaatttgataaaatatatttcaaaaataacaaattttgaaaaaataatatgggtagcaaattttgaaattcaaactggattatttctaatattattaatattttaatatcaaaataagatcattcaaattttaataataaaataagtaatatctgtcttataattaaaataaataaaataatcaaa

SEQ ID NO: 371040 - DNA, 534 bp, Cannabis indica
ataatattaaagagagaaatataatattttagtaaaaataatatttattataattcttgtgaaataagagattaatgataattaatcaactattatttattgacaaaataagtaataaatcttatttatggtaaaattgataaattaattttggaccttaaaatatgacccacacatgtagggtaacatataaaggcccatgttaattttttttattattttatcggttaatataattcaaattaaattaattaattatatttttattattgaattagatatattattgaataattatttaattaaaaaaataataaaataaaataatttaactaatttatgttaatcagttacatgatatttatatttaaatttaaattatgaatttaaatcaaattagataatttcttttagttttaaaggattaaataaaaatttgtttataacattatatgtatgatatatatcagtgtaaactaacagaactctaagaaaaagagaacataacatactttaagagagagagagagagag

SEQ ID NO: 371041 - DNA, 868 bp, Cannabis indica
ctatactacattgcctttttgaactttcaattgaaatttttaagagaatttcagctcaacttccttaaagttcaaccttaaagtttaataggaaaataaataacatgactcacaaatggtcccaatatttaggctacatcatatatgctcaacttataccaaacaattctactaactaatttttcaatatgcttgcatcatttaaccttctccacatatgtcaacaacaaatattttgaaatcaaaagaactttaacaggttataacgttaagcttaggtaattgtagataaaaatatcatttaggcttgactatacaataagctttttacatttaaagaacctcaattttattataaaactatctcgttccccacttaatacattacaagagagaatttttatatattatattttttttcttttactttgctttgcaatttatatgaagaattattttctattctttttttttttttaagattttgaagaaaaaggattgcaacatataaaaaatttctatctaattcttttttgcttttagctcctcaaaaatataatacccaattataatttctcccaaaattacttaaaaactcatggtacagctacgatagaagaaaataataaatgggtcaatttctttttttctttttctttaggtcaaaaagtgtgtaataaaaaaaatagcaatcggtttaagactcaaaaagagtaaactagggataatcacaaaatagattagcttgaaagacacaaatgttctaaagaaactgcctaaatcatttttcaaagcataagtcatcaagaatttcacctcaaaagccaaacaatgcaaattctatcaaattcatgttggaaattatttt

SEQ ID NO: 371042 - DNA, 496 bp, Cannabis indica
ttctcaaaggacaatccgttttcatatgatcgggctttttgcattcatagcaaataatttgatcatcttttcttgagctctcccttgagttactccctttgtaaaatctatttgcattcttcttgaacttcaaaaacttcttaaagttctttgtgagtagggttatatcctccatatcactatcaccatcctcactagcttcactatcatcatgtgaagtggatttgaatgcaatggtgttcttcttctttttatcaacttcctcttcttcttgagcattcatgaaaatctcatgattcatgagagaaccaatgagctcttccaatggtagagttgagaggtccttggcttcttggatggcaactactttgccttggtaggctttggtgagacttctcaaaatcttggtcaccatatctttttgtgtaagtaccttgccaagagagttcaaaccattagtaatagttgtgaaacgagtatacatgttagcaatggt

SEQ ID NO: 371043 - DNA, 638 bp, Cannabis indica
atggggctatgtttttaggatgaaactgggtaatttcagggaaaatgacttaaaattggcataaccgtgaactttagaaaaaatgcttgaacagacgccactttatattttgaaaacacgcgggtattcggatgaacacctcgaatactcgaatgtctgttcttcttaggcttcatagagacgtaatcacttctgactgttacttagaactttaggattttgttgtgggaacattggttaagtctttcaaatggtgggtgtatcacagtattctaatgttcatatatgcgactatatgttccttgaaatactaagatacagccagccatttgcgacatacgccaatgttttgataagcgtatcatttggcaggtggatattctcgaaacggtgggagtatctcagtaacttcaggggtatgcttgagaacgcatgccccttgagtcactgagattctcccagtcgttttttgaggtatatcgctagctaaagatgtgtgacacactcgcaggttgtgattaattggactcctcgaaacggtgggtgtctcccagttacttcagggccatgctaaaagacgcatgtcgcttaggtcactgggatacaccgagccatttttttgagatgtctttctattt

SEQ ID NO: 371044 - DNA, 544 bp, Cannabis indica
tcttgttgattttatattgttttcgtgttattttttggaaaaccgtaaaaatgtaaaaaaacattctttgaacgtaaaaatataaatattttacaaaaaatggtgccttatgtaattattcctaagttaaatgagataaattgaaaactaccccttatctttttcttacacattaattaaatataactctaaaataattttaattaataaataccctcttttataatcaaaatactaaatataatctcacataacttatcaaaatgagcattgctattaggcaccagtggtgcctagcacctttgcgacatgtcacgttgcaattttctaacgatactccctaaaagctattatattcaattatatgggatctgatacttagttgtaccaatagcgatattgacacataggagggtgctaggcaccactggtgcactttagcatttctctatcaaaattagagttcctattgcacattatggaaatataacctataaaatttggtataaattaaagagtagtaaaataaaaatttaaattaaaa

SEQ ID NO: 371045 - DNA, 660 bp, Cannabis indica
tgtaaataaatacctcatcagaaggtcgacgatgaatgacattaacttttttttgaatattcttaattacagtcatgacagacttgaaattaagttcaacaaaacacctcaaagaaataaaatcttcggccaaggattcttgattggaaatgaccaacttcaacttagatttcaacatttctatgtcctctgaatcaggctttttagaagatgaatcactctcaaatgtttgctagtggtaccacaatcatcaatagattcatctaaaaaaagccttccaattgcaacttctgcctcttctcataagttggacgaatgtttttaatcttcaactgaaaaacagaaacaaaaaaacaaaacatgaaacaaaagaaaattaaagaaacaaagattaataaactggcaccaaacaataataaaatagtaaagaaactgaaaatcaccttgttcaatgactaatcaaaaatcttgcctttcaagtctctaaaagttggatttttggtcccaatatcattgatccaattcaaaattcttggaatcctggatgaaactcttttacaaaaggtgtttaacattgcatgacaacattcataaaccaaactatgaacacccaaggacagctcaatgctctataccaaccatcataggactgacctccct

SEQ ID NO: 371046 - DNA, 426 bp, Cannabis indica
ctccatttttatcttgttgggaagtaacattgttgatgtccccaacgatgcaccatggcaaatcactctccgttttcaacgatcgaaggagatcccaagtacgctttcgcaagctacgattgggctcaccatataaccccgtcaatctccactctccatagtcacggctatgaacaataccatcaatatagttagagccgaacctaactaattgaaactcctcagcatctcgccaaagtaaagccacccccccacccccactcccctgagcatcaacactaaacgctccttcaaaaccaatacagacccgaagcttctcaaccatctccttcttggccaacatttcacaaagaaacaacacaatgggcttcttttggataacaatatccttaaatgaattggatggcccatgggttcccaagccca

SEQ ID NO: 371047 - DNA, 525 bp, Cannabis indica
tgattttgtccagattcaatgaatataaaatattcaaaatcaattatttattttattttcttaaatagaaaatcatttttttttaaataaaaaatttatttccataaataaaatattcttttattttaaatatcttaatttttttttaaaaaaaaaaagccaaaaggataaaaatattatagccaaatattttggagttattaatttttttttaaaaaaaatgtcattttttaatatctcatttttttgttttcaattttgtttaaaaaatgccaaaagcacaaaaaaaaaaaaaggcaaaaggcccgaaaaaaaagagttatattttttgaaaaaataacataaaaaaataagagaattatagagaaaataaataaaaatatatgttttatattaattaatatttataaaacaataaaaaaaaatttgaaaaaaaatgaagagaataaaggagataacaaataatactaattatataaggtgccacgtcaccgcctcatatttattccttatatatatatatat

SEQ ID NO: 371048 - DNA, 709 bp, Cannabis indica
atcacgggacaaaattgtgtacctatatatacatggcggttaaaagaattagaaaaatatatgatatatattgattatagtttaaaaaagaaaaaaaatgtgactaattaattgatgagtaatatttaaaaaaattatatttttgtttatttatttatttttaacagtagttattattttttgttaattatggtataaatatatataaatttatttatttaacaaatataataataataataataacaacaacgtataatattatataaatatacataattttttttttttaaaaaaaaataattagtttatgctagatattttttaataaaaaatttaattaaaataatagtaaaatatcactttgtagatttatcctctaataaaatattaaaaataagagaattaaggagaaaagagaaaaaaagctttggagagactatagagtgctatgccaccgctctattcttcttatttatatataaatatatatagattgatgtatgtacttcggtaatagaactacttacaatatgtaatacacttatattcagttacttatttttattattttaaataaagtgaatatgattttattttaaaattaattggcaatgagaggatcttatatatgaaaatttaattttctacattaataatgtgggataactctaatacactaatttcacgtttaggtcttaaaagtagt

SEQ ID NO: 371049 - DNA, 595 bp, Cannabis indica
tgcaagtcaagtccaagtgagagtgattgatgattatgatgatcaagatgagagatgatgatgatgatgatcttttttcattagttgactcaatcaacttcttcttcttctttaattgttctttctcttctcttctctccttcactttttgcaattgtctaaacctttcttgtaatagaacaattgaggagctaatgactttggtgttggcatcactactactactactactacttctactattgctatgccttcccatttttgtgattgaaatcgaaattgaattcgaagaagtgattcgggttgtatttttttcttgatggggttgtttttgaagggccaaaaatgaaaattgatctacataatatatagagaagagaaagaaagatgtttaattgtgttgtaatatgacttttggtgtgttgtaaatgatttttttgggggtgtgatgatgtattcatcatgcttgagaatcagcttcttggtaacaaaatccaaagggaaagagtctaagtggtggatgagtgaggaaaatgacttccattttttttttcttttaatttctttttcatattttggagagagagagagagag

SEQ ID NO: 371050 - DNA, 528 bp, Cannabis indica
cagcttgatccaatcttgcgggggaggactccaggcaaccgctaagcagggaggagagcaagggaacaccgaagcatggtgaactgcataagaagagcgaatactgtcaacgcactgaaaaatatcaaacaaagtattattatgtaccttttcgtttctgattcgccaaatggtgtcaaccgttaaagaggcataaaggaacacctcatctgaattgaggcctttatttttgagatcccatatgaacttgacccaatcccacatccggataccagaaccacagataggatagatgccccagggagaggatctccaaagatgcatagccacatcacacgataagaacagatgctcaattgattctgtctctaaaccacaaagagggcacacatcctgatcaataggaaatttcttactgatctcagcccgaacaggaagagcctttgctaaaatgcaccaccatagggtctttagcctttcagaaattctactattccacaatttgttccacatagacggggctacttc

SEQ ID NO: 371051 - DNA, 524 bp, Cannabis indica
aatcaaggaagaatctctgaaagtgacctatatgttagatgataggggtgtatattaaaattcttatatctacaccaactcagaatctattagagatgatggttactttggggtggaggaattattctagaaggatgtaaaaacccatttataataatttagttccaccagtgaagctaaataacttagttgtttctaaaagtaatagaaagttattcaaattgaagaacgttcttaacttgtttttatctctattccattttggattgaattagagatgtgtcttctatatattcagatgcccttaataaccagtgaagaattcaatatccctagaggagtaatacatatagaatatgatgttgcataatgttttttgaacacaaaggaagtaacggtggagaaagcagttgcttaccacagtcttacagttcctgttatttgggtttagtcaaacacactacacttgatctagatatcaagataatggattgattgaaatgcacttcttgttttatgttagt

SEQ ID NO: 371052 - DNA, 505 bp, Cannabis indica
tttttttttattcttagttgatatgtatgaagttgttacgatgaacaagagtagctaaataatttattagggtattgatggatattgtttgacatttgtttatggttttaatgtgatttaattttttcctaatttcttatgtattttatttcattcgtagttaattacttttaattgtctgatcaccaattaaatatttatgattttgatgcgagatttgaaaagtgagtgtcaattatgctatagtgaaataggaacaaatttcgacatatgacgagagtacctatgtggtttggataacttatagaatttctttgtttaatgtcttttacatgtttaatttatcacaaagtagaaaatttgtatgtaattgagatttatatatctgagaagactataaattacttgttgctattgcatagaatttggtataaggagttgactcttgttagaccataatagatagatacaattgaaatcaataaccctaacctttaatcatcgt

SEQ ID NO: 371053 - DNA, 784 bp, Cannabis indica
aattctgttatataggcacactttatatagaatagatacatactcatctaatttaaataattttcaagaacccttttagtttttcttctttgttattatatgtgtttattcttatatatttattctcatattcaattgttacattaaaaatgtaattataatgattacatttgtatatgacctactatataacaggtcaataataggtaaaaattctatctttaaactcaaaaaaattataattaagggtatttttatttttgcactttaaaataatttttttttgtatttttacgaaaattgatatatagaaacccatatagcagccaacggagcaacctacatagaaatcaccggagcaacccaaatcataaatttgaaaagaaaaattaaaaaaatagtatatgggataattctcctagtaataaattatctacttaaaataaattattttttaattaaaatatttaataagatatttttcacaactaaaatttataaatatttttaatttttttatttataagaaaataaataaaatctggttaatatcaggttacaaataatttattaattatttttatttgatttctaaattaatcacaaccgtttaacaatgattcaacaactaaaataaatgtaaccaacgtgattagcacagctgtgctgtggggaaaagcagctgtagctgtgctgtggggaaaagcagctgtagctgtgctgtgggaaaaagcagctgtagcagaactgtggaaaaaaagctgagctgagtgtttggtaaatt

SEQ ID NO: 371054 - DNA, 962 bp, Cannabis indica
aatggattttatttagggcgcaaaacccaacggggagttctagtaaaagtgtgggatgaagtggtaccttggcaaccttcccaatcggcctgggaatatcttgtgtgaatacccttgcattattacatagttgtaatttacattatttaacaagtgaaaataacaaaaaaaaaaaaaagtagaatgtcacgaaataagacaaattagggagatttgtaaaacaacaaattgaaattttagaaaactctcctaaatcgtcttcttccactcgttctcattcaccaccatcacccatacttcctgcactgccaatgatggctcaacaacaggaaatccaaccaagaacgctacaggattatctacatcctacgcgtacggccacaccttcatgcataatgtatcccatgaatatgcccaacttcgatttcaaacctggcatgattcaacttttaccaacctttcatggtatggaaaatgagagtccatatgtgcatattcaggccttcgaagaggtggtggccacattcaacaaccaagctgacatcattaacttggtgagattgaagttctttcctttctcactcaaggataaagccaaaagctggttgtattccttaaggccaaggtctattgggacatgggaagaaatgacaaaagcatttttctctaaatttttcccaccccataagactagcagccttaagaggcaaatctctaccttcacccaaaaggaccatgaaacgtttcatcaggtctgggagaggtttaaagatttgatgggccagtgcccacatcatggatacgaaagttggcgtcttgtcagctatttctacgacggtctcacagccgacaagacaattcgtacaaatgatgtgcaatggcgacttcctacagaaagatcccgaagaagctttggaatatcttgaagaaatttctgaaaaatcatacacatggagtgcgcc

SEQ ID NO: 371055 - DNA, 639 bp, Cannabis indica
gaactaaactaaaagtatgttacatcggatactctaaactccttttctattttaaagcttcttttaaaactcattattcatgctctacatttgtagaatactattcattgcactaaacatattttattaattgtttgagattttaattttactttttatatggagatatgtgtaaatattaatattacatgtttgaaatgaataaaaatatattaaaattttaaaagcaaaaaaaaaagaatttcggtgatgtattttaaaaaagttaatgtatggagtgatgtaaaagtttgaggtaaaataaaaaaaaaaaatgggattttagtaatgtattttgaaagaagagtagaaaaactgatgaaagtgctaacactttttttgtccatttttttttcctttttgtctactttaaaataaagaaaatgcacttatacatcatttaatgtgagagcactctcaatgtcttctcttctctatactttaaaatgcatcactaaaatcctactttatctattttacatcaaacttttgtattacatcattcatcaacttctctaatcatttccttatattctattttttaatatattttacgttagacttttttatttaggctttacatttaaattttatttggtt

SEQ ID NO: 371056 - DNA, 1209 bp, Cannabis indica
tatgcgaccatcatggtcttttatggtctttaaccaattttaaagaacttgaatttgatctgaacgaccataaacgatcttgactgtacactatgtgatcataatggtcttttatgttcttcaaccaattttaaagaactttaatttgctctgaacatgaacgaccttgaatttacactatgtaacttaaatttgctctgaacaaccataaacgaccactaaggtcgcacacggtcacatagggttgcacatggtcgcactatatattttcataccacatgcgaccttgttcatttagttaaatttgtaattctttttatactttttatatttatgttcttatcgtttatatattttttattcatttcacacattattattgtagatgcccaaaactatattaacaacagagcttccatgtatacctcgtgccattactactaatacagctgcaaaatctaaagttaccatcaaatccccgctaagtgtaataggccaaataaagaattggctcacaaagtctgaccaggatgtttttaaacattactcccaattgggtcgtctcttggacctcgacactaaagggctttttcctggcaccttagtaaaccagatagttttgaggagggtagattgccaaaagaggcatgagttatggtttttgattaatggaaaacctgtgagattttctctccaagagtttgcaattgtatctggattgtacactgatggtggcccgacacctgaagaaatggagcttgtttcttctaagaacaagttaaaagaaaagtacttcaagaacacaatgtctattaaaataacagatgttgccaatgctctagatagcatatctagagaagcaaagactagggacagagtgaagttgtgctttatctattttctcagtgcatttctaataatgccaagtccttcttcggttatagatcttgaatggctacaactagtagacaatctaccaatatttgacaattattgttggggaaagctggcatatgagaaaataatagagcaaatcacaaaaaaaagatatgaagaataatccaagtgagaaggatattaagtggaacctctttagttgtccttggatatttctggtaagaaatatgattatgattataatttagtttatttatttttagatattttttattgtattttgagatataattttgatatgaatttgcgaag

SEQ ID NO: 371057 - DNA, 701 bp, Cannabis indica
agacaataccaaactaaataaaaataaaaaaaaataaaaaataatatatggagtagtaatttttaaaaataaatgaataaagttacttttaatgtaataagtaattacacaatgtaattttatttaattaaaattaaatattatttaattctattaaataaattattaattattattaggatgattgaaaagttttattatttttattaagaagttgaaaatttataggaatatgtatatatatagaattttaaattgctttacttaaaaaaatattaataaaaaatggtagaaaaattggagtgttattatttttatttaaataaacacttttttctgtaatgcatgatctttatatttttatcatttaaaatcgttagcattattgtattttaacagttgttatcatcttatcttatttatagttatcagttcattattatcactgtatcttacttatatatagtcattattgttattatcaccgtatctcacttatactcatcatcattgtcatcatcgtatctctcacttatagtcatcatagttgtcgttatagtttatttcttataaaaattatgatataaaattaaaatcttaatataaaatattataaaatagattgtgtatattaaaattgaaaattaaatatatatatttatatagatatggaggagatttcaatagttacattaaatatg

SEQ ID NO: 371058 - DNA, 690 bp, Cannabis indica
attaaacaactgtttcagaaaagtcaaaatttagtttttgtaactcctctttgaattaaatcttcctccaacgtgtcaatactcatttaaatgatatgattgagtattgtaacattttctttctaacagcaagaaacttatctcattgatttcataactttcatatgtaataacttacttaattacatgtgattcttaagttacaatctattttcagatttataactcctcacatgttactgttagaatactgtaaactcagaatatagccctaattaattcatgagaatcaaacaatagaatatagattagcggaagcgtaccggagtccatagaatcgatctttgattggtatgatcttccaattttgcatcaaaacctttgaaaccttattttcctgatgatggggattcaagaactctgtaaaattattgatacgatgcaaaatggggacccatacctgttatattaccaactgttacaacagttggtaatatttattaataatttctaatttggcccctcatcaaatcagaaactatctaattggtatccacatattaaaatcatgacaatcatgcccttaagtcataaactttattccaaaatagaccacataaatttgacttatttatttgatgacctaacacacattttatatatacaattgtgaccccaattatttctaac

SEQ ID NO: 371059 - DNA, 565 bp, Cannabis indica
aaaataatttccaacagaaacgacctaggttgacaacatgtcaacctaggcgctgggacctaccaccaggtcaacatgggcactgtgtcctagttttggcctccaagttgatctgtttctttcacaaaaatacttgattcctcgttttcgatggagactaatgaaattattgggacaattttttaatatttttgttggaagtatcgcaagttgacaatatgtcaacctgggtgccaggatgctctaaccttatgggtacttttttgaagtgaaaaatggctagatgatctctccttttatatgcaatgaggtcttattaaaataataataaaatatttaaaaaaaatttgaaaaaatacatttaagctatttttttacaattgatgatgatcaaacagtgaaattgattccggaggtcggtcgtcaattttcggagcttgaatcacatctgcgggaccttttttgggtaagttgtagttgaaattcgtaactcttttgagtacgaaatttagacttgatgtcttcagaattgcgattagagtgtgagacattacttaatatatca

SEQ ID NO: 371060 - DNA, 660 bp, Cannabis indica
tgacgtagtccacgccctcatccaagacatttctgtcggcatcaattggctccccagcctcgttgtatccctcgtagtttgggggttcaacctcctcctcttcctccgcctcggagagacaaataggacgtacgtcgtcctcctcttcctcttcctggacggttggatcctattcggcgctgggcaaagtggcgtgccgagccacttgaggatcagacgcatcgaccatacgcgttgttttattggtacgagccatcattctatggctggataaaagatttgagggagaatgtccatcactggaagaaggtgggctggaacagagacgaggatggtcctcgtgcaaaagttgaagcaagtcctggtcgatttgatgctcgctctcccaaaactcacctgggttcatctacaaaagacaatgcacaagatgagtgtttggccgaaatatcgagcgataaacaagcaaatatgccgaccaggagtactcaatagattaaagaataagaatggtcaaagaaaagtcaaaactcaagaaatttaaaattttcttgagttatggcaaaaatttcatgaatcttagaagaagcaagatgaaagacaggcattatgcagttcagaaagcaagaattatggactataaaattgcatgaaaccatgaca

SEQ ID NO: 371061 - DNA, 767 bp, Cannabis indica
gcgtctcctaaagcgagaagcaccgacgaccttttctcctatataaggggtcacccattgcctaggaaaaaggatccgtgattttgagcacttagagaaaaaaaaaaataccatttttcctctttgcattcaagaacctgttcttgacgtttacaattctcattaataaaacacaaggggagtaggctattaccgacatctggggccgaaccactttaaattttggtatctttctttacatttattgcaaattccggtgtcattaattatatttattgttacgattttggtttaaatctcatttattacgactccgcgtcggtttgctaaaaattcagtcagcagtatcaattaggggtattcatcaaatccaatccgcactattttgttcatagtgcatccgatcagcactaactcaaatccaatccaatccaatcagtaaaagtgcgatcagggtcctatttttaccattttagaaaatataggtttattttgtcatttaacaaaacagatggtccaaatggtaatttttacaaaatacagggtctaaaatggtatttatccttatatataacatctgaatttttttgattgatttcttatgttacttttatgacaggttgtttttttttttggctaattagaatttttaccccctgaactttgacatataccaaatcatgccccttgaacttttaatatcgttaaaaatgcccctgaactattgagattgttggatttaaagacttttttctaattttagtaaa

SEQ ID NO: 371062 - DNA, 621 bp, Cannabis indica
tatgagccaagctattcaacctgatcaacccaactgattttcagtattaaaaggttatgttaagaataggtcatggctcattgatagacacactttctaaaaccaacacgtgagaatggtgtataagatgaatgagttacttttctcataactaattaattttgagatgaaaccctataaaccttaaccacacacttccaaattctaacaagatttgtaaataaataaataaataaataaaaaggatagatttgatgaaagtttaaaactaaggctgcacaaaatatgggccaagctattcaacctgatcagcccaactaatttttagtaataaaaggttatgttaagaataggtcatggctcattgataggtcatatatataattatgggttggttataggttgggcacactctaactccatatagcccaactcaacccatttcttaagaagcgtttcaaatttaagacaaatttcatatataaaatagaataattttctgcataaataattaagtttaactttcagctgtaaataaatacataagtttaatttttagcaataataatacctaaggtatatttctggaacttctgtaggtacctgactgttaagtgttaa

SEQ ID NO: 371063 - DNA, 524 bp, Cannabis indica
cacatttatcactacaatatatgtgcactcaaaataagtataacctttctttgggccgatcaatgcttacatgagaaacacacacacaaacatctaacattcctcataaccaatctacacaagagaggttgctttggcgacatcatgtttcaatcaactcatttagaatgaaagacaaattttaatattttagaatgccaaatttgaacttaaaataatacaaatatatatatatatatttaatttggacttgaatttttatcatgaacctaatacatatacacatatattatatatgattatatatttccaatgcaactcatatataataataatagtccatatttaattatatatttcaaaactatataatatatatgtgcctataaaccaaactcttaaaattattaataaatacctcatatacataactgtgaatatttaaccaaaatatgaaggaaaatttgaaaaactatccataaaacactctaaaattattttcctaaatctatatctattaaaat

SEQ ID NO: 371064 - DNA, 657 bp, Cannabis indica
attgaagccaacccagaaaaaatcaaggccataatcgagatgccttcaccaacgaagtcgaaagaagtccaggccttaacaggaagaataacagcattaaacagatttatttcaaagtcaacagataaatgtctaccattctttaatgttttatgaggcaaagagaagtttgaatggacagaagaatgcgaggaagcttttaaagttataaagacacatatatcaattcctccagtttttgccaaaccaataacaggagaaactttaatacctttatttggctgtctcgtagaatgcaatcagtatagccttgatgcaagaaggggaaagcaccatcaacctatttactatgttagtaagaggttactgggggtacagtaaagatatccccctcttgaaaaacttgccttatgcctgattcatacatctcgcaaattacgaccttatttctaggcacatcccataaaagtcttaacagattaaccattaagataagttttatcaaaacctgatgctttaggaagatttataaaatggtcaattgagttgggacaatttgatataacctaccactcaagaacatcaaaaggccaagctttggctgattttctaattgggataatctctgtaacaccctaactaacataggtgtattac

SEQ ID NO: 371065 - DNA, 661 bp, Cannabis indica
gactcccctccacgcacaaccaccaccagcaactccaccaccaccatttccatccatccaccctcctatccaccacgaaccagtcaccacttccatttccaccaatccctaaatcgaataacaatctccacgaaccaacaactcagtccaccattaccatcaaaatccgaagcttcatcaccatcactgccgccattttcccccaatttgaaaatgcaacagtaagactccactccgcccaccagcacctccgtccatccccacggagctgaaacataactaggcctagcgaacaaccaccaaactcgacctccagccacctttttcatccatacctgcacaacaccataaaccaccatctccacaaaactagcaccacgagctacacacaaagagaaagaaaaagaaagaaggacgagagatttgacaagagaaaaaaaaaagaagaaaaaaaaaacctagtgttagaaggggctgattttttggggggggggggagggttcggctaggacgatgatgggactaattttgggggggtggggtgggggtttggctagggttagaagaagatgatggggacgatgatggctgaatttgggggggtgggggtgggaggttcggctagggttagaagaaggagaagaaagaaaagagaaagaaa

SEQ ID NO: 371066 - DNA, 595 bp, Cannabis indica
tttcatgttgtatgtgcttttatgatgaatgtttgtgtttgttagaatattagtggtatattagttgtaaaagaattagggtaattgatatttcctagatattttgtagtttcctattttattggtagtttcccttttagtctcctagctttgtatataaatatgtactattctatgaaatacacatataattcgattcactactttctacatggtatcagagcattgtgattcaaaatttgaaattagaaattagggttataaaaaaaacgaaattaaggtttgagtttagggttgtttttcggaaaccctatttatagtgaacattttttctcaccgcccacataggaggactgccaagccgtcggactgcaaaacccagaaatccggcatccaaattcaccgcgcttgggccccacgcgtcgttgtttgccgctgcccgaaatcccacgcgtcggcacgtgagggcgcgtccggcgtcttctctagtgacggtcgacgcccgtcacactccagcgcctttctcgtcctccttgcattggtttctagcggttcttggcattttgtggtttgatacttttgccttctttgtgtt

SEQ ID NO: 371067 - DNA, 745 bp, Cannabis indica
cgaaccaatttataaactctgactacacacttgcttcgctaacatatcggaccctcccaattcgggttgaacactcctgcagatgcatctctcgtatttgcaaagactcatcttagcaccaagtctcaacattaaatagtcttttcttgacttaattgttgaagtatcttgtaactcgatgctggtatgctacgttggtgatttgcgactcagttcatttttcctcaagtagatccaaggacaattttaaaagttcctagttttcttcttgattataaaactctcttctgtgagtcaatatgttcacttgaacaggcagcattgctttcgagccaaatgctagcgagaaaggagtgtgtcccgtagctgtcttctcggtagttctatgggcttagactacctgaggtagctcgttaacctatctgcctttggcagcgtctagcttcttcttgatagtatcctttcgggttttattaacggcttccacttgtccatttgcctgaggcctggatactgacgagaatcttttgataattttattccactcgcagaattcagtgaacaagtcgccatcaaattgggttctattatcgcatactatcttcatgggaacatgggaattccaaacctacagataatgttcttgacgacaaactcaaggactttcttgcaggttatggagacgaggggctcaccgtccgtccatttagtgaagaagtcgactgttactgttgggttttatgcc

SEQ ID NO: 371068 - DNA, 559 bp, Cannabis indica
tattcgccaggtttcatacacctaccagcattaggttccagattcagatcaacttccggttgtagtcgaccaaagcactccataatcatcacacccactactaacattgtcacaataaaagtcttcattcttactcttaaataattcattaattttttttctttttattttgctgtgatataatggccgatggtgcatgctatttataggagaaattaaaggaataacaaatcttttaggtggcgtttggttggaggtaatgaaatggaatggaatggaaatgaaataattttcattccatttcattgtttggttgcatttaaaactattggaataccattccaatggaatggtctttccatcattttggtggaatgactattccattttaaaatggaaggaaataccattccaatgctagatttgaacaaatttaataattttttttaattcaattttttatgaattttaaattttattccattccattcctactccaattctcattctcattcatattcctattcctatatttttgctacagaccactctaggatga

SEQ ID NO: 371069 - DNA, 970 bp, Cannabis indica
cccgagcctgttttcaacaagttcatctcttttcgagcttcctcttttcggacgaacacctgagccctctcattgaactcagtgatgttcttcattggacgaccctataagtcttcccacaattcatctccaacagttgataggtagtagtgatcctcgcatgaagggcagtaagttgtatactatcatccagatttctaacccttgtagcagtcgtgctaaaatgacttaagtatgccttaagtgtctcgcctggctgttgcttgatgttggttagcaaggacgcctcagatcgtctatctcttgcggcctggaactgttttttaaagtccttggatagctattcccaagaagttatggaatgatgagtaaatttgttgaaccagctgcttgctgttccaactagcaaggtggaaaacaaaatacaacgtaaattgtttgtcacattactagctcgcattattgtgttgaagttgttcaaatgcgagaccggattggtggttccatcatacgatgagacatgatggtttttaaatccttggggaaaaggagtattcataatatctggatggtatggctcgagctcctcgtctgagtcatatccagactgtttttcctaattcccccacttgatatctcctaaacttatcctccaactcgtctattcgcaaattggatgggatcctcttactttggaccgagttgttggcgagatcaggttttttctaattcaagtgctctcaaagatccggctgggaataattactaacagacctcgttctactcatagactgtgtcctacttacggactcatctttctcatggatctcgtacctcgagtgactcgcagacttactggttctcatgctttctcgatcattagctcatcgagcactctctcctcttcgagttgatcgactgtgggtccttgaaagccctaaggtcacactagcttcttcacgctctgctc

SEQ ID NO: 371070 - DNA, 538 bp, Cannabis indica
aatataaaattatatatatatcataattttatgtaattctattactattattttttattataaattacttagtttacttatttctcattatttagttttattaaagattatttagtattattttctattaacaaaatttttttaaaaaattatatatttattaaatatacattatattccattcatttttttatagagattttttctattatagaccaaaaatagatgaaatttacatttatggccctaaaaaaggaaataaacaaaagtggaaactaaaaagttggtaattacaaaaataccggctgagaaaacggaaaccaccattctcaaccatttttcttccaaacagccgatccttcttcgtgacccagccgtccaaccccaacaacccaatctcaaccatttttcttccaaaaccagcaaaatcaaaatctaaaaaaatgtagaactcctaggaaaccagctgaatcccgaaaatccaaaatcaaaaacgaaaaggaaaaaaaaaacccaggaaacctccattgatgtacaa

SEQ ID NO: 371071 - DNA, 825 bp, Cannabis indica
gagtttgctgtacaatgcataaaatcgctcttttttgcgccttggttgtttctttttactatgttttcttttgggaatcgcctttttctatcgtaataacgcctttacggcttagagtggttcgtgctttctcggctttgtcttttttccctttttctctttctttttgcaacgtcactgcctttgggatttttgcacccgatgctttccaaggaaagtctcttggggtttccttattcggcaagcatctggagggggcctctttccagcggttaggggacccccattccctttttaaacattagggtttggtttggggcctaactgctggattttcttaattttttcagaaccaatatgtctgcttctgcatccagttcaaagtcttccaagaagggggcagttccactggccaccctagaagaggtcatgaagggtcccgtggcccaggaaaaatttacttctcgtgccaacggctgggaggcggacgagctccactccaccttaacttgtgcccaccagctcgagaagatcgtaacggtggtaggcatcaagccatcagcctttggaaccttccaccgcctgcctcgggatgaggagacgcccaatcataactatgagggttcggagcttggagctagacccatcttatgtctgcggccatgctccctctctaggattactttgttaattttttagtttttgttggcctcgcgccgcatcaattaattccccaagcataccgcctgctttcaggcttatttatcttgtacgctgctaggagctagggttcgcccagtctggctgagattttatacttttacg

SEQ ID NO: 371072 - DNA, 556 bp, Cannabis indica
tttcataattaatcataaacaactgctaatttccaaattaactaagcgggctttacaatatgtctcattccacttagatctctaacccttgtatcctttctgttgcagagtatcaccaagatctgagttcgaatgtccttctcttcagtttggattcttcacaatcttccagattatgatgaggtaccacttgatgtgtgtgggcactactctatcactaagggtttcaaaaaacttgaacaaggaaagagagagaaagaggtcggctatagtaagggaagtgatggctcaaatttttctgaaggcaaaatttctgattttcaatctctttttaagtgtgagccatcactatctatttatagataaccactaggtttaggttaggaattattggacattaaaataatgaaaatattaattggaaaaacccaatttagtggtcggccaaggtatagtgggccccactttggtattttgcaattttacaaattttcatttctattttctcaaaaacgccaattttctaattctaaccatttaaatgccaaaactaatt

SEQ ID NO: 371073 - DNA, 434 bp, Cannabis indica
gctgaaatcgcatcccaaaaagaacaaaaccaaaagatgcaagaggtgatgctggccatgcaaaaagccatggaggtagcaggaatccacgtgcatcataaagccatccctgctggacttggagagacaccaggagaatcctcgccaagtgcccaaaagaagaaatctagggaacctagccctataaggtatccctctgaagggaaccagcagaaaaaccccacttccactcctgggaaaaagaaaagggtgcaggatccgcgaaaggtccgctcagatttcccggaagggaaggtccgcagagggccaaactccaaaaaggacttggccctcaggatcgagaggactgaaagagcatttctatgtaccaggagcccggagggagaggaagaaagggccagaaatgccctaccatcgatctgagacatcagatt

SEQ ID NO: 371074 - DNA, 541 bp, Cannabis indica
taagaaagatgtaaaatttatatatggcttttggtatttctaactagtttttttcgttcaaaaattaatttttaattatatagaattaattagttattaatttaatgtcttaataaaattattttaatattatttgagtttctataaaaaaaacttcaagtgagataatttttttctttattacagtgttttattttttatttttttgaaagaaaagaaaaaaaataaataaaaaaaagagtaacacaatttaaagtttttgtatggcattcctccttactttttgggctatttacaaaaatatggtaaaatgaagataaattttgatttatatggcataaatacttaattatactaaatatggcatattttttttttaaaaaaacttacaaatatggaaaaaagtcataaggaatgccataaaaaactttaaatttgtgtttctttttattattatttttttttttaaaaaaaataaaacactaaaataaataaaaaatgatctcaactgtagatgttattttttttttctacataaatt

SEQ ID NO: 371075 - DNA, 478 bp, Cannabis indica
accggcaccacctccacctccgcagaatcttggggataatgtgggggttggtaatgctaatcctcctgctgactggcagctgatgtttcaagaaatgcgaagtgtcatacttcgtcaagaagaagagttgcgacgattaaggcaaccggctgcccctgctgatcaagtgttaccaccaacacctgtgccaatggtggataaccaggggtttattttgccgcatagagattcggtatttgagcagtttgtgaagttgcaacctctgacctttctgggaggtattgatataataaaggtcgagcagtggatgagcactattacccgtatcctcgagaatttggggagggtgatgggaacttaaagagtgaactgtgcagccttcatgttacaagatcatgcccgcgtctggtgggatatcttggggcaaacccgggatgtcagtgtaatgacctagaaagaatttaaaagtttgtttgaa

SEQ ID NO: 371076 - DNA, 977 bp, Cannabis indica
aaagtcatttctggcacgccaaatggcccagctgaccatagccgcctcctccaactcgccttctcttcctcggcattgcaactccagcagccaattgctgaaatcgtcatccatattaccgccgacatccacacttgttctgttccaggaggcacgagcatgaacacacccaactaacgcatgaaaaatagtttcagttgtagtgagacacaaggggcatgttgcgttaactggaacatgtcttttttccaattggacacaagttggtaatgagcctgaaaccgccctccataagaagttgctgactttagggggaactttaaaactccataaatccttccaaacgccagtagctccagtaacaggccaagctcctttttcttcttgtaagaacttgtaggcactcttaaccgagtagtgccccaatcgttcaaaccgccagctccaatagtcggatatggcagtagaactcaattgtatagaaaaaatcagctcttgatctctatcagcaaagagatctgtaattacctcttcatcccactctcgtaaattcattttgaaaagactgcttacagtctgattaacaagtgcaggatgtgaagaaataatatagccattcgtgttgtgtggaagccaatggtcacataaaattaaagtatgttcacccgtacgtaccccagccagtatcagaccttttgcttcaaaatactcctccatacgaagctcggattgtcacccaattcagctgaaagaagagttccgttggcatagtatttagctttaaaaactttactcaccaaggacgtatcattaaccaacaatctccaacattgtttccccaacagggccatattcaagtcccgcagacttcgaaaacccaatcccccaacaggtttgtgacgactcaatcgatcccaactcataactaacacccgttctatgaacatagtctgtttgccaccagaacttagccatga

SEQ ID NO: 371077 - DNA, 547 bp, Cannabis indica
actagttatatgcatgcgatggggtctgttatttgtttttctttctggaattaattttatgaagtgatgagatagtgtttgtttgaatcttatttattcattatgtctaataaggtttcagttccattttttttttggtgacatgatgttttctttagatcgactactaatatatcatataatatatgtaatcgagctcatcttatttagcataaagccactatcaaagttaaagtttatgcctcctttttatgcatatatactttatatttgacatatgtattcatatgtgatgtgattctaagttttcactcatatattgggtcttttggacttttggattaagtgcaccatggctatgggtgtgatctttttaataaaacttttcaattcatattgggaaatttgaaattccattcttacaagatcttaaaatttttttcctaaatgcatacttaataatattggtcatatatgaccacattcctaatatcccacaaatacccctcccatttgaaaaaaataaaaaactcaaaacttctctctc

SEQ ID NO: 371078 - DNA, 551 bp, Cannabis indica
ggtggatgcattttgatttgattctaccccgagtaagcatccatgaagcttaagatttcacgccctgctgttgcatccacgagctgatcgattttcggaagtggaaaacagtctttggggcatgcttttttgaggtccttgaaatcaatacacactcgccatttcttgttcggcttgggtaccaatacgggatttgcaacccaagctgggtagaaagcttcaattatgaaattattgttgcgtagcttttctacttcttcttttatggctagtgctccctctttttccaatagccttcgcttttgttgaaatggtcagaagttgggatcaatatttaggacgtgcaaaatgatagaaggatcaattccgaccatatcctaatgtgaccaggcaaaaacatctaggttttctcttaaaaattgtatcaatgctgattttacttcgcgcaacaaaccttttctgatctttagctttctggtccggatatttggattgatctcgatctcttctaattcttccataggtccaacattgctgcttgggtccccaag

SEQ ID NO: 371079 - DNA, 296 bp, Cannabis indica
tttttgaaaatcggaaaatatcaggggtgcatcaccccccacacgcacgcagatcacctcattatcctcggacgcgtgcgcattcagacacgcgttgtctgagttctctcggtctggacaggcaacgctgtctgaagatggccccatgtgtgcgcatatggctgcttgcagcctttagcgctgagaaaactcggccagatgcccccgagcgcgcgcggacagtatgcattgcatactgtctgtaccacttgcaaattttttcgtttcttcgatttttcatgctatttcatggagtt

SEQ ID NO: 371080 - DNA, 698 bp, Cannabis indica
tgctatttgtgagttcattaattaactttgcatagcatcagtatactggaaggggttataagaggcattttatgctcttcttgtgtatattcgtgtgtatttgctatgattctttagtttgagaattagaaaataaatgtctcaggtgaacaagattgtacggggtcagtttgatttattccagtcaatgtacaagccatttcttgaagaatacgaggctaaagagattcttagatcctcttatttttcggataacaaatcaaacatatctcaggttggttttgatcttaaagtcatcacggtctactttattgttcagtaccatgtcgtaaatatctacttgcagtggagaactttatatatatatatatatgtatatatatatattatagggtaatttttctgatattttattccttcacactacggtagcgtttggttggaaagaatgataaataggagtagaaatagaaattgaatgaaattaaatttaaaatactgaatagaaattgttaaattttctcatggtctttcatttattttcaaaatggaatagtcattttaccaaaatgaatagaaaagtcattctattggaatgacattccaatactctaatgacacgtttactatacagtattcggaatcgaaataaattaatggagaaatataacggaataaatgaaaaataatcggaatca

SEQ ID NO: 371081 - DNA, 470 bp, Cannabis indica
aaaaaattgtttcggatatactaaaacagataggagtccattaatatattcatttaaggtgggtgtagtgtagaattttttaaaacttttttagatgctgaaatagatagcatgtctattagaacgatccctttagggttgtactacgtaaattttctagagcatactttgatagttttttattgagaaataaattttttaatgttagaaaaagaactttcaaaagaaaaaaaaacaaaaaaagtgaactataaaatgtataggatgcaaatgatagagatacaattttaaacaaaatagttttaatataaaagaataaatgttcattggcccatagacgagtttctgagtttgaaatagtcaatttttttatcaagaaatatatattttttttttaaaaaaaagcaatagagtacatgaatatatatatacaagcaaaaagttacgtgctcacgtatattaaattttat

SEQ ID NO: 371082 - DNA, 664 bp, Cannabis indica
atatatctagaaccctatttgattaaagttaagattataagattaattaatttgtgatttcttcctatacacataataataatctcacctaataactaataatattttttctttaatttttaattgtatcactttcaaataacatagaaaaaaactagcataaaatttagtatacgtgcctcgcacgtagttttttgctagtatataataaagtttttaaagtacatatttaatgtttttatttatttttaggtctattttataaggtaattttttaatatgtaatgagaatgattaatttttaattgtgtttttgtttttttatttattaagttttttatttatagattttatttttatataatcaaaaccagttttctgataaaaaaacaagttttttcatgaagaaactaatttcttgatgaaaaatcagtttcttgattaaggattttttggtgattgatttttgatcgcatgagaaactaaacaatttgaatcgcaggagaaaaaaaatcttgtgtggctagagagagtagtttgcttttttgtctttttttcgagcatctctgttttactgtaatggggttgccttctttttttattgtcttttgtcttgttttttattgtaagtttgtcatattatctttttatagggtcaaaatta

SEQ ID NO: 371083 - DNA, 697 bp, Cannabis indica
ccaacgttcaaaaaactgaggtcacaaatgaccttccctcttgtgcggatcaagaggattttcctcattcaaaaacccctgcctttatgggagtatataaaccccttttattgctaaaaaccctagcaacaaaaatactttcttttatctaaccctagcagccacccttctcttcttctctttccttcttgctagtaaaccctagcagccgcccctcatcacctccttcagccgaacttctcttcttctccttgctgcaaaactttacaacaaaacaatactcaacctgtgttttttccttcctccttcagcccttctaatcttcttccttctttcttcttgctgcaaaatatagcagatgaacctttctttctccaagctttaaaccctgcagaaaaaaccaaagaacaacacctgagaagaaagcaaaaataaaacgatcaaagagaaaagactatagacaccacaacaattgatttcggagttccctctaaattagaggtacgtctccgtcaagcgaccctcaaagttgcttgagtcttcactatgaatgtcaaaactcagttacaatgttatggagattccatgccacaaaccagcaggtaatctcaagctttttctctcttttcttcctttatttttctggtttgatagatgtaaagcccgcttagttaatttggaaattagcagttgttta

SEQ ID NO: 371084 - DNA, 932 bp, Cannabis indica
aataaaagtattaaatttgaaaagaagaaaaaaagagcccaaaaattgggttttttttttttatatatatatatatggtcttttttgataagtagtttaagaaaatatggagaaataaagtaaattttaataaaaactaggaaaaatagaaattaaaaaaatttaaaatatagaaaataactaattagtatatataatctctctctcaactatgatttggaaagttgagaactccatttttacgaaccccattgtttccagtgtttgcttaagccaagattttctccttttggttttttttttttttttttttagcaacaatcaaattattttttattgagtaatagtctaattttttgtttgaacccaataacaaatttctaaagttttttttataacttttaatattctacacaaatatttatgaagttttgtcattgatcttaactttttttttttttttaaatttggattttaagtttgctagtgccacacataatgaaataacatatatatatttagctatttaccctaattaatatgaagaaaaaaaaagaatgttaattttcaatatataaagattaaaaaaaaaaaaaaaggtggctaatgtaaatctagctttataaaattataaagcatacaaagaaatcgtaaaagaagaagcaaatctgtaaaatgtcgtaagtgtagcgtaaagaaaatggaatgggaatccgtgtggcgtaagtgtagcgtaaagaaatatatattgtactaatagcggtattaagtcgtattgtattgtattatattaaattgtattttatacaatatttttatgtaaaattatatatgatattaatttttatggacacctaaatatataatattttattataaattaaagtttaatatagtattacagtagaacctctatccaagaatacacttgg

SEQ ID NO: 371085 - DNA, 852 bp, Cannabis indica
ttaatgtagcgtagatacggattaagtatctcacatatatctaaagtctctatccccaagctctcactcatttttgattaacacaaatttcttctaaagagagtagagaaagcttgaaaatctgattactcaatctgaagctccactggggaatgaaactcaaagatcaataattggaggtattacgatttctttcgtggtttgcatacttattcgatatgtttatattaattccttacactgaggattaaagctcaaatatcaatgacaggaggtattactatctttaatttacatatttattccatatgtttatattcttagattgtatatgctttattattctctttattattttcatataataatttttaacaagcagtaaatattcctaaaataatattatattatatatgtacaaaaatatttcaattgtggcatttacgtaccttcagcaagaggacactaaggcattaatgtcttgtcaccaaactatctataagtgagctactaacgttttctttcttcgatggtaagccctcaaaaaatatctctacaaaatacaaaggctattcctgggtgcatctaacaaccagagcaataaatgatagccgtccgatctaatgaccgtacaccagcagccacgggtgataaatcgtaaccacaatatcttatcccctgtagatcctaacatgtggtgtctatttctagttgaataagaaagtgaaagaaaaaaaaacgacgtcggattcatacaggctggcagttttcacacgccacaaaatccaattgtgaagaaaattaagtactaaagtgagagagagagagagagagagagagagagagagagag

SEQ ID NO: 371086 - DNA, 539 bp, Cannabis indica
gggttacaacctattcatgtggaaggagaggacatcctggttatttttgggagggccgcatatcgcaggggaaagcaataacgcccagataagatatgtggaagagataaaaaatgagcagtcggtcttttccccagaaccttccaagaaggtgaaaaccgaggaacctcccattaaattcacaaaggaagatgagaaaaacgtgagatatcctcactttgatccattggtaataaccattcaactcgccaataaaaggattaagagagtgttaatagacaatgagagctcggtaaataacctttataaggagactctaaagaaaatggggctcaaaaatgccaaattaaggccttgcatggtgaacctttgcagattcaccggagacagcatcgctagccttggcttaatcgagctcacattattaactttaggcaaggcacctttatctgctactgttatgcaagacttcttggttgtcgacctgccctcggcttacaacatatttttgggtcttccagcactgatcggactagggc

SEQ ID NO: 371087 - DNA, 569 bp, Cannabis indica
acccacactcgcaaaccaaaaccaaaaattgtactagaactggaccgggaacttggaacaggatccaagaactagggcttggacccaaatcaggacccgaaccaagactcggatccaaactcaacccgaacccgtaccgcttgacatgaaacgtgaaccaaaactagaagcagatcaggacccaagaacaggaccaagacgaggacctggacccatacccaaaactataactggactaggacccagactcgaacacagacccactcggggattgggtccaaaacctgaatccaaacccgaaccgggactcaagacctaaacctagacctgaacccaagagccaaacattgaataggactcagaacccagaactgggatcgagacccagaactggaccctagtctcggtcctgaacctggacacaaacccagaccagaaccatggacatgaaccaaaaccagactaggacccgtgattgggatccagttcgtgtctcgggatctgagaactggggcttggaaaagacccatagtctctgtcttgatctgggactcagacaaggacccgaa

SEQ ID NO: 371088 - DNA, 511 bp, Cannabis indica
ttagaaattatggcttagatattcaaaaatcgacaaaagacgtttttggctcaagatatcataagcacacaaatagaacccacaaagcttcttgcttttttcaaaaccccatagtgttcccacattcaccaagattgagaaaagatatatttatttttctctaacatcactaaaataaatttttctttcttgaataaacttttcccaaacatatcttactttttattgtgtttttttttctcttcagtgacattgagttagaatttttttttttctcaatcttgcaagttcttttcccctctaactattttctcacactaaatatttttgctcccccgaactaattgtatagcttatgatatcttggatgaaatggtgaagacaaaattaatagtgtagatacaattttcggttcaatgcgtgaaaaacataacaagtttcggctcaagagggtcaactagggataaaatttttatggtaggcttgaaaggctcaaactatccaacaaatg

SEQ ID NO: 371089 - DNA, 510 bp, Cannabis indica
ttctctctctaactctttcactcttggactttaaccccgacctaaaactactaccgtcgaatatacaaacctagaaccccggtcgcaaggcctcactgtcgtcttctctcacggcctctcttttttttacgtttctttctcctagtttaccagttttatacgatatttagcaatgtatttacaataataaaacaaatttgagattagggatgaagtttagcgatggtttgtaatattttgcgtatttaatgatgtttcgcaatgatattagcaagtatttgtgatatgaggctaaaaatgcacaacacatcgcgcaacattgttaatcatcttgaaaactttattatgatttcgtgacatttagcaatgtgttttgcgatgttgtgaattgtagacatttagcgatgtttcacgatttcgcgatgtttcgcgacacttagcgatgttttgtgacattgtcaaaaaaccagaaaaaaaaatacagaaaacaagcgagttgagaactccaac

SEQ ID NO: 371090 - DNA, 635 bp, Cannabis indica
aaaataatgtcttaaagagaaattaaaaaaataatcataaaaacttagtaaaacaataaacttaagtggcatagtgtgtatagtaaaaaaaagagtataatcaataaaaagcctaaagcatgaagttattttaattgtaatagttattattttaaattttaaatatatacatatatcatatcggggcgggttcggggcgggtatctattcccccacccccgtcccgttttcgactcgggtatgaatctttaaacccataccagcccccgcccccgaaagtcaacccccgtacccgcgggtataattgccatccctagcaccacgtctcctgctgaccaagaagaaaaaaaaaataaaaaaaaaaggttgaactaaaacccattttcctcatcccaaaatccacaattaaaaattaaaaaaaaaatctaacattttctcccacaatttacacttaaatatcaattttatcttcccattttatttcacctaaataaacattcttaatttatttttaggctaatgagtaattttttcccccgaactttgacatgtactaaatcgtgccccctgaacttttttggcaattaaaaatttccctcgaactattgagattgttaaatttaaggacttttgtc

SEQ ID NO: 371091 - DNA, 489 bp, Cannabis indica
gattaattttccttcttcatttctaatcaaacaatatatatttttcttttttttttaaaaaaaaaaatagagatatgagaaagattcaaaatttttgcgaggttgatgtcacctgtgtcaacacagatgatggtgagtgatacacaatttttactgcgttattaaacccatttaattattaaatttcactaattattatacctttttattttatgctttaattagagaattcaaaataaataataattaaaaaataaaaaaaataaaataactgaaaaagtaaatagactaacaacgattttaattaaaaagtaaatacttaaagcattgatttctctatttcaaactatgaatctcaatttaccaatcatcctaatttattttataatttgtaatttcaagagtcctaatgtaattaaactctctcgagtgattataaaattaactttaactaactaataacatatctctatttaatgttaatcaatt

SEQ ID NO: 371092 - DNA, 547 bp, Cannabis indica
ttctcatttttctttcattttttatttttaaatttagcattcagtttctttttccttttctttcttagttgttcatttcaaaaccaccttccggccattactctttcgaaacccacgttcaaaatccacgaaaaccacttcccagccataacattttccatcttcttcttcaaactgcctccctgatcaattttttttatatatatctttcatttcgtatatataatagctattacctgtaactctgcttctccatctctattgccaaaaaaagcttcaaaaatgggtcataaatcagttgctaacaaggctaaagggaaacgccaagtcatcaatgatgatgactccgattttgctccccccgtggctaatggtgtccgtcatccagtgaagaagaagtcgaaggtgtctttgcctaaaaaaattccgattctgacagccaaaaggggaagaagaagtcaacttccaaacaactgtgatgaaattataatgcaacagttatatctattgcgagccacctaacataaaactacaaaataactaataa

SEQ ID NO: 371093 - DNA, 538 bp, Cannabis indica
aaggctggcctccatcacagaaggttggcctccatctccgaagtctggcctctgcttccgaaggctagcctccatctccaaaatctggcccctacttttgaaggctgacttccatcacaaaaggctcgccaccatctccaaagtctgacttctacgtccgaaggttggcctccatctctcaagtatagcctctaccaccgaaggctgaactccatctcagaagtttggcctctacctccgaaggttggccaccacctctaaaggctagcctccatccataaaggctgggctccctcaggcgcacaaggaggtgacgctgactctttctaagccttcagtgacaggacatttaggggttgtcattgtcggaccccatatgtaacgccttgatacttaggcgtgctacaatgatttttcaattacagtgccatctttgctaatcaaagagattttcttaaaaatcatgtcaaattaaaactttagatttaattactaaactttataaacttttacacatttcactacaaaaaattttact

SEQ ID NO: 371094 - DNA, 521 bp, Cannabis indica
aaaatttcattatgtggtgtaattatcccatttattattccaaaacacatgtttgatgtgtgagttagaagcagaaacaactacacatctgtttttatattacaattatagcagaaagaagtatggaagccatttcaaattggctttgatggaggaggaaagcaaataacttgctggaggttctacaagctgtaaaagaaatggaggaaaactaacctcaaacaataggttattgctatagtagtggcagccattaatgtttacaatgtgtggaaatgtcgaaatgagtgtttatggaattattgtataccaacattgaaaaatacattgatttatagagtaaacaagatgttaggtatagaattttaagggttttgccaaaaaaaaattgtctagaatagtggtttgatagtttgtaaagattacatgtttagtaaaatttctagcctttagttggagtgattgtaggatgtataggatggttagtgaagttgatttctcaaaaaaaaaaacgtaaataa

SEQ ID NO: 371095 - DNA, 268 bp, Cannabis indica
aaataatttccaacactaactagtcgatcctgggtggtgggaaataatctttaggacacgctttattcaagtcttaaaattctatacaagtcctccaagtttcgtttggttttgggacaagaactgggtttgagatccacgagtgatagaaggactcgcatatgaagtcattagttaacaacttgtcaaactcttctttgagtgccccttgtctctcgaaatctaatggtcgtcatttttgtctttttgctggatagttggggtcgat

SEQ ID NO: 371096 - DNA, 514 bp, Cannabis indica
gtaaaggaaaagcaaagctggaggaacagtgagatagagcttggcagtgattgtacatatcgcggcagtgcagcctggagggtttcggttttttgttattatggagtctgtattttgaggttgcatgctagcaagtttttttaaaaaaaatattataggtatatattggtaaaatacttttaaattgtattttgatattcgggatcccgacccatatagttataaagatataatatattaaagttaatcttttgagtttggtaaatttaaaatacgggcgttacaaattatctcaagggagaaaagaaaatccaaaaaacgaattaaaaggacaaaaaaaaaaagataggtagtttgaaaatttctgttaaatttatttaaacaaagcatctccaacaaatacgtaacaaatcgtgattaaaaaaaattaaaataactagatctttaacttaggtgccgtttggtaacactttttttttttaattttttaattcacaaaatgaaagtaaaattt

SEQ ID NO: 371097 - DNA, 690 bp, Cannabis indica
ttatttacgtgacaaagtctagcatgccaagtattaaaagaacacaacatataagcagaagcattaactttattgacttgaacatttaatttaaacattccctcagttacataccccttccctacaaatatcccattcttagttaaagtaaacaaatcagctcctatagtctgagtgaaccccgccttgttgagaaggtagcccgagaccaaattcttccttatttttggagtgtgcatcacatctattagaatcgcagttcttccagaggtgaagttcaattccacatttccagtaccagcaactatagtggtgtgggagtcacccaacaacactttctgatcctcactagcagcaacatatgttttaaacatatttctatcatagtagacatggagaaaagcgtcaatatctacccaccaccctttagatccaccaatgaagttgatctctgaaatcatagctgtaaatggcagctattctatcaggttagcctgcgaagcagaaataggcctgttcttacacttacgtgtcatatgacctggcttgttacagttgtaacacatgaacaaaccagagtcatttctattacggggtacttgctgcctattattttggttcctttgatggttccaattctgattgttgttattggtctgaggttgactgttgcggtttggattcgctttg

SEQ ID NO: 371098 - DNA, 676 bp, Cannabis indica
ttgattgtgattctccgtgagattaatgccgatcgaactggaactgactgatcactcatcactctcttctatttattatatataattaagattagtatgaatgatgatgatgataataataatgatgtttatttgtataatatttctagttaatctccatgtaatagtatcaataacattgaagctccttcctatcctatgtatggggtttcataataataataattaagaagttgattctactagttatatatatatatatatataaatatatccctatatatagttagttttggttaaattaattaaatttgagtaaaaattaatgtgtgaaataagaagagtttcttttgaaggttaaattaatatgatcacctaatcaatagtataaacatgtggatttgggtctcattagaccaagtatctgaaagaagaattgtttggagaggccaaagcaagaactcaaaaacttgtccattattaaaatatataacagaatgagaaaaatcttgcactaaaacttgatagtatattgacaagaattttggcttcagcttcaacaccaaatcctttcctttcccaaaacaataataatataacggaaatttaattttttatgcttacatttagttaaaaaaaaaattttaaacaaataataactaatatttgtaggata

SEQ ID NO: 371099 - DNA, 509 bp, Cannabis indica
attataaataaacacatataaagtatgagaaaccttacattgggtgcaacgaaataatatgcctccttccactcagatctctaaccttgtatactttttttcgcagagtatcaccaagatctgagtttgaatatccttctgttgaatctggattcttcacgatctttcacactatgattgaggtaccacttgctgtgtatgggcactactctatcactaaggtgttcgaaaataataatgaagaagaatgagagagaggtggcggctaggttagatagaaggctcaagtttttctctgaaaggaataagatgcatcatcttttctgaagccatccctatctatttatagtatgccacaaagggttttggtttgaattatttagcattaaaataatgaaaatattaaatgataaaccctacataagtggctggccaaaggcttatggatatgggccccacttttgtaatttgctgttttatcatttctactatctcatttttctcaaaaa

SEQ ID NO: 371100 - DNA, 480 bp, Cannabis indica
tttgttatgattattatcgtaacaatcctaaaagattcccatatatataaacatatatattaaatcagaaacgaaagatgatgaatagaaaagttacctcttgatgaactatcaagtatatttgcaatcttttcgtaaattgaatcctaaaacagtaataaacccacaatgtgatcctctagatcaactaccacacacaaggactagtgtgggctggtaggattcacaaaataatgatgagttcttgttttaactttaacacatgagcaagaactctttcgggagaaaaaataagattataacgattaatatttttaggtttctaaatctattgtatacataaatgtaggtttatattatattaattgtaaccaataaaataatattgaaagtttaattaaataaattatttatttatttaggataaatactattttagatcatgtgttttgcaaaagttactaattggaccctctattt

SEQ ID NO: 371101 - DNA, 770 bp, Cannabis indica
aaggcccaacgcctaggctgacacttggggctggccgagcgcccaggttggcgttttgtccacctgggctgattttgatgatgttttttgagaactattttgagcatcctatcaatttttagaaagcagtaagattcaactatttttaaggaccaaacgaaactttggaagggccataactgggacccaacgcctagattgacacttgggactgagcctaactcccaggttggcatattgtcaacttgggctatttccaatcaagttctcaaaaagtgctctgggtattttttctattaatgaagatttaagcaaactcgaggagaaaactacaaatctgagcccttggaaataggcactactacaaatatggaattcagtgacccacttttaaggactctaaaaatttttagtgacccttcaatgcaggtcactaatgtgagtgtccggaaaggtaataattagttacccttcagcgtaggtcactaaaatattttatactctctcattacgtgtcactatatgtattcgtgtgtcactacatgtatatttttatttattatttattatttttctaataacacttactaggggtgagcttaaaatctaaaaaattgaaaaacctgttcaaatcgacctaccgaataccattggaactgaaaccaacgaaactgaaaaactcaaaaaaccgctaatggttaaaacgttattgaatggttagtttttttaggtaataaaccgaccaagaaaactgaaaccgaccattatac

SEQ ID NO: 371102 - DNA, 1212 bp, Cannabis indica
atacccttctcaggaccatatctcccacgaagaattttcgagctttcacttgtatgtgaaataccgagctactttttgttgatggtccatcaactttaagttcgcaaatgctcatttttcttcgatttcatcaagtgattctgcaaggagtatgtgattggtaccttgatcgtacgtcaatcttctgtgggaaggtggcttgagttcgacgggcagcatagcttcgtaaccctacgccattgcgaatggtgtctgtccagttgccattttttccattgtacggtatgaccatagaacttcaggaagctcttctggccagtttcctttggcatcttcaagttttttctttattgtatccttcaaggttttgttgactgcctcaacttgaccgtttgcctgaggatgcaccactgcggagaaacttttgatgataccatggttcgcacagaaatcagtgaaggattggctatcgaacatattgccattatctgagactattttgtacggtagtccgaaccagcatactatgctcttcacaataaagtcttgaactttctttgatgtaatggttgcgagtggttcgacttcaatccatttagtaagtaatcaaccgctacaactgcatactgcactccacctttacctttaggtaattgtccgatcaagtcaatcccccaaatggcaaagggccacggactttgcatctgtgttaactcgttgggtggagctcttggtatctttgaaaatctctggcatttgtcacacttcttgacataggcttttgaatcttcaatcattgtcggccagaagtaaccttaccttagaattttcttggataagcttggtccggcgacatgatttccacaaaatccgtcgtgtacttcagataggagtcgtgcagctttttcttgagtggcacatctgagcaatggcatcgagaatcctcttttgtacatgactccttccactatgatgtaccgtgcaactttccttctcattttccgagcttcatttcggttatctgggagtttcttagactcgaggtaggtcgttataggtgtcatccagtttggggatgtatcaatcatttcgatttcttccatgtcagtgatgctaggttcttcaaggaacttgataggaaccaggtttgccttgtcaattacattgctacttgccaaatcgagccaaacgtgtctgcagttgtattttctt

SEQ ID NO: 371103 - DNA, 740 bp, Cannabis indica
attttgaacttgtgaggcagtggtaggagattgatctctggtgagaaaggagttccgcgagcacggtctaactcaagatcattgttacgatgtccggccatgccatgaaacatattcttcaactcgtcaagctgggcctgtacggctgggctgacttgctcggcattctggtcaacttggattacgtcagcgtctttctgagcggggatttgagtatgggctccgggctgcacgatcgttgcaatattctacatgtctgttccccttcttctgttgagatcgttccttaggtcataggttgttcccagcctatcgaacacagaagagcctagttgccttagtgattgattcgcttggttaacaggtggaataacaccattattctggttggatccgtcaggtatggctcctcctgatgaattctcggacaaggtctgcccgcctacctcttggcccacgagtggaactcgtaaccggggattgtacggttgaccattggttgtcttggaggtattcatcgtcaggtgatcctccgtttctcccagaggaatgacgttcgacgtttgctgacctacagtccagtaggctcttcgtatcaacacggtagcttaccagctacgatcttcgatctctgcatggtgagcccttaatgcctccatctctttgtctctccattcagcgaacatacgccttgttcgtcaaacgcgagattcactccagcacgcagttcatcttgatca

SEQ ID NO: 371104 - DNA, 623 bp, Cannabis indica
cttgaagtatttatgcaagggcatcaacgctccttgctggccatgggcacccaaccaggtgcacatccccttctcagggtttgtgacaaaattattgtgggcgggaatgtagctgtccaactcgcccaggtatctgccctggtcaagagtttgaaggcgcgcctccgtaatcttggacggaggacttacccatctggcgcccaagggaccttgccttctatgaggaatcgccgcagcgagctcctcactgacatagtcgacgccctcaaccaggacgtctccctcagcatgactggctccccagcctcgttgtactccccgtaatttggggttcaatctctgcctctccctctgcctcggagggactgccgggacgtacatcgtcctgctccttgatctcctggagctcagcgtccccttgacgatcctcctccatctggacgtctggatcctgtttggcgctgggtagagtggcgtgccgaggcacttgggggtcagatgcgtcagccagacgcgtggttttctttgtacgagccatcatcctatggctgggtacaagggttggagaatgcccttcgctagaggaaggtgggctagaacaaagcgaggatgatcctcgtgca

SEQ ID NO: 371105 - DNA, 503 bp, Cannabis indica
ataaggctcctttgtgagaaatcaaattttcgaaattcaaagcctactaatatcataaactaattttaattaattaaaaaatttataaaaattaattttattctgacaattagatttttaattgaaaatttagattctacacaaaattctaccaaaaattggcttttgtttcaatgaaaaacgatttttgaataaaaagttatgaagaaaataaaattggtgcacaggggtagtatgcattgcatacccctgcgcgcgcggaatcaaggggacggccgaggacagaggctgcaagcagcctcatttgaccgagggagctcggcactgcagccctttagaagcagccgtgtccgagaatcctcggtcagccctgtctgaatggccgagcgtgttcgagcggatccgaagctcgtgcgcacgcgtgtgtgacattcaaattataatattttcattcaacttcaaaaaatcatatctaattcacaaaaatccaaattaggttctgt

SEQ ID NO: 371106 - DNA, 501 bp, Cannabis indica
tgtgaaaaatgagctaagggagctctccttatataggtgaaggaggcccaagaaaataggagaaaaatacaaataaagaatttaccactgtcgatgataacttaacggtaaaaattagcttctagttttgaaggccgatttctggtgcctagagggtcttgttgcgagttacttggagattatttttgtaactccttttggagtgaattttgacaatgatagctttagaagtacacctggggtgtgagatatgacttcatagagagtttaaatagattcaaaaagcaatttgaatcacgccaatcagataaaaattgaatgagttatgaccattttactaaaggcggttcaagttccaacacccatgaattgttgttattcctctagaaggacctatttccccatttttgatgatggaaagttaaatgaaaaagttgaatctttgacttgagactttaaggcgcccagattgacagattgttaacctaggtgttgagtgct

SEQ ID NO: 371107 - DNA, 659 bp, Cannabis indica
gacatttactttcatgaatcactctcttcacattatttcctttgtgatctaatccttgtaccctcaacattaagggttagctcaactacctgagcataaaactagaaaactcctagttatttagtcataatatctacattctgaacaatatacccgttccaccttaaagccttcctagcggccttagtagccgctgcattctaacaaaactttgctaatcggttcagcgtagtgtcattctccatcactatgctgcccgggattaaccatacaggttctactaccttattactcaagtaatctcttacttcatagcatgcatttactctcggtcttatggtagtggaagattcatacccacaccacctaccccgagcttagtaggctcacaattattcttactagatcgcttcaagtacaccttctagtacacttgcgaccattcgttgctcaaagttagaatctttataactaaaactaatgctaataagcattaccgcacacacataaatatactcagcaactttatatcatatcaaaacttatcatgcttctttaacaatttacacatttcaaataagcaaacaattcaaataatcaataaataattcactaatcagcgaataattagcaattactaaaccatgagtcgaacgagt

SEQ ID NO: 371108 - DNA, 526 bp, Cannabis indica
aaaaaagagaatgttggtggtgttgttcgaaccgaggtttgttttcagtttctttttcgttttccccttttttgtagatcttcttgtattttccattttatcaatttggtgtttcttgtttgtgatattctaggtttccattttaaaatttccttttgttttgtttggatatttagggcttgaatttttgttgatcaattttatttgttcttttgtgggtttggcattttagtttgtttatttttgttgtgttttttgttctgtttatgttttccagttttttaaatatttttaaacttcagtttgttttagtgtcacttctcggtgtgttttagttttttaatagtttaatctatttatgtatgttgggttttgggaatattattaggtatagttgtttgctgttcatttttaggtaacaatttgattttagatctttgtagtttatatccgtagagtagtttttattggtcagtttgttttaagttttttttttttatatagttttattatagtttgtatactt

SEQ ID NO: 371109 - DNA, 567 bp, Cannabis indica
cttgattgtaagaatttgagaatgccccattgcttctattaaaattctgatttcccatgtaacaaacggactccggattagatggacacttctcaaacacatgcccttctccacaaaacacacatgagacatcatcactttgaatggcagcagctggttgaatatttttagagttcccaatgctcaaattcttcaaaacattcgtcatggaagccatttgagctgtcaaagccgttattgcatccacttcaagaacccccgccacttttctactacctggagctcttgtgttggaccattggtaattgttacttgcaatggtctccaaaatctcaaatgcttcgttgtaagacttcgacaaaatagcaccattggctgatgcatctagcaccattcgagaagctgcattcaagccattataaaagtctccatctgaatacaatgtggaatgccatgatgtggacactttcgcaaaagttccttaaacctctcccacgcatcacttgtggactcatcttcaagttgctgaaaagacatgatctcacttctgaatttttcatttctagt

SEQ ID NO: 371110 - DNA, 571 bp, Cannabis indica
gtcaacataatattttctgggcaaaattttaaaaattgcacaaatattcaagcaaaatattagtaacaaactaataagaactataaaattaccttgaataaatctagagttgtgagtgtgtgcaccaaacttaaaccttcttaccgcaaaccgtaacacataaatgctttcgaaaaatataccaagtagaagtctcaactccattagcctcacaggtatttgaaaatatttatttatggctaaggatttcactcatggagttagaaattgaaaagtgagcactcgaaaaggatagatcaatttaggacaaacatttgaataaatattgaaacgaagataggttatgaattatttggacaaaccaccataaaaataccacaaactagcttttctggatttttgaacgaaaatagacaatcttttacattttttttctaggagccataacaaatgaaaaagtgggccctcttggccacccgcgacaattaaatgcaaactttttttcttttctttcttttctattttttttttttgaacaagaggcaacatatagatataatgatggaaatgt

SEQ ID NO: 371111 - DNA, 1042 bp, Cannabis indica
tatatatatatatattgtaataacaaatatatcgagagacaaatatttatggttgcagttgcatccgagttgaggatgtctttctttatgcatcaattattgttgacaccatcttgagaacgcgcaacgaattggtacacaataatactccttctgatgtattaaaatgtattgaccatatttgtacttcttttgcagagttacatgcttctctctcgcctagtcctgcgccgaccttgaaggagaactggactccacctcctcaggattggataaaaatgaattgtgatgttagagtgagcttagagagtatgtgcacagctgttgtagcaaggaatcatctaggtagggtgattcgggttcacacgtcccagttggatttcacggaggtgctatgtggagaagctgcggcctgctgtttggttatttttgtggcgctggagttagagtctaagtatgttattgtggagagtgactcgaggctagctatcaatgctctcaataggaaggagtcccattgggctcttgagaactatgtctccttttgtgctaagtcatctccctcttttatcaattgtaatttttcgaatattagtaggaattgtaactatgttgcccataatgtggcaaagtaggccttcacccaccagttatacggatctattccgatctactccttattggagaaccttttttgtaatgagcgcaagattaatcgctttatttaagggaaattatagtaaatggccacaaatcataagactatgttagtttatgtcctcattttaaaaaattaatagtaaatagatcctaaatcaatagcattatgttagtaaaatgtccttatttcaaaatcatttaattttttttttttagaattagaagcatattatttaaagattatggtatatctatattaattttgttaaaatctttttaatttaaaaagtttatgtcgatttttttttaaattttttatgagttgttgtgattgttggtatatttactattttgttgtacggtatatttctattttgttgta

SEQ ID NO: 371112 - DNA, 814 bp, Cannabis indica
ttagacctttgagagaaaaaaaaatagaaagagaagagtgagtggtgatcgtgggtgagagggtggttgagaatatatacacatgattttacatacccaatataaaaaaactgaaaaggaaagtaacttccttacctttgactcacgtgtggagagaaaaaaggaaaccaaaaaaaggtttttcaaaaaatggtcaatgtttccttaaatggaaaaaggaaaccaaatatccccacaaaatctaagaatttaaaaaccctaccaaaaccgaaattgccaccaaaaaggaaaccaaaaataattaattatttaagtacaagtttcctcaaaacaccaaaataagaccaaatctccaaaaataaaggaaacattctataaaaaaatacaattaaaacatgtttccataaaatgaaaaaataaaagaaaaaatatttacaaagaatcgaaaaaaaaaaaaatatatgcccccttttcttttattttttcaaaaaataccccccaaaaatttttttcaaaataatgaacaagagaacacacagagacacaaaagcactaatcaccacttaagagcaaaaaattgtgtctaagaatataatgaaacataacaaaacaaaataacaagaatttttaacaaagctcaattgacaaactcgatcacaaatttttttttttttagtattaaatgatagaaaataaaataaccttgatattttgtaactagaattcacattgtccacttgtctttgtccctgatagaaaaatcaacactcataaggaaagtcagaaattattttatcaagctaatgaagtaata

SEQ ID NO: 371113 - DNA, 542 bp, Cannabis indica
tgtgcttctgatagacaatggcggttggaatatccaaaaattaaacaatctctttgataagaagactgtttttgcaattctagaagggggcaatccgtctggccagagagatgatggatggatttgaactttagaaagtagtggtaaattctcgtgcaagttagcctacctggcccaagctgttgatagggctcccccttgtgacgttgctccttcacattggaataggctttggaattgtaagatcacaaaaaggatgaagacactctggtggtgtctcctgtctaaggcaatcccagtgcgaactgagatctgtaaaaagtttcctattgaagatgttacttgtcccctttgtgggacagagaatgaatctattgaacatctatttctctcctgtaacgtggctttccacttgtggaggtcttctccttggggaatttacctagtttgttgtactggaattcgattatgggactgggtcaaattcatctaagaccttaaaaacaagggcattaatgcagatgaggtgttcctttatgcat

SEQ ID NO: 371114 - DNA, 766 bp, Cannabis indica
tttatagtccgtgaactcgtggagcagttccctgactatcgctacatacgaggccattctttctccgcgcgtttgatattcttccgacacttggttcactactagttgggaatcgctgtacacttcaactcttttagcccccacagtctttgctaatctcagccctgctatcaaggcttcatattcgacctcattatttgaagctgagaagtcaaaccgtagggctgcttggagtcgaagttcgctcggggatatcattgcgacccccgctccggatccattctcgttggagcctctgtctacaaatactttccatgctgggactgatggtgtcggtatgttcgcggtagcttcagcttcattgcactccgtgatgaagtctgctaacgcttgtccctttatggaaatgcggggaatgtagtgcaggtcaaattggcttaactgcattgcccatttgaggagccttccggatgcctctggcttctgtaggacttgccggagtgggtggttggtcaacaccttgattgggtcagcctggaagtagggcctcaacttcctcgaggccattaggaggcaaaagactagtttttcaatgactgtgtaccgcgtctcttctcctatcatgcgcttgctgacatagtacacgggatgctgagttttctcctcctcccagactagggttgcgcttactgcatgctcggagacggctaagtataggaacaaatcctctccgagaacaagttttgacaggattggaggtttggcc

SEQ ID NO: 371115 - DNA, 643 bp, Cannabis indica
gggggacccaaaacccgaaattgggacctaaaacttgggcctcgaaacttggatcaggatccgtgacccggccgagacccaaatcatgacctatgacccacctccagacttgggatccgggactcgatgcttggacctgacccatagtcagtgtttggatttgggaatcagactagaacccgaacccaaactcgaactcaaaccaagacctggacacatacccagacccagacccacaatcgggaaccaaaatcgaaacttggactagaactggattaggattttagaaagagactaggccttccacccagatcggcacccaaaaccggacacaacctcaaaccctaaccgagaccgaaacacggacctaaacctcgccccgaacccaaatcaagactagaatccaaacacatacccaaaatcgaccagaactcgtaccccgtgacttgaactacaaccgaaactagaaggagatcaggaccgagaaacaagactagtactaggacctgaacccatacacaaaactgcaaccagaccaggactcggactcggacatagacccaccctatgattgggtcccaaacttgaatccaaacccgaactgggacttgggacccaaacccagacctgaactcaaacccaa

SEQ ID NO: 371116 - DNA, 750 bp, Cannabis indica
aaaaaaaattgattagttaagcaatgataatgtaatgatactataaatgtgatatatgggctcacctaattaggtgatgcgatattcttggcgacgtaccggacgtcggtacgggcattagtgacataagagtaccgaacgtagatacagactcacctgattaggttatgtgatcctcctggcgacgtgtagatacgacgttagtgatatgaaaattgttaggttatggcatagaatgaaaccgttgtagggtttcctcctggcgacgtgtagatacgagcgtcagtgacatataataagtaacggccgtaggtacgggctcgtctgattagacgatgcgatatattggtgtcaagttatggcacgggctcatttgattaggtgatgcaattatatgatatatgggtgcaggtttttggcacagtctcacctgattaggtgatgcagttatgcatatgggtgctaggctatggcacaggcttgcctgattaggcaatgcaatacagaattatcatattaaagcatcgacttgcttgattaggcaacatgatgttataaagatggttactttatgaggtaacatatatataaataatttatatgaattctattattggtataatggttatgtattaccaaatatctatgactgatatttattcgtggcagatgccagtagtagtttagatttcatcttatgaacaatgtgtgaaggtttgatttttattgtgtataaatgacatattcgaa

SEQ ID NO: 371117 - DNA, 320 bp, Cannabis indica
aaaaaatttgacaagttatatcagcaaaacagaacaaagtatttcgattcttttgttgatcaggcggcacccggatttgaactgaggaaaaaggaatttatagaattaaaacaaattagaattctcaattctatacgacgtctaggggctaaaatcgtttcaagaacaaacaaatcatggacaattagcttgagcagcatgtgctgtagcgaaactgattgcaaaagaagggaaatcagccacattaaaattaccttctggggaggtccgtttgatacccaaaaactgctcaacaacagtcggacaagtggggaatgttg

SEQ ID NO: 371118 - DNA, 707 bp, Cannabis indica
tagtatgtaagactgtgaagaatccaatcaacaagaaggagaatcaagctcagatcttggtgataccctgttacagaaaggatacaagggttagagatctgactgtgaggagtcatttcattccgctgcaaccactataaggtttctcataccttttatgtgtttattttcatcgttttagaaattcatattaggatatttaaaaacatacttattagtgaatccagatcctggtaaatatatttcaacaactggcctcaaatccatagtaattgatttactttaaagtaatatggatttaaaacgatgtatgtgtgatttggatgtgattcatgttaatctatgtgtttattgatgattgattgatgtttgcaaatttttttatgagaaataattggattttcgttttgaaattatttttattggatagtatggaaataattaagcaattcacctttttacaaacttaatttcaattttatttgaattagttatgattttttgaaatttggaaaaatcttaggggtggggacacacccatgcgcgcgcggtatgcacgtgacacacgagtgtcacccgtgtttcagacacgggctgtctgaagaaacacgcccatgatgttagaaaaatcttaggggtgcatgcagcctgtgtgtgcggcattcctcgccccaggacaccaagcacgcaagtgcataccatctgca

SEQ ID NO: 371119 - DNA, 610 bp, Cannabis indica
tatgattttttgaaatttggaaaaatcttaggggtggtgacacacccatgcgcgcgcggatgcgacgtgacacacgagtgtcacccgtgtttcagacacgggctgtctgaagaaacacgcccatgatagttagaaaaatcttaggggtgcatgcagcctgtgtgtgcggcattcctcgcccaggacaccaagcacgcaagtgcataccatctgcaccaaatacaattttttccaattttttccaattttttcatggaattaattttgtatttttttttgtgtagttttgtatttaaatttttaattttcatatttcaaatctaattatcagaattaaattaattaatattttttaattaatttaagatattagtgaaatttgaagcttgaaaataggtaaaaatctatctttttgcttagtttgttatcttatttttaaaatttaattattttatcttatttttaaatttaaggtcagatatttaatattttaaattatttaattgtttttcaataaaatgaccttattggaaatttaaaataagattattttaatcatgaaattttaaattgaaataagacatattgctaacttttaaattttgttatt

SEQ ID NO: 371120 - DNA, 567 bp, Cannabis indica
acttgtttcttcactactctctatattcgtattttagatgtatacatatacattgggtatatatatacacaacactgtcactagctgacatgatataatactattagttgtatatacatacatatatatacatatatatataaagtttgcttgaattaaacaaagttttctacctgtgttattactactagtggagtggtggaggtaaacgtggggcgaactagaaatatgggtggtctctcctctaagaaattttctatgttttgttataaattgtgaaggtggtggtgctgattttactctgatttatgtaagactatattatatagtatatgaaatacagcatctagataaacaatatttaatgcggaaaaactataaatatatcgaaatgaatatggaatgaaggattgtacttccagccattgatcttttaacttcaatctttgtgatagcttcagtattggagttcggacttcctctcaactctctttaaatggaatttgctgaataaatagaatgagtgaggagtttggggacagagaccctatatttataggtgagata

SEQ ID NO: 371121 - DNA, 898 bp, Cannabis indica
atatgattttttttttttaaaaaaaaagttatttacatgaaaaaaaaaaattaaatatatacataaaaaaaaaaaatagtcctcgttatcttaaggaggtatctagttatctagttagcctaaaacgtcactagttacactaaattatttttctcatattttttaactttttttgcaaaaacttttaccatattattttattggtataaaagccatatttttacacattatataaacttcattcatttccacacattatttttcatatctatctaatttttgttagaaaattataataaatgacccaaaaatacattattatgtaagtaaatatctttattttaaaatttacacaaaaatgctcttttcacattctttattacttaaattatcttttatcacataaaatttgtatggttctaacatttttaattatatattaaatttatattttttaaaaaatatttagaagcatatcacttagatatcatgatatatctatattagttttcttaaaattatttttgtattaaagttatgtttttttttttattggtattattgtgggttattagtatacatattttgttatacaatataatttttttttatttgtatctcgtgtctggtcaacgatgcaaagtcaataatacgacgatatcggtgtttgaattattaaaatatgaaagagcaataaatgacacaaaattttatagaggttcgacccctgagtcggtaatggcctactcccactttttatttgtatttgtctgagcaataacaagatcacatgaacctggtcaagtgagtttctgttgggttttgtgccctaaataaaactcatttcaatataatcagatttacttattaataaagaacagaaataacattttatgtt

SEQ ID NO: 371122 - DNA, 680 bp, Cannabis indica
ttgatttggggtgatttcatttatgaaattttcccatgaagcatggacgtcaccgaggtaatgtataaaagaacgtcaagaagagtagtagtatctctaaggtaaagaagattacctaaattacttaaggtgatatggtaatgatagagagtacttcataattgacgggatagtcaatattgtatataaggagaccattgaaattctgggaaaagattactttattatgcaataatggaaaggcatactcacccataatggggaaaagcttatgagatgcaatttaatggacatgtatttgagtgattggtgaatgttggatcacaaagcaggttgtttataaaacaaagagctatataactgagtgtataagaagttttaaaagtggttaaccaagtatgaagatagtgatgattgcaaggaagcagtggtagcgtatgaactaggaagtcaaaccttagtggtaattatggaaaagaacatgagagtctcagatgttgatgaatcaacatcatcaacgggaggctcactataaattggtattgtagttcgtaccaaggttgtcaataaaataaagaatatacttgaggtatgtatatttctggatgtgtttgaaaagattattaagatttcaaccaaacacagaaaagaaattttaggatcacaaaataatctttgat

SEQ ID NO: 371123 - DNA, 510 bp, Cannabis indica
ggaaaatctttgagaaaaaaagatcactgattgtaatactgtattctgtatctaaaaatatcttgaataagatagactcatggactatgcagagtaaactgcaaaaccatgtaaacaacttggtgtcattattactattattattcttatcaaatttctcataatttctgtgcataatttattatggaaaaggcttattaattagttaacgaaaatctgcgttaacaaaagtcaatccacttaactcaaaattatttttcttattagatattttccaaacatgtttacttatagcagaaagattccataaagcaatatccttgaagtctaatccacattcatttttatctttacatatttcattccacgaaacatacctcgaaacattagataaattaaccccctcaaagataaccatgacaaatttggtaaatttgtggataattgctttaggaagaatcactatttgcgaccaaaaacattgatagtgaggagaactgagttgatgag

SEQ ID NO: 371124 - DNA, 732 bp, Cannabis indica
cttttactctctttcaagtcaaatacaaatattagtagttttgaatttgatttattttctccaatgtaaaatttcaatgtaatcatgccagtaggtatggtcgcctaaccttattagatatgaaatttttttcactttcttctcaaagtatcatttaaataataagtcttcatttttatgtttttatatattcttttattttaaaaatatattttattggttaagttttatgttataggtagtcttctcagtagacaaacatagattgattgttttatggaggccaccaagtatttggggaagattaatatatattaataaaaaataacattaatagattaataaaatatatgggagaacattggatatcgtatatcatgaatatatgatatttatcacaaacttttcatcacttactggcaggctcaaaactggtgaagtaatcaacttcttctttaattcttgaaagctattctcacacttatcagtccacacaaattaacaactctttcgggtaagctcagtcaaaggagtagcaatcttggcaaaaccttccacgaatctcctatagtacccagccaatcctaagaaagttctaacttcagtagctgtcttaggtcgtggccaatcttgaacaacttcaatcttcactggatctactagaatcccatccttacttaccgtgtgtcctaaaaaacttacttgggacaaccagaattcacacttcttaaa

SEQ ID NO: 371125 - DNA, 649 bp, Cannabis indica
gactcttacttcgtttcagcaactactagagcagcctcttgttccttcgcctagatcattaaccacaaaaaatttcacagtcaaatgtactagtcatacttgcaatttttggcacagtcaccaaacaattcacaagtattgatgaatatgatgacgcagtcacctcagacgtctcatgtgtcacaacctcatatgccacaaatgatgtcgacacaacatatgtcatagacgacacaaaatgttcagatgatgttgacacaagggcagcaatatcagcagatatcgcagacgatgctgacacaaccatggcagcaaacatctcaaatgatgccgacataaccaagacagcagacttctcagatgatgccgacacaacaagaacaacatgttgggttttatgccctaaataaaactccatttcaatgtaatcgattttatttaacatcaataaagaaacaaaagtatttttcattcatttatgcatgttttagttcactttatcaattgcttgtctatttgatttataaattcatattaaactcttttcacatacttgatcctgtttattgtgttgtcatcacattggaaagtaaacatgactatgtgaacaaagtttcctagatttatcagacacaggggttttactgat

SEQ ID NO: 371126 - DNA, 732 bp, Cannabis indica
gggtttgaccaagaaattctcgattttcaccaagccacctccatggcgtatcccaccacaaccagcgccaaatcctccaagaaggggtgaaagaagctagccactctggaagaagttatgtaaggcctagttacatataagaagttctcctgccgttcccatggttgggaggctgatgaactccattagacactaacatgcgctcatcaactggagaggatagtgactgtgaacggaatcaaatcatctagctctggagtctatcaccgtcttttgaggaacaaagagacgctaaaccataattacaacagttttggagcctggagccagacccaccttatgtctggagccatgctaccccttcaagaatatttcattgatttcctcatgtttgttggactcgcaccataccagttgataccccaagcttaccgcctgttgttaggcctttttgtcttttatgctgccaggggttgggtcgctcccagccttgccgaaattttatatttttacaaacttctttctgtccccaagaagggcaacaaatttaatgacgatttttataaattacaagctcatcctgttgggttttgtgtcctaaataaaaattatttcaataaaatcagatttactaattaataaagatcagaaatcacattttatgttgcctggttcacatgatttatttcatgattatatttaatgtataaattctattaggtccagaacata

SEQ ID NO: 371127 - DNA, 549 bp, Cannabis indica
gtacaatatttaaaaaaagaggtaaaaatgatagactttaaaaaagagggtaaaaataaaagaggacaatataaaaatggtatagagtgtaatttcctcttacatcaaagagagagtacaaaatgggataaattataaaataccttttttttgtattcattaatcaaaaataccctcatattattttttttattaagatttacccactttttgagtgagtagcctagtataccctcactctctacttaagtctagcatataatttacattaacctaaggggtctaatagggacatcatctataaaagtggttatattttaaaaaatatgaaaatagaagtaaaaattaaaacaagtaaagtaaaagggatatacaatgtaatttcctcgtacaaaagagagtaaaatagagagtctccttatcacttctcaaaaaattatataaaaatatttgaaactataaaaaatatatataatttagtgattaactcattaattgtaaaaaataatggaataattacataaggcacaatttttgtaaaatatttac

SEQ ID NO: 371128 - DNA, 562 bp, Cannabis indica
gcggagacctgccgcctttccaagaccataatcaatcatggcttcgtcatgtccgaattcgggggcatcgacgaggccgtgaggatcctgcaggacctgtccgctgaatggcgggcgatccaggaggaggctgagcgaagggaagcccttgctaaggcaaagctcgaggaggaagccaaacggagggaagtccaggcggaggcgaggctccgagaggaggtccaacaaagggaggctgagctggaggcgaggcatcgggaagcgctgaaggcggagggtgaggctgtcgccagggccaggcgtgagcttcgggaggctaaggaggccatgaacgaaatggctaccaaggtgaagtccttagaggagttgcaccaggcggacttgcagtccaaggccaacttggccgtggagttgaaggagctcaaggactttagagaccaggccttcaagaaggctaataaagatgagctcctgtcacctgtctcttgcaagcgctgcgtcaagcgcttcgacgacggcgtctatatggcctggcagcaaatggccaaagcatcaagctcga

SEQ ID NO: 371129 - DNA, 618 bp, Cannabis indica
ttttttaggatgtgtagggaaaatgggaaatttgaaatgaaacttgtctaatgttctgttgtgcatggataaatgtaattgcttattcccttttctttgttttaatgtttattttgtagttaaatgatctgagtgattatatgagttactaccactattttacaaaagtaatatactttgcaatgtctaccaacttaattgcctattttggcatattcctcttatatctttataattatttaatacattttataaattgttttaataaacaaaaaaaatgtatcggcatatcttttttatttttttttaaaaaaattgacatatttcttttaaggattgcattatctacatttaaaaagaaaaatagtgccatgataaaaaaaaaaaccaataatcccccgtcccccctttcttattgacaaaaaatagtgatttataacaaaatttcaaacgattttatggatttcaatagttaacaaaaagctaattaacacgtacattataatggttctagtaactagtagaaagagctaattaatgaagataaaaccaagaacaaaagatgctaaagttaaaagggatattggcggctaaaccacctgaactttacggtttgta

SEQ ID NO: 371130 - DNA, 817 bp, Cannabis indica
tggtgaggttctgtttgtctactcggaaagaataagtatctggatttcgggcagatcctggcttccatgcttgagttgtttatcttttatttatcttaatgtgggtggttatataagtttctaagctgttttgaatgtttttaaggacataggtcctcgttttttgatctgcttttttgagtactgaaacctgaatttgagatgaaaattaggatattttggatgctatattattgccagtacattgtgattgcttgttgtagaattcataattttataaggacaaatgcagaaaaagacgtatattttgatggagatgaagacatcctgaagtacaagatgctactatacaaagcacccacgaaactttgaatgatagtgttgagtttagcatttcaagagatcaacttcgtgaaatggctaatgtccgtgatgaaattgctgatcatatatggagagcaaatcgacgatgaagataatgagtgaagattattaacaattagaacttttttaatagttttcttcaagattagacaattattagttcatattttattatgaatttgtcggttttgtgttatagataatgtgtttcgtgattttaaattacttgaatttttttaagatgttaatgagtattttttatttgattttttataatttttatatatttgtttaaaaataaaaataaatgatattcataattttttatttaaaaaaaaaaaatcaaaatttatgttttttgtttttaaaattgaaaaataaaaatggttacagaacacacttttgttttctgtttttaaaattataaaacaaa

SEQ ID NO: 371131 - DNA, 475 bp, Cannabis indica
attttgcacgtcctaaatattgatcccaacttctgaccagttcaacaaaaacgaaggttgttggacaaggagtgagctctagccctgatagaagaggtagagaagctacgcaacaataatttcataatcgaagctttctacccaggtttggttgcaaatcccatactggtacctaagtcgaacaagaaatggcgagtgtgtattgatttcacggaccttaacaaagcatgccccaaagactgttttccacttccaagaatcgatcacctcgtggacacaacaaccgaacatgaaatactaagcttcatggatgcttattcggggtacaatcaaatcaaaatgcatccaccaaaccaagagcatacaagttttcgaatagatatgggtctatattgctaaaaagtaatgtcgtttggtctaaaaaatgctggagcccataccaaagattagtaaacaagatgtttaaagaccagat

SEQ ID NO: 371132 - DNA, 678 bp, Cannabis indica
caagcttgagctttaaaactcaagtttaggtctctaatggcatgtttgattgtattgagtttttttatgaaatactggttggtttatgttgtatatacattgtttaggtattctggaaagtatggttgcatttggtggagttttgagcaagaaatgggggtttttgggtgaacttgtgttaaccggctagccagttttaccagtactgcaaaccggctagctggttttggcagggtccccgaatgcttcattttctcaattctcatccatttcagtgtcgtagttgggtgtttccctatttcctgagttagtgtaatccctagagtgtataacagaacctagagttgtaggttcgggtttctcgggattagggttttgatcatgtgatttacccggtttcattatgtgattagggcatccatctagcacgagactttccgttcaggtcggccagcacacttgaatatggaaagaaggtaagaactgtgtataatgtgtaatatgaatatcttaatgtatatatgtgttaagtgtatatgcatgcttatggtttagttgcactaccaacacttgtacagttatggtacaaagtgcattggtatagtgaatattgtttcagagtacattacagtgataccaacacaagtacaggaaagtacagggtgtttgtggtatatc

SEQ ID NO: 371133 - DNA, 715 bp, Cannabis indica
aattcaaaagctacgctctcaagcaaattccaagagaagaaacacaactgctgatgcattagcccgacttgtgagcagcaacataaatgataaagcaaatctaatctccatctaatttctagaaaaaacccagtatcatcggcacagaggagattgaaatgattgatacatccctaaactagatgacaccaatagcagcctacctcaacactggggaactcccagataacagaaacgaagctcagaaaataaggagaaaggctgcacggtacatcattgtagagggagttatgtacagaagaagattatccatgccactactcaagtgtgttacacaagaagaagctgcacaacttttattagaagtacatgatggattatgcggcaaccacgcagctaggcaaagtttatctaagaaaattttgaggcaagggtatttctgacagacaataattgaagactccaaggcctacgttaagaaatgtgacaagtgtcagagattttcaaagataccccgtgcaccgcccaacgaactaactcagatgcaaagtccttagcctttcgccatttggggaattgacctgatcggacagttacccaaaggcaatggcggggtacagtacgcagtggttgcagtcgactattttaccaaatggacagaggccgagctactggccaccattacgtccaaaaaagtccaagacttcattgtaaa

SEQ ID NO: 371134 - DNA, 490 bp, Cannabis indica
tttaggtattgacttgtattaattgattgtgtaaagttataatatattttcaatacactcgatcccaacaccaactccgggtccgggtctcgggtctggttttgggtccgggtccaggtccgggttcgggtcctgagttcgggtcggggtctaggtttgggtccgggtataggtcccggtccgtgttcgagtccgggttcaggtccgggttcgggtctgggtcccgagttctggtccgtgtcccaagttctggtctgggttctgggtccgagtccagggtccaagttcgggttcgggtccgggtcctgggttcgggtctggatcctgggttcgggtctgggtcccgagtccaggtttgggtccgggttctaggtccgagttcgggtcacgggttcggatcccaggtccaggtttaagtccggggtctgggtccaagtctgggtctaggtccgggtctgggtcccgagtccagattcgggtctgggtccga

SEQ ID NO: 371135 - DNA, 313 bp, Cannabis indica
ggggacagagtaaagttgatattaagatctttattttttttcaaataatattaaaaaaaaaataaaaaaaaaaaaaaaaaaagaagtcgaggaagaagatgtgatttactaagaataattactaatttttaatttttcttattttgcaccactattctctaaacataatttagcaaaacattacctataaaacgtaaaacattagagaaaaataaaaataatggtaaaactaaacattttgaccaaaaagtagttatttttttttttgtaattttgtaaggagaaatttaagagcatgtttgatattattttc

SEQ ID NO: 371136 - DNA, 666 bp, Cannabis indica
caaataactcttctctttgtaattaagtagctttaatgaaaccacttcttgctagtcggccgacccatgtatttttggggcctcgagcaaaagtttaaaattaaatcctttattaaaagaaaattatatgcattaaattataattttattaccagtttttttttttcatgatacattctaaacgtttaattataaattttgtatttatgtagtatgatagaaaaaaaatataccttttaataattagaccttaaaaaataaaaatccttgtgcaatggctcaagttctctaataataataataagactaattaagatttctaccccctgaactttgacatatacaaaatcatgtcccttaaacttttaaggtcgttaaaaatgtctcctgaactattgagattgttggatttaaggacttttttccaattttagtaaaaaagtctaacatggatgaaagttcagagggcataatttagtacatgtcaaagttcgagaagcatgatttggtagatatcaaagtttgagagcatgatttagtacataaataatctttaaaatagtaaaattgaataaaatttgacaaaagtaccttaaagtaacaatttcaatagttaagggatatttttaacgatcttaatagttcagggagcataatttagtacat

SEQ ID NO: 371137 - DNA, 547 bp, Cannabis indica
tcgcgcctggtgtgcaagagactaggaataacagttcagcacccaaccagggcattcataacacagtcgttctacctgttaccaacactcagacgactattggagatgatattgagtttcaaaatctccgtgctgctcttgggctcgtgcaaggtcaccccaataccctacatcatgatcaggaagatcttcgcgcttcggtaaatctcccgtttgagaaacaaaggtgcatgtttaccgagtggagagacagaaagatggaagcgttaagggctcatcatacagagattgaaaatcgtagtcggcaagctaccgtgttgatacgaaaagcctaccaaactgtaggtcagcaacctccgagtgtcatccccctaggtgagacggacgaagatccagcgatgaatacttcacagactgcaaatggtcagtcgcccaatccccgatcacgagttccacttgtgggccaggcagtaggcgggcagaccttgtctagtaattcatcgggagaggtcatacctgatggatccaaccaggtgaatggtgccat

SEQ ID NO: 371138 - DNA, 549 bp, Cannabis indica
cttgtccgagatgctggtgcgatggacaccatctcgacacaacttcaagctgaatcttcaaaaattcataactctctcaatttctattggaatcgagttctgtaagaactaaaattgcttaatttttcacaagaaatctaaataaaatattttcggaacgaaaataaaattattttcaagaaaaaattttgtaaaacacattcaatcatcaaataacccataaaccaacatgaacacatccaaatcaacacacaaacaatattcattgttttaaatcgatatttcatgaaattaaatcattaccatggctctaaggccagttgttgggaatattttggtgatcaccgttagccactgttcggccttcgccacatctggacctcccagaaagaccggaggtacttgcttccggaaccgttcatacaaaggttccaatttgttggccgccacaactaattcggcctgagcagcaggggcgggtgccactggaacttctggcatcggcactgccggagcaccctgctgccgcgatctctgaatctcattatc

SEQ ID NO: 371139 - DNA, 581 bp, Cannabis indica
gttgttataaggttgttgcacatctacctgtactaagtgattgtcatgtgttgtcatcatcatatgacaacatatgacaatcggtagaaaatggcttttgtcattatcatatgacaacatatgacaattgatagaaaagggctttcaccactacagaagtgtattgctgctatgtgaatgttggcatacagagcaccaaccgattacattgatgatatgtttgaattggtgaaatcactactattgaatgtctactccatttcattcgtggagtgaatgaaatttttggggtagaatatttgagacggcccaatgctggtgacattcgccgcttacttcaaatgggagaaaggcgtagtttttcaggcatgttgggaaacattgattgtatgcactagaaatggaaaagttgtccagttgcatggaaagggcaattcacacgaggtgatcacggttcaccgataattatgcttgaagcagtcacgtcacaagatctttggatttgacatgtattttttggtgttctgggatccaataatgatctcaatattttaaatcaatcaccattattcactaacatc

SEQ ID NO: 371140 - DNA, 895 bp, Cannabis indica
caacatctagtaactaatcataatccttttactttcattatcgtgcaaatcgaatttatggagaggtaagtttgaatacaatttaaagttcaacttaataatctttgaactgcatatccaccaaatatttctccacccctatcagttagcaagatctttaaccaattaccttaatggttttcaccattgctagaaattcatgaaatttttcaaacatttcaaatttctttgcataaggtataatctagagtgattgtattaagaatataacgaaaactcatatccacccctgaatgtacattcatatgtaaatataaaaatcttactttcaagtggacattagcatatttactctttgcagagaatgaccttgtcaaaagcactatgaacaagacgcaaatgccatagatttataaaatatgtggttgtggtcttttgatgacttaggtctacaataaaaagttcttagaatagtccaagtggaatctagtcacagaatactaaactcggtatccacacataaacatacagtttggatccattgacaaaaaatggatattaaaaattgtgaaagtttaactgtattgtatttaagaaactaaaataaaaaatttctatttggaatctaaaatttaaagtcaaaagacttaaatttataccaaatatacataagtaattattctttcttggaccaccactactatctaactctaagtctaatttgcctaaagtaaacattcacaagtaggagatttctaagatcgagtatttatatcattttgggatagaatatcgggaatatagtcatctgcaccatttaatttcataagagaaagtagaatgacatcataagcagatgatttataaactactcatccaatgaaatataatttaa

SEQ ID NO: 371141 - DNA, 744 bp, Cannabis indica
ttagaggccaaaggccacctaggatttattttactgtcttgtaacctctttgtaaaattctggtttacagtgaatggttaatatggggtttacttcaacaatttccacctaaaccccatatgaacagtacactgtaatctctgtgttgtttgagtgtatctgagggtcttagctcgaacccattaagggttttaccaacctgtgtcaatccccaataagcttaagcaaagcttaaacttattgagggacacaacctttgtgcccatgtctgctggattcacttcagtaggcactttgtctatcccaatctgtccttgtgaaactttatccctgataaagtgatattttatctcaatgtgttttgtcctatcatgaaaaactgggtttttgcataaatagatgctgctctgactatcagagtagattataggctcctttttcattaacttcagctcctccataagcccttttaaccatagagcctctttaatagcttctgtagtagctatatattcagattcagtagtggacaacgccactactggctgtaattgtactttccaactagtacaatttccccccgttaagaaaaagtaggccgaagtagatcttctagtgtccctgtcccccgcataatctgcatctgtgaacccttcgatgttctgatgggtttggtgaccctgatagaccaatcccaacttagatgtaccttttaagtatctcataagccatttcatggctttc

SEQ ID NO: 371142 - DNA, 506 bp, Cannabis indica
tgtaataacctgaacagtagttgtaagcattcaagttcatctcttttataacatcaagtgcatgagcacacggtaattcgttaagttggaatcggttgcaactgcatgttttctccttgagattgattacccatgatcttgttagttctaccacttcgaacatgctctcatttattggctttaccagcaaattaagtcaattttataaatcatcattatgatcaagaaactgaaaaaataaactatttaaaaaccataatgcaacttaaagtttacagagattttacattttctgtcaatgagtccccaaagttgttgactaacttcttctctgctgtacgtgttaaaaatgttgttgttttttgtgcatttttcctgtttgtatggccattgttgtatcaaagctctcaatgactccatcaacgttgtgattggtagttctctagctgctaagtttgctgcatttagagattcaacaatgtttgaagtcatagttgaatacctgt

SEQ ID NO: 371143 - DNA, 517 bp, Cannabis indica
aataggaatgggaatgggctgggaatgggaatgggaataggagtgggtcggggaatgggaatgcaaagggaatgggaatgggaatgggccaaggaatgggaatggggatgggaatgggaatgggaatgggaatggcaatgggccaatgtatgggaatgggaatgtgaatagcaatgagaatgggaatgtgaatgggaatagaaattggaatgggctagggaatgggaatgggaatgggaatgggaatggaaatgtgaatgggaatgggaatgggaataggaatgggaataggaatgcgaatgcaaatcggaatgggaatgggaattggaataggaatgggaatgggaatgggaatatgagtgggctggggaatgggaatgggaatgtgaagggaatgggaattggaatggcaatggcaatgggaatggagatgggaatgggaatgggaatgggaatggaaattggaatgggaatgggagtgggaatgcatcgaggaataggaatgggaattggaatt

SEQ ID NO: 371144 - DNA, 711 bp, Cannabis indica
attatgtttatttttggctgaataaagagttgaattttacttttatcccttattttcaaattggaaaagaattagaaagaaaacaaaactcaaattttatttcaaagctctctctcttactctctcttttcggccctccttgagcagcaaggaagtggatttttccttggtgattcaagctcattttgatcagatttagtgatctctaattgttggtaaagtttcttcatctttcttttatgtttcttggaatttttgaagagaaatggtaggttgcatgctagttttggagttggttgttgttgctgtgtttatatgttgttttcagagatttaagcatgttggattgagtggattgaaactgttttgatgcatgtttggttggttttaaattggtttagagttttggttcaaaagctttggtttttcaaagtgaaaatgtgaaattggttgttgtgcttgttgtttaagtttgagaatgatttctgcagtttttatatgcatgattatgtagtttgattctagttttgatgcttgtaggtgagctttagccaagtttgagttttgaactcaaagcttggagctcacatggcatttttagtatctgtgtgttctgggttgttttgatgctttggatatgttctttggggtatatagaacaggtctggaaggtttggtttggattggatttgatttgagggagttatgaat

SEQ ID NO: 371145 - DNA, 553 bp, Cannabis indica
attattttttaattattattattttgaattatgcgatttttgtttataaagatatatatatttgataaagaaaattttgaataatccttttcttttgggagatttagttttaatttttatttttatatatatatattgtgtaatttattattattattattattatagagaaatatccttaggaaaattaattatttttttaacataattttaaaaggaaaattgtatttggttttttttttctaagaaatgttaataccgtggaatattacacttacaacttaaatagtataaatttatataataataataataaaaataattactctttgcataattattaaaaaaaatataagttcattggaatttgttaaagctttaaaaatcaattataaattcaaatctattaagtaaactactaatattaagtaaacttgttaatatttacatatagccactaattgatagtttgatactaaacaaacatgtgtcattctattagagggtattagttagttttacagtcaactatgttagttattaggcagttagt

SEQ ID NO: 371146 - DNA, 581 bp, Cannabis indica
tcagttttatacaattataatttctaaacggtcgattacagtttttgtaaaataaaaccgtaaccaaccgatcggttataaaatgtaaaaaccgaccgatttcacccctaaaaagcaagacccaacgcccaagttgacattttgtcaatttaggctaatttcaatgatctttttttgagaactctcctgagaatcttcccattttcagcaaagattaagattcaaatatttttggagaccaaatagaacttttcaaagggtaaaaactgggacccaacgcccagattgacacctggcactggttgacatattgtcgacctgggcgttttccaactaagttcttacaaaaatgttcatggaattttttgtcatcagaaataatgaagattcaagaaaacttaaggagataaccaaaaactcgagaccctagaaacagggcctaacgcccaatttgacctagtttgggcgctaaggttgaaaatcaacctggtgtgctagtttcgattgctcaaataaatcggtcggctatggtcggtttttataattttataactgactggtcggttacagtttttatttta

SEQ ID NO: 371147 - DNA, 654 bp, Cannabis indica
aaatggaactagaaccgaactaggactaggatcaggacaaggacctaaaccaaaacttgaacccagatcaaaacccaaataaagacctaaaccagaaccgagactatgactcgaaccagaacctagaccgggacccaaacccacacaataaccaggacctggacccaaaataaggacagggacatggtaaacaaaactaggacagggagctagtacctgacccagactggaacttgaacctaggacccagctcgtgacctggcacaagaaatggaacgggatggggacccgagattgggatccggatctagacccagggcttggacaaaagatgtagtcggtgtcaggatttgggacacagccctggacccgaaccctgagaaggacctgaacccagacttagaatccaacatagaagtgagacccggacgttgacctaaatccgagatcggatcccaaacacagacttcgaccttgatagggatccggacactaacctggactcgaaccaagacccaaattgggatcgaaatgttggacctagatctggaccgagatcctgacccagaccaaaacatgaacccgcactcgagacccaaacttggacctggacccaaacctagacccagatcggggtccagacctggacacaaa

SEQ ID NO: 371148 - DNA, 853 bp, Cannabis indica
tttttgtaacttcccatttaaaaaaaaaaattctggtggggattagttggcaatttcacactatcgagacccatttaattgggattcgtaggcctacagtatacagtattgggtgagtttcatttcataattttcctctccatcaaacacctttagattgggcttttgtacgcctcgcttatatctttgggcttaacaatttcattttgttgattgtaggcctatggagtaggctttttctccacaataggaagcctgtcaataatggcccaccatggtaaaacgcgcactttaatctttaattttagaccggcttcaaaaacaactgaagaaggtccacttcgtagaacctaaaaccaaatcaatgattcaagccatggaaggaccacattttttatgattatatttatttgtttaattttttttgaatatataatgtggtagtggtgaggttgaggtgatacgcataaaatagaatagaataggtaaatataatcacagaatggcctccgagacaagtggccccacccaaacaataactgtaacaccctaactaacataggcgtattacgtgttttttaaacgtactgtgcagctcgttgctaatcaacgaggtttatggaaatcgtgattaattaaaaaattttgcttttaattaaacttacataataattcatacaaaatactttgggatcccatttacaaaatactttataaaaagtttacagtctattacaaaatacttatcgcccagcgactaactacaaaagcactgttgtcccgaggatcgtacgctccaggcctaaccgcccccacatgtacaatcttcatcggctcgtcctcacggttcctc

SEQ ID NO: 371149 - DNA, 407 bp, Cannabis indica
aaataatttccaacagattccacgtgtcaccattgtgtgatgccacatcagagtgcaaaaattgggataacaattatattccttgttcttaagtcaatacaaacaaaaaggattaggctattaccgaagtgctcggggttgaaccgctataaaattctggtgtcattacttacttcataacattacatttacattatactacttgtcgcttacaatgaagactcattgtcgttgtccaaaagcgaggtcaacattttggtgctttcattgagagcttaactcaaggatcgctcttcatctgaaatctagtcacaaacacaatggtggtatagatgttggaaatattttaccacgatctagatttactacaaaatatgtttcattaacatcctaatatgaattcaaaa

SEQ ID NO: 371150 - DNA, 1397 bp, Cannabis indica
  modified_base (1392)..(1392): a, c, t, g, unknown or other
ttggctatcttgacttccatgactaattggttaatgtgtgggaaattaatcttgacaacatcctcatcattgaatgttatggtgggttcccctgcccgtgatatttttggcttcctttcttcgacggccagaaccacctcttcttgctcgtgctgtaatgttcgggcatacctctcccgagctttccctaaatctcatgttatgtgtgctcctctaataatgacttgcaaatgtccatctactggtcgtgggagtaaatcttgattattatctgtctgggtggccattttattttgatcggtcttaacatatatttgcacgtacgggttattctttcttatcaaaaattcaatttcgcgctttcgattgttgcattagttggtggcatggccataatcttcatgaaaacggcaaaacttggtcatgtctctcttacttacgtcatttttcatgggagtgtgtttcttgtacgaagctaatgattgagaagccatgtagatagtctctaaaatcttctgtcaggactgagaaagcaataaacttgggggctttttcggtttggccagcgaacttcctttttcccattgccttgtctgttgttgttgttggaccatttaccgcccgagattaaattgctcgggtacggaaggagctggacggatgttccagcagagggagcttttggctggccaagtttaagctcaacttctgctcgctgaatggccccttcaagcttgatgaagccatctgcacgatcaaggaagtcactcatacaatctactggtccgtctctcttgatatccttccaaagttctctgagaacttcgatgcccctgagtatcccatttaatttcccttcttcggtcaaccgtgcaaccttcgttgcctttgtcataaatctgctgatgtaagctcggagaggttctcctggcctttgcttcacttcgaccaggtcttctaaatgcaacaggagctagaaagaagaagagaattgtgcatggaattctatggagaaagccttctaagagttgaacctattgggtgtcaacttgaaataccattgctgagcggcttctgagagtgtggcaggaaaaactctgcaacataaatctcctcgcactccttgtaggtccatttgcatttcaaaatacttaagatgtataagggatcttccttcccagtatacatcttccaggtcggcaacttgaacttgtgagaaaactctaggacattgatctttggggagaaaggggatccacgtgctcggtccaacttgacgtcattgttcttctgaccggccaggccttggaacatattttttagttcatccaattgtgcctgcacggatggattaactgttcagcctcttggccgaccagggtcacgtcaggntctct

SEQ ID NO: 371151 - DNA, 718 bp, Cannabis indica
acttattacaaaatgaaaaatatttaacaaatatattaatatcacttttttacgtaccatcatacaaaaattaagagcatgtagtcacgagttaaatgtaacgaaatatataaaatccaagcaaaacatataaagaaaaatcaaaatatttattattcctatatatattataattctaatggttattgattttaatattataattatatcaatattgtaaatgctttttcttgtatccattgtatgtcgttatatataaatagagttaataatcggatcaagcattaatcgttaggggtagggatggagtatattcaaaaaaatttaaaaacaaaaattatttagtatatttataattgttatattatttaatataataatacgtagattaaaatgtggtaataatatatgttattatgtgaataatatatattaagtgtttggtaaataaattgtgtaaaatatgatttatttaacctataattgtaacctacactttataacatggagatgagttataaatttaattgcttttgtaacttcttttggttgatcatatttttatgtaataaaagagatgttacacaaaattaatgataggattcaaatattatgaaatatagttgttacaattatattaatgctcattatatgagagaaatgagatggtattttgaatcctaagagtgatcacataaacactatataaaagaatcta

SEQ ID NO: 371152 - DNA, 595 bp, Cannabis indica
ggtgccccgaggattcatagcacaacgtctctagatcacgttatccgaagaggatttgcaacaggttgcattgtgtgacttcatcggcaaccagggaatattgtttggaatgatgtatacttttctttaatctaattaaacttatataccaaattctagtgaaattattataagacactaatacttagcaatttaatgcaggcacatctgggagagcataaaagatttgagaaaaaattttaagttttatgacccagagcttctcgcggtgaatggtattgtcaacgcaaattttcgctaactaaaattgagcctcacaattttaatctcacacagaaaaagtaaaagctatcaaaataaagaatatgaacactgggttttttacgtggttttgaagttaaaattctgcatagtccacgagtcaatcttattcagatttctgagtatttttcagaccctctttcatatgagtttttttttgtcccccttcttgatcttgtctgtcactatttataattacatagtgggcagtaatttacaaaagttgacaataatcggtacatcaattattccctcaaatcatgggatttgatta

SEQ ID NO: 371153 - DNA, 648 bp, Cannabis indica
attatcaaataaaaatcatatatatttaattacctcattcttttataaagttgcaggattgtgctgagtcatgaagcttttaataatcttcatgcagtaatatccacactgtacatcgtccgcttgtcctcgacacttgtattgcttgatctttaccttaattctgttttgtatatatattttttagaaacttgtaggtttccaaagcactacactaaagagaagttacttagtgaccaaattagtaacaaaagttaaactaatgaaaaaatgatagaaattacgttgtgacacattttctaatttcattctgaattggcatattcttgttgggctttgtgccctaaataaaactccatttcaatgttatctttattattcaattatcaataaagaaacagaagtatttccatcacttatttaatgtgtcatcaagttcatgttgtcatttatatatttgtttgatttataaattcatccaagcccttatcacattaatattcttatttattgtgtcgtcagcacagtggaaagtaatcaagattgtgtgattaaatatatattcttagatttctcagtatactgggttttaactgatatgataatctaaaacatagtttacttgcaccatggataagtgttatgtcc

SEQ ID NO: 371154 - DNA, 750 bp, Cannabis indica
cccgaacccaaactcagaccaggactcaaactctgactcgaacttaaacccaaactcgaactcagaatcgcaaatagatctagaatagaactaggactaggaccaggacctaaacccaaactcgaacccagatcaaaacccagacacagacctaaacccgaaccgagactagcactcgaacccgaacctagaccgtgacctaaacccacacaataaccggggcttttacccaaaataaggatagggacctgagaaacagaactaggaccgggatgtagtacccgaccaagacccaaacttgaacctaggacacagatcgtgaccctgcaccagaaatggaaccagactgggacccgagatcgggacctggatctggaccgagggcttggacaaaacctgtagtcggtgtttggatttaaaacccagccttggacccgaaccctgataaggacccgaaccctgacaaggacccgaacccacacccaaacctgaaccgaagccctaacccaaaacaggacccgaacccgtaccctgtaacccaaaattggaaccaaaactggaagttggtcgggactggaactagggcttggacttggaatcataactgaaattgtacctagatccaaaaccgtaaccggaccaggacccggactacaaatctaaactagacccgaatcgggagccggacccgaatcccaacccaaacctggactcgggaacttaacccgaacctgaactcagacccaaaca

SEQ ID NO: 371155 - DNA, 619 bp, Cannabis indica
atctcaatcatagtgtggaagattgtgaagaatccaaccaacaagaaggagaatcagcatcaaggaaggagagaaagagatccaggttcagatcttggtgatgctctgctacagaaaggaatcaagggctagagatctgaacggaaggagtcattatattctgctgcacccaatgtaaggtttcctaaactttatatgtgtttatttcattgttttagaattcatattaggatgttaatgaaacatacatggtagtaaatctagatcctggtaaaatatttccaacagctacatatgagtgtgtagctcccgaatcaaataatactgtaaacaaggagttgttgacaggaagctgacctgtcacaacagaaggacaggctgcagcatcagcttgggggatagcgaatactcgagcaagaaccggttttacttctgctttcggctcctctttctttacttgagggcaatctttcttgaaatgccccaccatgccacatagaaagcatgtattccggttgcattctcctgggtcatgtttcttgcaacgtgggcattcaaggtacgagtaacccaggcgtccacctctaccttggttcccacggaaccgcttgctttgccc

SEQ ID NO: 371156 - DNA, 509 bp, Cannabis indica
cctagaagccttgtgcgattttcttgagtgcacagaagcatcatcgtcttcctcttgtgcgattgcaacatcatcgtcgtcctcttggcgattgcaactccagcactcaagcttcccaaatccagatgtcgttgtgcaaccccaacactcaagcttcccagcactcaaccccagcagagagaaatcgagaaagagagggactgacagagtggatcgagaaagagagggactgagagagtggagagaactcgagcgagatcgagagggagaacaagcttcagtgtggtctgatgcttccgatcttgggggtagtgggaatctcatccatcagttgtggtggaatggctcacggaggtcgggcggaggtgcgccggagaagaaacctaggtcgggcggaggtgcacggagagggaacctgtgagaagagagagatgagaacgagttttagttttaggtttgttttgtattttttttttattttattcagtttaaatttttaatgttaattt

SEQ ID NO: 371157 - DNA, 934 bp, Cannabis indica
gtatgttgtagaatttttcctgccaccctctcgaaagccgcccaacaatggtatttcaagttggcgcatggaaagtttaactcatggaaggctttctcctcggagttccatgcacaatttccctcctctcgccagcttccgttgcacctaggagatctagtcgaagtaaagcaaagaccaggagaacctctccgagcctacatcaacagattcatgacagaggctcttggtttcacgagtaaccgaggagggaaagttgtccgcgatactgggggcattgaaatccttggtgagctttggaaggacattaggaataacggaccagtcgactcgatgagtgattttcttgaccgtgcaaaaagctttatcaaacttgaagaggctattcagcgagtagaaggtgagcaaaaacctggcaagttaaaagctccttctactgggacatccgtccagctcccccattacccaagcaattcaagctcaaatggtaaacggtccaacaacaataataggcaagggaatgggaaaaaatgaaagtttacaagcaagactgaacaagctccccgggagaatcctgctaagtatactgcattcaccatcctgacagaggacatagaaagtgtttatatggccactcagtcactagctccgtaaaaaaagcccgcacccatgaaaaaagacgtcagcaagagagacatgaccaagttttgtagatttcatggagactacggccacgacaccaatgaatgtaacaatatgaagtgggaaattggatttctgatatgaaaaaataacccgcacgtacagaagtatgtcaaggccgatcagaatcagaggggtgataacaaccaagacttgctacctccaccagtagatggacatctgcaagtcatcattggaggcccgcactgtgggaattattttaccaggatct

SEQ ID NO: 371158 - DNA, 488 bp, Cannabis indica
tttaaaaggtccatcatgcatatgtgattgtttgaggaatttttgatggaggtcagcgggcacaattagagttagtatgaccaacttaccaagtgataattgttggaggattttcataatgatgcatttagaattagatattttcataaacataaaatccatatatccctttcttatctttccaaaacattttgaatcatccaattctaacatatatcgaggtgcgggacttgtgtgtctttgtacgagctagtgtgcctgtgtgcgagtcggtgtgcttgtgtgcaagttggtgttcctttgtacgagtcggtgtggatttatataagttggggagaatttatgcaggtcgaggagcatttgtgtgagcaatggagcctttgtgcaagtggtggagcattcgtgcaagtcatgatgcatgcgagacgtccaggcgagccgttgtatgagacgtccatgcgagccgtggtatgagacgtccatgcgag

SEQ ID NO: 371159 - DNA, 788 bp, Cannabis indica
ttcgttttgaaaactgctggctttgggaacctctttgttatcaggtagtaaaggagtataatttagcgggtatccaagagaagatacaaaggtgtggggaatctctttcggtttggggcaaagattactcaggtaatttttcttctcgtataaaatattggaagaaggaggtgaggcggtggaaacaaggtagagatcctgatgcaatttctaaatataaggaagctgagacagaactttttgaagttctcactctgaatgaggtgttttggcgtcaacgatcgaaacaattgtggcttcagaagggggataaaaatagtaaattttttcatgcaacggcttcttctcggcgccgtatgaatgctattgataaactccaatgcgaagatcgaagttgggttaactgggaatcgggtctatcagatgtcatgtgttcttacttccagaatctgtttactagttccaactgtactatggatgatgttcttgatgggatttctgctactgtgacttcaactcagaatgactctctcttgcaacccttgactgatgaggaagtgaaagaggctctatttcagatgcacccagataaatcccctggacccgatggcatgactccaggtttttatcaaaagtgttgggcaattgtgggtaatgatgtcatcaaacaggtccgctcttttttcttatttggacagttgcctactggtcttaatcatactaatttagtgttgattcctaagaagaaaaatgccactactatgggtgacatgttggaaattatttta

SEQ ID NO: 371160 - DNA, 449 bp, Cannabis indica
tttcaaaacccttgggcggcctctccaccctcactgaaattgatacaatacccagacattaatagaacaaaattttgaatacaaaatacccagaaattgatacaatacccatatccatatacaaaattgataaaatacccagaaattgatacaatacccatatacaaagttttgaacagaaaatacccagaaattctgactaggtcttcttctccactgagattgagttgcaacaccgacaactcggacaggactcgccgcagcagggagggttcttgggtggaacttcgccggctctggtggtgaaagaccaagggaacgtgagtttggtggatggttcttctttggtggtggtggaaccgtctcgaccttcgtctagatatggatcaaccttcgtctcgactggttttctccgtcggaccaaatgggtctggagaggagcagatggg

SEQ ID NO: 371161 - DNA, 447 bp, Cannabis indica
agccttctaccaggaacatacatcattttagctctgtagacatacggcccaaaccacataccaaatcacatagtttcaccaaaccgattgcaccattccatttgtagacccaaataaatggcgaataccaagtcccgtcccgttccggacaaaattgaagatatttacgaaaatgccactgcatacaaactaagcatcaacatgccaccagcatgcacaacaacatgcgccaccacttgaccaccacttggccaacttgtgggcatcacttagcttataacgtgccatcttagcacgcacgttacactctcccccacttcaacatgccgatgccctcatcgacggaccgcaggcaaatcttccggaactcgactcctaagcttactccaagcttatcctgaatcctaagtctgcacttgtccctctacctccgtagaaccaccctct

SEQ ID NO: 371162 - DNA, 534 bp, Cannabis indica
caaattaagcattaatcaaatttttacaaaaatatctaggttattaaatatttaaaatactatttataaatttctaataagtaaaataatataaaatatcatttttctaacttatactttacaaacaattaaatatttaacaaaataaccagtttttttaattttaaaatattatggttagaatatctataaaaataatctaagttaatttcaaatttattaattatttaatttatcttataagataattttaatataatatttcaaattaaaaagataaagatatcttttaatttaaaatatggctaataataaaatatctgatcttataattaaataatggctaattagtaatttttcccccgaactttgacatgtactaaatcatgttccctgaacctttttggccgttaaaaattttctctgaactattaagattctaatatgtcaaagttcattgctaattagacttaaataatatataaatattaaagaaatttaaccaaattttttaaaatctgaccataaataaaa

SEQ ID NO: 371163 - DNA, 682 bp, Cannabis indica
gatgtaatggtagtaagagtgaagagaatatgataatagaagtagagagtttagtacaaagtaaacatatctcttcaatttttttattagtttttttttaaaaaattagttgtcaaaatattttttatttaatgtgtatttttcttgtacaattaaattaattttattatatcaattttgtacctctaattgctcttttcttctaaggaaagtttcattattagctggtttcattttgtttagggaactagtctgataagagaatgaatttttttctatggaaaattatctatttttgggaaacttgactttcccttaataatttcgattttcaccttgattagagcagataaaataaattttatttgacaggtatagaagaagaccaattcatgatcttagtccattttggaaagtttcctttctagttctgatctgctgcagcagagtccaattctgatgctgcaaatacaaaaaaaaaaaaattagaagaaagttttatatagctaggaaagtgtatttgttgttgttttggttactatgttctataaataagaactagagagccaaaaaaatttcagctctttgaacttcattatttatatttggataaatagcgggataagtactcaatgtttatttttagtcggcataagtacccaatgtttgtaaaactataatt

SEQ ID NO: 371164 - DNA, 593 bp, Cannabis indica
taatcttataattaaattatatataaatattaaagaaattaacaaattttaaatctgaaccataatttaaaaaataaattaatcaatatttaaatttaaacctcaaaatatcaaaattataataatctattgaaaaataatattgttaatttaaaatatgatatttaagttcaaatatattttaaaaaagatattttattttaaatttagggtttgaaaattggaaaattcagaatttgggaaaaaatcccgtgaaaattgggttaggggtgttgcggctcaggaggctgcacgtgcagcctccagaggctgcaactaggctcaaacgcgcgcggaacagagtgacatgggcgagaatcctcggcaggcgtagggtcatcgtgggcgaggtgcagcatcgttgggcgcattcagctaagaagttgtctgagcacacgcgcgcgttgggcctccttgtccgagggtctggtgcgcatgaacacctccctcgacaccctttcaactcgatttttccaaaattcataagtttttcaatttttatcagaattgagttccgtaaaaaggaaaattgcttaatttttcccaaaaaatcc

SEQ ID NO: 371165 - DNA, 478 bp, Cannabis indica
taaagctcgagtttgtattcctaatgttgatgagctcaagaaagaagtccttgatgaagctcacaccacaccttattcaatacatccaaaaactaccaaaatgtatcaagatctaaaaccctattctggtggtatggaatgaagagagatgtggtagattatgtgtccaagtgcttaacctgccagcaaatcaaagctgaacaccaaaggccgacagggttattacaaccactagctcttcctgaatggaagtgagaggacattgtaatggattttgtggttggtttgcccagaaccacaggaatgtatgattcagtataggtcattgtggacagattcacaaagtcagctcattttctgctagtgaaaattacctattcaatggatcagtacactgaactatatgtaaaggagatagttcgtctccatggagctcctaaatccattgtttcagacagagatccaaagtttacatcaa

SEQ ID NO: 371166 - DNA, 517 bp, Cannabis indica
aaagagttttatttagggcataaaacataacatcttttactaatgtaatagaccggatgttgtgtgttgttttcctctctgatcagtacagcactcacggcgtgctccgttaaaaccaactatatctcaagttcttctcagtccagaggtttcgagagtacatggggttttgcgagttgcattttcagctcttgaaaagctttttcacattcctctgtccactcaaattgcttgtttcctcgcagggtgttgaagaacggaacacacttgtctatcgattttgaaacaaatctgctgagtgcagcgatccgaccagccaaactttgtacttccttggttcttgttggcgatttcatatctaagagcgcttgaatcttctatggattggcttcaattcctcaggcattgacaataaagcccagaaacttagctgaatccaaaggagcactttatgggaattgagtttcatgttgtatttcttgaggactttgaagcattcgtctaggtcatctatgtg

SEQ ID NO: 371167 - DNA, 817 bp, Cannabis indica
ttgtttataaattataagttaaaaaaataatattttatatcattttacttatcagacatttataaatagtattttaaatatttaaataacctagatgtttttgtagaaatttataataagcttaattcgagatattttgacatataatttgaaaaattattatttttttattatcttattcttaaaataataattgcataaccatatctattttaaattagtttattttgttattttaattttattaaattataagattagaaaatgatattgaaaatatttaattggttattttcaaatcatttatcttattagatatttgatttaatttgataaaataattcaaatgaacctagatattttaaaattagtttgaattttaaatttttgaaaagatatttaaggttgtttcaacaaccttaaattttaaaatttagttggttagttaaatgataatttaattatataaatatcttacttcataatttgttacatggatattgtttgtttttttaaattgtttattcaaattttttttaacaaacctattatttatttgatctaattactataatttatttgtcgacagatccaatgatctgattttaatcatagtcaaattgtcaatagatcttaaaaataatttgtaacaggtaacttttatattttttttcatttgtgtaaacatagaaacatgataggacccatacaaattaatttgacttgtgtgggcctatatgtttgcttttgggttcagatgcatataggaagcccatttatttctagatagataaatggactaggttgttaaaataaa

SEQ ID NO: 371168 - DNA, 511 bp, Cannabis indica
gagatatgggggtttttagaggtggttggcgagggttttcgtgggttttctctgctctacgatggctggttatggtggagaagaagaagtggggaagaagaagacgatatataggattttttagggaaaccctatgcaaagaaccaacggcataggtgcacacgtgtcaataaagtgtgcacctatgccgtcagttctttgctaggaaccgacggcaaagggtttcactaaagccctcaaagtttgccaatttccaaccgacgagatagggtttattaatatttatacctacggtttttaccaaaaaaacccgcctctaaatgtcaatttcgaatcaggtgggtgttttcacaccctttagcttccctttttataaaatgggttaaaaaagggaagctaaaggcccatattgtagtagtgtatatataaaatgatctatataactgataatatttttactttttttttaaaaaaaaaattaattagaattatatatgttcattagaaatat

SEQ ID NO: 371169 - DNA, 876 bp, Cannabis indica
ttacaatttggaataaaattattaattttatgtaaataaatttacaaaacatatgtatatattttattaagatgtaattattcttatatagaggtatattttgttaatacgggacttagaaaatgtataactaattacaatttagaggttattcttatttataactggcccaaattgggacttgatttttttataacaaattagaggttattcttgaatagagtattcttaaatagaggttctactgtattagtttttattcattataacactgttataaaaccgattctattttaattataactggtttgagttattttatgttatttattatgttacaaaactagttatattttaattttaaccggtttgaattattagtttttattcatagaccgaaccggttatatttttagttatatcaaagacatctacttttggtgactttccagtaacttttctagcgacggtgatttttcgacgacggtaatttttttggtgacttttccggtaccgatgacttttttggcaaaacttattgttgttttatatatatggaatttttatatttattacaaaaatataggtataaaaaaacacttataaatatatatatataaaaaaaaaatcataaccttatgatattatttatttatatatgtcatataaaaataaactataatctcaattccaaaattccaatatttatgaaaattgaaaagcatagaggatcgacccatttacacttacatagcccctatagtttagacaaagattagagttcatattatttaaaaaacttaattatcctaaatatgacatatgccataaaaaacttacaaatatgggaaaaagtcatgaggaatgccataaaaa

SEQ ID NO: 371170 - DNA, 593 bp, Cannabis indica
gagtcccaccagactctatcatgcatcccactgcgccctcagctcgcagtgccttatccactatttcagcatagagggttctgtcatcagtaataatcatcaaatcatgtcgaatcttcgcatttaacccatccaagtacttttccttttcactgaaatcagttggcacaattcctgagaccaacctcgccaagcgatcaaactgagtcgtatactcagtaacactcatgttttccttctgggtcaaatgggtgaattcttttctcttggcacttcggactgcctcattatagtacttggcattgaataactcctggaatttctcccaagtcattgtagtaacatcatgtatcatggacaccatgtcccaccaaactaaaacatcttcttaaaattgaaaagtggcacagaccaccctatcatttccagtgacgcccatgaaattcaatatcctggtgatcacagttagccattgctcggctttcataacatctggacctcccaggaagactggaggtgcctgcttacggaacctttcatacagaggttccatccggttcattccaaccaccggttcggcttgcacagcaggg

SEQ ID NO: 371171 - DNA, 273 bp, Cannabis indica
gtgtatacgatataccgaaataattttgttcttcaagtggattgcaaccagggtgaaagtgcaggtttgagatcacctatgtacgacctaaggaagctttttaacgttgtataagggtcggaggtcactgtttcgagtttcaccattattgaagcttcgaaggtgcgatttgaaacggacacgaattcgaacgtgtttaagcttgttcttgttggaaaattttaccaggatctagatttcctaacaagtatgtttcattaacatcctaatatg

SEQ ID NO: 371172 - DNA, 844 bp, Cannabis indica
atatatatattatttttcttaatttggtggcattactttttttcttgtcttcttcggccatgtgagagcatgaactctcatttaacatatatatatatataaaaataatagttaatgaaatgtatataaacgcgcgtatatataaatattagacttatacatatattttgagaagtgttaactaatccaacattacttactcatatatatatactcaaaagtgttaatcgactcaaagattttactgagtacttatttttttatattgaaatttatatatacaaatatattcaactggcacaataaggtatagattatatatttttttaatcaaaatatatttaactataaataattttgacaatgaatttatggatgagggtatccatttttttgtggaatgagggcattttatgaatgagagcatctttttttgtgtggaatgagggcattccatggatgagagtatccaatttttttgttgaataagggcattccatggatgagagcatccaattttttgtggaatgaggacattctatggatgagagcatccaatttttttgtggaatgagggcattccatggatgagagcatccaattttttgtggaatgagggcattccatggatgagggtatctaattgtttatagaatgaggacattccatggatgagggcatccaattttcatttatagaatgagggcattccataaatgaatagagagaaatatgagagaggtaatgaccatcaaaataaagagagaaaggaatagaaataataacattccatgaatacttacccttgaagcttgttgattgctgacaaaaatttatcgtagtt

SEQ ID NO: 371173 - DNA, 617 bp, Cannabis indica
tttatatttatttaggttcaatatgtgaatatccagcccaaagcatactaattattgtattgttaaacttgaatttttttttcatatatattttcaagccttatggtatttttgacaagtgttgctcaagatttgttgtatttgtgatagtttaattatttggtgatactccaaactgcagaaaccacaaaaatcgcactgcattgcaccattttttgcggtgcaatttctgtggttttttagttttgtggtatgggtgcgttttaggaaattggaaaaactgcaatgctggttgatttgaaaaatggtcaaacgcaccacccgcatcgtgaacaccccttaattcaccccatctcggatctggtcccagacccaggcccaggacatgaacccgaatcaagaccgaactcaaactggaacccgggcttagaccctaacccgaaccaaaactcgagacctgaaccttgcccgaaccccaacccagacttgtacctagaccttggcttggacatgggacctggaccctagaccccgacttggatcccagctcgagcccgtaccctagacctggaacccaaaccccacctcagacccagacctaggtatgtgagataaaa

SEQ ID NO: 371174 - DNA, 1120 bp, Cannabis indica
catgagtaataaaaaactcaaagtagacgtagctccagtttctagtcgggacgaagggagtgaactactataaatcttgtgtcgtctctctcatttactctacttaacttctattttctctcacaaatctagcgagcgaccgttggccatatttcagcgttaacagtctgattatgaatttgatgtcaataacctttcaagtcccaaaaagccaacctaatagggaaccatcattcaatcgataaaaaggtatatatcgcatatctattaagctatgtcccaagtcatatacatcattgagtctccaaaatgatagttcttagcctagtcatttagaaaaatcgtaacgcgtgaatcaaaggatcagataacatatataagtgttcatagtaacttcaagattaagatcaatttatatatgatcatactgctaacccaaatttaggccatatgtattaataatattagtggactgtactagcagctattaatctaaaaatatataactttatttcactgcgaactatttaaattcattatcttaccaatatgagattaaaactacatagatttacttgagtttttttttaaatagtcctaagtcctttaaggcaagggatttatttagatctgctataagtttggagattagagtggagttgggagcagttactaagatgtcacccacatataccaatagtatgatgaagctagtggcagatccaaaggtaaacaaggaagtatcgaaccgtgaagcagtgaacccccattccaacaaagtatgttttaacttctcattccaagcacgtggggcttgcttgagacaataaatggccttgtgaagaagacaaacatgattaggtttagatgggtcttcaaaaccttgaggttgtctcatgtgaacaatttcttgaagatcactatttaggaatgcattgcttacatccagctgtttgaccacccaatttgtagtgaatgcaagagttagaacaacccttactgttgttggtttcaccactggactaaaagtcttttggtaatcaattggtggtgtttgtaagtaacctttggcaacaagtgtagacttataggtgttgagagatccatcagcattaagctt

SEQ ID NO: 371175 - DNA, 510 bp, Cannabis indica
gtagagataattagggctatttttttatttatttatttaagataagaatgtaatattttaaaatattttagtgcattactcaaaatatatatataacataatatatatatgactataggcgtatatgccaaataaacttatgagtaaggcatttcatgtgtgtactttgtatacaaccggatttgatgtgtcaacctaaaacaatagactaattagtttattattttataggcacacattgtgtttgaaacaaaaaattaattgttgttccaatatacacgaaaaatagactaataggtttcttggcttacatcattatgtttgattatagtttactctgtattgaaaaaaaaataaaatgttgttccaacaaacaataactagtaggtttataatatatatggtagactatatgaaattaaatgaaatgttgttctaatatacaaaaagaaaaatgaaatttattttaatatgccaaaataaactaatggtaggttatatgaaatggtt

SEQ ID NO: 371176 - DNA, 331 bp, Cannabis indica
aaagttagattttagccactgcaaattaattacgctagtaaaactttgacctctttaccagtgcagtttgtgaaataagcatttgaacatttggatgatttcagcactggcaaatattcaaatgcgaaatatatacttgctatttttaaaattaagattattttcaaaaatagattatatataggtaaaaagaaataatgtaactaatgtaaacaaataaatgttagtaacttattctatattaagtcactattttaacatctcatcacttttttaagttcatacataggtaatatctattaaaaaataattcatatatacactacaagaa

SEQ ID NO: 371177 - DNA, 735 bp, Cannabis indica
tgtgataaggatttagatgaatttataaatcaaataaataaataaatgatcacatgaaccaaataacacattaaataagtaatgaaaataaaaatgtttcttttattgataattgaatagaaaagattacattgaactagaattttatttagggcacaaaacccaacacaaaagactagctcatacttacatgttggaagcttaatagtgcaattgagtgagagcgttaatcatagatatgaaatttacttctataaatatttataagttaaacgatagtttccttaaagcttggaaaaataagttaaatagtggagtactcatttcaatatttatatagtttatcgaaatattatttacaaagagctaagtgttttaaggataaaatacattaaagggtaaagcagtaattttgtccctattcaatgtaaatttttatagaggatccttgactagttagattgaaataataaataattatagtgtatctatatttggtatgtagagtgttctatgtaatcaagagtgtaatatagtggcgtagggaggaattaataagttaggaaatttacttggtaaatttcacatctacttattaggagcttggttacataaatccatggttcccatattatctgagataatatatattattgtggagactcaaatacttgatttaataaatcaactaaaattctaaagtagattatgacttatttaagaatttttggtaaa

SEQ ID NO: 371178 - DNA, 833 bp, Cannabis indica
catcctcaagttccataaccttgaaagtattaaaatgacatcccaaaagctccaaaatatgcacccagcacccaggtttgacaaatggccaggtgcgatacttctacttatccgattttaattttgcctcgaccgttggtctgttttttcatcataattgagagtcatgaattctgaagagggaaattcaaaacttcatattttcatttttctaacaacgtgatttactcgaaaactgggtagttttgagtctctagtttttgcaaaataacaacatctacgagaattggtgaccagcttcgttagaacacagaaatggactaagtggtgtcaaaatatcatctaggcatcagaaaatacatcagacatattttctcactcatccaaggtccaagttaacatcacatgtaaacctgggtgctagatgtcaacttgggcaccaggatgtcaacctgggtactaggcccaaaataaccttcaataaaatggtcataactcactcaatattgatttgatcgacacgattcaacttgtatttaaaagctattctaatgctctataaagtcatgtctcacactttaataacagttctgaatttatcgacctaaaatttcaccccaagagagttacaaatttaagttgcaacttacactgagtgggtcttgccaaagcaactcaaactccaaaaattgacaatcaatctccaaagttaatttttacagttagatcatcatttatgataaaaagatagcctaaatttattttctatattgtaaagtcctttttggcaagttagtggacaaatttttttttccatttatggtaagattgtt

SEQ ID NO: 371179 - DNA, 651 bp, Cannabis indica
ttcatgtcgggcacataaagcacattcatcaatgtgactttcttaccggaggtggtacatttgcctagtacctttgatttgacctcattgccgatttggatctcatggttaccctttgactcttcaaaggtcttgaacaatgatttgtcatatgtgacatgaacggtggcacatgtatcataccaccatcccttcactttcccttgcacggaattcacctcactaagagtagcaatgatatcctcctcgatagcatttactttgggtcccttaaagtcttttctatgcttacaatccttagcatagtgtccaagtttgccacacacaaaacatggaccttttccacctttgaattggtttggtttagactttggacccaagttattaccctttttggtctttcccttgttcttattaggaactttggaagttgcatttgctttggaagtctcttcattagacccctccacaagcttatccctacatatcgattcctcctcaattcgaatatgtttttggatttcttccaaagagtaatcctcatttttatgaaggattctcttcctataattcttccaagatggtggcaattttgccactattgcaccaacttggaatgcctcgggaagttcaattttgagcacttttaat

SEQ ID NO: 371180 - DNA, 1271 bp, Cannabis indica
cctaaatatacttttcaaaaattatacaacttaactttttacaaattttatgttaattttttaaaatacaaaatttaaaaaaatctaaataaaataaaataataaataaatatcatttatctgattttataatttaatttaaaataaaaataacaaacttttttcaaaaagtgataaatatctggctatgttcaaaattatctagattattttattaaaatatatcatatatatatatatatattttaaaattttacataaggtcattttatagaaattatttaaataagcaaaacataaaatatctgaccttaattttttttaaaacaagataaaataataaaattttaaaattaaaataaccatttaagcaaaaaaaaatgtacatattacccctttttaagttcaaaatctaataatatctaaaattaattaataaaataataattaattttaaattgataattatatttgaaatttaaaaaataaaaatctacacaataatttacacaaaaaatctcaaattaaatccatgaaaaatttgaaaaatgaaaagattgaaaaaaaaaaataaaatagatttggtgcagatggtatgcattgcataccatctgcgtgcgtagatggggggaggtggccgagttttgatgtacagggatgctgcatgcagcatatccgcgctcggaggggaaatcgttcagaaaaaaatgcctcggacagggcatgtctgaacaagtgtgacacccaagtgaatcttggttgtgcgcgcgcgtatgtgggtgatcccacaccccgatttttttaaaaaaaatttaaaaaatcataactcatttaaaatcaaaattcagttttgtaaaaaagtgaattgtttaaattttttaaaactatccaagtaaaataattccaaatcatgaatctaattattttatgtaaaaattcgtaaacatcaaacaatcatcaaataaacacatagatcaacatgaatcacatccaaatcacatattcatcgttttaaatccatatttcttgaaagtaaatcattaccatggctttgaggccagttgttcgattatattttactaaaatttagatttactaacaagtatgttgattaagaccctaaacatgaattctctaaaataatgtaattaaacacatataaagtttaggtaaacttacattgattgcagcagaataatatgtctgctcgcactcagatttctaacccttgttcctttttatcgcagagtattattaagatttgagcccga

SEQ ID NO: 371181 - DNA, 808 bp, Cannabis indica
aaaaaaaatgtaatcaatattgtaataacacctcgaaacaaaattattattaagttttaatttgacgaaaaatttaactaagggtctattttgtgctattttaaaaaatacaaagtatgaattgtcatttaataaaacgtaaagtataatcagtaacttttacaaaacatttatatttaccctattttaaggtggtaagtaaatggagggtctacgtgacgtatatacaggccaaaattattcatcaattaatttgatcagaagttattgatcgatatattagacgctaatgatacttaatagttaatactatttagaggtggcaccttataaatatacatagttagcaatattataaatatacttaattacacaaataacaatataacactttataggccggtgatgttaaacaccactaacaccttttaacatttctctaattatatgcatatagcaacctgttcattatccttaaacttctacagacaaacgatattgatatatatatatataataaatattattttgtaccatatattttacaaaggttattgattgaccttttgttgtgataaatgataaattgaatcttagattttctaaaatagtattaaatagtaccctgaattgattttctgtcaaaataaaacttaataataactcgatctagaagtgtaatgacaaatctagttacgttgtttgtgttaaaaattatcttcaaactagttatatatattttaaaaaaaaaatcaaaaattaagttgaaggtcttatttattaatttttttttttacaattgaacacc

SEQ ID NO: 371182 - DNA, 561 bp, Cannabis indica
caagatagattgctgaaatttggcatgcaagtgcaggggacctgctgcctttgtgagatggaacccgagacctgtaagcatttattttttgagtgttctgttgctgagaattgtttgcaggttctgaagttatggctgagctggtttgcccaaaccagcagcctccaacaacttctcaagtggattgggaagtcaaaactttccaaatttaaaaagggtgtatacacggctgctattgtagggctggtgtataatatttggaagtctcggaatgaaatcatttggcaaaatggtcgagttaacccgactagaattgttgaagaaacaaagtggaacattaaggctcggattgatagagtgatgcctaaaaaagtcaagcctaaggatagagagtggtttctccttttgtaattcataacacattttttgtctctaatcttgatattttgattcccatcttgatacaaatgtatacatagaatttcggccctttgcttgggtgcgtatagtttgtaaaaagtttgttttgtgcaatacaaattcttgatttatcaaaaaaaa

SEQ ID NO: 371183 - DNA, 541 bp, Cannabis indica
  modified_base (14)..(14): a, c, t, g, unknown or other
aactttctttattntttcttattttctttcttcttcttcttatttttcttctcgcttaatgcccatccctaactgttcaactagttaccaaaaatctaccaccaccaccaccctccagccatgatatgttcatcgacctttctccagggtttcattgacttctcaaccggatgatatcaatgaaggtttcaagagttttggagaggttaaatcccactatgggctcagatctcatcaacttgctgtaaccgtggctgaagaagtagcagatgggaggtgtcgagatttgaaacagtgagattctatcaatagagatttagtttgtaggcactcaatggagatggacgaggtttttcttaagttgctatggaggaggcttttcgttggctgagaggttgcactgtggaagagatcagtgaagcataggcagagttggcagaggggaactgtgggggacggaaaagcgacgaccccctaagggttaaccggattttaccctcgtttacttttctgttttttttttggattcgtttattcagtc

SEQ ID NO: 371184 - DNA, 511 bp, Cannabis indica
tgatgcaggaggggtaggagccccgtcaaccactgaagtcctagcagactcagtcatacacccaactgcgccctcggctcgcagtgccttttccaccatttcagcataggtggttttgttgtctatagtaatcatcaggccaacctcgccaaccggtcaaactgtgttgtatactcagtaacgctcatattctctttctgggtcaggtgggtgaactcttttctcttggctcttctgacggcctcattgtagtaattggcattgaaaagttcctggaacttttcccaggtcatcgttgtgacatcgtgtatcatggacaccatgtcccaccagaccaatgcatcttcttgaaactgaaaagtggcacagaccactctatcattcccggtgacgcccatgaaattcaaaatctttctaatcactgttagccactgttcgactttcataacatccagacctcccagaaaaaccggaagtgcctgcttgccaaacctttcatacaaaagttcca

SEQ ID NO: 371185 - DNA, 728 bp, Cannabis indica
aatttatgtattggatttgtatagcttgttcaactagtggagtgatatatggattggtggcattttttatcggaataccttgcataatgtcgtgcacctatcgtacaaagctgaggaacaagtttgggttgctggagacacctgcacctgattgggttacccattttctttgtgattgttgtgctatatgccaagaatatagggagcttcaaatcagaggctttgacccttcaattggtaagtaattatacataatcatctatagactacaactctctcctatcaataatttgaattacaattcaccatatatgatcatagtgtccttaaatgttcttctttataatctagaacaagtatctaagataataacttgattttcagaacctatacatcatcataaataatataaatgctttattttatttttctatttgtccaaaaattttatatttttttctttattgataattgattaaattaatcttacccaacttatagttttttaaattcatataatttatagtttataataatatatatttattatttacatattcatattagcaatgataattttttttattctatttcttaaatcttgtgagtagggagttttatattatttctttttatttagtatgattctttataaatttatttgtgtaatagtctcacattatttgtaaaagatagtagatctttacattatatgtattataaataaa

SEQ ID NO: 371186 - DNA, 624 bp, Cannabis indica
atttgagttaaactatattatatggtagttattttgtgagatatattttaaaggacaaaattatcattatatatttaatattaaaaaataaaataaaaataattaaaatccattaccgataatggcattccttacaaaattggtgggggaagttctccctttcttttctcccttatttaatcaagttctccatttcctaattttaataatgcatgtaagtaaataaatgtaagagaatgattatcttaccattgattcccattacatattagtaaacatgccatgtgtatcaaatatacactatgaacaaaatagtgcaaattaaattggataaacacgcttattactaaacccctcaatatagttttagttgtataattaattaaactgaaggaatacatgcaatttgtttttaataaaatgtgaatttgataaatacatataatgttgtccaaatgaatatatatatgtggaacactttttaatgggtattacccatgaatggttactaaaaaaattaactataaatattaattttaaaaatatcaaaccatcgaattttgatttaataacgaataatgaaatcataaatttgaatttctatgcttaatttaacaacttaat

SEQ ID NO: 371187 - DNA, 535 bp, Cannabis indica
aaagccattgaattattctcaaaacaacaactttggattcaagcaaggaggaaatcgaaggaatagtgggttctttcaatagagaaatcagaaccagacacataaccaacaatatactcagcaacaaagctctagtggaaattctagtttgcagacagacttattgttacaatttatgacagaaactagatcttccattaaagatttacagactcaaatggggcaactagcaactcaggtagcaacccgtcctcagggaaatttgcctagtacaactgatgttaatcctaaaaaaactgcaaggcaattaccctgaggagtggtaagaaatatgatgggcctgagatgatacaaccagtggatgaagagattaaagatcaactggcaccaactccaacatcaacagaatagaaggccactgatagtcctgcaccacaacaacaatctccaccagtcagtatagatcatcatgtgaagataccttatcctcagagactccgaaagaccaatctagacaagcagttctcaaaatttc

SEQ ID NO: 371188 - DNA, 1109 bp, Cannabis indica
gcgagttggagctcgtcatatatcttcctgaggttgatattgcttttactttcattctgacaactacagtttctggtgtcgagatgatctttctcgcgtgcatgccatcttacggcgagatagacacctcgccatctgtcaccttgatccacccctctgtttatgcttagtttgtatacagtgtcatatacggtaagtatttatattgttattatacctcctccacgcgacgagattaatgcctcgccatgcacacttgcatttacatggtttctcagtcaacagttagtacatttttatctcgtataagactgtccagtcatccgagttataaacatattctgttaattatgcttttaacgagttattccacgtcaagtgtacttacgattgcatgttagagttcttcattcttcccagctcgacacgtgtcttcttctgatgtgctcgccgaattttaggtataacaattgccccataaaaagttattttttttaataaaagagcttttaatgataacaaagggtattttcattatgatcctttgtttgagaagacgcatatcctctgattttggcggttgtgcggtttcaaggtacatcagtattaaatgaccatcttttccacttctgctttgaattatgtccgtaggatcaaacctttctctgatctgacgaaggcaatatcatgagtataaattaagaaaaaaagagccacctttgcattatttccttcattttagaaagtctaaaaaactcttaagcttcttcaccaagaatcaccatcgagtttgtctgaggacttgaatggcatctctgtccttgaccttttttctacgattttcatccgacttcatcctctcaaagtgttcctaaccacgttgaaagatttgcagacggagtaactagccattgccccaagtcttaactccacatagtaagttgatttcttccttcacatgcttgctacattgtgttaattttctagttagtttgtttgtatcgttgtcatctcatttggtgttggtagtttttagggttagactatatttaggtccatactatattcatgtattatgtaggttgttttaagatctccaactcattacc

SEQ ID NO: 371189 - DNA, 628 bp, Cannabis indica
ctgtccccatctgaaccatctcgattattaactctcgacctctgtcgtgactaacaagaatctgacggcccctgcactacttccaaacccatgccaacaagcttccttttcaacaaaagcgcctcctgtggcttgcgatgtcactcaggcaaacttggcctagtgtaccaagcatacaatatggactatcccctcaatcttgtattatgccaacgagtttgaaacattctgttgcacctctctacaattgcacgtggtagttgtctttctagcatctctgaacttgactcgaagcaaccatcaatgtctcctctctaggatgtccaatattcccatgaagaaaagcaacccagtcttaactccatctcagcgtactgatcccctttaaaagactaactggctcaacaacgtcttgttccaacattcaaaccatctcgatccgtccacccgcatacatcctctctaggataggccaacaaggttcacctcccactgagatgaacttggctctgataccaactgtcacgggctcaccttttcagggagcagaagacccgtgcggcaccttgacttgtctaagccaaggtcagccttcaaaccatccgagtaacaatgggctcatttttcg

SEQ ID NO: 371190 - DNA, 959 bp, Cannabis indica
attcttctaaataaaagagtcacgcaacagaaagtttgaattttattttcggcatgttaaattttttaaaattttttaaaattttgcaagatgttttaaataactataatgtacacgaccataaaaaaaaaagactaaacaagtctcccgaatgccgaaacaggtaggagtaaatcagtgcaccacttttaaagaagtgctttattttcggcgtattaaatttttctaaatttttttaaattttacaggatgtcttaaataattataatatacactactatataaaaaaaatagactaaaaaagtttgtcgggtgccgaaataaataggagtagattcgtacatcacttttaaaaatgtgtattaaaaaatttcccaaaaaataattcttaattttacaaatataataatataaatatatataaatattaattaaattattaaaaaaactaaaaaaaaaaaaaaacaaaaaaaaaacaaatgccgtggctaccaatttgcagtgtatgttgctgcctccttggatcaatcctcaacatcaaaatatcaatttgccgcctccttggagttggccttagccacacttaattaagtactgaatgcgcaattttctgtaacgtaagataaagcgtataaataattattttaatttattctatgattaactacacgtacacgtaattgtcccgctcaaaacggaaaaataaaatgaacaggctagctaaccaaaggcaccgttacgttttaggattttagctagatatggagggtttccacttcattcacatcttaattatacaaccaaatcttcttaaaatatcaccttcgtcttcagctttcagcttttacttttacgttactcattgctgaagattgtttggtacgtacgtacatgcatgatttttactttttcttgaagaaaaaaatccctatatatatatatatatatatatatagact

SEQ ID NO: 371191 - DNA, 651 bp, Cannabis indica
aactttattcataactgaagtttcaaatattacatcagaaatgtgagttacaatcattaatttactagtagtagggtcgcaaatgttccacgttccattagttctttatcagtgagccattcagccgagccaattataaaccccggttcctactattactttaatcacataaggaccctcctagttcgggttgaatactcctgtagatgcgtctctcgtatttgcaaatactcgccttagtaccaagtctccaacattgaatagcctctttttgacccttttgttgaagtatcttgttactcagtgttgatacgctgcattagtaatctgcgattcaatacatttttcatcaagcaaatctaaggacaatcttaagagttcttagttttcttcttgattataaaactctcgcctatgagtcgagatgtttacttccacaggtaacattacctccgagccaaatgctagcgagaatggagtatgtcccgtcaccgtcttctcagttattatatgagcccaaagtacttgagatagttcattgacccatctacctttggcagcatctaacttcaacattatagtacccttcaaggttttgttaacaacttccacttgtccattcgcatgaggtctggatactgacgagaagct

SEQ ID NO: 371192 - DNA, 660 bp, Cannabis indica
cttcatctcacaaaagaaatatacagagacactattgaagaaattcaaaatggagggatgcgagactgtatcaactccattagacaataacaaaactctcaagaaggaagatacttgcaaggaacaaaattctacagaatatggtacggagttacaagtgactcaaaacttgtgggctacacagatagtgactgggtaggatccatggacgactatgaagagcacgtcaggatatgcattcaaacttggatcaggaatattttgatgggtatcaaagaagcaagaaactgttgtgcaatcatcagcagaagcagagtacattgcagcagcaatgactacaagccaagctatatggctcaagagaatatttgaaagaaatgggagaattacaagaagaagctacaaacatctattgcgacagcaaatcatctatagcaatggcaaaaaaatctggtatttcacaatagaactaagcatataaagcaatcaaagtaccatttcatcagggaagcaaaagtaacaaagaaattgagctaaagcactgtcaagactgaagagcaggtagccgacatattcacaaaaggcactaccaagaggaaaagttcgagctatacgagacatgattggagttacagaaaatgtgtaccaaggaggagtatt

SEQ ID NO: 371193 - DNA, 453 bp, Cannabis indica
tgctgcccgtcgaactcgagccacctcccacagaagattgacgtacgatcaaggtattaatcacatactccttgcagaatcacttgatgaaatcgaagaaaaacgagcatttgcgaaattaaagttgatggaccatcaacaaaaagtagctcggtatttcacatacaagtgaaagctcggaaattcttcgtgggagatatggtcctgagaagggtattcctcaacaccaaagacagtacggaaggtgtacttggacctaactgggaaggaccataacaagtggtcgaagttctcgaactccaaagcatacaagttaggtaagtatgacgaaaaaatgcaactcattactagtaccacggtaactggaatggagaacatttaagaaaatactaccaataaagtaccaggccagatgaccactttaagtactaaatgaacatttgcttttaagtg

SEQ ID NO: 371194 - DNA, 817 bp, Cannabis indica
cctgaacttttaaggtcattgaaaatgccccctgaactattgagattgttggatttaaggacttttttctaattttagtaaaaaagtctaacatggatgaaagttcagggggcataatttagtgcatgtcaaagttcgaagggcatgatttggtagatatcaaagtctggggaacatggtttagtacataaacaatcattgaaatagtaaaattgaataaaattagacaaaagtccttaaatccaacaatctcaatagttcagggggcattttcaatggccttaaaagttcagggggcatgatttggtacatgtcaaagttcagggggcaaaaatcctaattagcctaatgtttatacatgtattataatttggaataaaattattaattttacgtaaataaatttataaaatatatgtatatattcttatagaggtatactttattaatgaggtatactttgttaatgcgagacttaaaaaatatatatattctatatatatatttataaaatattctatagagatttcaataaaggtttttactgtatatatattctcaaatgacttacgtaaatttgtatgtagagcaagagagttggtgtaaatagtaaataccatgatttcttgctcaatatagagatagagttggtgtaaataccatgacttgttgcttaatttatgtgtgaatttgagaggacagtaattgtataagaccctagctaagattttattctattaatttagagtaatattcttatttgttttttttgcaaagttacaaatttgcccatagtttttctccattcattttgtat

SEQ ID NO: 371195 - DNA, 509 bp, Cannabis indica
aaatggatttagtatagtatatgcaagtgctctacagagtatggtagagtttgggctcgaattgagttgtggtgcactgaaccgttcgaccgattcaggggagcctgtaacaaccgggttgatccccaggaaccagtcttccgattgggaaccagtctgctggttgggcttttttcagaaccctaccttaaactaagtttaagaataagcatactatgaatgtatattatttactagttcatgcatgattttataaatgatgtaattgatgtaaaaaattaatttcatatctaaaaattttaaatacatagaatgttataatcttgaaaagtaaaattaattaatataatatgatagaattttcaaactattaaattaattgaaatcttaaattaaatataagtaaagaaaagaaaatattacttctaaagtattgaactcgtgatattttaattattttaagagtaattattataagttgaatatgttataggtttttataagtataa

SEQ ID NO: 371196 - DNA, 466 bp, Cannabis indica
ctttctctcactttacaatatttttataagtccccaataatatttgttaagtctcactcccttagtgaggtttttggcttctgaaagtgttaaacttaaaccttttctctcaaaatgtatgatgaaattatactaaaattcacttggcccaatacatgtccacttcatgggcctcaagtttgtatcagcccacttgggagcttcatttgaccacagggccgaaagaagttttcagcggcatgatctaaatatgttgatcagtctttcactaacataaccatcaatttcaaagaatcgtaagtccatgtttacataataactaaaaaaactgttttttatctttaaaaacagaaaatttgtttggtcttatttttttaaaacagttttcagaaaacaaaattacaaaaaacaagaattttaaaaacaacaaaatgttattttctgttttaaaaaccaattcactttt

SEQ ID NO: 371197 - DNA, 860 bp, Cannabis indica
agtttataagcaaaatgacactataaaatcttttaatttatttatttttctttccttttataagaaccacaaagcttaatcatttagctttactaattcctcctgatctcaaagaatattcagaaacaaaagatttatcccattggcatatttcaaaaacatcaaagggaaaagaaaccatccctaataataggaatcatccagtccccccatctaaaaaagaagctcaaaatatgaatatgcctaactttgaactttatccatcaacagcaacacatataaaaataaaatgccactagtaagattccctggtaagtaatttctgtgtaacacagtctgtagtttggagaagcgtgaatatccagaaagaaaatctaagttcaaggctgctaatattttaaaattttatttttctcaccccgggtaaaacttcctctccagctttctttagaagggattccatctcttggacctaacaaaccacaagacaaaaaagaaacaaacaatgtcaataggttatttcaaaggtagaaccagatgaacatatccgtttgtaatcacaaaaataagtagcaaacaagacctcatgacgtggtatcctctgtttgatgtcatgaaagtatttcaaaccaagtttctgtgcatttgttaatgtattttcattctccaaatcatccagtgatcggtgtcctttttcatataatttcaatgcagtggcaggaccaactccccaaacttcaccaaataagctgatggttttaacctgaaatgaagttcaaattctcaaaagccacccatcatcaacactgacaaagaaattgaatttcaacttcccggcatttgcgtataaagaaatgact

SEQ ID NO: 371198 - DNA, 732 bp, Cannabis indica
gatgtaaaagtgcagtaaaagacgagcggagccaagaaaaatgccaattttaggcttgacgcacttctggccgcggctagatcattgtggccgcggctataactcgaaggcagaatgcacaatttttgatgctccagtcgccgcggcgagatacaccttcgtcgccgccataacatccactacagagagtggtttttagaggttcatctggccgcggcgagagtctgtacgatcgggggtatttttgtccgacgaaccctaaaaatcagatataaatagaaaactgcgattggaaatcaggagaagcgatttggagacctaaaacacagtagaaagcggcaagaagagcagaggaaatcaaagttaagctccggagtcattccaccaatagtttctttctctattcctttttaatttctttatgctgaatattgttataggaatggtcatggataaaattatgaactaaatttcccatttagggaggatgatgattgttgtttaatgtttttgcctagttaatgaataattgccattcctccattcttgattgtgaaattatctatatttgtgttcaattccatgtgtaagcttgatcaccttctgtatgttctatgatctcaattcaaaatctgaaaagtgagaattaagaatgctaaaattggataatcgatgttcgatgtgaaacgagagtattcacataatttatgtgacaagtagattattgcttaa

SEQ ID NO: 371199 - DNA, 604 bp, Cannabis indica
aatgtgctgactttgtaaagtgatcaaccacgacccaaactgagttgtacattcctgtggttctgggcaaacaacgacaaaatccatcgcaatgtcttccaacttccattctggaagtgttagtggctgaagtaatcctgcaggtcgctgatgttctgctttaatttgttgacaagttaagcacttagtgacgtatgtcaccgcatccctcttcatcccataccaccaaaagtatggctttaaatcttgatacatcttagtagttcctggatgcaatgagtaacgggtagtatgagcttcatccaaaatttctctcttaagctcggtgttattagggacacacactcgtgcttcaaacaataacattccactgtcagaggttgaaaagtccttagctttgcctgctaagacatcttctcgaatcttaaccagttcaggatcttctaattgagccgctttgattctttccaacaagtctgactgaagtgttagattatacaatttcccagtcaccaactcaatgtttgctctgacatctctgaggctaactgaggagaaatcatgatcatattgaatacatgatcaggtccttttcgacttaagg

SEQ ID NO: 371200 - DNA, 675 bp, Cannabis indica
ggcttagatcactgaaaaaagaatgtcccctaacaaaaagagacacaactgctaaggagtctgattcaacatgtacaacagaaatttgaagaaaatatcctatccaacgttgttaaaattgtcacacattttgcttaaattactgagaagcttttatcttccactcactcctaagttaacaaacgatgtttcttttacttttttcaaatatttcaaatgaaaataattagatgattcaaaactgcatgaaatacaaagaaagctaacaactaataaaaattattaaaagctagttctaatgagaatgaaagtaccataaaaaaaggacatatctgctaaaaatttcgttctttagcaaaataaccatatcatttaagtcaccaaaattctaagacttccattttaataactcgataaatactcaaaaattaatacgaagtccaaatcacaatacatattgggataattgcataaagcattattttttgttaaaaattttacatttttacgtggaaagtattttttttttttttttttttttaattttacggtttttgaaaaaaacaacacgaaaataataagaaaattacataaatataacaggaaaataatatccaaataacaacaaaaaataacatacaaatacaaaaaatcaacaagagtacaacataaaaa

SEQ ID NO: 371201 - DNA, 737 bp, Cannabis indica
atcttcgtcgttgaatgttatggttggctctcctgctcgtggaactttgggcttcctttcttccacggccaggatgacttcttcttgctcgtactgagctgtgcgggcatatcgttcccgagctttgcccgtgtctccagcgatgtgcgggcctccaatgatgacttgcaagtgtccatctattggcggaggcatcagatcctggttgttctgaccttggttggccttgacatacttctgtaggtgcgggttgttcttcttgatcagaagttctatctcccgcttcaggttgtagcattcgttggtgtcgtggccgtagtctccatggaaccgacaaaattttgtcatgtccctcttgctggtatctttcttcatgggcccgggcttcttgtacggaattagcgactgagttgctatatacacactttctatatcctcagttaggatagtgaatgcagtgtgtttggcgcgatcacggggagtctgtccgggtttttcggtgaactttcccttcttcccgttcccttgcttgtggttgttgcctgaacgcttgccacttgagttgctggaatattggggaagctgggcggacgttccagtagaaggagccttcgttttgttcggcttttgctcaccttctgctcgctgaatggcttcttcgagcttgatgaaaccttcggcccagtcgaggaaatcactcattgagtcgaccggtccgttattccttatgtccttcc

SEQ ID NO: 371202 - DNA, 653 bp, Cannabis indica
tcgctcttcattcaaaatctaaccacaagtacgatggtggtacagactcgtaggggcctggttgatccgacaagtccacaggcggtggatcctgcattgccgaacccaggaaacgcaagggttctgctggctgttaatcttgaacagccatcgaacgtagatcatggtgtgacgactcttgcagataaaatcacgcatggtgtgcaagagactgggaataccagttcagcacccagccagggcattcataacacaaccattcttcttactaccaacatttgaacgaccattggagatgatactgagatccaaaacctcggcgctgctcttggactcatgcaaggtcataccaacaacctacatcatgatcaggaggaactctgcgctacggtaaatcttgcattcgaggaacaaagacgcatgtttgccgagtggagagacaaagaaaggaaagcgtcaagagctcatcatacttaaattgaaaattgtagtcggcaagccactgtgttcatacgagaagcctacaaaactgtcggacagcaacctccgaatgtcctcccactgggtgagacagacgaagatccagcgatgaatcttcccaaactataatggtcagccgccaaatcctcggtcacaagttccgcttgtgggcc

SEQ ID NO: 371203 - DNA, 773 bp, Cannabis indica
gaacctctataaaattctcatgtatttatttacttcattatattacatatacatcatactacttctcgcttacaatctagactcactgtcgttggacaaaagcgaggtcaacaaaatccaaggcatatagttattcatgattatagtgttatcaacacattggaatacaattatgattacatgtttcaatgtttatatcttgtgatttgttagtacattggatttacactgacatgataatcaacgataaagcctacttacaccttggataagtgttatgtcctttccaggacattggtaaagtatgctaggatcggatgtatgaagtatacattgaactggatcgatattaaacttggataagatatcataaacttactgttaaatctatccaaatcaatatcggttagttgatcttaggtcaatagatcttaatcttgatatggttagatttgatctcaactatgttatttatgttattggagttgttcgttaaagttgaccaatagattggcccaatacttacatcttgggaacatagtagtgcaattgagtgtgagcagtgacggacccagaatttttgatctgtgggggcttaattgttataaaaatatttattatttactttacattaaaattataactattttgtgggggctttttactattttgttgtataataatttaattaaatagaaaatatttaattttttttcacactaacttttttttgtgggggctatagcccccacaatcttattagtgtgtccgtc

SEQ ID NO: 371204 - DNA, 483 bp, Cannabis indica
tcagaaattttatcagtgctaatcacttcgaccaacaaaccttttcaaatttaaactttctcgccagaatatctgagtcgatctcaatctcttctagttcttccacaggtccaacattactgcatgagtccccaagtcgaggatccacatctttatccccgccttgggaacttccgtacttagaaatgttttttcccttctccgagctctggctagaggatacttccttcttatccttggctatggcaacgtataacattcccgagcaaactgctggtttcctcttagacaccctaccccattctttgttaggaacttaaggcatgagccattccgtgtgcgcaggggtatggaaggcatacccttgtgcaccaaacttgttttcttcataacttttgattcaaaaatcgtttttcattgaaacaaaaaccaatttttggtagaattttgtgtagaatctaaattttcaattaaaaatctaat

SEQ ID NO: 371205 - DNA, 865 bp, Cannabis indica
gaaaactagatggaagattgtcacagatcgtccacgttcgcttcaagagccttcctcttgtgtttttagggttctattctatcaccccttttataattcacgaccccctttcattaaatagagtttttcagcccaaaaatgagaaaagatgaaattatccttaacttgtacggagtcggcactgcggtggccaatagcctcacagcggcagctgtagaacagtgaaaaaaatgggattactgtagtccctcgccgcggccactggacccttttttttctgcttctatatctcccagtaaaatatgcataactttcacatacaaacttcaaataagctgatataagatgcgttgaaaagataaaaaagagatctaaaactttaatgttttgactttttccaaaatctgatctgaacatagtcgaattcatgcttgaagtttcagttttattttcttgcaaaattttctctattttatagatcaccatttttcgaaattcgaccaatttatacattccaagtgttgaaacttgaaataaagacaacaaacataattatattccaaaaataataacaaaaaaaataaacaactatagaaagtgacccaaaacttaagctaaaaatagcctaacacactacccgagaaccaattgcacgattccaaaggcaagctcgcgtccttccctcaccgattgcaacctccacaagtgcgtgaggttgggaacgccaatataaaacctcatgacaagccactatccaaggtcggaagagaaattccctttgtaaaaagtcacaaacaaaaatttaatgacatataagggttgtattgtattaaataatatcgcttgagataatattgcttataag

SEQ ID NO: 371206 - DNA, 585 bp, Cannabis indica
cctacaacgccatccttggcaggtcgtggattcatgcaatgaaggcggtcgcatcgtcctaccatcaagtaatcaagttcccctgcaagggtgaggtaagggagattcgaggggaccagttgggggaccgcgagtgttactcctcatctttgaggaataaaaacaagttatagcaattaatcaactcctcgaccccggcgagagaacaaccaccggcggtagaggagttgcaggaagtacccatacacccgacgaacccaacaaaaacaacctatatcggcatgggacttacaggagaccgaaagaatcaagtcatagaattattaaaataatatgtccaagtatttgcatgggatcactcggacatgcccgggatagatccgaccataattactcacagattggtgtaaaccccgaactacatcccagtcaagcagaaggggcaaaaaaatgggaacaggtcgaaataaggacagtaaatgatagaagttgcaaaaatgcttaaaaacaataccatcaaagaggtacaatatccaacttggctcgccaacccgtgtagtacccaaaagaatggaaagtgagagt

SEQ ID NO: 371207 - DNA, 575 bp, Cannabis indica
ataataaacatttatcttttaataaaaaatatttaactgtttatttttataaaaccgtttaattaattttacgaaattatttattttggaggtttaataaacatattaaaaatgtatggtttcatgtaataaattttcaaaatgtataaatttttaaaaaaattttttttgcacattttttgtaattattttatttttgttgtacatttatgaaaaaaagccctaaaatttatacaaaacttaagaagtaaatactattatactaattcacctaatagttgattagtaatgagtatacaaatgtgcactcatcacaccgcaaaaatttgaataattctacaggacatctttaatacagttgtttatgtatatttctttatctattttggcatcctgaaaagtattttagtcttttttttatgaccaaataaattgtagttatttaaaattatctgtaaaaaaattaaaaaatttaagatgtttactgtgtcaaaaataaagtttgaatatttgttgcatgtgtgattgtttttctttatatatgtggtaaacaattgtttgaattttattttttg

SEQ ID NO: 371208 - DNA, 590 bp, Cannabis indica
ctctgaccgaccaggccttggaacatattttttagttcgtccagctgtgcctgcacggccgaactaacctgttcggcctcttggccggtctgagtgacattagcatctttttgagcgagaatttgagcacaggtttcgggctgcacgattggtgtatcaagctgatcgtccactcctctcctcctgttcaaatcatttctgagatcatgagtcttcctcaacctatcaaatacggaaacgcttggctgtctcagtgactggttggtttggccaatttcatgaccggcaccattaacttagttggagttattgggtatgacttctcccgatgaattactagatgttgtcgagtgaatttcgcaacaccaaattatattgtattattaataacaagaagaattttatgtgtgaagacaattgcgagtattcaacctggaatggcgagtactcaactgggaatgggaaacaatcaacgaaagctggaaaataacaataagacagagaattatagttgttcagtcagattatgatctgcctagtccactgtagcaagggattcttaggtgccatttcatggtggatcacccctt

SEQ ID NO: 371209 - DNA, 346 bp, Cannabis indica
caaagtggggcccacatccatggccggccacttatgccctattttaccatttattttatcaattttttaatgccaaataattcaaacctaaacctagttggattcctataaatagatagtgatggcctcaaattgaaagatgatgaacacacttgccttcagtcaaaattttgagccatcttctctatcttattcgaacccttcctctctctttctctcttcaatatttcgaaccctatagtgatagagtaagtgcccacacacatcaagtggtactcaataatagtatgtaagactgtgaagattccaattcaagagaaggagaatcagactcagatcttggtga

SEQ ID NO: 371210 - DNA, 882 bp, Cannabis indica
ataattactaaaatgagatctcaatcatttatctctattaagctaagcttgaaaaaatcatcatttcacttctaaatacttatagaagctacagattccatatctatgattagcgctctcacttaattatactatcatgttcctaagatgtaagtattgggccaatccattggttagctttaacgacaactccaagaacataaataacacatttgagatcgaacctaactttctcaagattaagatctattgacctaagatcaactaactgatattgcttagatagatataacggtaagtttatgatatcttatccaagtttaatatcgatccactctgatgtctactacatacctctgattctagcatactttaccaatgccctaaaaatgacataacacttatccaaggtgtaagtaaactttatcgttgattatcatgtcagtgtgaattcagtgtactgataaaccatgggacataaactttgaaacatataattatgattatattccactgtgttgacaacactgtaatcatgaataactatatgttatagatttaatagaatttatacattaaacatataatcatgaaagaaatcatgtgaaccatgcaacataaaatgatttctaatcttttattaattagtaaatctaattatattgaaatgagttttatttagggcataaaattctaacaaactcccagttgcatttatataaaactaaaagtgcatttcaattaatctcaaccccttgatatccagatcaagtgtagcatgtaatattttctttgtaatagaaatcagacaagttgtattcaatacaaccttcctccaccattacatttccttagtcacaaaatcattgatattgtgaaatt

SEQ ID NO: 371211 - DNA, 616 bp, Cannabis indica
attaataattaataaaaattaaagagaaaagaaaattaaggagataacaaataatattcattagaaaaattttagagtgtcccgccaccacctcaaatctctcatttatatatatatatatataaaaattttaattaattgagagattttgtaagatctaattaataaataaattaaataacaattttatttgataattaattataataattatataaatagttttgacaattatgggattgaaattaaaaatatggcattagtgaaagaaaagataaattgttgaataaaatggtaaaattgtagctggtggggtccactatgtatggccgaccacttaagctatttttagccattattttatcttttttattccatataatttaaattctaaactctagttgaaatactataaaaggaataagatgacccttataacctaattttcattctttgtcacacaactagaaattgagagcctccttcaatagctatttcgaaatccttctccctcttcttcttcattaaatttcgaatccctagtgaagagttcatgcccagcccactcatatcaagtcaagtactcaactatagtgtggaagattgtgaagaatcc

SEQ ID NO: 371212 - DNA, 530 bp, Cannabis indica
cttgatcattgcggcttaattgacttgagcttggaagggtacccattcacatgggagaaaggaaaaggttcaagtaactgggtggaggagaggctagataaagcgttagtttcttctgcttggcttcagatgtttcctttggcaaaattgtataatgtggaaatctctacttcggaccactgccccatcatcctagttccggaagcttactcttcaggtttgcatactcgctcttttcgatttgaaaatgcttggttacgtgagcctatgtgtagagaggttgttaggagcaattgggaagctttgaatgggagggatttaatggataaaattaagagctgtggggaagccttggaggcatggggaaaggattttaccgggaattttaaagaaagattgagcaattgcaaaagggatgttagaaagttaaagaaaaaaagagatgaagcttcggttaagttgcaccgtgagaagcaagaggagttgtttgagatcttagcacaacgagaagtttattggaagcaaagatc

SEQ ID NO: 371213 - DNA, 499 bp, Cannabis indica
tgtttcagaaaagaagcaccacggtaagtttgacaattccaaagggaatggaagacgtttcatccctatttgccatttttgtgggacaatgccattcttgttttaaaactattgctactaacatgtggtactttgatagtgggtgttctagacacatgacaggtgaaaaagaatatcttgagaacattagaccaatgcagtgtgaagaagttacttttggtaacggtcttgttggaaaagtcatagggataggaactctcaatttcgaagggctttctagactgaagaagtcatgttggttgatggactaaaagctaatcttcttagcattagtcaaatttgtgatcagggttatactgtgagctttgatagtaatcattgttatgtgtataatattcttggttaaattgtcttgcaagggttcagatctaatgataattgttacaccatcactacctatgctacttgtcactctgttattaacaccactgatttatgg

SEQ ID NO: 371214 - DNA, 831 bp, Cannabis indica
gctacctgcccgggacccttccttctcagggcatcaaccactacattcgccttccccggattgtaaaggatttcacaatcgtaatccttaaccaactccaaccaacgcctctatctcatattcaaatctttctatgtaagaaagtattagagactgttatggtcagtaaaaatttcacatctctctccgtagagaaaatgtcgccaaatcttcaaagaaaatactaccacagcaagttctaggtcatgagtcgggtaccgctgctcctaatctttcaactgacgagagccataggcaataacccgatcagcctgcatcagtacacacccaatccctgtctagaagcatcacaatacaccacggatttctccttattagaaggtagggctaacactggagcagtaattaatctctgcttcagctcttggaagctagcctcacacttgtctgtccacacaaaatgcttattatttttagtaagattggttaagggtgttgaaattttagaaaaccagtccacaaactgacgataatatccagtcgaacccaagaagcttctaatttctgtcactgtttttcggtcttggccaatccctgacggattctatctttcttggatccacattgatcccatccttgctaacaatgtgccaaggaaggacacctgagatagccaaaattcgcacatcttgaatttggcatacaacttatgttctcgaacccgttgcaaaaccatccggagatgttcctgatgctcctcttctgattgagagtacacaaggatgtcgtcgataaacacaatcacacagatatcaaggaaatccttgaata

SEQ ID NO: 371215 - DNA, 638 bp, Cannabis indica
ttttcggtgcccgacaacatggaacacggtgtatggctcattagaatcacaatttagtatttctagtttagcggggcagtattgttagacattgggaatgtcgggattagtcgggaatttagagttttcccaaactaccatttagtgctgtttaacccttttagtgtgggaggggcaaaatagtcattttgccccataagcctttgtcctttagtggacttattatttggtggttatgtgaattatgttatgtttatttggctgaagtaaataatcaaaaaccattttatctctcatttttacaaaattagaagaaaaacaagaaaagatcactccatttcctctcactctctctttctctctttcggccatcctagaacaagctaggattcttgtgtttgcttcctcaattctttgtttccagcagcttattgtataatccaagccaaggtatgatttatagcaacctcctctttaagtttccttgaatttcaagaaagaaaatagttgcatgcttggtgtttttgtgattttaatgggtgtgattagttgttgttgcattcagaggtttgtacatgtttatttgagtgaatttaaacagatttttttgttagatagttggatttaaccaagtgtaa

SEQ ID NO: 371216 - DNA, 514 bp, Cannabis indica
tgaaatcaattacctctggcaacactaccaccaatcaaggaagcccgacacttgtagcgtgagtctcatcaaagaagacagccacaagaatggtatcaacggaggttaatcttcagtttgctagggttagggtttgttgggcttggcccatgactagagtagaagagagataagtagtggaatgaaattataattccaccaaataaaaaatggaaaagtaattttatttgtttgggggaatagcattaatatggaattcttttccaaaattgttattttccaaccaaacaaaagaatcaggcccattagtattccattccattcctttctggcgcattaccatcaaccagacgggccataagtatacaaccattctatcattctaaaattttcctatcactagggtatatccctagaaggacttaggcaactgctagtaactaatcataaaccgtttactttcatcaatatgcaatatgaatttctagggaggtaagtttgaatacaatttgaa

SEQ ID NO: 371217 - DNA, 715 bp, Cannabis indica
ttacgctgtccggccatgccatgaaacatattcttcaactcgtcaagttgggcctgtacggctcggctgacttgctcggcattttggtcgatttaaattacgtcagcgtctttcttagcagggattcgagtatgggctccgggctgcacaatcgttgtagtattttactcgtctgttccccttcttctgtttagatcgttccttaggtcatgagttgttcccaacctatcgaacacagaagagcctggttgcctgagcgattgattcgcttggttgacaggtggaataaaaccattattctggttggatccgtcaggtatggctcctcctgacgaattcttgaacaaggtctgcccgcctacctcttggcccacgagtggaactcgtaatcggggattggatggctgaccattggttgtttgggaggtattcatcgtcgggtcatcctctgtttctcccaggggaatgacgtgcgatgtttggtgacctacagtcttgtaggctcttcgtatcagcacggtagcttgccgactacgatcttcgatctttgcatggtgagcccttaatgcctccaacccctttctctccattcaacgaacatacgcctctgttcgtcaaatgcgagattcactacagcacgcagttcatcttgatcatgatgcagagtgttgctatgctctgcatgctccgagcgcagcacagagattttgcaatt

SEQ ID NO: 371218 - DNA, 587 bp, Cannabis indica
gaaaggccagctttttctcctcaattttctagaattaagctaaggattaagtgttcttgaagtggaggtaaaccctagaacccatgaatttgtattttgaagctttttctttagttgagtatgtgattttgtgaaaagagggctgttagggttaggttatgttgcaattcaaattctgggcttagtttgagttgaaggtagtttctagcagctggttttaatgtttgatttaggttttgtgcaagtttgagcatagaaaccttaactttgttctttaatggcatgtttgtttatattgagtttttttgggaaatactggttggattatgttgtatatgcattgtataggtgttcttgaaggtttggttgcatttggtggaggattgagcaagaaataaaaaatttggggtgaactggtgcaaaccggctaaccggttttggtagggtcctcgaatgctctattttctcaattctcgtccatttcagtgccgtagttgggtgtttccctatttcctgagttagtgtaatccctagagaatataacagaacctagaattgtaggttcgggtttcccaagattagggttt

SEQ ID NO: 371219 - DNA, 702 bp, Cannabis indica
tagggcacaaaacccaaaagtaatcaccagatcatgcctgatctttacattcaaacaagccaaatacttctctttcttgctaaagtcagttggcatgatacccacggcgagcttggtcagacagtcaaactttgtagtatactcagtaaccgacatcccctcaatttgcaccaactcagtgagctctttccacttagcactgcggatgacttcattatagtatttagagttaaacaactccttaaattcctcccaggtcataactgtgatgtcccgagcgagggttgtcaactcccaccacacgagagcgtcctcctggaactggaaagtggcacaggtcacccaattattaccaaccactcccataaagtttagaatacgcgcaattgctgtgagccactgctcagccttcaacgcatcaggacctcccagaaacactggaggtgcttgcttacggaaccttttgtacaacggctccataaggttgccaacaacaagttgttctgctggcaccgctggaactgcaatggcctgagcaacttgctgaggaggcacggcaaaaggacccttctacctcaacctctgaatttcttcttccttctggcggattcgatcttgcatttctgcaaacctctgctcccaatctgaaggtgcttgtggtggatttacaggatgaccaccctgagctctgccacggccacg

SEQ ID NO: 371220 - DNA, 871 bp, Cannabis indica
tcttacggttcttgtttaagctccatttttgggtacaaggtttgggtcagcggtcgggtttgggtcctggtctgagtcccaaatctagttcgggaccaagattggggtgcggttctaggtcccaggcccaagtttgtgtcccgagtctggttccatgtttgggtctgagttcgggtccaggttcggcatcgagtgtaggtttgggttgggatctaggtaggggtttctgtttggttctaggtctgggttggagtttgggtactagttcggttatagttccaagtctaggtgcaggtctgattacggttccaggtcaaagtccaagtcctggttccgaacctattcccgagtcctagtctacttccagtttcggttctaattttggctcacaaggtacgggttcgggtccaggttgcaatttggggctgggttgaggtctgcgtctggtttcgggtcccagtctaggtttgagttcgaggctgggtccctgatccaaacaccgactacgggttcggtccaggccccaggtctagatctggatcttgatctcgggtctcggtcgggttccatttcgtgtgtcgagtcacgagttggttcttagattgaagtctaggtttggggtcgggtcttgggtccctgtcctagttccgttgcccaagttcgtatctcgattcttggtctaagtcccagtttgggtcccattctaggttcaggcatgggtcctagtcgtggttcaggtttgagtctcggtctgggtttttatttgggtttgggttcgggtctgtgtcttagtcctggtcctggtcctagtcctagtccagttccagttccaattgcgtttcagagttcgagtttgggttcgagtttgggt

SEQ ID NO: 371221 - DNA, 569 bp, Cannabis indica
acaacacagacataccatataattaaataggtcaataagcacctttttaaattattttaactgttttacccttctcgggtcaaaattactgaaatgcccttggctcaccaacgagttcttaacatatcaaatctcatattaattcacatatactaaattatataataatataacttcacaataatactcaatcaactagttaggattttgctaatccattctcttaatcataggctattacaataaccttcctctataggaggaagggatacctcggttatcttagagggaatgcgttgttgggttttgtgccctaaataaaacacatttcaatataatgagatttactaattaataattatcagaaatttcattttaagttgcatgatttatttcatgattgtttaacgtataaattctattaattccatgacatatgtatttgttcatgattatagtgctgtcagcatagtggaatataatcatgattatatgttcaaagttttaattccctgatttgtcagttcactggatttagacttgcatgataatcagcgataggtatactt

SEQ ID NO: 371222 - DNA, 615 bp, Cannabis indica
atcgaccccacggtcagcctcttgatatctttccacagttctccaagtggcttaatgcccctcagcgtagcggctagccttcctctttggtcaaccccttaactttggtagcttatgtcataaatctgcttatataagctctgaggggttcccttggtatagttttacctcgactaggtcttctagatgtgagggaagttgacgggagaaggaaaactgtgcgtggaattctaaggagaaagcattccacaaattaaacctccttggaggcagcttgaagtaccactgctgggcggcttctgcgagtgtaacagggaatatcctgcatcagatatcacctcgtaccacttgcaatatttcagatgtgataagggatcctctttccccatatacatcttccaagttggcatcttgaattatggggtaattcaaggaattcaatctctggggagaagggtgatccgcatgctcggtcaagtttgagatcagtgagttttgggccagtcaagccttgtaccatgtttttaagttgatccagctgtgcttgcacaaatagatgaacttatttagcctgttgatcggcctgtgtcccgttaggtgttggaaattatttta

SEQ ID NO: 371223 - DNA, 617 bp, Cannabis indica
taaaatggaatagtcattccacacaatggtagaaagattattccattagaatgttattctaatactttaaaatgcaaccaaacaaatgaatgaaatgaaaattgattcatttccattccattctatttcattacctccaaccaaacgtcacctagagttttatttagttgataccatattaaaatttgagattatatgataaggtgtatggtgttatgtttcaaaattaattggtattgagagatgagtggtttatgtatttaatgtagaacaattagtaattttagctttgaattttcaataatattaattttgtcccttaaaagatagggcttcttaaaaattctctcttaatttttacatttaaagaaatttagttcttctgttaggttacatcttatttaaatgctgacgtgtcttcgtaaattaacaattttgtcacctaattttgacaactatcaaatcgcatctccttaaaataaaaatatgaaaaattcaacatttttttagtaaatcataacaaattaatttagatcttaaaaaatattattttaaatgattaaaaaattaaaaaataaataaattataaattaattaaggtgccgtttagtaacact

SEQ ID NO: 371224 - DNA, 547 bp, Cannabis indica
cattggtgttgtgcctaatgttgttatggtactcgcatctcttgttgggatcctccgggagctgtctttgtacaaaggaggtggtctctgatagtgcgtattttgcctagtagcaaagtacacacgttcttgggagtccgttaactccgtgtactgggtatattgaggagtatacccctttttctgtcgtttttcctccgtccgagtgctgcctttggaggacctcttactcctcgagccctgggaaggaccggctaagctgactgtcggagcacagtgcgagggggcttgtccatttatccctgacagatttccaaaatgggacgatgctggggccacggcctagccttggctatatccgggagtggcagagaactgtatgccactcatcggtggagctgctgctggcacagtgcccgagggctgggctccgggcacatatcctgatatcccgatgggataatatcctccataggccactatttgggtctcttcgaggttaatgtatttttggactctcttctggaagtcctgaaggtttgcagct

SEQ ID NO: 371225 - DNA, 497 bp, Cannabis indica
taatataatcactaaaatgagcgttctatcatttatctctatttagccaagctcgaaggaaatcatttgtttcacttttatgtccgattagaaactatggattccgtatctatgagtagcgttcccactcaattgaaataccatgtccttaatctatatgtcacgacaagatccattggtcgactttaacgaatagattgaagaacacaactaatataactgaaacagaaccaaaccatctcaggattgagatcatttgatctaagatcaactaggtgatattgaattgaatagatattacggtaagtttatcatatttaattcaagttcaatatcggtcccttctgatgcattctccctacatccaacccaagcttactttaaccaataccctagaatggacagagggcttattcaaggtacaagtaaactacattttagattatcatattagttaaagcttgtgtactgataaatcgtaggaatacatttaatca

SEQ ID NO: 371226 - DNA, 510 bp, Cannabis indica
tgacactatatagtgacacacatgaaagtgtgggtcactaaaaagttaagagtggtttttagtgacacacactaaatgactctaaatatttagtgtttatcacccaaaatgtgggtcactaaaactatagagtgtcacttaatactaaaactcaaaatttataattttataaaaataaaaaaaaaccatgacctatagagacgtgccacgcgtgtgagcaaaaccctttgccaacacattatgcgcgtcactaaagccacgtgaacatgtggctttagtgacacgcatagcatgtgggtatacacttttacatacacacaatgtgtgtccccatataggctcatattaaaaaaaaaaataaaaaaaataataattataatatgtcaccctattttcccaatattattataattatataatttgaattaataaaaaaaaacgtgtaccatcattaaataataaaataaaacctaatatattctcttacacaaccctaaatatcaaataaca

SEQ ID NO: 371227 - DNA, 496 bp, Cannabis indica
aaataccttaaatattgcaaaaaatgggaaaaaatagggttccctaaaatgccccaactggtagactgattccccaatcaaaatttaaattcggaggggtttcctgggaaccaaccggaattccggttcctataggcccccctgaaccggaattctagtttagtgcaggaaacacaaaaatccccccacaaacttcaattcaaccccaaacttcacacaaacctccagaatacctaagtacataacaataaggagaattcatgcaacaaaaaccagaaataatccctaaaacttaaaacaccattaaagaccaaaagtttgagttctaaaactcaaaccttgtccagcaataatgttggattttgtgccctaaataaaacccattgcaatctaattagttatcaatataagtgatttatgttaacatgtatttttcatgtttatggtttaatatatgcacaaaatcagttaagtccaaaacatatattcattcaca

SEQ ID NO: 371228 - DNA, 853 bp, Cannabis indica
gggtcgcgaatcccgtattagtatccaagtcgaataagaaatggtgagtctgtattgatttcacagacctcaacaacgcatgccctaaaggctgttttctactaccaaggatcgatcaactcgtagatgcaacaacagggcatgaaatattaagcttcatggacgcttactcaggctacaatcaaattaaaatgcatccaccagaccaagaacatacaagtttccgaacagatatgggtctatattgctacaaagtaatgccatttggtttgaaaaacgctagagctacataccaaatattggtaaacaaaatgtttaaagactagatcgagtgaaatatggaagtgtacgtggatgatatgctcgtcaaatctagaaaggctggggggcacataaacaacctggatgaatgcttcaaagtccttaaagtgttcctttggagtcagctctgggaagtttctaggcttcatcgtcaatgcctgaggaattgaagctaatctagagaagattcaagccctcctagatatgaactcgccaacaaaaaccaaagaagtgcaaagcttgactggtcgaatcaccacgctcagcagatttatttcaaaatcaacaaataagtgtgtcccattcttcaacatcctgtgaggaacaagcagttcgagtggacagaggaatgtgaaaaagctttccaagatctaaaggcacaacttgcaaaacctcctgtactctcaaaacctctggacggagaagaacttggaatatacaaagctgtcacggaacatgtcgtgagtgtcgtgctaatcagagaagagaacagcatactgttgggttttgtgccctaaataaaacccattac

SEQ ID NO: 371229 - DNA, 456 bp, Cannabis indica
aaataaaaaaataaagttatctttaaatttaaaatatattaaatatcaaaatatctaatcttataattaaataatatataaatattaaagaaattaacaaatttttaaatctgaccataattggaaatatttaaaattggaaaaaatcgaatttttgggaaaaatcccataaaatcggatttttgggttgtcaaaatcgtggctgcccaagaggctgcaggtgcagcccaggaaggctgcaagcagcctcgggcgcgcgcggatagagggcacccagcagaggtttctcggcatctgcagggtgaacgtgggcgtgacgcacgagttcacacgcgcgcgtctcctgcttgtccgaagcacctggtgcatgcgtgcacctaacttcgacagccatggcttccaattttccaatattcataactttctcaatttttatcggaattaagttccgtaaaa

SEQ ID NO: 371230 - DNA, 256 bp, Cannabis indica
atatataataaaataatttatcatatttttaattattacataattaaaataataaaataaaaatacttgaataatataaaattatttatgctaaacactaatttaatcactaatttacaaatattatttttctaaagtattgatataaattaggggtttttttatttttacacttcaaaacagttttttttttttttttgtatttttgcaggattctacattgaaacccatattatactagctgaccaacctaaat

SEQ ID NO: 371231 - DNA, 921 bp, Cannabis indica
aatgtataaaattattaaattacataaaagataaaatattacatattatttactattcaatatagtaattattatacaaaaacacaacttcaaaaattgtaaaaatgatattaatatactaaaaaaatacaaacgcatatataaaatataaaatattaataaaaaaataattaataaattaaacgggtccccgtcggggcggggagtgtcatccccgtccccgccccgtttaacattcggggacaaaatttgatccccgtccccgccccgttccccatttagacggggaatccccgccccattaggggcgggtccccgcggggccccatccccatggggaaaatgtgcatccctactcctgactctcctccctgccttctggtttgatgaggagacaaatatcttttcttgagcaggtttatattgattaagtgtaacttttgtcaaagagatcatattgtgaatgcttggatcttttttattccatactagctatactagctcatttcttgttttccaaattactcaacacagtaccgcccccaactccatctcctctactttccacaactaaacactattttggctaccaattcgcaaaagatccctatgcacttgctcgagctgatctcaaaattgtgtcaaattttgtcaacaataaatacaaccataaaattattgtgtcaaatttaacacaacaataaatatgattttaattataattttaccactaatattaaaggttttaatatctttttttaattattataactttatttaagaaatcacacaatttaatatttaatttatcaataattatattaataatattttactttcatatttttattttactatctaaaataaatattatacatctcactataatatatttgtttattttcttcatgttaaatttag

SEQ ID NO: 371232 - DNA, 1042 bp, Cannabis indica
tacaacttcatccgagctcaggttcgctccttttcagcttttgcctttcctttacctacacatggaagcagaactgtgagtcgacagactcagtaagaaaagcatataacatatcatataatttccgacttgtatttaggcaatcatacacctatttacaaggctcaacagatgagtaagaatgttcaatactagggtatagccactataccacatacactacgtaccttactgtacgagtgttgctagggtttgtttcataccctgagtacctctgagtgatgtaccacacattaccagtactcctccttacttatgttggtatcacggtactctcagataacattcactataccaatacattctataccttaactgtataagtgttggtagtgcaactaacacattaagcatgcatataaacataacatatacatacactcagatattgatatcacacattatatacagttcttaccttctttacagattcaagtgtgctggccgacctgaatggaaagtctcgtgctagatggatgccctaatcacattatgaaaccgagtaagttacatgatcaaaaccctaatcctgagaaactcgaacccataaccctaggttctgttatactttctatgggttaatctaactctggaaatagggaaacacccaaccacgacacggaatggacaagaattgaggaaatgaaaggcacgcggaaccctgccaaaaccggctagtcagttttacacgtatggttacccaattttacacgtacgtgtaaaactggttacccggtttgcaccagtccacccaagaaatttcatttcttgctcaaaactccaccaaacgtcaccaaaccttccaaagtacctaattagggtatatataatatatttcagccagtatttcacagaaaaatccaatgaaactcaacttgccattaaagaccaaagctttgagttcaaagctccaacttgcataaattcaacacaacaccactaaatcagctactagaagttaaaatcaactcaaatgaaccct

SEQ ID NO: 371233 - DNA, 1190 bp, Cannabis indica
accactataatcctctgtcttattgttattctagttttctgttaagcatctcacattcccagttcgagtactcgccattctaggttgaatactcgcaattgttcttcatataattttcttcttgtcattaataatatcatatacatttggtgttgtgaattttgctcgacaacatttggcgccgtctatgggaaattcagaattaaagtttcattcagttcaagtaagaaaatcatcatggctggaaaccaaacaaacggaggtgcgaacaacgagtccatcaacatcggaatgatgaacgtgccattatttggagctaggacgccacctgtggatgtcgttaatggcggagtagggagaggtaatattagacctctcaatctattccctgaaacagctggtcctcaagtcggggaaacgtccacaccaccagcaacaatgcactttccacctgtcactccggcggtggtacttgagggaatcatccaactcaccaccgaccaatatattgcgatccaggatcaactgcgcacactgtaggccgaagtggacggacagaacagggcccgacttccccctcgagcccctactactcgcacagacaaccgtcaggtaacgaactctagacgtcgtaataatcatgttcgcggggaacgaagaaccaatcctgaaggtctggacctaaaccagccaacctcgagagaccaatctgcgaggtatcctaaccaggaaacacaggttgatgaagaccctgagcgacgtaatccccgcagccgaccatcaagagataatgacgcagaatctgcctcttcatcctcgcatggtcgtacacctagcagatacacaaggtccggttctgtgtagacgtaacagggaggatgttatcaagttcataggggcgatctgcgtgatcacctcaatgcggttttcagagcgcgttcccacgcccctcgcggcgaggaaacaccacgtgatccccccgtgggtgatcaaggtgtaaacactcgcactaacccgcctagcgcaccggcaacgactactggagtcaatatcccagcaaacctcgccgcagtagtcacgactcctgcaatcacagcagtcccgactcctgtagctggaggaatggaccaaagcctgcttttgcaagctttgaagatgctcgagcatcagagaaagcccatatacaagtt

SEQ ID NO: 371234 - DNA, 831 bp, Cannabis indica
caataacaattctattttaacataaaaatcaattgtacatcaactaatagtgtataaaatatgaaaggaaaccaacaaacaacaaaaagtatgaaccatgaaaaactaaaacataaactatttttctcttgattgaacaattatatatgaaaaaataaaataactagataacaacttcatattaatacgtaaattaattaattaacaacgcattgcattaactcaaaagaaattcaaaaattactgataaataatctttaagaaaaaagtaaaagaaactacaagatactagtgcatcaacttaaaaaaattatatacccataaaaaagtaaacatatattcatttaatttttttacgtagttaaacaactaaataacaacgagcagataattagataacaaccctatctaatatgaaaagttattagacatcaacatgtggtgttaacttgaaaaacacaaataatcttagaaaaataacacaacaacaatctttatatatgtttccatgtaaaattaaacatatatatatttagtttttcttaattgaacaactaaataacaataaataaataaatatataataactccactgtaacagaatatttaaatagcatcataaaataactccaaatacactgctcaatcattaattcatgtatagtggcttcaactttcttaaaagactttgaaacattttcttgtacactttcaatgtttgcaactcacttcattctaccaaaggaatagaaatgaacaacaagtctattctgatcaactttgaagttcatcatcactagaaatcaagtcctgcagcagttaaaacaacat

SEQ ID NO: 371235 - DNA, 596 bp, Cannabis indica
taaattacttattttaatatcttaagaagttactaaatttatcattttttagtagttttgcgttttatggtaggattaagatagattcaagatatttaatattttttttccatcttagaaacaatagccctagccgctctatttatcaattagtgcctctgactttccacttttcttcttttgctaatcttgattttttggaagattgatgatttctccacgatgcgtagtgttagtcgattgagaatctactgacttgctccacgttgcgatcagaacaaagacatgagaggagaacttccacatcaacgtcttcttctgtgaggggttcaagagcagtcgtctgagagtggttcggtttggctcaacgacgtcatccgtttaagatttttgtttttatttattaatttactattattagtttaattctaactaatgtttttatggggttagaattataaggagttcattcttaattaattttaatgttgtgatcgtgtttaagtgttgaaactaatttagtttgtccattagtcttgtcttttgacatggttctttagtcttgtcttttgacatggttttttagtcttttcctt

SEQ ID NO: 371236 - DNA, 703 bp, Cannabis indica
ttactccatagttgcagatcaaagcttgaagatgttgagttcagactgaagggatttcagtatcatcttcatcaccagatctgaagggagttcagattgaagaagtgttgaagagagctcatcattcacacaaggggatcttgtgtctccaatcaagggtcttggttggtatgggtatagattcactgtattttgtaaaagagtgtattgtttacaatattgttggtttttgtaagatacatctttgaatatagtgaaagttattaccctggttcggggaacccaagcactagccgcctagaatgagtttctagggcaggtgaagcttgtaaaattctggtgttgaatctttgattttgttctttttatattcaagcttaaatcaagataaaatcaatctaaatatgaaaaagataggttagacaagaacttggggcttacaagcttactagtattactcggtatattcacctcctcgctttttcctttttgcagatgcattatagcaattattggggggggggggcgtgaacaccgagtagacgaggatcttcttcaaattttgtttgaagattgtccagcgtcgcccccacacaactcatctggggacgaggggcttagtagtgtgtcagagacgcccgaccacctctaccgagagagaataggtggtgaagcatacaacagacacatttgggagcttgaa

SEQ ID NO: 371237 - DNA, 755 bp, Cannabis indica
tcaagagaagcagacgctgccaaaggcgatgggttgaggagctacctcagctgctctaggcccacagaactaccgaaagacagctacgggacacactccgttctcgttagcatttggcttggaagcaatgcttcctattgaagtgaacatatcgactcacaaaggagagttttataatcaagaagaataccaggaacttttaaaattgtccttggatctacttgaggaaaaacgaactgaatcgtgaatcaccaacgcagcataccagcaccgagttacaagatacttcaacaaaaatgtcaagaaaagactattcaatgttggagacttggtgctaagaggagtctttaaaaatatgagagatgcatcagcaggagtgttcaacttgaattgggagtgttatagtgagatttcactcacctagaaactcgagaccagactcctgttcaaaagacacgtgtactcaaatttccaatgaaagctgagacgtccgtgagagactcctcgaagtttaaacctcgtccaagatagagtcagcgagatactgcgagtatgaccaaagtctgattgcataactgtaactcgtattatgcgggatgagagaatggatccaactcgcatgtatcgggatatgtgcgagtatcctctctatactcttacgaaagtatagagatcgattctctataatgcgggttggtctcaatgacccaacagccttgataaaccgatataagactcgcatgtctaggttctat

SEQ ID NO: 371238 - DNA, 907 bp, Cannabis indica
tgtttacttattaacactccagaaacagatgaaagtccactgggatggtcgttttcctgcaacaatcactgaaaaggaacctgaattgtttatgaattgtttatgatctccttcggctgtgaaggcgataaagaaagggtccttatacaaaagtcatggcattttcaaaaccaccatatagttctttatgaacctactgctcttcagaatgtctcaccaactgatcttaaattctcacccttttgggtacaagtttatagattacctttccttagtaagactcggggtctggctaaggctctaggtaacataattggaaaatttttagaagtttacactgattctctgcacgaaggatgggggctattcttgcgtattcgagtgaaacttgatgttactaaaccattaagaagggggcggaatataaggttgcagcaagttgaagacaaattttgggtagaatttcgttatgaaaggctacccgaatggtgtatggactgtggttgtcttggccacccttaccagaaatgttcaacctttcttgaacttgtggataatggaattgatccggaactcgcttatggaccacagatcaaaggggctgctttaccaacctcaggttatgataggtatcgcactgacttttcgaaaggcaatgcttggcctttactaactcagctagtaaggaaaaccatcacaaatccattccttccatatccttacgaaaccagccacaaccaagaaaacttctttatggagaatcctctaatagtcaacagcaaatccatgaagacacaaacaatcaagtggttcatcgcccacaatcacgttcagaaactgtcaacattgaaagcagtattcctttttcctttacaccagcaacactgtcttccgcatctctgttacc

SEQ ID NO: 371239 - DNA, 460 bp, Cannabis indica
aattaccaggtataccacaagccacaggtttagataatcttagacctttgataccatgatcgaaaagtttttattaagtccattgaatagacttattatcaaaatttccctttttgtccttgtaatagaaaacttttggttactccacttgaatagttttaaccatagttcccttagctttgcctcatagttccttattttgactatccattacttgtttatactaacaatggatttttatcacaagtgtcttccaagtcataacaaggtgagttccttgaaaccctctcactacgacgaagtaccgtgactttctgtctaggaatattaatgtgttggaaattattttaccaggatcttagatctactcacaagtatgtttattaacatcctaaataagaattttctaaaacgataaattaaacacatataaagttgaagaaaccttacattgggtgca

SEQ ID NO: 371240 - DNA, 542 bp, Cannabis indica
tcaatggaggttactttagacataaatctcctaggtagaactccaaggactttacgaaccagctttgcatttgaataaagctttcccaaagcataagattcatttgatatgtcacacaatttagcatggaactcagccaccgtttcttcttcctccattgataaatcttcaaacgcttttgccaaagcacgaagatgggatttctgtacagcatctgttccttcatttttaattcgtagtttttcccaagcctcttggccatctcacagttcgcaatgaccttcaactgatttgtggacactgcattgaatatagcatgcatagccttcaaattaaaattggccctcttcatctcatttggagtccacaagctcataggttttggtttcgtgacaccattatcctgttggaattaattttaccaggatcttagatctactcataagtatgttgatttaacaacctaaatatgaacttctaaaacgataaactaaacacataaaagttaagaataacttacagtgatggcagcggaattaagt

SEQ ID NO: 371241 - DNA, 738 bp, Cannabis indica
ccaatgtagtggctgatgccctgagcaggaagggtcccgggcaggtaactagtatggttcagatttcacctcaattagcagaggatgtggttagataaagcatcgagtttgttgtaggaaaacttcataacttgacgctgcaatctggtctgttagaacaaattaaagttgctcaattaattgatccagagttagtaaagatcagagatgaggtttcagctggtcaagccagagactttacagtgtcagatagtgggatgctgttgttcaagaccagggtttgtgttcctaatagtgcggaacttagaaatgaaattcttgaagaggctcataccattccatattccctgcatcccggaaccaccaagatgtatcaagatcttaaaccctacttctagtggagcagaatgaagaagaatgtggtagaattcgtatcgagatgcctaacctgtcagcaaatcaagactgaacatcagagaccgataggtttgttgcagcctttaaccctacctgagtggaagtgggaagatatcacaatggactttgtggttggattacctagaaccacagttttatttgattcaatttgggttgtggtagaccaatttacgaaatctgctcattttctaccaattaagacaactttcttaatggatcaatatgcagatttgtacactaaagagattgtaagatttcatggtgtgccaaagtccatagtttcggatagagatccgaagt

SEQ ID NO: 371242 - DNA, 626 bp, Cannabis indica
ttcaattcctcgggcattgacgatgaagctagaaactttcccaagctgactacaaaggaacactttgagggatttagattcatattacactttctgaggaccttgaagcattcatccaggtcgtctatgtgccccccagcctttctggatttcacgagcatatcatccatgtacacttccataattcgtccgatctggtctttaaacattttgtttaccaatcattggtatgttgctccagcattttttagaccgaacgacattactttgtagcaatatagacccatatctattcagaaacttgtatgttcttggtctggtggttgcattttgatttgattgtagcctgaataagcatccatgaagcttaatatttcatgccctgttgttgcatcaacgagctgatcgatccttggaagtagaaaacagtccttcgggcatgctttgatgaggtctgtgaaatcaatacagactcgtcatttcttgttcggcttgggcaccaatacgggatttgcgacccaagctgggtagaaagcttcaattataaaattgttgttgcgtagcttttctacttcttcctttaaggcaaatgctcgttctttgtccagtagcctttgcttttgttg

SEQ ID NO: 371243 - DNA, 533 bp, Cannabis indica
acattcatcacgcctttcataatgatttcagagataagttgagtaataattttttatctatctgtttattaaaaatactcttatattatattttattaaaatatatctactttataagtaaattatctaatatactcttactctctacttaagtctagcacatcatttacattaacttaaaaggtataataaggacatcatctataaaagtgagtatcttaaagaatatgaaagtaaaggtaaaaattaaaacatataaagtaaactagctatagaatgtaattttctcatttttatacttatttaggtctaatatgtgaaggtctaacccaaaacctactaattattttattattgaaacttgaaattatttttcatatttattttcaagttttatcgtatttttgacaagtgttgctcaagttttgttatatttgtgatagtttaattattggggttttttcaataatatacatgaaaataattttatttacaaaaatacctttaaaaaaattatttgcacaaataacgtt

SEQ ID NO: 371244 - DNA, 698 bp, Cannabis indica
aaactggcgcttagtatattagcaagaagccagatatcgctaaatgcaaatagcaaggcaccagagaaagtgacacatatcaaccatgaaagtccttagcgtgcaatgaacaaactaagtgtaaaagttggatcggctcgagaacaagtaagcgagaataccatctcgctatgggaagacttcctatagcttcatccagctaacgggagcgaggcttacaaccctggcaagtcaaaagaattctttgtaaataatcgcgatcgatacaagctatacattgtcgacctcggaaggaagaatggtcccagttcgctatctagacaactccagatagaacagttaaagacgtgtttaacacacgattattttgacccagtaaaagcgggaaaattaaagctacgcaattttcaaatgataaactgtatttacactacatgatatgtaatcaaatcccacgattttagggataattgttgtaatcatattccggtcaactttgtaaactgtccactatgtaattataaatagtgacaaacaagaccaaaaagggacgaaaaactcatacaagagagttcctgaaaaaacataatcataaattgaatagattgactcgtggactatgcagatttaactgcaaaactatgtaaaagaccatgtgttcatatatatttttctatagtcttttattttttctgtgt

SEQ ID NO: 371245 - DNA, 670 bp, Cannabis indica
ttatccacttgaaaagcatactcaactagtttataaattcgtaattaggaatatttctcaagaagactggataacaaacttgcaatatgttaaagtagtcttcccaaacaacacattgtgagtgtcccatattaataaaagaatagaaagttgatcactttataaggccaatgaggtatttccctcgttgccatatggttttaggatcggacctccttggacttgtaaagtggattctcttttcatgatgagcggcccaggctcgtatttaacataatattcagttatcaccatttggtgaagttgaatatactagttttacattagtaagtatactaattaatgtttcaccaagtttttttttggctaaatttaacacagggtgcctgaggtaattttctggcatataccaagcaaagcatacaagaaaactggctccaatatttggtattacacaaaccttgggtgggttcaatttataaagagagagttgctactcaagaagttgaaaatggtatcatggaacttcttgttcaaaggccttctgtcaagtaggagtgtcaatgggtcgggtcggatctgatctgactatgatctgacctgatccagatcatgtaaggatctgtctcgccccgcctcgctacgatcagatactcggatcggatcagat

SEQ ID NO: 371246 - DNA, 1171 bp, Cannabis indica
caaatacgagagacgcatttgcaggagctttaacccgaactgggagggtccatatgtcattgaagcagtagttggagttggagtttataaattggctcgacttaatggctcgctaataaagaactactggaacgtagaacatttgcgaccctattaccaataagtgaatgatgtaactcgcattactgatgtaaactttaaacttcaattatgaattaagagaatcatttctattaagtaattacaaagttttattctttaaaaattacttaaggggcatttatgtatgattaatcgaaattcttctggaagtacattgtataatgcaaacccatcatttcaaatttttttttttgaaattcaaaggttctcgactaaacctctttgacgaaagtgcagtcgcactgttataactccctgaccaaacctttttgacgagagaggggtcgaatcattataacaccttgatcaaacctttttgacgaagaagggatcaaataactataatttttgatttaaaacctatctaacaggaaaggaaaatcaaaagttataactcgcatataaaactgaatactaacggttctcgtgagctaggaaagtacaaaacgaggcatcacgatgccttgataaaagtacttaaacataaaaaatggatagataatataactattcatacgagcaaattaagaatatacaaagtgataaaatccttaaagtatatttaagtttgcttaaggcagattataactgcaattgcgaggcagaattgacaactgcttgaaaatcgaaaaagtttggtagattactaactacttaaacaggaagattacaagcaatggagaaacccaaaagtactgtatatttgattaaaatatagttgttaacattgtgaataaaaacgcaagaaacacaattgtattaagttcaaatgaaaatagtacaaggcatttaagataaggaaaaactaaaactggttacaactttgtctttacaaaaatgccactagcagcaaagcattaagtcatcttcctaaaccaaggatgagaggggaagccgatgaacttgagaaagaccgtctgcacatagcttgaaaaagatcgtctacacgtagctcagagaaagaccgactacacatagcttgagaaagaccggctacatgtagagagcc

SEQ ID NO: 371247 - DNA, 629 bp, Cannabis indica
catcatctcatatctgccttttaggaataaatacaaaaactcaaccactctctctttctctccactacctaatttatttattggtttaatttactctattttaatttaattgtttattagatctacaaacgaaaaaaataaaaatataaagtgttactagtaacattttgagtcacaaataatattttccttaaaataaacgaaggcattcttatatacactgtaaaaaaaaaatatattttagtgttaagttacacaacataatttttttttttgaattaaatataattttagttacaataaaaaatatttttgattaaaatataacatttagataagttgtgactaatccaattttagtcacaaaaattattgtaataaaatcacgtttagtcacaacaaactatgatttttatgactaatatatttagtcatgatttttttagtcacaacatacactacaagaaatgtcacttttgccagcacatttttgtactggaaaatgttagtgctgcactggtaaaatataatttacttgtgatgtgttggtcaaaaagggttggcaaatcaacgttggtattaaaacttttgccagcataaaatgaaaagtgctggcaaaaatgactttt

SEQ ID NO: 371248 - DNA, 780 bp, Cannabis indica
tatcttttccactgtcaataccgctccagtctgacgtataaccaatacatcgaatcctggtaaaccctaatgcccttgatcttcaattgtaggctcattctcttccatgtattcaactaatgacacttcttcattattcagacaactctcataactttcattattggagttattacattctgaatcatgcgccattaaattatcatataaagatcttaccatgtccgtcaagtgattaatctctcctagaagtgattgtagaagtgatagtatattctcctcttcttcagttggttggggtgagtttgggtaataaggagggtattggtgactccaatcctaaagtgatggatcccaatgccagttgtaatcaaaatccgccatatcattcaacagatttattacatcatgacctctccttagcaaaggctctccaattacctctgctccataattaaccaaacttcttgtttcatcatcaagtccgttataaaagaaccaagtaaaacactcacttgaaaaattgggataacatttctctctgcgcattttaaatctcccccaagcagaatcgaatggctcattgtgttgttggacaaaattcacaaggtatagcatctagatttttcttgcaggttaaacacatcagtaaaacattagtaaaattaaataaaaagaaaccaaattagaatagaattcaactatattgatattagctaaaacagtccctgacaacggcgccaaaaacttgttgtgatattttaacacgcaagtatacgt

SEQ ID NO: 371249 - DNA, 528 bp, Cannabis indica
tgtaaattttcaaaaaattttgaatatatagtttacaatgctgaaaataagatttaaatattttgttacacatacgactgtttttcttatgcgtgtgacaagtaattgtttaaactttatttcgacattgtaagttattcggaattttctaaaaatttacaaataattttaaatagctacaacgtacatgattacaaaacaaaaaattgactaaaaaacttttttagatatcaaaatagataagaaaatctatcagaacacccattaataagtgtactacttaaattttcaataatatttagtagtgattatattggaatatttagtagtttagcacataatcgcaatgaatttagtttttccttgtgatttgaatagtgatattttcttttagattactcagtttatttaatatttatcaacataaaataaaattttcataaacctaaaagttaccaatggagatgcaaagtgaaaatatagctcacttaacataaaatatggggaagtttacacttgacaccttat

SEQ ID NO: 371250 - DNA, 716 bp, Cannabis indica
ctcccctttgcttagaccccaaagaaaaaaaatgcatacagcttcaagcccaaagtaatgtgacagagaaaaataataagagttcaagtcctaaacaaaatgaaataatcaccatggaagcctggaaaaatgtttaaagaaaaatgagaagtgaaaaataatcatttgtatcaacttaaagagagcatgataaaatttatcttgttaccttgccttgagactcaaatttaaatttgacagtaaaccatgttaatcctctgtccacgaatggagtacgtgcaagtgccctgagtttgaaagttcttattacgtatagtactttgattaaaaaaaagtcttaacagttatagatgcaacacttaaagtgccttcacttatgtgtgatcattgtaaaaattgaaattaaatttactcttgcagatcaagacggcacatgaatataagaagtgagaatcatgataaaactaccaactttgttgggctgacaatgttgactaacttaactgataatagctctattatctttttttttttcttcaagagactaaggtcatatgtctatgattgacttccttccaactatattgacagccttctcttatatctatgactggccacataatgttgaaactacttgatacgctctagcctaaccaatactggacagaaacaaaaggataaatttgtctttgcatgtgtgaatacatgtgtatata

SEQ ID NO: 371251 - DNA, 663 bp, Cannabis indica
gattattgtgtacgactgccaaactgtaagaacacaaactgatccccgagaacgcgagtctctggagagagccggtgtataacggaaccttctcacaaagcaacaagagagaaatgacaaacgtctttccaagcaaactcctcgaccatcatcagctagttcatcgcatacataaactagggtgttagaatttcatctttattagtgttaacccttatttttttccttttctaattgcagaaatgactttcctgaagtccgctcctatgctcaaccgcaagctgaagcctgggacagcagcgacttcccctatcacctcccaaaagaggaaaagcgatgtggtggtttctcctatcgcagattcttttaagaggcttgctaaaggcattcaagagaaagggaagaaagttgtgatcgacccagcggttcgagctcgccatgtgctgtaccttcaggagagatttgtcagcgatgagttccagtcgaaggttgacaagactcctaccgaggagctgctgcctcgctctgcggagttagcttcgcagttcatggccatgttctcgaaggcttttgctactgggttcaaagaggttgaactcgcgaagaaacatattgctcagcttcaagagacatagaagctgaagcaagatgcatcttctaagg

SEQ ID NO: 371252 - DNA, 856 bp, Cannabis indica
ggtactttttatcccagttttcatgaaaaaaccgggataaaaagtaccccttttgtcccggttttttaaatactttttatcccactggcatacatcccggttttcattttagcgaaaaccgggataaaaagccttaaaaaccgggataaaagaccttttcttgtagtagtgtatatatatatagcttgtccaaaaattaaagaaataacagaattaactaactaactttcactttatattctaactgaataaactgaccaaaactaataataagatttgtgattccaaaacaaaatgagttgaaaattaattcatttccaacattttttttaaattatgtcaactgtacttttttttcaaatataaagaaagttttattattagagtttactaattggagctttaataattgtataaatatataatatatgtgatgattaaatcatataaataatattaatattgatacttaagtatttaagctaaaatatatgattaattatttgttaattatttatgtgtaattttattacttattttttaatataatggaaactttgaaaatataattgatacataaatatatataatttatttaatttgtttaatttgtaaaataataatagtgtttgattaaccaaaagtcgttttaaagagaaaaggtaattggttaaaataataataattccattcaatacctatagtaattcttattctcttgttgatgacataatatttaccaatcaaaagaataaaaatttcttgagtaagattgatttcatggagtctatatgcaagatcaagtttggtgatgagattatgaagctcacaaaaaatagtacgtagctagtataga

SEQ ID NO: 371253 - DNA, 511 bp, Cannabis indica
atgtatgtatgtatttatatattagaaaaacaaaaaaaaaatagcttgaagggttttgatcagtcaagtaaataaaaagaacaaacagaaagatatattgatgtttacaaaaatgaaaaaaaataataatgccatacataacatataagaagagagaagtaagtatggtgtaattacaacgtacatacatgttaaaagaaaattaataaattagcggtatattctataattaaatagttagtgttaaatgtgatattatttacaatattgcgaccctccgtgtaaatttttctaaatattattactgtacttgaagacaattgaaaaataaaattaaagattacaattcgctagctagctaaaaatcaaacatatatatctttatatattaaaagtgcttatctaacggcatttcttggtttaacagaataaacttaaaaaataaaagaatattctgttaaatttaacgattaggtttaatctcccgttaacaaataaacccaataattaa

SEQ ID NO: 371254 - DNA, 574 bp, Cannabis indica
gtgaactttgataaaagtcacgctttcttttttatattattattacttatatatttgttataaatgtgaaagaagaaaaaagaaagtgtggattagaatattatgtgtgatcttaatggggaaatatccaaaattgtaaataggaaaaaggataacaataaaaaaattaaagaaaactcaatcgtagatgtacaacagcaaaaatccaatcgcattttttttggatttaatgagattttattttatttattttattatatataaataaaaaatgacccatgaatttctcataaaccattttatttttaatataaataaaaagtcacctataaatttctaaataaaccaagaattacacactttactttatatagaatagatatatagataattaataaatgattgataattatttttattattattatactaaaaagattaaaatagtaacgactatatttaaggaaaaaaaatttcctgtcgcaaatttccctatcccaatcctgtccctccaatcaataattaccatctatttctattttttccacctcatttattaatcttttcaaacaaa

SEQ ID NO: 371255 - DNA, 822 bp, Cannabis indica
tttacctctcgagcttgttgtcaacaaagttcatttctcctttgggcttcttccttctgaacaaatacctgagctctctcgttgaactcagtgatgctttttaccggacgtccttgtagatcatcccacaactcgcccccggcagttaatggatcagtggagatccccgcctgaagggttgtaagttgtgtgctgtcatccaagtttttaaccctggcggcagctatgctacaatgacttcagtacgccttaagtgtttcgtcaggctggtgctttatattggttagcgaggccgcttcgggtcgcctatccctagcggtttgaaattgcttcttgaaatcattggacagctactcccaggaaattattgaatgacaagtgaacttgttaaaccagctactcactgctccaacaagcaaggtggggaacaaaatacagcgtaagttgttcgtcacgttactcgctcgcattatcgtgttaaagttattcaaatgcaaggctggatttgtggttttttcataggacaagacatgtgggtttttgaatcctgaaggaaaaggggtattcataatatctgggtgatacggctcaaactcctcgtcagagtcgtatccagatgatttccctaattcccccacttgatatctcctgaacttatcctccagctcgtttatccgcaattggattggatcctcttgctttggaccaagctattggagaaggtcaagtttcttccgattcaagttctctcgcaaatctggatgggagtaattgctggcagatctcgtcttactcattgaccgtgtcctacttatagacttt

SEQ ID NO: 371256 - DNA, 607 bp, Cannabis indica
ctgcccagtcagcccgttgtctacaaatgaaaataattccaagtttaagatcgcttggtcggtcatgatttcttagaaaaggccttatggccgaataagatcatataaaaataaaaggataaaacaaaaacgtatttaaacagctggagtcccaggctcttggttcgggtcattgggacgacaggagctggaggatttgttgtttgaacgggaggtacatcagcattctgcccggaggtagaagcagccgccccggtttcaccataagctacttgggaagcgcagaactcaaggtacttgtccttggcttcacccaagtagtcaaaatttgcctaaggattagccttccaaaagtcatagaagagctcaagatcggttgtctccaaggcatgaactttctctcccagcctcgtcaccttggccgcaagctcctcatcctcaacccgaagaaggaccgctcgaagagatgtcctttcatcttaaaggctgctcacttcagcagataaagtgtcgatggtctcctcaagtcggtcagaagcctcaagatccttagtcagctcagttattttcttctgggcagtaaaaagcttcttgttggcttcaccca

SEQ ID NO: 371257 - DNA, 424 bp, Cannabis indica
aacagtttcatgtgtcaatgatttaagcctttaatgaagagaggaaaagagaagacttatgggctgagttagaagaactggcaaagaaaatagatgaaccatggatgctaatgggggactttaatgagataatgaatggtgatgaaagaatagggaggagaactcactgatgtccatctcagagacttcgagattgtatggaaaattgtaatatggtagatttgaaatactcaggatcctttttcacttggaataataagcagaagcccgaagaaaggattttttccaaaattgatcgagcaatggtcaatttgcactggattaatacctttccttgttctgaagctgtgtttttacctgaacttagttttgaccatagcgctatcttggtaaccatttatgaggataggagttatgggaggaa

SEQ ID NO: 371258 - DNA, 682 bp, Cannabis indica
cccttatgcatcaatagttgggatcttaatgtatgcaatgttgtgtacaaggcctgacatatactttgttgtagggattgttagtcgttaccaatctaatctaggtttggaacattggatagctataaagaacattctcaagtgtcttaggagaaagggagatctcatgcatgtatattttggtggagagttaaatcctactggatatgctgattctaattttcaattagacaaagatagtcgaaaatcgatatctgggtcagcattcactcttggttgtggatctatagtctagagaagcattaagcaaacctatattgcagattcacccatggaggtcaaatatatagtagcttgcgaagcacctaatgaagcattttggttcaagaaattctacactgatcttgaagtagttttagaagtagaaaaaccattagtactctactgtgataacaatggagaagtagctaactccaaggaaacgagaagccataagagaggcaagcatattgaaaagaagtaccatctactgggaaatatagtatagagaggtcatgtgaaagtcttgaagattacattagaacataacttggaagatccattcacaaagatgctaccagtgaaatctatatggtcatattactaatatggaattaagggagatgcctaattcgcttttagg

SEQ ID NO: 371259 - DNA, 549 bp, Cannabis indica
tttggggttgaactccatctcttcaactctcttcctagatccaaactacatgagtagtaagtacgtaagggtggacatcattcaatccaattgaaccgaattgatgcaattcaatccaattataaaaaagttagatatccaattacaatttgattggatgctaaaaatttgattttaattggattgaatcgattattggatctcaatctcaaaatccaattaaaaaccgatctaatccaattacatttatatatgttaaaaaattatttatataataagaaatattgaaaaatataatatgtatttattaatttttttttgtgtgttgaattcgtaacgcttgttgttttgtgtatttattttcatgatgttttgttttattttattacttaaaaatattgttgttttaattatttaaaaatttggctacattatacttgtaacaataatatgtttatgaagtattaaacttaaataaaatgtgatatttagtttttacgtatttttcttcatatttttaagttaatattgaaatttaggtgtgtaatt

SEQ ID NO: 371260 - DNA, 500 bp, Cannabis indica
ctgaaaaatacatacataaattgaaataaatatttttcaatcttaattttttcatatatttattttttaatacataattaaaatttatgctaatcacaataacaaaaaaaatgatatattttatatttacgtaaaaagttataccattacaatatataatgaatttatatgtttaatttttaattattataaataattttattcgagatgagcatttatatttactgtattatgactaatatttgtgttaatcacatataaaagatagattttacataaatatattatataattttaaattattcataaaaaataaaaaagaaagtattacacttgaatttttttatgtaactaaaattaatttttattaatataaatgtttaagaaattagtaaaaccgcgcgaagcgcggaatagaagtattcaatctctctacaaagcagaatttgtagtaatctctacaaagcagaatttgtagtaatgagcctcaaaaacaaaat

SEQ ID NO: 371261 - DNA, 739 bp, Cannabis indica
agtaacctccattacactcttcccatgcatcaaacatgtgtgtgaccactatcaatcaatcaaccatccatcatttccctttctttttttttccttttattttccatttcttttcagtttttttttaaaaaaaaaaattaataacctccattgttgaacattgcctctccacgatcccaccattttccctcccctttgtgttctttaattttttttttaaagcccataatagttttccctctttctatttctttctcaatccgtatatatatggctattacctgttcttcatcatctccttcccccgttcaaaagaaaagctctacaatgggtttgaaatccttagctaataagaacaagtaaacgacctgttatggagggagatgactctgattttgctcttccattatttaagcgtggtcgagctcctcctaagaagaaatcgaaggtgggtgcccaagaaaaaatggctcaagatgttgctgaaaaaaaaacgataatattagtggtggtcttcgaactgaggtttgtttaccgtttctttttagttttctcctttttctagattttgttgtattttgtatttttctcagttttgtgtatttcgtttgtgctattctaggttttcccccatttttgaaatttttcatattcaacttttgtgggttttgtgtttattgatttctcattttgtaatagttttttcatagttttttattagtgtaaacactttctgtat

SEQ ID NO: 371262 - DNA, 985 bp, Cannabis indica
taaatataattactataattacttaagagtttcaattttcatatttattgtggagtaattatggaattaataaacaaatattacttagattgatgagactataaataaatctaatttattggaacttagaattataagtccatagttcacaggatctcgccacagtaaaacactatcaagggggttgggataaatgttgtaaatggaagttcaaaaaaaattattttgaattagcaaaatagtaatttatttatttttgtaataaataattttttaaattaattaaatagggaaaaaagttatttagacaaaaattgtcaagacaaaattaaaagtttgtctagacaaaagacatcatcattgtcttaattaagacaaggtaggcgcctactctattgtagggtgcccctattagttttgtattttgtggtaaattaattaattgattaattcaattagataaatatttgaatttgaaaaatggttaaagatatttcaagttggttgagatattccctcaaagtagttgagatattctctcaagtggttgagagattccctcatctgatttattagtaaccgaattcggttatagatatttatttaaataattaaatatgatttaattaattaaaaattaactactataaatataagcccgatttgagaaatcatatgatgcttctagattataaaattcgaaagtaattgggagaaaagaaaaattatttttctctatcaaactattcttgctcataagttgagaattcaacaagattctaatgtatagttaatcctaatagcccacactattccttgtgtgtggttgattaatcttgaagactacggtctgagttttctaatctaacctgtaaagggatacaacttacgaaaaagaaatcaagaataacctaaataggcttcaagaggtattaatttctttgcatgtcaatttatgttttgtatttaataaatatacatctgg

SEQ ID NO: 371263 - DNA, 710 bp, Cannabis indica
caatatcaactttaaccattattaaggatttgttgtctaaattaactttgagagatatattttttttttatgttagtcgtaattttaatattatagttcatgaattggctagtaagcatacatcatttgtaacttgatttcagggcaagtttaaatttataatattgcattcttgataaaaaaaaaattaatgtggaacttaatacttaattatactaatagtaatataaaagtgtattggtgtattttatcatttctctttgtaaaatatcaacaaatattgttattaaatatcagtagtattacgttaaagtgacactttataaatagttattgatattttataataattattaaattaaattatttaaaacttaatacttaattatataaataacactacatggagagattttagcattattcatacctataatataaatttagtagtatgagtgcctaatatctatatacacatttcttcacccatcactttttggcttccaaacacatcatgatgacctttttttttttttttttttgaataaaagcgtttttgattaatcaacaagctagacctcgcggtcattactaaaatgttcaaagggatggtggataccgaaatatcaccaaccaaattgtgggaaaaggcccacttagccacattatgggcaacaaaattacaaatcctgcttatattagagaaaata

SEQ ID NO: 371264 - DNA, 726 bp, Cannabis indica
aaatattttcaggtttggggacatttaagactagataagtggatatatgagtgtaatttgttaattacagagatttatttgaaatacgtgaataaaatatgagttatttgtgaaataataatatttcaggtttgacgaccttggagacccgattggaggccaaaaacttcacaatagttttagttagaaatattgatgagattattaggataagttaattttagaaatagcagaatattttagggtactcaaagttaactaaataccctaaaaatagaaattctttagtggttcaaaaataattaaataactattaatattaaattttttattattattattattatattatattattattattattattatatataaaatgaaactgataagtttcattcgttttattttatatataaatatattgtaagttttacatatcagtaaaagtacgaacgaacgaactctcgttctccttctttcgacaaaaccttcttcctttctattcattttctttgattttcaacacgaaacttagcgatctaagctccagtagtagcaggatagcaaatccttgaagagggaaagcttaagctatggtttaatttcgttttaaagtttaaaaacaattagttttatataagggtttcatgaattagaatagttatagagattccgacttcgtagaattgttctttggtacctatgggactagtatcgatgttt

SEQ ID NO: 371265 - DNA, 788 bp, Cannabis indica
attggatctgtcaacaagttaatcataacaatttagatcaaataaataataggtttgttttaaaaaaattgaataaataattaagcaaacattcaaacatgtaacaatatttggaaagtaggttaagatatttctgttttaaaataaatatttaaaaattatatctcaattagaatttaaatttaggttgttaaaaaagtatttgaaaaatatttaaaatctaacaaactttaaaatattttaaattcaaatatccaactaatttttaaatattcagtgtatttaaataattttaaaataattaaatatataataagataatataatattatatattgaattttaaaaatttagatatttctaatattatattcttaaccttataatttaataaattaaatattacaaaaataaacaatttgaaaataagatattttatggttaggatattatcaattttatttaaataaaataattaaataaaataaaatatcctaattttgaaaattgtatggttagaaaccttaaaatttctattcaaacataaattaataattttttttttaaaaaaaaattcatgtgattttgccaaaaattaattttaagaaaaaaaataatctaataagataaaatgtcaaaactaacatttttgaatcttataatttaatttaataaaatatatttcaaagataacaaattttgaaaatctaatatggtagcaaattttgaaatttaaactagattattctaaattttattaatgttttaatatcaaaataagatcattt

SEQ ID NO: 371266 - DNA, 863 bp, Cannabis indica
ggttccacttcagttgggccggtttgagagactccaatagatgtacctgcagggttagtttctgtggaacctgcatcaagctcattagtatttttacaaggaaaatcattttcttgaaaaatcacatctctactaatgagagttttgaaacctcctttcccttttacccacaatctatagccctttacaccctcggggtaacccagaaacacacattttagagccctaggctctaacttgcctacactttgatgtgcataagccgcacatccaaaaactttcaaattagacaagtcaggtggtttaccagtccacctttcttcaggggttttaccttcaattgcactagagggacttctgttgattaggtatgttgcagttacaactgcttctccccaaaatccatttgcgagcccggcattgaaaagcatgcaccttgctttgttcaatatggttctattcatcctttcagcaacaccattttgttgaggagtttttctcacggtcctatgcctttggattccattgtcttgacagtaacctgtaaactcatcattacaaaattctaggccattatctgttcttagggttttcaatttccggttagttaggttttcaacaagtaatttccaatgtacaaatttttgaaaagcctcatttttatgctttaacagataaacccaaaccttcctagaataatcatcaacaatagacaagaaataggcactacccccaaaagttagggttttctcaggaccccacaaatccgaatgaacataatctaagataccttgtgatttgtgtgtgccagtttgaaatttaagtctatgatgctttcctagtacacaaaattcacaaaaatc

SEQ ID NO: 371267 - DNA, 608 bp, Cannabis indica
gttctagttttaaatcatatttaatactataaaatataaactcataaccattttttaacaaaagaatttggcatagtataacgttctcgttaaaactatactttaaaagctctaatattttattcttaaactaatacatttcaaaaaaaaaatatatatgacactttttataaaaaaaaaaaaaaaccaaagaataaccctcacataacacacaacccaactctctctcttcctctatctctctcgcttctctctcaacccaaccgaaccctcaacaccctcacctcatcgtacgagccgacccagccccctcacccccacaccgaccacgagacgaccccctcctccgaccgagacgactctgacggagacccatagccccgatctgaccgagacgactcccacagacacccactaaccgaacaatcttcaatctcaaacttcaacccacaacaccatcagacccaacccacataacccatcggaccccaacccacataacccatcgaaccatcggaccccccacataacccatcggaccccaacccacataacccatcggacccaacccacataacccatcggaccatcggaccccccacataacc

SEQ ID NO: 371268 - DNA, 502 bp, Cannabis indica
catatataaatataaaatttaattttatgtaaataaaatttacaaattaataaaaggaaattgtaactaaagttgttaagttcgtaaccatatgttacaattttgtaaatatatttagaaactaaataaatttgttgtaaattgttattatttttataatttttataaaattccatgtttttcaagtttttttttttttaatttacaatgcaatgttatgtaatttttgctatttataagtatatatttaaaatataaagtttaacaaataccttaaccaatcttaattacaatagtatataatattatatgtcatgatcaataaaatacatgaattctaaattattatgtctaacggaaatgatcttgaaattctattttctcattaatttttgtaggtttttaaagtatttttattatttatgttacttacgatgtcaataagatatcaaattaactaatgtttcattaaaaaaaaaaaaaaaaatcatgcttttattat

SEQ ID NO: 371269 - DNA, 635 bp, Cannabis indica
tgtgtcacgggacccttaaacacctatagtgatagtgacaatactgtgagtgtacatcgacacaactaagtagaaccctatttcgatatcggttagtgatttcgttacgaaactggtgactacaataacctacacctaacttgattacatactttgtgtcatgggacccctaaacatctatagtgatagtgtcactaccgcgagtgtacatcgacaacgataagtggaaccctattcggtatcggttacttatttcgttttgaaactggtgactcctatacactacacctaacatgattacatactttgtgtcacgggacccctaaacatctacagtgatagtgtcacaacagcgagggtacatcgacaccactaagtataaacctgtttcgtttcagtttgttatttcgttacgaaattggtgactctgatacactagacctaatttgattacatacttttagtcacgggacccctaatcatctacattgatagtgtccctgttgcgagtgtacatcggcactgcaatgtcgaaccctatttctttatcaattagtgattgttttacgaaactggtgactcttatagacaacacctaacttcattacatactttgtgtcacgagtcctctaaac

SEQ ID NO: 371270 - DNA, 636 bp, Cannabis indica
aatttttagggtctaggcatgatttaggtttatcatattcttttagcctctggtttaataaatttcatccacgaatggagattgttcttttttgtagaaatgtcccaatctagttcagaagtttattctccagaattcttagaaacagaatatcctaaacaattagccctcccatacaaacccagaaatttccaaccaagctttttgcaaccagatgactctgtttgattctaaaaaacacttgtaccttaatctttggagaaaacaaaaaatatgcccagaagaattccaagaaaaactctttggaaatggcccaagttgacaaaatgtcaacttgggcattgggcccagcaccaatttgacctgggtgctgagtcccaattctaaccactagacgaatctatttgtttcccaaaagcactcaatcttatttgttgagcaaaacagagaatatgcccggaagattttatctgaaatgttgatggaagtggcctaggttgacaaagtgtaaacctgggcgttgggtccctgtttttgttggatatattttaccaggatctagatttactaccaagtatgtttgattaacatcctaatatgaattctaaaacaatgaaataaacacataagagttta

SEQ ID NO: 371271 - DNA, 1506 bp, Cannabis indica
tttgtttaataaaaagatcttttgatctgataggggtggaagaagtttaaatgtaatatatgcagttcaacgatcttttacatctattgaactctacactatattcataactccacatgatctctataacacttaggggtggataaaactattgacatatgtagttcattttgaactttagattatactcaatacaccacagtacctctgtaacacatattttgaataaacatgcatatagtataatgaacaaattagcaaattactagaacttattcttgatcttgtattttgttccaattaatatgttactgctgtaatagaaattgataccaataaagttcttggacatagtatcacagtaccttatttgagtgggagaattttaaaattctaagcccatcttaatttgaatgacacttgtgatagcttactatgttatgatcatgataggaactttagattttaactgagaaagtaaatctgaccattcatatggatagaaacaacttatcaattttttgaggataagataggagaactttgcaaagtctattcgaatgacttaggcaaaatacctaatccttaataaatttttttatggtatctttaatgattccttaattttaagcaagtatttaactttcgtgttaatactagattgctattttgatgacttaatctagaaggaacttacagtttcagactgataatatgtcacaacaagatgtccctgagaaacaatagtaagaggttaaatgtacttctatgtatgaatttaaacagactcctactattgagtgagggccatctaagatgtaatcaaacaaggaacattaggagacagtcaaggaagatctctgaaatcgacatatatgttagatgatagggtgtatattagaatccttatatctacaccaactcataacctatttgagatggtggttactctggggatggaggaattattctagaaggatttaaaaacccatctataataatttaagctccatcagtgaagatacataactttgttgctttcgaaaagcactggaaagttgttcaaatgaagaaagttcttaactgtgttatctctattccattttggatagaattagagacaagtcttctgtatattcagatgcacttaataagcagtaaagaattcagtatccctagatgagtaatgcatatagaaaatgatgttgcataatgttttatgagcacaaaggaagtaatggtggagaaagcagtagcttaccacagacttacagttccagtaatttgggtttagtcaaatacactacacttgatctggatatcaagacaattgattgattgaaatgcactacttgttttatgttagtgcaagtgggagtttgttgggattttatgccctaaataaaacccatttcaatataatctgatttgttatcaatagaagattagaagtcatttatctttacatatagttttcatatttatggtttaatgtgtacaaaatct

SEQ ID NO: 371272 - DNA, 552 bp, Cannabis indica
aagctaaggctatttttcaggcaattcattgggctcagctgatttctctccctgtagatgtattgcttacagattgtaaatcaatagtagacaaacttaactcttgtaattggaataatagtgtgttggatgatgttcttcttagtattaataacttgttatctttcagtccaaggctagctatctcttacatctctagggaaaataatgttcttgctcataatttagctaagttaggcattggattagataatgagttagtttggaatggttctttaccttccatttaacttgtagctttattgctttgtattgcttcttgttttaataaagcacaagtttttttcaaaaaaaaaaaaaaaagaaaataaaccttttcttttctttttttttccattctttttagtttattttatttccgacgttacgaaatgaaattacaatcttttttaaagaaaattagaaattatagttcaagcatttagggatagtatatattatagggtctatacatcggtcggtttggacgagtttatcttatatattttttaa

SEQ ID NO: 371273 - DNA, 850 bp, Cannabis indica
actaaactaatataaataaagaaattaattaatatcccaaataaataaaaatttatttaaaatttttggaattttcctttttttttttaaaaaaaaattacttgggaaaatgacatgttgtctttcccgtcttcaaccgtcaaactaggattttgacctgtttttattttttttattttttgcaacttggttctaactgacctaacctaaaaccgatcgaaactctcaattctgacgaccaaattgatgctaaatgaatctaaatataaaaattaagaaattcatatagatttaatgcatggagaaaatgagaaaattaggctttaatttccttaaaaaagattcaaatcggccatacataatttcaaactctttttgaaaagccaacgtactaaagcaacattattttgatgttaaaatgaatgagttattgtacaaatgggactgaaaatcataaatataatgattcttaataattttatgcttcaaaaacactagaaattaaactttaattttcaataaaagctttcagacattaatggatgaacaaacttttctaatgattttggttttttttttgttgtttttttttaagaacttttgaaacctatttcttaagtcacataatcattagaaatataaacttgataatttcccatgtgatttagtttgaaaaataacgttgaaaaatatataaagtttgaaacactatagccgaaaattttcaaaaaataaataaataatttggcaacatattcttagtcatatttgaattgcataaactaagggataaataaataaagcaattccgtaatataaaatataatagatatacaattcaaatcaccaa

SEQ ID NO: 371274 - DNA, 583 bp, Cannabis indica
tataactatgacaaaaataaaaaaataatacaccaaaaactattccactcaatttattaattaaattaagcaggatttttcaaaaagagttcttttattatgttttatttatattttttttgggggctaaactttctacactctcattttgttttgctattcagatttccatccactttggcaaagtgtacataaggatacacatgggttttcattggtccaccttattttattatttaaataattataaaaaataatagaaaatatctaaaattaattaagcattaaaaataaatatgataaaaaaaattaaaataaaataaaattattgggtgattctttaatgcacccctaaaaattttagaggtacactgatgcaactcttatttgttcgaataatttacaatataaaaattgtgttcaaacagtctattcgcatataaaataaaagaatcacacgtgcaatagactgtttgaactagggctgaacatcgggcgggtttaccgggtttcaggttcgcgggtttcgggttcacgggtttcgggttcaaaaaaataaaaccgaacccggacccgaataggg

SEQ ID NO: 371275 - DNA, 774 bp, Cannabis indica
gccaagtagtaggtgggcagaccttgtctagtaattcatctggagaagtcatacctgataatttcaaccaggttaatggtgtcgatcagcatattaaccaaaccaataaatcactaagatagccaagcgtatctgtatttgaaaggttggggatgactcacgatctctgaaacgatctcaacaaaagaaaaggagtagacgatcagcttggcacgccgatcgtgcagcccagaacctgtgctcaaattcccactcagaaagatgctgatgtgactcaaatcgaccaaaatgctaaacacgtcagtcaagctatgcaggcacaattggacgaactatggaatatgtttcaaggaatggccggacagagaaacgatgatcttgagttggaccgagcacgttgaacccctttctctcccgagatcaatctcctggcgttaccccacaagtttaaaatgccaacctaaaagatgtacattggaagagaagatcctctttcccgcctcaagtatttcgagatgcaaatggattttcagggggtacgaggtgacgtatcttgcagaatttttcctgttaccctctcggaaaccgtcaagcaaaggtatttcaagctggcccctggaaagctcaagtcatggaaagctttctcctcggaattccatgcacaattctcctcctctcgccaaattccgttgcatttaggagacctggtcaatgtcaagaaaagaccaggcgagcctctccgagcatacaacagtagattcatgacagaagcaa

SEQ ID NO: 371276 - DNA, 1054 bp, Cannabis indica
aactcatccagaggtgattctccccgggggtagtttagtaaaccattgttgcgccctatccgtgagggttgtagggaaaatttcgacacctaaggtcatccctgattccctgaaggtccatttggattttggagttctccacatgagttagtgggtcttcactacccgtgtacttgcaagtgggcatcttgaactttgctgaattagggaggtcattgatcatttgggagaaggcagaccctctcctcctttctagatccaagtcagtaagttttggtgcggtaaggtccttgaccaatcgagttaactcgtccaaccgagcctggatcaccggatctgtggctgtttgaggttgagcaatattgacaccagcatttttttggtccccttggactggctcaggtgggttcactatgttggaaccacgattgtctctatttctgttgagggcgtcctgcaggtctctacccccttgggggcctacccgttcaaaaactgacccagttcttggccttcctccagcgttctgactgtcagcctttccttcagctgcgggtggtacttggtcattcctaccccttcggggtggattttcaggtagatgttgcctattaggggcatacggccctctggcttgataaactcccagctcagaatttggttggttgttagctcgactttcagcttcatcatcatcatgaccgtcagggtagtttggatggtagtcactgttgacctcagggtcttctcttctccccctagacctactaattcttgggcgatcatcgccatcttgtggttggccacgttgatcgcggggtttccactccctacgttggggcgtccttccactatttctgccacggtcaccattattgtttctagagtttcctccaccactccgccttagacgaacattgagggagtcagcgcgtctcatatgatgaccgggtaggacttgctcatcagccgggggtggtcgattattattgtggggaaccctgttggaggggtgactcctagtcctttcttggttccttgggcgctcttcagg

SEQ ID NO: 371277 - DNA, 530 bp, Cannabis indica
acttcgtttttagagtacatgagcgaccaattgcaagtcggcaagagataggcatgtactgggtacaattactacagtacctacacatatgaaactcacacatataagatttattgtagatacaataaactagtaatacttatacaaacaaaaattttatacaagaaaaaaaaattttaaaaagaaaaaaataatacaaaaatacattaaatttattcaaaaacctatgatgggatctgaattggcaaatttatttatttacagtatatttcttcgtatgattatttaggtgcttctattcttggttggggcgatgggtattgcaacccaatctgagttttacaatttctttctttctttttctttgagggtatttggattgtgattgcaacccaaatttgggtcatggctattcaggcgtggtgatggtgttggtttggggttgggggttggtgggtttctggcagtcagaagaagaaaagaaagaaaaagaaaaaaaaagaaataattttttaattatttatttattt

SEQ ID NO: 371278 - DNA, 1136 bp, Cannabis indica
tactagacccgacattgcctatgtcgtgggattactatgcaggtttactagtagacctagtgcagagcattggaatgctatagagagggtcatgagatacctcaaaagaacattgactcttggattacattatcaaaagtttccagctgtacttgaggggtacagtgatgctgactggaacactttatcagatgactccaaggcaaccagtggctatatttttagcatagctggtggagctgtttcatggaaatctaagaaacagactattctggctcaatctacaatggagtctgaaatgatagcactagctactgctagtgaagaagcaggttggctgagaagcctgctagctgagattcctttatgggaaaaacctattccagctgtgttgatccattgcgatagtaccgcggctattgcaaaagtacagaaccgttactacaacggtaagagacgacaaatacgtcgtaagcacagcactgttagagagtttctctcaacaggagctgttagagtggatcatgtacgcactgatgataacttggctgatcctttgacgaaaggcttagctagagagaaagtccttaaaacatcgaaaggaatgggactgttgcccttagattgatgaatcactcataatggcaacccgacctatagactggagatcccaagaaataggttcaatgggtaataacaagttatgaagtgataaaagtgagatcatgctataattatacgaaaagagaagcatgaattcctgaagcgatttaaggttgagttaatagaaactcttaatgagatctatactccaagtggagtggagtaccgagctacgggagtactcttgatagactcacctatgtgaatgtgggagtggggccgcttcctatgaaattttgggcaaaatttctagagcgttcactatactgggatagacgtgcatggccattaacgcacgggcttttgattacacccttgaaaaggttgttgcgtggtacaatgttagagatagagttcaagactacggtcactctagtaaaatctaaatcgtattcactacgcagaggttcaaatcgaaagatacctttgtttatgctcaatcttattgttgaatgatactagtagatggaaat

SEQ ID NO: 371279 - DNA, 649 bp, Cannabis indica
attgaatatttgttgttctttacttttaaggccattcattatctataatctctatattttgtaacctatattaaagggcaattgttaatttgtttttgtcctcacatttttgagttaccattttgttatcaaatcattacctaaaaagttatgtagtgtgtaaagttttatataatttaatttgataattattataaaaattaataactatagggaaattttatttttaatgcttaaaaaaatacatttttataaaatttagactcttaattaatttatacaaataaatgttattgtttttaatttttacccaaaataccctctcttttattttccttctctctgtgtctctttctcttctccactctcttcctcttccttgcaccaccgagaccaaccagacccaggcaccgagaccacccaacctcttttcttccaccaccgaacctcctcatctactcaaaaacccagacgaaacccagaggcccaagaccggtcggacctccatagcactcaagcatcaaaaaacccagaggccccgaatcgttgtctccgtcttcatcttcatcttcgtgtttatttttttattggattctatcgataggttatcaataagttatcgatagtttatcgatggcatttatcgata

SEQ ID NO: 371280 - DNA, 497 bp, Cannabis indica
gactattgcattctcttctctagagacttaccttttggcatagccgttgagctaacttaataagtcttgaatcttgcccaaacaggctaacaccttttcgcctcgggctatatattaaccttggacacgatttatgactagttgagagtcattgtgtatgtataggtattcagcccgcgtttcgtgtgctagcctaaggctagcaatcaaagctccatattcatccccattattagaggatttgaaactaaactttgtttccctgtgcaactgttgcccccaagtgtaatgagggtcatgcctgcactttggagtgttcataaaatatccaacccaatctaatctgcatgatccaatccaatacaatttgcaaaatgtggatatctgcacttgtgcagattggattggattgaaaaatctaaaatttgcacttctgcggattaggtgttgattgacatgtaaaagtaaccgatccaatccaatccacacatatttag

SEQ ID NO: 371281 - DNA, 361 bp, Cannabis indica
ctagtttctcatatcataatctcaatattaatttgtttgttttatttttatttctgctattttaatcttagtctccaaaacccccttttccaacttcttatcatttaatttttgaataatttaataaacatagtcctcgtgggttcgacccgtacttggttttatacagaaataattgaaagtattcaaaaaaaaaagtatatttgatacaacatacgacacgcatcaggttttttaaacattttgtttactagcctctggtaggtagctccaaaattcttcagaccgaacgacattactttataacagtatagacccatatttattcgaaaacttgtatgttctgttggaaatattttac

SEQ ID NO: 371282 - DNA, 187 bp, Cannabis indica
tgttgaggataagatagaataggcagttagttggtttggtagttaagtcagtttattctgttatgacagttactcattagttgtgtactggtagttctctctgttctactctataaataccttatcatgtaattactgtcattcattgaataaagcaagattactttctttctctgttctctctctc

SEQ ID NO: 371283 - DNA, 524 bp, Cannabis indica
tttccttttgtcccaaacatttccaaatacttattttcacatttttttctgcttaatacacataaaaacaacaacataagtctatttaacacttactatcacacacacttctatttattacaaagacacaacaaactaaacacaattacataatatagacactaattactctattatttaacttaaaatccaagtttaaagatataaaaaataactctaaatcttagagttatcaacgaccctatttctatttatatatattaattagagaaatgctaaaggacaccactggtgcttagcaccatcttatgtgttaatatcgctattggtccaattaagtattgagtcccatgtaatttaatataatagctttcaggaagtatcactagccaatcacaacgcgacatatcgagaaagtactaaccaccactggtacctaatagcaatgctctattaattatgatcatttttctccctatatattacttagggttaatttcacaaatgtacaaaaacaacaaaaa

SEQ ID NO: 371284 - DNA, 698 bp, Cannabis indica
aaggtctctacaaatttgactctctccaacttcaaagtcttgccactaccaaaagcagcattctttcccaatccgagtcttccacatcaactttttccaaccataaagatcaatgtaataatactgtcatacctctaagaaactctcaattctctctatggcacaatagactaggtcatcctagtgctacgattgttcaaagtgccttatcttcatgtaatatcacattaagtaataaaactgatgctcattattctgatctgtgcttcatgctgtttaggaaaacttcataaattccctttttctaattccactactgaatataatgaacctttacagctattgcattcagatttgtggggtcctgcccctatagtctcttctagtggctataaatattatatcagttttattgatgcctattcaaggcatacttggatttacatgttaagaactaaatgtgaggccttaccaacctttgttactttcaaagctcaagttgagttacaacttggatacaaaattaaaaagactacaatctgattggggtggggagtatcaagcttttaccaaacttttaaatgaacaggggattattacacaaaattgtcatgtcctcacacacatgaaacaaaaatggtgttgctgaacgcaaaacaacaggcacatagtggagagtggtttaaccttgttagctc

SEQ ID NO: 371285 - DNA, 794 bp, Cannabis indica
tttttttaaaaaaaaaattagtttaaatataccgtaaataacatttgaataatgatttaatatacttatagagttctataaatataaattaagaccaaaaatttaaatttaagtatttatttacaatctaagagttaaacatagatattcataccttaaaatactcaaatatttttctaaatcaaatataaaagtccttaaatgggtaataatttaaatgttatttttaataatattaatgtatgacaatgtttatcatattttgttaagtaaaaaaaaaatgacaatatttatcatatttattataaattttcatttcgaccattttagtaaatttattgtaaattattttgaattatttaaaaatttataactaatcttaaaaaattattataattaaaagctctcgtaaatgctaaaatagaaagtagagtatagcgaaaaacaaaaatagaaattatatctatttattctttgtggtgaaggcttctctaatttgttgtgtaactatgaacaaagtggcttacttatggtgtgctcgaggcgcaccggtaatctcttatatgctctttgttgacaacagctacatttactgtaaggcaactgaggaagaagcgtacaatgtgaaagaactgttgcatacttatgcggtggtttcagtgcaaagaatcaacttctctaagtcttccatgtttttcagcaataatactggaagtgcggtgagggattccatttgtgttatgttggaaatttatgagggtgataaaaatggctattacctgggtcttccgtgt

SEQ ID NO: 371286 - DNA, 544 bp, Cannabis indica
ggttcgggtccacttttgggtttggaactgtgttcaggttcgagtgtgggttcgtgtccttgttagggtttgggtctaggctgggtcccaagtccaaacaccgaatacgggttttgtccaagccctgggtccatgtctggttccatttcgggtgtcgggtcacgagctgggtcctaggtttaagttcgggtctgtgtcaggtactacgtcccgatcctagttctgttttccaggtccgtatcctgattttgggtctaggtgccgattagactgtgggtttgggtcccggtctaggttcgggtttgagtccttgtctcggttcggtttcaggtctctgtctaggttttgatctgggttcgagttcgggtttgcaattctgagttcgagtttgggtttgagttcgtgtcggagttcaagtcttggtctgagtttgggttcgggtccagatttcagtctaggtccaaatcaggctccgggtgtgggttcgcgtcctgggactttgtctgggttggtccgagtcccaagttccaatcccgatctatgt

SEQ ID NO: 371287 - DNA, 533 bp, Cannabis indica
aacacgaatcgacaaaatggattgcttgggaaacctgtcccaaaaccggttaatcggttttacaggacttggcaaaccggttaacctgtttgcaccaggtttccccaagcaatccaaaacctgtccaaaacgtgcccaaacctcaccaaactttccagaacacctaatacaacatcccacaacatattccaagcagtaaatcccaaaaatttacataaaatcaaaacatgccattaatgacccaagtttgagttttcaaactcaaacttggtcattcaccacaacacacaacattaagaactcattctcaactcaaaataaacttaaaaactcaattacaaatcaacctaaccctaatagcccatataactcaaaattaaacaatcaagctaaacttcaagcttaagtaactaaagaattgaggtgctagggcttgcctccacttggaaacatgttaggttatttttagtattaattttagattaagtttagtatatttttaattgagttttaatcgtgtttggagcattttt

SEQ ID NO: 371288 - DNA, 497 bp, Cannabis indica
aaatctgattatattgatatgagttttatttagggcataaaacccaacctgtagagattgagtatctttactcagttaaagtcgttccatcaaggaagaacgccgcagggggctttttttatcttggcactcacactagccaaaagttatcgtagacttgccaaataaagtctccttcaaggacgactttttctagacgtctggtctctcccctgttggctcaaacacattttgcaaactccgtaagtgattgttctcttctttcttatttacatcaatattccttttttaagtacttgactaatgtgttgtttgttttgacagctcttatgacgagacctacccctacccccaagatggttagtaggcacaggcacttgatgactctcccttacggtcttcaatcatgcaaactccttttaaacgaagtaaacttgcgatcggcgggccttctcgctgacaaagagtacacttgcaattacaagattcccaaatat

SEQ ID NO: 371289 - DNA, 1289 bp, Cannabis indica
actagaaccgaactaggactaggaccaggaccaggacctaaacccaaacccgaacccagatccaaacccagacagagacctaaactcgaacccagactaggactcgaacccgaacatagaccgggacccaaacccacacattaattgggagttggacccagaataaggatagggacctaggaaacagaactaggatcaggacctagtaaccgacccaaacgcgaacttggacctaggaaccaacttgtgacccggcactagaaaaagaaccagacatggacccgagattgggatccgaatctagatcaagggttgggacaaaactcgtactcagtgtctggatttgagacccaaacaaggactcgatccctatctacgacacgaacctacacccggacctgaacccaatcccaaacccaaatgtggacccgaacctgtaacctgttacccaaaattggaaacaaaataaaaagttaatcaagactggaactaggatttcgactttgaatcataactgaaatttgacgtagatctagaaccgtaaccagacctggacccggactccaaatccgacctagacctgaattgggagccgaacctggatcccaaccaaaacctggactcgggactcgacctgaacctgaattcagacccaaacatggaaccagactagggacatagaaccagggtcgggacctagaaccgcacccattctcgatctcgaacccaaactcaaaaatgggacctgatacatgaaccagaaccagaccgaaactcgtgacagtgatccagatcctaactcgggattcaggtaacggggcatggaacaaaccagtagtcagtatctagatctgggactcagactaggacaagaaccaagacaaagaaccaaacccgaactaagaccaagacctaggacccaaaattagaacctgaacaagaatcgccgaaccaggaccctagataaagactaggaccatgaccaggacccggacctagacttagaaccgaatacagaactagcctcaaacccaaattaaagtggaactcgtgcccggacacggtcgtgtacccagactggaactaagacccagacctggacctaaatctgggacccgatcccaaacatagacttggacctagatagggatctggatacgaacctggactcggaccaggacccagactaggatcgaaatgttggacctagatctggaccgagatcttgacccagacccatgttgggttttattgcctaaataaaactctttacaatctgattagttatc

SEQ ID NO: 371290 - DNA, 567 bp, Cannabis indica
cgatttatgatatataatatgatatgctgtcaagttagagatgagattcaatttatgcaagattaattaatttgcgcttttattatatacatcttccagttgtgatcaattgtgtagaattacaactgtattttgaattaatatcggtattagaatagaatttgcataactacatttctaccttaccaaactctttatctgatcactcccattcacttaccattttattatttttaattcattcatatttctatcattttttatttactaaactaatctttagtgggattattttattacgtcgtatcttttgatacggtctgtctttgttctttgacatgttcatcagtatttttttcagtgcctgagttttgacctttgtctgtaagattttttccctgagtttttgtttgttctggtgtatttgtctttactcaattttttatttcttattatggcttcggctagtaatattcctggcatagaagatcaggctgctggaatcaccctggatgatgaagagatcgggtacagctttacagggggggaagaggaagagccttttga

SEQ ID NO: 371291 - DNA, 921 bp, Cannabis indica
tagaaattaatacaaaatcttgttattccttaatttactttactataaaagtaagtagtcaacattaatggagctctaaatcatcaaatactaatcattaaatatggcctatatgaatatataccacatacgtacaccacatcctacaacatcaacaatttcacaagcttatattctctattaccgtctttatctataaatccatgagtaaattggatttggaagctatattttatgaacacattattttgaaaatgataagtaggtacggtaggatctttagacgtatttatattattgatataattaattttaacagcaaattccagccaaaaataaaactcctgcataggaggaaaaaagaactttaatagcaaaagatacaaacttgaatagtgaacttactagccaataagtaaagcttctgcaacgtaagccgatttctcaacgtgggtggaccacccatcaaggctggtagttaagaagtgacaccaatggccataggttaattttaacattatttttaaatttgggtaaacaaaactatttcttttctttttttacatctgagtaaattaattttacagaaaaatttatagtacatccactaaaatgtttaatatatcaaccaaagtttttttatttatgttgtagttatataaaattataaattttctaaataatttacagtataaaaataaaattcaaatagttgttagcagggatataggaaaaacaatcctataaacaataaaatattttaaccttattttaaacaaaataattgacttaaaaaatttaaaatagacaaggtaaaataaactaaaatctctcctaaatattgaaatcaagggtaatttatcttaaagcactccttcagtgtttttataatagttaaaagcaaaaaaaaaaataaagact

SEQ ID NO: 371292 - DNA, 1119 bp, Cannabis indica
tgtgagtagatctaagatccaggtaaaataattcccaacagtaagaacaacgtataatatgtgatatgaaatgcgaatgtatgtatgtgttaatgtatatgcaagcttgttgtgatttgtacactaccaacactagtacggttgctataacgcccgtatttgaaaatttgctaaaccaaattaatcttattatattataattatatagccatataagtcgggatcccgagatttaaaacactattgaaaattacatttactataaacaaagtttcatacatattttttttacaaacgacgggcaactacaaaatatagttcacatggttgaaagaccaaaactctccaggttgcactgccgcgatatgtacactcactgctcctccagcttagcttttcctttacctacacaagatagcaaactgatgagtcgacagacccagtaaaatatgcataacatatatgaaaacaatgttataccggctttatgcctaagccatcctgagcccaaatactgagctcaccaaatggttaagaacgttcttaacagaagtacgaccactgtaccatatgcactaaagtatcaaccacgtactcgtgttggtagagccattattgtactctcgggagttactaagtgttgtaccacatgcacgacgtaccccctggtactcgtgttggtaacattgtaactaccctaaaatcctacactgtaccaacatccttaaaaaaacacattcacatatattttatttatgctatcttatctcgttccgtgctaaagtgtgtcgatcagcctgagtggaattgcagctcgatgctttacaaggccctaaaccataatattcaaaactcaatgagaaacacgctaaaacacttatcggggatttaaaatcaaaactaagaataaccctatcgatgaacaagatgctaacacccccaaataacacaaaaatagagaaagctagggttctagaaaatgacccaaccggcagactggttcccaaccggaagtccaattcctgggtaccaaccagtcgaccggttggtataggtcccttagaactggtcgaccggttctgtactaagaactcgaaaaatgtccccatgaccacaaat

SEQ ID NO: 371293 - DNA, 816 bp, Cannabis indica
ggttacgccatcgaactttaatactgatggcagttccaatacgccttctcccatacgacattaaatgcgaggtgactgttcagataaaatttgatacctcccggaggtgctttgttatagccttgctctccaagagtatatgaaaccttcatgccttctccgggaggcatgttaaatgctgatccttttgattaagaagacttagtcgaattatctcaaagtcttgcctcttcaatccacgtgtcacaatcaggttggtccacgtattttggacaaaataaagggcaacatttatcccccaagcattgtttggtagaaagtaaatgaggcttgcttaggtgcctccgtttgtcttattaacttcctagcacgtgccttgggcgcatggggatgcatttatgaccatcattactgcagttattcgctttttgcaggcaacgattcgtttcctatccatttaatgatacgacacattaaatgggtgtcattcgagtcctcaaatgttttctaccgccttgatgaacgcttgtcccaaccgtcggatttgtagaatgtgaatcgattgctattctgaccgtacgatgatggtcgatcacagctgtctcacacccgttctggcctataaagccagccttctcatttcatttggttactttcaccattttaccaaattttcccaaagcttccacagagaggaaaaatttcagacaccatagattacctgcttcttttccttcgccgttgccagtcttccctttaccggcgatcaacaccaaccccactcttaaacttcatgtaagttctcaggacacttta

SEQ ID NO: 371294 - DNA, 935 bp, Cannabis indica
gtgccaaatatagcacaatttttatatctcttaatggagatggtctaaatcaaactcaaattattttttttttttgcctaaaaaacttttttttcttaaatttttttttagttaatggaacaatccaaacccatataatataaaaataataattgttcttagatagaaaaatatacataaaaatttaaatttttctaacaatacccattcatgattctttcaaattagaaaagaaatctactttctaatttccaacgttcatgaatatttcttaaaatgcctgcaacgtttgccttctaacaaaggagtttatcaagacttgtactctgattagacccgttcactccaactctcacattttcaaattcatatttctaaaatgattcattgaacacaatacatatacaagcttctttatatttggaggagatattagactcttttctttctatgaaacatttgttttctgtttgactttttccctaaagtttttaatttaaagtcaaatattccactttgactctcattcttcaaattgtttggtattaatttgttagagagtttatttttgtttaatgttttgaatattttttttatgttttttgcgacaggataagagaagcaaatatttctatagacaaaacaaaacaaaattctacccactcaattatacttttgtcccaatgtcaacaagattacaaaaagattaaataatattttagatccagtattttgtaaaagttactaattgaactttttattttattaaatgacaaactagaccttataattttcaaaatagtaaaaataagaccatatcaggatcccaaatagaaaatcaatttctttaggctaattaggatttttgccccctgaactttaacatataccaaatcatgccccctaaacttttaaggtcgttaaaaatgtcccct

SEQ ID NO: 371295 - DNA, 625 bp, Cannabis indica
aaaaagaactaaaccttaatttgattttagtagtggttaaggacaatttattgagccaaaatctaaactaacaagtgagaagaagaagaacggaaaaaaaaaacaaaccttaaagattttagtagtggcgaaagaaactctgagatattagagtatgagataggataaacatgacaatgagattttaccaaaaagaaaatgatacaattagaattttaaaaaggatacaattataattttaatgaaaggccatacaattttcctaggacatatccgctcttagtaaaatgtatagatatatgttctattaaagtatttctacatttaatattaaaatatttttaatagggtaaatactattttgaactttgtgttttgtaaaaaatactgatgtttaccctctattttattaaatgacaaaatggaccatgtattttctaaaatggtaaaaataggatcctgaacttaatttttgacatttttttaatataacaaacttgaagacaattcctaacacgaacagattcagaaaatgtaaacaattttgtcctaacacttttagatcggattattattaaatgttattttgaacaaaaaataagttcagagtcctatttgtaccatt

SEQ ID NO: 371296 - DNA, 687 bp, Cannabis indica
tcattcaattttactattttagtgattgtttatatactaaatcatgctccccagacttggatatctaccaaatcatgcctctcgaactttgacatgtacctaaatcatggcccctggacttcttccatgttagacttttttactaaaattggaaaaaagtccttaaatccaacaatctcaatagttcagggggcatttttaacgaccttaaaagttcagggggcatgatttggtacatgtcaaaattcaaggacaaaaatcataattagccttattattatttgcagaatgattatcgttcgaaaaggtatattatatcattagagaaatgatatgttcatttagaatgtacatcaaaatattaagaccattattttagtttttttttttttgttttttttgttttagggacctctttcttaatcactcttgttgtattattctttaaacctagttagtctttaactaacttaactatcaaaaaggacaacttgcatatcgagtccctttgcctatataaattaagagaactactcctctcatttcataataagagaatacaagtcaaatacaagagagagacacaatacagtagagagagaagttagagtgagaaatggagagagatatctcagagagaaaaagggttgggattgggaaattgtattaagcaacattgttgattat

SEQ ID NO: 371297 - DNA, 699 bp, Cannabis indica
tggtttggttgtgttgggatgaatttgctcaagtttgagctttgaaccttaagctttagtctttaatgacatattgtgattcagggtgtttttttgggaattattagttggaatatattgtgtataccttaattaggtactctggaaggtttggttgcatttggtggagttttgagcaaaatatgggatttttgggttagctggtataaatcggctagccggttttaccagtacctgtaaaactggtaagccagtttttgcagggttcccggaatgtcccattttctcaattctcgtccatttcagtgccttatttgggtgtttccctgtttacgaatttagtgtaatccctagagagtataacagaacctatagttgtgggttcgagtttcccgaattagggttttgatcatgtgatttacccggtttcattaaactttgccaatgcctttgaaaggatataacacttatccaaggtgtaagtgtacctatcgctgaatatcatgccagtctaaatcaagtgaaccgaaaaatcagggaattaaactcttgaacatataaccatgattatattccactgtgctgacaacactataatcataaacaaatacatatgttctggacttaatagaatttatacacgaaatataatcatgaaataaatcatgtgaaccatgcaacataaaatgtgatttctga

SEQ ID NO: 371298 - DNA, 432 bp, Cannabis indica
ggactgaatcaaaatcaactgtgatgttaaagttggtggagactccatgtgcattgcggccctggccagagatcactcaggagcggttctttgggctgctttgtcctgccttaacttcagggaccctctgattggtgaggcgacggcgtgtcagcttgcgtttgacacggcgaggctcaggaagcatgaatatgtcttagtggagagtgattcagaagtggttatcaaagctctgaaaggacatcactatatttggaatattgataattatgtatttgtgtgtaatcaactctctaattattttttatcttgtaactttgcttttatttcccgtaattgtaattttgctgcccataatgtggctagatgggctttcgtccagaacttttcaggagttatggagtctccctccatacctgtttctatcctttg

SEQ ID NO: 371299 - DNA, 546 bp, Cannabis indica
tactgaaatggacaagaattgagaaaactggtttctcggggaacatgcaaaaactggttaaccggttttacaagtactaataaactggtcaaccgcggttcctcccaaaaaaacctccaattttctcaaaacttgtccaattaccaccaaactttccagagtacctaaatagggtatacacaatatattccaaccagaaaatctaaaaaaaactcactgaattaaattatgtcattaaagacctaaacttgagtttcaaagctcaagcttgctcaattctatcaccatacatcaaaactaactttcaaagcttagaatcaacataaataaagctcacaattcgaatcaaatacaaatcaaaccctaacaacccttaatttttaaaatcacatactcaaactaacccaaagctttaaaatacatataatcaagggttctagggttaccttagcttcatcctctatgaataccttgctgaaaacaccaagaattagcaacaatatcctagttccttgctggtttcgaagagagagatagagagagaga

SEQ ID NO: 371300 - DNA, 931 bp, Cannabis indica
tacaaagaaattaattacaaaaaattgtaatagtacaaaaaataaaaaacaaaaaccaataatgaaaaattgaaagtctaatactacggctttcactttatttaatgtatgtgtactcaatattataattaaattagtaatataatagctctttgcgcaaactaatttaattttttagtattataataaataattacttacaaatatatattagtaaaattataaatatattttcttatttcatattattattaataatttttatttactaaaaattatatgcacaattgtattaattattatttggaattatttattaagatgtttaaaatttattatatgtagtattttaaattgctttgttaaaaaaaattattcatataaaaataaataaataaatagggtggtatagaaaaaattacggtgttccccataatacattattttcatatctcgatcactaaaccctattgttattgttgtatctcacttgttgtctattgtatctcacttgttgttattgcctcatatttctcctttatatatattgatgattagtattatttatttaactttaatattttaataaattaatattctaataaatattcatatgtattttgtaagtaaataaacaaataatttttaaaaataaatgaataaatattcaatgtgtaacaatccactaaaatactatatgttttaatattataaccaatcactattcaagattttaagggtgtatgggtgtgaccaatattagggtatctagaactaccctatattattttctgggtgattctacaatgcagtaatgcacctctttaaaagggatgtactgatacacccttgacttgtttcggcattcagaaaaaaaaaatttagtttaaattttttttttcatatttatatacgttataactatttaaga

SEQ ID NO: 371301 - DNA, 1459 bp, Cannabis indica
tgtttgagcggggagaagcatcagcagcctggtcagaagcttggccggaagttgaagcagccacctctttcccaccataggcaacttgggccacgtagtactcgaggtacatttccttggcgtcgcctaagtagtcgaagttggcctggggattagccttccaaaaatcaaagaagagctcgaggccggcagtctctaaagcatcaaccttctccctcaagcggttcgcctcgaccgtctgagcgtccttatcatccttcagccgaaggaggacctgccgcagagtagtcctctcatcttgaagacgatcaacatcagcagatatggactcgatggtttcctcaaagcgatcagcagcctcgaggtcctttgtcagcacggtgaccttcttctcagcggcaaaaagcttcttgttggcctcacctaactcatggcgaacagctgcagtctccgccctggcttcctcagcttccttcttggccaatctgcctccgccctcaaggtgtcggacagagtcgtactcttggaagcagcagatttagcccgggagtaagcataacccagcttcaaaccggcctgaacaaaggaaaagactccgcccaacaacacatccaaagatgagtggtccgcatcaaccagctgctcaccgacctcaggaaccagccggttcatgtgatgagccatcacctccctgcccttcttgacctcaggcagcacgggcacgggtagagatggtgcctgcatccgttcaggaatcctcctgaccagctcggacccagatgttggtggcctagactccttagacttggcagatatgggagtggaaggatttgcagtagtcagctcctcagaaagatctatgatctctctagaagacctcttctctgaagacccctctccggccttggacttcttggtaggaggagaagcactagagcctccgctcatcctcttccttaaggcgtccatcatctgccgagacatgtttgcacagagcaaaaatagcatggttagcaaaaaaccaacaaaaaacacaaagtatggaagccaaaaagctggaaaaaaaataaagtaaagcgcagaatgactgcccgcccagaaagtcagaagtccatcatcacctgacatcgactttatctcagccataacgaccttcccttttccagcataaggatgggatggccgaacaggtgaaatgggctcccttatgcgaatgccgtgttccacgggcctgggcgtggccgagagtttcttcttcctcctcaaaggagccacctgctcagcctcagcctcagcctcatcttcaggattcatggactcctgagcatactgctatgcccgagcacctcccttcaacttgcctccgctaagttgaattagctcattctcctgatgagctcgttcaggccgagcagcaatagacttcctcttcttccccgtcacggacttagaagaaaac

SEQ ID NO: 371302 - DNA, 368 bp, Cannabis indica
ttcatattaggatgttaatgaatacttgttagtaaatctagatcctagtaaaatatttccaacactaactccaacacttgtggtgcttctaatggccgtggccgtggctctcgccctatctgtcaaatttgtggcaagattggtcatcttgcctacaaatgctatcatcgttatgacaatgaaccacaaaccagtgccatctcttctaagtctcaaggacacaacccacaggcacttatttcggactctaattgtctagcaaaagacaatggctggtatgtggatagtggagccacacaccacatgactcccgatgctcaaactctcaataccacccatgattacaaaggcaaagccaaaatcactgg

SEQ ID NO: 371303 - DNA, 645 bp, Cannabis indica
gcgaggtggggaacaaatacagcgtaaattgttcatcacattactcgctcgtattattgtgttaaagttattcaaatgcgaaaccggatctatggttccgtcataagacaagacatgcgggtttttgaatctcaaaggaaaaggagtattcataatatctgggtgatgcggctcaagttcctcgtcagggtcatatccagatagtttccctaattcctccacttgatatctcctgaacttgtcttccagctcgtttatccgcaattggattggatcctcttactttggaccaagttattggcgaaggttaggtttcttccaattcaagtgctctcgtagatccgattgggagtaattgctggcagattttgtcttactcatagatcgcgtcttactcattgactttgtctttgagtggctcgaagatttaatggttcacatactttctcgatcattagctcgttgagtactttctcctcttcgagttgatcgactatgtgttctggatcgtctcgaagtcacacttgcttcttcacgctctattccttcctcctgagagtggtttgtcgtatttccccaatcggggtatgtacgagtccacgccctatgggtttgggaagaacattggtgatttctagcaggtga

SEQ ID NO: 371304 - DNA, 867 bp, Cannabis indica
atttaagacaatctttcaagattaaagacacattaccatataaaagatcaatctttaaatggaaacatatcaaaataaatcaaagaagaataaatgttgatacttaccaattaagcacaaaatttccttagcccatgaatcaagtcaccacgcctccctctttttttttttatttaatttttaaagaaccgaaaataaaataaaatatgtacaataaatataagaaattctaaaccaagcaatttaatcaaatatcattgacaattgacaaaaatacatgttatgctttcaaaggaaaataactaattagtatctcatgaaataatcatacttaattgatgttgaggaaaaagatatgcatgttactgaaaattgtgaaccaggattatcaatttaattttaatagaggagacttacagatttgaacacacttgtcagacataagtgtgtgcagtgaaaataggatcattgtccttggcaagatttttcattttcgcctttttcaatttgatcccgcaactggatgctttcacaccatactgaaggtagcccttttctatggtagtgcatcctcatcatagttgctaattacaatgttccagcttactcatcagatggctttcacacctcagtatgggtagctctattccagcaaggggcctgacaagactgaaacaaaaattgctcaactctgtataagaacattatttaatcctagacacaaataaagagtaacatgaaccttttaacacaacatcacaaagtatgatcagactgagatcctaactaattataatccaaaagcataaacatgatttgtcaaaatacaatgatagaagattaagagctagagaagaatcacataac

SEQ ID NO: 371305 - DNA, 239 bp, Cannabis indica
tagttctagttgctacagaaacctttaatttgagtaaatgaagttgtagcggatccacacttattcattcagatagttagccaaccgcatgagatttagatagtgtaagaacgcttaacatccgaataaaatagacctcatgattctcaacaacatcaaataaaaaataaaatgtataatgcaaaagattatttcctaatccgagatagtagtaatatattatggactatataattaat

SEQ ID NO: 371306 - DNA, 588 bp, Cannabis indica
tgcttccccctggtttcctctcaccgtcgcgatcccagcttcctgggcagggaactttaggcacaggtgccgaatggatgtgaccgcgccgaaatctaccaaggtcggtcggccgaggattgcgttgtaagcgatcgggcagtccaccaccacaaaagtgcagtacttgaatgtgctctggggggtgtccggacacaaggtgactggaagtcttacttttcccattgggataaatgtcgttccattaaaccctgtgagttgggacccactgggtgaaaggtctcggttcgtcaggcctattgcattgaaggcatccttgaagagcaggttcacagaacttccgttgtcaatcaagactctggccaccactttattagcgatgggggtctctataaccaacgggtcatgatgagggaagcgcatcgtcttggcatcttcttccgtgaatgtgatgggttgatccatcagccgaggcctttgagctgggagttgagtaacctcccaaacctcattgtgtttcacggcccccgcgtaccgctttagctccttgcgagtagctcctccaatatggggacctccggagatcat

SEQ ID NO: 371307 - DNA, 527 bp, Cannabis indica
tggcgacccgataaggtggaagtacgagacccaacaagtggtattagagccaaaggttgagaacattgagatagtaggttgcaattgcgatgtgtgggaaaagccctcaatgtgataacttcgcaattgaagatttacattgtgccttgtatcgaaagtctacctgatattgagatagtcaggtgatgtgtcccgttgatgattacggtggtacaagatggagatcggtgttaggacctatgttgaaagtcttcctgacaaaagtgatggtcaggaggcaagttctgttggtgatagcagtgacataaagtagttttgctggaggggaggtcacgagtatgtggtccttagtttgaggggaggattgttggagtatcaacccaagtcccacattagaagaataagtaaaagttgtcttggatataattgttccaccttctccattagtataaggccttttaggaaggtgcccaaaaacaaaaccatgagggcttaggcccaaaacgaacaatatcatactaacgtgg

SEQ ID NO: 371308 - DNA, 623 bp, Cannabis indica
tcaagtgtgcaatcatgcatggtgtaatgcatcaataagaatcgattgtttcccaacatatctttactcagtagtgaatttaaatgcaatgcaacataggcttgatcttgcaagataaatcaaccaaatgattttgaggttgaacactgattgaaaaataataaaaacaaaggaaactaacaggaggtttagaagccatattgaagaatgatgaagcaatctgcaattatggtaaaaaaatttggcgtattataatgatgtattattagccaccgttttcacctttgtttcaaattttgtgtaaaaataaattttcctagtttctcacgaagatggtagttgcaacattcatatctgcatatttaaaatgcattggcaacaaaaagtggagcaaaacaacaaaaacaacagaaatctcatatctgcatattttaacaacagtgacgagcagagaaaacattaacacataagtattaaaaatgaataaataaaaaataatctgaaatttctgttatattatttaatataataatatgtaaattaaaatgtggtaatatatgttattatgtgaataatatatattaagtgtttagtaaataaattgtgtaacatataatttattt

SEQ ID NO: 371309 - DNA, 843 bp, Cannabis indica
acccgaacccagactaggactcgaacccgaacatagaccgggacccaaacccacacattaattgggacctggacccagaataaggatagggacctgggaaacagaactaggatcgggacctagtaaccgacctagacacgaacttggacctaggacccagctcgtgacccggcaccacaaatggaaccagactgggacccgagattgggatccggatctagatcaagggctgggacaaaacccgtagtccgtgtctggatttgagacccagacaaggactcgaaccctgacaacgacccgaacccacacccagacccgaaacccaatcccaaaaccaaatgtggacccgaacccgtaacctgttacccaaaattggaaacaaaaccagaagttaatcgggactgaaactaggatttggacttggaatcataactaaaatttgacgtagatctacaaccgtaaccagacttagacccggactccaaatctgacctagacctgaattgggagtacgaacccagatcccaacccaaacttggattcgggacccgacctgaacctgaattcagacccaaacatggaaccagactagggacatagaaccagggtcgggacttagaaccgcacccagtctcgatcctgtacccaaacttagaaatgggacctgatacatgaaccagaactagacggaaacccgtgacagtgatccaaatcctaactcaggattgaggtaacggggcctggaacagactagtagtcggtgtctagatctgggactcagactaggacaagaaccaagacgaagaaccaaacctgaacccagaccaagacctgggacccaaa

SEQ ID NO: 371310 - DNA, 749 bp, Cannabis indica
actaaaagttcccctatcaataaaaagcacgacaataccccaaataacataaaaatgagaaaatctagggttcctgaaaatctcccaaccggcagaccggttgcccaaccggtattccggttcttagaatttcagaaccccatccggaattccggatgcacaagaaaacgccaagaaaggctacaaggaaaataattaaagtttaagcacctcaaaaccaagctgattcttgcttgaaatgcagaagaagaactccaattccagctgctcaagaagtggccgaaagagagaggaagagagaaaagcaattttccaaattttctaattttcttactttgaaccaaatgaggataaatgcaaaataaaccttttatttcagccatcataaatcaaacaacatttaattttccaatttctaagtccactaaaggacaaaacataaatggggcaaaatgactattttgccccttcacactaaaaaaacataaagggcactaaagaggtattttgggaaattctaaattcccagccaatcccgacagtcccaatgtctaaataaccgtcccctaatactaacatactaagttgtgattttactgagccaaacaccgagttccatgttaccgagcaccggaaatgcaaaattatgaaaatcactatatgacataaaatgcatttcagaattcgataataacagcataaataattatttaaatatctataaatatttttccataattaaacatgat

SEQ ID NO: 371311 - DNA, 830 bp, Cannabis indica
tcagagtaaataactggttttgagtctagtaattttagctcttctaggactcctttaacccatatactttctttaatagcttctgtagttgcaatgtattctgattcagttgtggataatgccacaacaggttgtaattggacttttcaacttacacaatttcctcccaatagtagtatgtaggctgatgtagattttctactatctctgtccccagcatagtctgcatcactgaagcattctattgctgttcttccttgttgtttcttgtacttgagtcctagcttagttgtcccaattaggtaccttagtaaccatttcatagcaagccagtgtgtcttaccaggatttgtcatgaatctgctaagcacactaatagcataagcaaggtctggtctagtgcttaccattaggtacataacagatccaatagcattagcatagggaattttactcatttcctccttctctgctttgctctcagggcattgcttcttagatagtgtaaactgtgtagttataggttggctagcaattttagatcccttcattgagaatttctcaattatcttgtgtatgtagtcttcctgagttaggctaagtgtcccttctgctctgtttctcttaatagaaatgcctagaatcttagtagcttcccctaggtctttcatttcaaactcagtcttgagtaggcccttcattgtgtttactcttgctctttccttactgattataagcatatcatctacatacagaagtagatatatgactttattaatatcagttcctttgtagtacaaacagtggtcatagtagcttctagaaaatcc

SEQ ID NO: 371312 - DNA, 656 bp, Cannabis indica
aagactttcagcaagaaggaggtttcagcgtcaaagattcagagaaagagatccgggttcagatattgataatgctctgctacagaaaggaatcaagggctagatatctaaacggaaggagtcatattattccgcttcacccaatgtaatatctgaacggaaggagtcatattattccgctgcacccaatgtaacgagtccatataagtgttcttgtgttacccaccagcccgttgtaaaaattgtgaaccagcatccacttctcaataccccaatgagggcactttctgatgagatccttgaacctctcccaagactcatggagagattcattctctagctgacaaaaattgttaatttctcctcccagtttagtagactttgctagaggaaagaacttagacaggaattttgttgccaagtcattccatgtggctagagaatttggtggcaaggagattaaccaactcttggctcgttctctcagcgagaatagaaacagtctcaccctcatcaaccaacttgttgtgatattttgcacacgcaagtgtgcgtatcgtcacaagtagtaaactcaccaggagtgaggtcgatcccacatggattgtagttaagtacgttaaaattaaattttacttctatttggtgaaataaaa

SEQ ID NO: 371313 - DNA, 572 bp, Cannabis indica
tatattatagatagatatatagatataaggcactttttaatatataaagatatatatatatttactcaaattttggctaatgatcattatacccatttatacgattgaattataaatgaatcaataccccttatataaaacctattgataaaataataacattaaccagcttttatatagaaaaagtgttcaataataacatatatacaatgtgcataatgcacgagaattgactgaaatggtttgttgcttttaaaataaaaggttccatgcattaatgtatatatgtgaaaatagtatattgctgtaataatactattatccaacaactataaacaaagagtttacgtaccaagttagaatgcatataaaggtcgatttccctctcccttttttttagagattagaaactatcaagggtagttttcaaaattattttatatatatatatatgttggtgcactcttaatgggtattacccataaatagataaaattagaaaattttgagtttttatacttaatttttctatctatttaaaaaaatatattatttttatatcatatgagctg

SEQ ID NO: 371314 - DNA, 557 bp, Cannabis indica
ggcaaatgtcaagctcgagcctgcttccagtgtggggtggaaggtcatctgaaaagaaattgcccacagttatagagatcggagcaaaagaaaaatgatacactggttccccctcgggtactcgctttgacctagacaaaagctgatgctagtccttctactgtgacaggttagatttttattgatggtattatgttgtctgctttaattgattctggtgctacgtattcccatatgttgagtagagtgattagaaatctgcataaacctagtgatgttttaccaagtggttttggtaccttactacctattggagagttagttatctccagcaggtgggttaggtcccttctagtgtatgtagaaggtatattgtcagtcaatttgattgaattaaatatagaagattttgatgttatactgagaatggactggctagcaaagtataacgcaaccatagattgtaagagaatcctcctcagaccacaaattaaaaaaaaaaatgaaaaaatattataaaaattgcagaatgctctctggaagcaggacgctgcatc

SEQ ID NO: 371315 - DNA, 614 bp, Cannabis indica
agtatgcatgttctataaaaaatttattgaacatgaaagagttaaatatcataactttgtttggaataacttcattgtgcctaagaaccagttcgttgtttggaaatctgttaatggaaaacttcttactaaggatcttttacaaaaggtgctgccacacatggagagctctacctgctctgtttgtgagaagatagaagagagtcatgatcatcttttgtaataaccaaaatatatatttggtttttatgttagtctagaagtttcgagtgaaaatagtaatttcatagaataagttgttagaaaaatgatacttttataagtatatgcttgtgttaattttctaaaataaaagagatttgagtattagcaattatttagctcaaacatgaatataagcatatattagagattttatgttatagtatttataaatagtgaaaaaaaatgattaggtggaattattatgttattattggagtagaattgcaatagtagtggtagtggtcgtatggtaccatatagactttgggacaagtttgaaataatggtctataggtggccttttattttgagcaatggatggaggattaagcatgtcaaaaagatccatt

SEQ ID NO: 371316 - DNA, 484 bp, Cannabis indica
attagtaacctgctattacaggttaaagaaaaatgtaaccatatggttacaataaaaatgtaaccattgaatagtcacccatatatgtatatactatattaactaaattatataccacaattaaaatatatataccatgacgataaaattatacacaactattgtatataataaaataaaaaataattaaatattatttaaaataaattatgtattatataattaaaatatataaaaataatagttaaatatatgtagcatgccagtaaaattatgtacagatattaaaatatttgtattatgctaacaaaacgtactatataccactattatacatagaaaataaaagataaatatcatctaagaataacaatataccatacaacaaaatattgtacaacaaaatcttacaacaactcaataaaaaaattaaaaatcaacataattttcaaataaaaagttttaacaaaactaatagatatat

SEQ ID NO: 371317 - DNA, 556 bp, Cannabis indica
ccaatcacacagaccaagagattacattgcaaagacaacactacctcggcggatgagggaatcagacaagggaccgattcctgaatacaacctgaacattagccctgtcgaaatagttgcagtaatgaaaggaatgggaaaccaagtcaagtggcctgaaaagattaaaaaaccagcagcaatgcgcgacacgacaaagtggtgtgaatttcataatgaccacggacataccactccagaatgcatagcattaagatatgaagtggctggactcttgcgcaaaggtcaattgcgagattttttatcagacaaggggaagatgaccgtgacggaagcagacaagaggccaacaacaccaccagaaccacctcagcacacccggacatgtaatgtcatctccggagggtcagaggtcagcggcgtaacatactcagctgctaagaggcatgcacgtgaaataatcgggacagagggtagaccaaagaaacaaccagcagtctataacggccagatcatcagcttcgtggacgacgaagcttcagatttgctcaatcct

SEQ ID NO: 371318 - DNA, 724 bp, Cannabis indica
tgaacctagccagctcgtgacctggcacctgagatggaactagactgggacccgagatctggatccgaatatggacccagggcttggacctaacctgtagtcagtgtctggatctgggaacaagccccggacctgaacctagatcaggacccgaacccagtcccaaatccaaacctggaccttaacctgtaccctgtgactcgaaattggaaccaaaatcggaagtagaccgggacccaagaacaggaccgcacccaagacatcgacctggacctagaaccgttacacgatttggacctagacccggaaccatagccggaccaggacctagactccaacccagacctagacctgaaccgagaaccagaattggatctcaacccagatctggactcggtgccaaccctggacccgaactcaaaaccaaacatggaaccagactcgggacagagaaatggggtcgggacctagaactgcacccaagtctcggtcccgaaccgaaactcggacctgggactggggacctgaaccagaaccagaccgggacacgtgacaaggatccagatttgggactcagaccaggacccgaacctggaccaggatccaaactgggaccctcacccagactcgggactcaaaacgggaacctaaacaagaactgccagactaggaccctcgaacaagactaggatagtgaccaggacccggactcaaacctagaacc

SEQ ID NO: 371319 - DNA, 509 bp, Cannabis indica
gcacctcaaccgtctcagacacacatggatcaaggttcccctgcacattctcaacattcagcggcatcatctgacatgcatacatcttcgacatcacagcctcagcatctagtaccgccgctctcgcagccattgccacaaccatcacaccctccaccgccttacccttacatgtatggaccaccgtatccattcatgtacggaggaatttcgcagcaacatccttctgctttctttccaggttcgactaatatggctggatcatcacagcaaccttcgtcgtcacagcaagctcagccagtctacccatatcaatggatgatgggggcatcaacatctcagccgctacaaccaccacatacatcacagccggtacaaccacctcagacatcacagccgctacaacaacctcagacgtcacaacgccagccatcgagtcttccagagttcgatgagaacgagagatcacatgactttttatctcagttgtagaactaaaaggctactat

SEQ ID NO: 371320 - DNA, 818 bp, Cannabis indica
gtcaatccgaatgacattaccagaaactcataatgcgcatatatctggttcgaaaagcagtctttggtatgtcttcttctcgtattctaagttgatgataaccagatcatagatcaatcttcgaaaacattgtcttttcctgaagctgatcgaacaaatcatcgattctgggtaacgggtacttgttcttaattgtcaacttgtttagctcccgataatcaatacacattctgaaggaaccatctttctttttcacaaacagaaccggagctccccagggcgatacactgggtcgggtaaacccaatatcaagcatcccctgaagctgtaacttaagctccttgagttctgctggagccattctatatggagctttagaaacaggttcggctccaggtgccagatcaattatgaaatcaatttctcgttgcgggggcaatcccgacaattcctcgggaaacacatcgagaaagtcttttaccactctgactacctcaggcccaaatgtttcgggtctgctggagtcaatcaccactgctaaaaatcctacacatccactgtgtagtagatctctagccctcaatacagaaataaccgggattcgagacccctgaactgatccaacagagacaaatggatcttcaccttctaactaaaaagtcatcatttccgcttacaatctatactggccgaatacttggacagaaaatccatcccaagtatgatgtcaaactcagttaatttcagttctataaggttagcgcttaactccctatcctcgatcctaaccggcatagacctaatgcgcctattagaga

SEQ ID NO: 371321 - DNA, 805 bp, Cannabis indica
ataacattgaacatagaagaaaagaaagcaatttgatatataatggaaactagaaattaacattcaataatgaaattaagaatccatgtctcggtttttgaaataatccttaactaaaaagaaactaactcagaactagacattataacgataatcataataaatagtaagagtttaaggagaagaaaaaaaatatgatgaagaacacttcgaagtcgcgatctccgtctcttccttgctctctctctaagtttctatctcaatttgggagttccaaggttctgaaattcgtagcctaaaaggttctatttatagtgcttgaaaagatagatgaatccccttagaattaggattttttttttaaaaaaagataagtcggcgctatagcacaggaattgagcgctataacgcccatgagatatttcctaaataacccatgttctgaaattattttttttccagactggcgctatagcgcctaaaacctactgcaatatagcgcctggcacctatttttgtttatgcacctgattagtattttggccataacttcttcaatacaactcagaattggacgattcaaaatgttccggaaagctaaaaatgagacctaaaactttcatgttgagctccaagtccagttttgcttctaagatcatcaaaacgtgcaattaagtttttccttataaaaccgagctcgccgacttcccctattttccaccaaaatatgctaatattcgtccaaaagactccaaatgcatgattagtctttaaaatatcaagggcatgtttggaaagccacctg

SEQ ID NO: 371322 - DNA, 836 bp, Cannabis indica
atctatatatatatatatatatatatatattcaaaactaaagcgatgtaaaaaaaaaaaaacttcctgcatttttttttcctcaatctcaaactcaattctatatgaaaattaaagctatacaaactaataatgcaaaagaattcaacgtcactactttttatgtcaatacatgtattatacatcattattattgtgttgacacctccaacaaaattcagttgtggagagaaaataccaacacatccttaatattgccattattttttgggaaattaccacatataatattttttgtaatttctaatttacggtttaaatttctaaagtggttgcagcgctagttgcaataggagaatctgtacgattttttgttgcaatttaggctgcagcgctagttgcaatatgggtttctatgtagaattccgtaaaaaaacaaaaaactagttaaaaaagtgttaccaaacgcatcctaaggctattgatttttatgtgttagtttttaatttagttactttacctaactaattttttttatgtcagatttttaattagttgtttaatgtaattagattttgtaatatgtcttattatttattttttttttaattaactgatttttatgtcctaatttatcttttgaatgtttaggtgttttatatttttgtttcagcttttcattttgttgtataatgtaactggttattctgtttaattgttggttttatttattacgtaactgggtttaaagtttcaaattttgatttagttatctttcgatagctaatttttgtgtgttagtttctcatttggttgcttcacgtaagtgatatcttt

SEQ ID NO: 371323 - DNA, 480 bp, Cannabis indica
aatgactttatacgcgaggtgttttatccctcgtggatagccaaccctgttctcgtcccaaaacctaacggaacttggaaaacttgtattgacttctctgatatgaataaggtgtgcccaaaagattgttttccactacctaggattgaccagcaggtggatgcaactactgggcatgagcttatgtcattcatggatgcatattttggctataactagataaaaatgcatgttctagatcaggaacatatgagcttcgtaaccaacatgggactatactattacaaagtcatgtcatttgggttgaagaatgctggggcaacatatcagcgattggtaaatgagatgttcacgaatcagatcagtcgaaacatggaggtttacgtcagtgatatgttggtaaaatcagtgaaaagtgggagtcataccaaggacctcgcagaatgcttcgaaatactaaagaagtacaatatgaagctt

SEQ ID NO: 371324 - DNA, 553 bp, Cannabis indica
ttccaaggtctaagttggggtcgaagtccaaaatattgattaaaaaaattatttaaaaaaatttgaaagtaatttttttttgttttcaaaaggctaattatgatttttgcccccaaactttgacatgtaccaaatcatgtcccctgaactcttaaggtcgttgtaaatttccccgaaattattgggatcgttggatttaaggacttttatttaatttaagtaagaaaagtctaacatgaatcaaactttaagggcataattttgaacatgtcaaagtttgagggatatgatttggtacatatcaaagtctgggaagcatatattagtacatggacaatcactgaataagtaaaattgaacgaaattggacaaaagtctttaaatccaacaatctcaatagttcgagggaaatttttaacggctagaaaagttcaggggcatgatttgatatatgttaaagtttagggagcaaaaatttatttatttttaaaatttttattctcaattaaaaaattagaaagtgaaaaaagtttctagaatatgattttaaaaa

SEQ ID NO: 371325 - DNA, 724 bp, Cannabis indica
agatatttgcttggaaaccagtgttggtagcaaattgattctcaaagatgttaggcatgttccagacattcgccttaacttgatatctactggaagacttgatgatgaggggttcataaactggtttggtgaaagtaaatggaagctcaccaatggttctcttgtagtggcgagaggaaagaaagtgaatactctttatgtcatggaagctaagctacacaaaggagagattaatgcagttcaaaaagatgcaaacattgatctttggcaccagaggctcggtcatatcagcgagaaaggacttcaaactcttgctagaaagcaattcttaccgaatttgcaaggtacgcctcttaaaacttgtgatcattgcttagctggaaaaacacatagagtttcttttcgtacacgtccaccatctagaagatctaatgttattgatctgattcacactgatgtctgtactatgcaaactagaactcttggaagtgcactttattttgttacttttattgatgaccattctagaaaagtttgggtttttgctttgaaatctaaagaccaggtgctcgatgatttcaaagaaattcatgccaagattgaaagagaaactagaagaaagttgaagtgtgttcgagcagataatggcggtaagtataggggtccatttgaatactattgtagactccatggaatcaagcttgagaagtcagttccaaaaact

SEQ ID NO: 371326 - DNA, 488 bp, Cannabis indica
gtcggtttagagtcatcctcaggtgttcctcatgttcctccatagtttgggagtagataagaatgtcatcaatgaatacaaaaacaaacttatctaggtactccttgaacaccctattcatcatatccatgaaggctgctggggcattagttagtccgaaagacattaccaaaaactcatagtgtccatatcgtgttctgaatgctgtcttgggtatgtcttccttccggaccttcagctggtgatacccagatcttagatctatctttgagaacacagccgagccttgcaattgatcaaagagatcgtcaatccttggcaaagggtacttattcttgatggtcaccttgttgagctcacggtagtccacgcacatcctcatacttccatctttcttcttgacgaagagtaccggcgcaccccaaggtgagtaactcggtctaatgaaccctttgtctaagagctcctgtagttgtattttaagctct

SEQ ID NO: 371327 - DNA, 1038 bp, Cannabis indica
ctatctgcaaggaaagacagttgtgggaaaatcgaatctggttgtcaagagcagtgatagagacaacacaaggctatggcacatgagactaggccatgttagtgagagaggtctctatgaattggagaaaaagggtattctcaaaggcaaacttggcaaagaactgggattctgtgaagagtgtgtgtatggtaagtgcagcagagtgaaattcactccaggactacacacaaccaagggaaagctagactatgtgcactctgatctctggggtgcttcaagaactaagaccattggaggtgctagctacttcatgagtattattgatgactattctaggagagtttgggtgtttctacttaagtctaaggatgaggcatttcaaacctttgttaactggaagaaactaatagaaaatcagtctggaagaaagattaagaagctaaggactgataatggattagagtattgctcagatcagttcacaaagttttgtcaagacaatggcattgctagacacaaaacagttgtgaagacaccacaacaaaatgggattgcagagagaatgaacaggacattgcttgagagggtgagatgcatgctaaagggtgctggtttagacaagaaattttggggagaggcactgcaaactgcatgctatctcattaatagatgcccttcaacagcactaagatttaaaactcctcaagagttttggacaggtgaagtacctagatatgatcatctcaaggtttttggctgcactgcatttgctcatatcaaacaagacaaactagaacctagagccatcaaatgtttgttcttgggttaccctgatggtgtcaagggttataaactgtggtgcctagaagatggacacaagaagtgtttcattagcagagatgtggtgtttaaggaacatgaaatggcaatgaaacttaccaatacagagaacaaccatgaacagcaaagtgttgaacttcagacagaccaggagaatacagaagttgcagatcaggtggatacatctgcaacaca

SEQ ID NO: 371328 - DNA, 641 bp, Cannabis indica
ggattccaccttgaatccttcaggttgagacatgtaaattgtttcgggatattggtggctaaactactcaaactacacatctagttacacttaacccctaaacaaaattttggtggtaaaaccctctctactcctgttttattttgctcgacactatttcgtcaccctactctcgtttgaccccaaaccgtcctatgtggcaagccaaatcacaatccatatcagctatttggtgccacgtagaaaactaaaacctaccaaaaaccctcattaaataaaaccctttaaattaattagaaaacctaaaaaataaaaaaaaaatcaaagcccccataattaattaaaattgttatcccaatttttgcacagggtgacatgacattcttttaggtgacatgtggagaaaattcttagacctggacggatggtatgctccacgatgtgttgcccaatgtaatttatcattcataaataactcatctgagtcttagcatggaacttctggatagggtgaatgaaactgtccgagcaacaaatctcatagtgaagtcatatacactgcagacaagatcaagaagggggacgaaaaaactcatatgaaaggccctgaaaaaatactcagaaatctgaataagattgac

SEQ ID NO: 371329 - DNA, 463 bp, Cannabis indica
cgaccacgagtcggagttggaggctttgaatgtttaactcctgcagaacaacaaaaacatatgtatgaataacagatgcctatttcgtactggtcgggtatcgggttacaacccgactaaataaatgcattgttttaaaacccgaacccgacaaccgtgctgtgtattttcgggttagacccgactcgaccacgcgcgtttcaaaattttcggcttttttcggtagcgggtcggggcgggtggtcgggttttcggatttgcgggtataaatgttcagccctaccattggcgccagaaataaaacaccatttcttgaaggtgttggggattattttactaggatctagatttactaacatatatgttgattaacaccctaaatatgaattctctaaaacaatgaaatttaaacagatataaattaagtgtaacaccctaactagcataggcgtattacgtgatt

SEQ ID NO: 371330 - DNA, 677 bp, Cannabis indica
atgaatgtatttaggtccaggtttggggttgtgtcccgctacttaggtcttgcgtttcgggtccaaggttgtgtcccgtgtctcgagtctggggtcgagttttggatctcggtcccacttttggggcatatttttggggttaaagtcccccatctaggtctggatccttagtccaagtttggttccaggatcaagtttggggcctaggtcccccttctatgttcggatcctaggtcccggtctaggtccaagtttaggttggggttgggatcccgagttagggtccaagtctaggtcacagtatgggttcaggttgtagtctggttccaggtcctggtctgagtcctagtcccttttcgagttcgagtctggatcgttatctgagttctaagcaaattctaggtcccagacgaggttctggtgtgggttccggtccgagtttaggtcctatgtctaggtctaggttcgggtccgtatccgggtctgggtttggggcctgggatccaatctcgttatgggcatttgtttgtacccgtgtcatggttagggtttaggatttagggttttgggtttagtgtttaggaatttaggggtatgtgtaaaaaatttaggatttagggtttaaggtttagggtttagggtttaagggaccgcttcaagtctcggcttcaatttcg

SEQ ID NO: 371331 - DNA, 619 bp, Cannabis indica
aacccagaagttcgtcaagaaaaacatctagaaattcccgaaccaccttgatgtcttctggccgaacaaagtcaggccaagtggtatcgaataccacgaccagaaatcctagacatccttctcgtaataattccgtagtttttagcactggaattactgagatccgagatccctgaaccgatccgacaaaaacaaacggttcttcaccttcaggttggaagattaccatcttcctcttacaatcaatactggctgagtatttggtcaagaaatccatttccaatataatatcgaaatccactaaattcatctctatcaaatcagcactcaactctctatcctctattctgatcggcatagacctaatccaccttttggagataactaactctccgtcaggcagtagggttccaaaccctgtttcatagctatcatgcggtctacccaatttattaaaaattctggccgccacataaaaatgagtgactccagagtcaaacaacacagagaaataagagttgttgactgagagctgacctgttaccacagaggggatggcttctgcatcagcttgggttatcgcgaacaccctggctagagtgggttttgttgggtttta

SEQ ID NO: 371332 - DNA, 609 bp, Cannabis indica
tatcagatttggtcagccaaccctgagtttttagttttttgggtgataaggccgaaaccatgcttgcctattgcgagaagacccggaaggaagaattttgcgaggaagttgctagagacttaccttgcgtttggaaacaccaaaagcttgctgaaaatactagaattgttgaagaaaaatcagaaccctagctagttccatgaggttcgaaggagagagagagcttgatagaaaaagtgatctttgatgatatttgattttttgtaaaatgagataactataaaaattgttttagttaatttttaacatatataaaattagatttatttacttaacatatgtccactaaaggacaaaacaccaaaaagcaaaattactatttttcccttcccacactacaaataataaaaggtcacttaggggtatttttgtcaattctaaattctcaactaatctcgacattcccaatgtctaactacaatgcattcctatactaaaaatacaagtgttgacttcgcttttagctaacaacaatgagtctattttataagcgataaacgatatgtagtaacagatatatatgataaagcaataataagacacaagaat

SEQ ID NO: 371333 - DNA, 764 bp, Cannabis indica
ttctcataaataaatgatcgcaaaataacacatgatcattatgcatgctagagttctcacacaacttaacaagatggaactcatacacaggtaagaaaaatctattaaatattataatcaaatgcattaatttactatcgaaaggatagataaattgtgattcataatatttaataattttcttcaccatattacgcatctttaataagcaaccatcatcgataggataattaattactcataaagatctcaatgttatttggaggaaaatacaatacttaaataaattaatatttaagtgttcctcatcaccaaacaatttcccatgcttaatcttacgataggcaagaaaataagcattaattgttgaaataaatcacaaaatttatgccacaatactaaaattatcaaccaaatatgaataaaattcatgcaattagtattgtacatgccaagaaataatagagaattaaaaaatatgagaaattgtggaaaatggcccaaaatgggccacgcacgcgcccccacgcgccctgagaattttttttttttttttaaacgtgtccgtacgacatgtcgtttgacggaaacgacgtgtcgtttggacaaacgacgtgcgcaggacggcaaacgaccatcgttcgcgggaactgttggaagttattttaccaggaacttagatctactcacaagtatgttgatttaacaacctaaatataaacttctaaaacgatagaaaattaaacacataagagtatcagaaa

SEQ ID NO: 371334 - DNA, 657 bp, Cannabis indica
tttagttgcaaatggtacttgggactttggtttatttaccttccaaaaaatgggtcatagggtgcaaatgggtgtttacgttaaatttaatcaagatggaacaattgctcgcttaaaggtccatcttgttgccaaaggttatgcttaaacgtgtaggagtggactattgtgatactttttctcctgttgctaaactcacatctgttcaagtgttcatttccatgggagctactcatcattggcctttgcatcagcttgatattaaaaatgcttttttcatggagatcttgaagaagaagtgtatatggagcaatctcttgggtttgttgctcatggggagttagggcaagtttcacattttacaaatctttatatggattgaaacaaagtatttgagcttggtttggtaaatttcgttaggctattgagaaatttggtttgttgaaaagtaagtcagatcattttgtgttctataaaagattaactactggtatcattttgttagtggtctatgttggtgacatcgttattactggaaatgatactaaatgcatctcatcctttaaatcttttattcatacccagttcatacgaaggattaggggtgctcaagtatttttgggtgttgaagttactcagagtaaacaaggtattttt

SEQ ID NO: 371335 - DNA, 1096 bp, Cannabis indica
tgagtacgagcaggtgaagattgtacatgtccgggcggttaggcctgcagcgtaagatctttgagacatcgaggcttttgctgtatagtcgctgggcgacaaacttttgtatatgtgtatagcaaacttttaaaaagtattttgtaaaacggatcccgaaattttatatatctaatactttaagtttctaattaaataagtaaattttaattaatcatgttttcattaaactcgttgattagcaacaagctgcacagtaagttaaaaatcacgctaacacgcctaagctagttagggtgtttcattttttatattgattaatatttatgaagctaataaaaaattaaaattgagagaattaattaggagagaacaaataatcctaattagagagatttttgagtgtcacgtcaccgtcttatgtctcttttttatatatatagatagatacatatattaatattatttattttagattaatttaaatatatatatatatatgaatattaatatattatttgaaatattattattttttattgttatttttaatgatgggagtatgttcaattttaatattcttaatctttatatttatcttttcattgttatttttaatattaggatatgttcaattttagtattcttaaattttatatttattttttattgttatttttaatattgggagtattttgaatttttaatattcttaaactttatattattttcctcaaatttttaaacctttaaatattagtttttaaaaataattaaaaaattaataaataatttcctttatttatgtatgaaattttaaaaatacacataacaaaaatataactaagtatactacaatgcatgtaacaataaactaactaatatatatatatattatttttgaatgaaactagctaatatataatttggctcgtttggtacgctgtatttggccgtattgtattgtattgtgaaatttcgtattttaatattctcattttaattatttaattaagtgattaattaaatacggaataatgaaactggttccaaaaaaaaaaattttttcgtagttacagaatacaactctgtaact

SEQ ID NO: 371336 - DNA, 473 bp, Cannabis indica
tcccaaacctcattgtgcttcatggcccccgcgtatcgctttaattctttgcgggttgttcctctgatatggggtcctcctgagatcatggccactctcccattaggtttgggcagtagaccggggatatgctgggcatctccagtgggagcaactggagccaatactcctgctgcaccccctggtgctccctgtggtaaagttccagtcgcctgacctgggttgagatggggcaaccgatttttgatccactcgtagaggtgtcccaatcggattaggttttcgatctcatctttgagatttttgcattcattggtgttgtgcccaatgtcgttgtgatactcgcatctcttgttggggtcccccggaactatccttgtacaagggaggcggtctccgatagtgcgtattttgcctagtagcaaagtacacacgctcttgggagtccgtcaactccatgtactgcatgtatt

SEQ ID NO: 371337 - DNA, 720 bp, Cannabis indica
tgataaaccagccgattgcacttggtacagaaaaataatagggaagctgcaatatcttgtaatcactaggcctgacttagcttactcagttaacaagctaagtcagttcctatctttgcctaaagccaagcacttgcaggctgtccaaaggatattacaatatgtaaaatccactcctggacagggaatcttcttctctgctgcatcagaaatcaaattaagggcatacactgatgcagattgggctgcctgtgttgatacaagaagatctacaagtggtttttgcatttttcttggaagctcggccatatcttggaaaagcaaaaagcaacaaaccgtttcaagatcttctgcagaagctgaatatagggctatggctaacactacaagtgaactaatttggttgctttcactacttaaagagatgagaattgaacatgagggaccaacaatcatgtactgtgataataaagcagcccaacacattgcagctaacctagttttccatgagagaacaaagcatattgacatagattgtcacttggtaagggagaaggtgcaacaaggcatagtcaaaactgatcatgtctcatcaaaggatcagattgtagacattctaactaaaacattgtttcctaatcaattcaagacacttaaagacaagatgggattggtaaacatttaccatccatcttgaggggagtatcaacaatcacagtt

SEQ ID NO: 371338 - DNA, 427 bp, Cannabis indica
aatttgcgtattgatgatagtataaggtctatgattagttactagctgttgcctaagtccttctaggaaaataccctagtgacgggaaaattttagaatgatggaatggttgtgtacttagtaaaaaccattactagattcatcgatgtcttgatcgtgaccttaggaaaagctagaactgttaactaaggtttgcatgtttgatagctattctaagtgattatgggtgaaccatcccatggtcattaagataagaaagtgtttgtttcgacaaataccacttttctaagaaaatggacttagtctgaaaagaaagtaacataatagaggagatattttttttattcaaaaagtcttctatcatcttattcgaaataagatgatcccactacctctgttgacttgacacaaccgaagaggtcaatac

SEQ ID NO: 371339 - DNA, 841 bp, Cannabis indica
ggccagttttgctaaggcatcagcgttggatttttgttctctaggaatttgttcgattttaaagtaatcgaatctttccaagctcttccgaacattttgtaaatacttcgccattttcaagtctttggcctggtattccccgaggacctggttcacaatcagctgggaatcactacgtcagatgaggtttttgactttcaacgcctcaactatctttaagtcggcgatcaaagcttcatactcagcctcgttatttgatgcgtcaaattggaacctcagagcatagtgaaacttaaagccttctggcaatattaatattacccttgcacccaaaccctgttcgttggatacaccatcaacgtataactttcatttttccgcgcctcgctgaacaggtgggattttttctggagttttaccttttatcaagaagtcggccaaagcttggcccttgatggatgttcgaggatggcatgttatgtcgaactaccccagttcaatcgaccattttatcaatcttccagaagcctctggttttaataaaacttgtctcaggggcagatcggttaacacttttatagggtgcgcctgcaagtaaggccgtagtttccgagacgcatggactaggcacaacgcgagtttttctagagggggatatctggattctgccctaataacattttacttacatagtaaataggttgcttgtgcttgccctcttctcacactatagctgcacaaatcgcatcttccgagatggctaaatagagaaacaacgtttctccagttattgatttcgccaaaattggaggcgtcgctagatgcctttttatcttctaaa

SEQ ID NO: 371340 - DNA, 740 bp, Cannabis indica
tggtgatattatacatgtgatgtacgggctcacttgtttagtgatgcaattatgtaccaaacgtaagtacgggctcgtctgattaggcgatgcaataatattggttccaggttgtggcacgggctcacttgatcagatgatgcaattatgtaccgagcataggtacaggctcgtctaattaggcaatgcgatatattagtgccacgtcgtggcacgggcttacctgattaggtgatgtaattatgtaccgggcataggtacgagctcgtctgattaggcgatgtaatatattggtgtcaggttatggcataggctcacctgattagatgatgcaattatgtaccgggcgtaggtatgggctcgtctgattaggcgatgcgatatattaatgtcaggttgtggcacgggctcacctgattaggtgatgcaattacgtaccgggtatgggtacgtgctcgtatgattaggcgatgtgatatattagtgtcaggttgtgacacgagctcacctgattaggtgatgcaattatgtgatatatgggtgcaggtttttggcacaggctcacctgattaggtgatgtagttatgcgatatatgggtgtcaagctatggcacgggcttgcctgattaggcaatgcaatataggattatcaaattaaagcatcgacttacttgattaggcaatgtgatgtaatgaagatggttatttatgaggtaacatatatataatttatattatta

SEQ ID NO: 371341 - DNA, 789 bp, Cannabis indica
taataattcagggggaatttttaacggccaaaaaagttcaagaagcataatttagtacatgtcaaaattcgggggggaaaaattactaattagccttttataattattgattaggattaattaccatataaagatggatcctatagtttatgatatgatagagtttattagagtgaactttttaattgttagtttaattttatggtatgaattaagagctcttagtgttgcttatttcttaactttattattttttgtgaagaattaatgtaaagatttaatcataattttcaacttttaaataaaaaataaattggaacccttatttcaccatctctataatataatatatgaaataagtttggatatcatacttggaaatacaatcctctttagggtggggctcttcaaaaaaattaacaaaccgtccaacctgaataaaccacccaaatcaaaaccgacaaaaaataacccgaataactttacgaaaaattcaaaccacccaatgaatatattaagcgggttgaatattattctaacctgcccaaataacgcgaataaaccgaataaactgatttatatattttttataaaattatataaattacgtttaatagttaaactattttacatttaaagtttgtattttatagtgtttattttgaaatttaaaatttatagctgataattttgattgtaattaaatattgaagttgaaatttagaatttacatatcagtatatttttttattttattttttgaaaaatattgtttaatactttaatgtt

SEQ ID NO: 371342 - DNA, 775 bp, Cannabis indica
acttttacgttcaacttagtgggactagaaatatttttccaatctaatattattggactagaaaaagacattttttatgtcccttgatactatgtccaacataaaatagactagtaatacttatatagtccaactttgatgaacttaaaaaggaatttttgtagtagtgatatgtacatgtttatattgcaagatatatgacatatcagttataatgatagttgttgtatacaagcatgcatctagatatcgtgattatatgtgtttggcaattcaagaagttagcaaagctcgaagaaaattatcatttcagttctacatacttatagaagctatagattctttatctatgattagcgctcccactcaattgtactatcatgttcccaagatgtgagtattgggctgatcctttggtcagctttaacgaacaactccaataacataaataacacagttgagatcgaacataaccatatcaggattaagatctattgacctaagatcaactaactaatattaacttagatagatataacggtaagtttatgatatcgtatccaagttcaatatcaatccagtttgatgtatactctatacatcctatcctagcatactttgccaatgtcctggaaaggacaaaacacttatccaaggtgtaagtaggctctattgctaattatcatgtcagtttaaattagtgtactgacaaatcatgggacataaacttttgaaatatataatcaagagtatattccattgtgttgacaacact

SEQ ID NO: 371343 - DNA, 577 bp, Cannabis indica
ccacatgaagaaacccctcaccaacctagaaaagagccaatgggctccaagaggcttccaactcacaatctaaacggaccactcgttccaggttgacctaacctgagggtggcccaagcactcggaccactcgttctaagaggacccaacctgagggtagccctagtacatgaaccactcgctctaggaggactcaacctgagggtggcccgaatacacggtccacatgttcaaggaggaatcagcatggaaatagccaaaaccctggagtaagggacgaagaacccaatcttggaggtgctcagcccatggaagatggtgcttatgaccttacaaggtacatgtccatcgtcgaattagaaaaccgccatctcaggcgccgcttggaggaggcaaactggcagaatgctgaattggagcgtgaggcagccacagccagtgcggcataggggaataatactcaaaatcaacctgaccctggagtgagaagaccacgaggcagacctcgtggctcacaaaccaggaggcaggaaactgctcaggaggaccctcaaaatgctcaagaagaacaacctgg

SEQ ID NO: 371344 - DNA, 693 bp, Cannabis indica
tattttctcttagaaattgaatggcgcacatgactatattcccgacattctatcttgaaatgatataaatcctcaatcttaaaaatctcctacttatatatgcttactttaggaaaatcatgattatagttagattagtagtggtggtccaagctagaaaaattactcatgtatatttggtataaatttaagtcttttactttaaattttagattccaaatagaaattttaattttctatttccagaatacaatacagttaaactttcacaagtgattaatatccatttttctatcaatggattcaaactgtatgttagaatggaatatgagtttatattccgtggccaggatccacttgcactattctaagaactctttattgtcactagacctatatcatcgaaagacgacaaccaccttcttttataaatctatggcatttgtatcttgttcatagtggttttgacaagatccttctctgcaaagagtcaatatgcatatatccactgcaagtataatcatctcattcgaagatggaagtacattcaggggtggatatgagtttcgttatattcttaagacgatcaccctagattttacctatgcaaaataattgaaatgttgaaaaatttcatgaattctagcaatggtggaaaaccataggtaagtgttaaagatcttgcgaattgat

SEQ ID NO: 371345 - DNA, 568 bp, Cannabis indica
attagttttggcatttaaatggttagaattggaaaattgacttttttgagaaaataaaaatgaaaattgtcaaaattgcaaaataccaagtggggcccattaacactatgtccggccacttgttgtgatttttataattaatatatcattattttaatgccaagtaattcctaacctaaacctaatggttaccgataaatagatagtgatggctcacacttaatgagagattgaaaaatcagaaatttttgccttcaagaaaaattgagcctcctatcctatagacgatagctgaacctcttctccctcttttcttcttcaatttttgaaccttgagtgataaagtgagtgcccacacacatcaagtggtatctcaatcatagtctggaagatcgtgaagaatccaaactgaagagaaggacattcggacttagatcttagtgatactctgcgacagaaaggatacaagggttagagatctgagtggaaggagacatattattccgatgcacccaatgtaaggtttttaaactttatatgtgtttaattttattgttttagaaattca

SEQ ID NO: 371346 - DNA, 621 bp, Cannabis indica
gaaaaataattccaagtttaaagaccacttgaccgatcatgatgtcttaaaaaaggccttatcgccgaataagatatataaaaagaaggataaaagaagaagtattaaatagttagagtcccaggctttcgattccgatcttctaggccggtaggagctggaggatttattgtttgaatgggaggtacatcagcattttggccggaggtagaagcagtcgcctcagtttcaccataaaccacttgggaagcgcaaaactcgagatacatgtctttagcttcacccacactactacaaaaatgtgattcagtgactcattttgagagactctaaagaattttagtgacacttcatggcgcgtcactaatgtggctgttaggaaatgtaattttcagtgacacttacaacgtgtcactaaaacattttagactctctcaccgcgcgtcactgtagacttttaaaaactcactttgtcagactctaaagacaatagccacactcacaaagcgtcactatatctatattttttctctttttaattaatttcttgataacagccacactcaaagaacgtcaccatatcatattttttttaaagaaaataataaataaagaaataaa

SEQ ID NO: 371347 - DNA, 1388 bp, Cannabis indica
  modified_base (1358)..(1358): a, c, t, g, unknown or other
cagttaaaacagtaaatgatgtcaaatccataagtcattttactggaatatccttaataaaatcaaaacaagtatatctgataggctttatttatcaaattttaagtaatgagataatggtagcatttttacaataatttatgaagagaataattagtatttttctacttatttaattttatcccttaaaatatataattggttaaaaaatttctctaaaatataaaagtgttagattttatatcttttatcgttaataattagcatttttactttctcaatacaaaattttattctattttattaaaaaatcagtttaaaaaattataatattctgttgattttgaaaaaattaataaaaaatagtaataaatttgacaaaaataataaatttactgagaaaacataaattattccttaaaagtatttttaaattttattttatttataaacacgtatcttaaaataacactaaaattattgaaaatctaataaataatttaaataaactaaaattttttgaaaaacaaaataattttatatatttataaacttgtatctaaaaagataattaaaattcaataaacatataaattattttgaaaaataaaataaaaattaaactaaaaaaaattatatttacttaaacaaatctatatttttagaataaaatagactcaaacttgtttccgtaaaattagtttttacaaaaattgaattttttatataatttattttatatctaaatgaatttttaaataaaataataaataattttttaaatcacttaatttataaattttaatttcttttttaattatcttaatcatttaaaatatttttttaagatctgaattaattttttaaaatttactaaaaaatgattgacttttgttcatttttattttaagggatacgatttaatagttgtcaaagttgttaatttacaaaatcacgtcagaatttaaacggaataatgagacataacttaataagatgattaaatttttataaatgtaaaaattcatagaattcttaacaagctgtatattttaactagcgagcaaataatttagaattgttgaaaatttaagtggtaaaattattaattattcttatgaaaattatagtatgggttttttatttaatggtatttgagcttttgttcaatggggatgcatgcatttaaggaatgggcaaagaatctttattaatagaacttcgtagaagaaagatttttagtttaattcacacatagactctctttcataatttaagtttcattccaatcatttaaaaaagacaaaaattgtgttatttcatatagatataacacaaaaacaaaagcaaaatttaangtttttttttttttttttttttttttattt

SEQ ID NO: 371348 - DNA, 684 bp, Cannabis indica
tttaactggtttttattagattggattggatccatccaatgaatcccatggatgaatccaatccattttaaccactatttaggctaatttcgttaaaacaaatatatatatgaaaaaatataatttaaaacctaataaataataaaataatatataaaatattaaataaaataattaaaaaaataaaattataaatattaaatatgattggatggacattggatgatattggattggattggatcggttatccattggatcggatgtctcatccaatattcgatccgatccaattggatttttaaaatttgcatccgatccgatccaattatgattggatatccgattctattggatcggttgggattggatcggtcggttggaattggattggatgactttctgcacacccctactttctaacatgttagattgaagtgttaaaatattgagtttatcaaccacaaactcaatacctgtctcgaccatgtttatcgctaattgaagagaaatcattttagtactaaaaatctacctgggaccttccctactctaggcgtctgctaccatattggctttcttgggataatatgcaaaatctcgtattcataatctttaactaattccaaccaccgtctttgtctcatattcaaatctttctgattaaagaaatacttgagactt

SEQ ID NO: 371349 - DNA, 568 bp, Cannabis indica
ttggagcttgtttgagcaagagattaaggtagctttccatgatcttaaatttgtttttgcttgctgaattttagtgttgaaaatgcatgactatgatggtaatgaagatgataattacatgttgcatgagatgatgttcttttgttaatttaagtgagttttgcttgaattctttgtgtgttggttgtttgagctctagatggagttctagggtttcttctttattttaaattcaaagtatttgatgatgattgttgctggaaaatattggaaagatgttggtttattggaaagattggagtttaaggcatgattttaattattgtgcaatctgaaattatggggtttattgttggattttaatgcataaatatgtgttttagatcctataatatttgctagctgctgtaagtggattaattgtgattttggttgtgaaaaacaagcttgagttcatggaactcaagcttggtgctttaatggcactttttgatttttagtgcaattgttgggtttaagttgtggaatatgtttattatgacatatattgatgctctggaaagtttgg

SEQ ID NO: 371350 - DNA, 1345 bp, Cannabis indica
gggtccaagcattgagccctagatcccaggtcccgaggtcggtcctaggtccaggtttgggtctggggtcgggtcccagatcctaatccaagttccaaggcccaattctggtctcgatttgggggcccaattccctggtctgggtcccccatctatgttcaagtcctaggtccttgtcagggtccaatttcgtgttccggtttgggtttgagtctcgagtctcggtctaagtctaggtcctagtttgggttcaagtccgagtttaggtcccagtccaagtgtgggtctgagttttgggttcgaggtccgagtctaggtcttaggtcctgggtccggcctcagtttttgggtctgggtttgggtcttgggttaggtcccggtcttagtttaggtcccaagtcacaggtctttgtccgggtccaagtcccagtatggattctgttctaagtttgggtttaggtttgggctgtgttaatgtcccaggtctaggttctagtccaacacctggtccgatttcgatttcgggtcttggatcgggtttggatcatggtctgggtttgggtcctggattcaaacactgactacgggtcaggtgaaagcctcaagtttggattctgatctcggtctttttccagttcgggtcccgggtcttgggcggggtcctaagttttggtttgcgttcgtttgcacggttggaaaccgtgtctcgagtctagggtcgagttttcggcttggtcccggttccggagcccagtttcgggtccaagtcccccatctaagtctggatccttggtccaagtttgggtctatgttcgagtttggggcctaggtcccccatcaaggtccggatgctaggtctcggtctaggtccatgtttaggttaaggtttggatcccgagtttgggttcgagtctagctcccattacgggtttaggtttgtgtaaagcccgcttagtttaatttggaaattagcagttaattatgattatttatgaaattatttatagctatttaaataattaattactgttatttatggaattcatgttagtagtttgggacggattttagtcattgggaatgtcgggaatggccgggaatttagaatttccaaaaaaatacccctttagtgatttttatgtgattttagtgtggaggggcaaaatggtctttttgccccaatgactttttgtcttttagtgaattgattatttgaatttaattgtttatgttatttaatttttggctgaaatgagtatatgttaagtggctttattcattaattcatttttacaaaagattacacttagaaaaaattacaaattttcaaactctctctctcttt

SEQ ID NO: 371351 - DNA, 369 bp, Cannabis indica
actttcaggttacaagttatttattatttatttttatttaatttctaaattaatcacaaccatttaatagtaatccattggcttaaaaaaatataaccataatggttacaataaaaatgtaaccattgaaacctcttcctctttaattgtactaagttttttttttttaaaaaaaaattccaatttatattcttaaaaaatatacctatcaaataaaaataaattatattttaaatattataacaaaaaaattatatgaaaatttcttaaaaaaaaaatacataaatgatttagaaaaaaatatgaaaataaaattaaaacaagcattgaaattaacataaaataatatgaggaaaaaatttaaaaaaa

SEQ ID NO: 371352 - DNA, 500 bp, Cannabis indica
gtaaaaatacccaaattagtaaattgttaatagttatatcgttttggagggtttgccgccaaatttaattttagggttaagtgcaaataaaataaaaaaataaaaatagttaattaaatgaaataagatgtgataaaaaaaatttgaacctatctagatattgttttgtgagatgcaacctatctaaatattaatataaacaagatgagagaaagcagtagaaagtttggggggcagtacatgaacgaactgcctaatatttggataagatagaataaatcagatatcatagatttattaattaataagttgcccaataatagcctaatataaatctatttttatttctattctatataaaatgtgactatataaaaaaatttttggtttacgagaaatattattttaaccaaataagcatttttcattaatttcgaaaataaatttaggacgaataataattttttttaattactattacaaagtataataataatttt

SEQ ID NO: 371353 - DNA, 454 bp, Cannabis indica
ttatctgtccttagtttcttaatcttccttcctgtctgattttcaattagtttcttccagtttacaaaggtttgaaatgcttcatccttggacttgagtaaaaagacccaaactcttctaatgtagtcatcaatgatgctcatgaagtagctagcacctgcaatagtcttagttcttgaagcaccacagagattagagtgcacatagtctagctttcccttggttgtgtgtagtcctggagtgaatttcactctgctgcacttaccatccacacattcttcacagaatcccggttctttgccaagtttgcctttgagtataccctgtttctccacttcatagagacctctctcactaacatggccaagtctcatgtgccatagccttgtattgtctttatcactgctcttgacaaccagattcgaatttcccacaactatttttccttgcagat

SEQ ID NO: 371354 - DNA, 945 bp, Cannabis indica
cgcttagagatttttgggcttgggcttaaaaaaataaataaataaaaaagatgaaatgggctgtaaattagtatttaccttatatgtttgtgcttatgtttagttttatttttaattttaccaccaagagaagaaggttgaaaaatattagaatatgaaaatattattggtgcttattagtaatttgcaaagagtgtgaaagtctataaatatatagttgtgtagctattattagatatgaaatgagataatagaatttttttcaattagaagattaatgtacattttactattaatagcatacattattacaacacaactatgttttacttactaaatatactgacacatattttatttttataaaacaaatcgttcaaataattatactattttaattattaattaaaataaaaaactaaaatattaaataaaactaacactacgtgacttggcacgtaacaatcacctagttttataaaaaagtatttatgatatttaatttaatttaatttttttttttagtagattaatttactttattttgtataagattaaatttttaaacgggattaggattgaagctcaaaatcaatggttggaggtttcttggcgacaagcgtgggtctcaccgtcacccgccacacgggaggaagatatgtgtgcataattctggagaagatgtcatgccaagagcacatcaaggctatgcggatcagcgacatcagcaaatacagctcctcgtgtgggtattgcaatcatttggttctctctccctagcaaagaatcctttccatgtgtcacaactattagtctctaacccacctcccttttatttcctagcgctctccttttatttttgtatgctttttttattttatatatatctatacatctttgtatttggggaggtatgattatttcttttttgtctcttcatttggt

SEQ ID NO: 371355 - DNA, 482 bp, Cannabis indica
atccgtttggggatgtgtcgatcattttgattttttccgtaccagtgatgctagtctcttcaaggaattggatagggaccaagtttgccgtgtcgcttacattgctgcttgccaatcgagctaacgcgtctgtagttgtattttcttctcttagaatttgtctgagaccgtagctcttgaattgtgcaagcaggtcgtgtattttgctcagatatgctatcatcttttctcctcgagcctcgtattcgccgaatacatgatttactactagctgtgaatcactgcagatttcaaagtgttcgaccttcatttcctgggctagcttaagtccagcaattagagcctcctatttggcttcgttgttagatgccttgaatccgaaattgactgtagcgtgtaggcgttgcccctcaggcgagacgagggcaattccttctccagatagttgatctgtcgccgacccatctgttggaaattatttt

SEQ ID NO: 371356 - DNA, 472 bp, Cannabis indica
gtttaggatgccttccactggtgagggaatcacgccaaggagtattatttctcccacttaggcaattatttaggccagtcccagatgggttctggacctccgatgcccattcccttggacccttcagcctatatatcttctacctggtcccatccctcggacagctatctcagggatgatgaagccagtgctatgatccgggactttgctaaggccgaattagagagttagggtaggactagcttgattgcctttttgttaagtgcatgatgttttcacagatgttctaacacaacctatttcttgttgcagcagccagacccatggacgaaattttggccactcttgctggagcccatagtcctgatgcttcccctcctcctacttcttctcagttggccaatcccgggagggcttcctccagcgccccttcgggcactattgtcttggtggacgaggaggaggtacttct

SEQ ID NO: 371357 - DNA, 674 bp, Cannabis indica
gcccaaacgtattttgtcaaggcagccatgttccattcttctatctttttaagcccaatgcctcctgctgccttcggttgacatacactctcccaagctattagtccaagccctattgttgtatgatgacccctccaaaggtaggctctacaaatctgctcaatgtcttttatgatcttcttgggaaggatcataatttgactccaataagaatgtatggacatcaaaacagagtttactaacaccgctctacctgctaaggacaagttccttaaactccatattttaattcttgctgtcattttttcagctaacacagcacactctttaccagaaattcgtttggcacagacaggaatacctaagtattgaaatggtacctctttctttgaaaatcctgatctgtctatgactctttgcacctcgctttcttccattccacaacagtaaaatgccgacttatcaaaattcggttgtagccctgatgtgcaagaaaatagtttcaatccttgaagcaaaagacgaatacttttgaaatcttcgtggcaaaaaagaattacatcatcagcaaacattaagtggttcatctttagttccttgcatcgatcatgataatgaaattctggttggttccaattcggctcattatccttgacagtactccattcctaggc

SEQ ID NO: 371358 - DNA, 494 bp, Cannabis indica
ttttcttagtgggataaatattgcagaaaaataaaataccgagtttgagcggggttatggttttcgaccattttacccctagactttaaattcttaagtcataagctagaagggcattttggtaacttggcaagttggggtaggtggctattttagagctttacacctagctaatgttaattcatcaaggaattaatgaattaggcctttttcacttaggaaaaataaaaaaattaaagaaaaaatcaaaaatcaagagaaattcattctttttctctctctctctctttgctcgccccacatagaaccagaaggaaccaagtttttacttcatcttttctagaaattcaactaaggttcaaggagtaattggtgtaggtaagcactagaaactcttaacttttgacttccttaagttttgattgattttggtatgtaattttaatgtttaggggatgttagggtttgaatatgtgaaccatgcaacataaaat

SEQ ID NO: 371359 - DNA, 501 bp, Cannabis indica
ttaaaaacgggaaaaaactagggttcgggaaaaagccccaaccggtaggccggttctcaaccggaagtccggttcctgggaccaaccggtcgaccggttgacgcaggctcccaggaaccggaattccggttctggtctgggaaccaaaaatccgacccccacaactcaaattaatcccaaacttttcaatactttccagaacacctgtatacactattctaaaccaaacccaagctacaaatcacaacaattcattcaaattccaaaaacaccattagagagctaagtttgagttctcaaactctaactttgctcaaacctcaattcaattcattcctttaattcaaaatagctcaaacaacatcaaacaatctccagaaaactaatttaaaccaccaaagaccatacaacaacatatcactcaaatttcttcaaaataactaacttaggttaaggaaaacttaaggaaaagaatagggaagttaccttgaattggaacct

SEQ ID NO: 371360 - DNA, 695 bp, Cannabis indica
ctgtcagcaaaagtatgctaaagatttgctgcaaagatttggaatgctcgagtgcaagcccatatcaacacctatggaagctaatgctaagctatgtgctcatactggaaaggacttgcaagatggagcaatgtatcgacaactggtgagaagtctaatctaccttacattgaatcgaccaaatatttcttatgcagttggagtagtaagttgatatatgcagcacccaaagaagccgcatttggaagtagtacgacgaatactgaggtatgtcaaagatactattaactatgatctcttctataagaaaggtgatgaggttaagatcgttggctactgtgatgttgattatgttggagatcatgatacctgatgataaactactgggtattgtatttaaacttggatttggagtagtgtcttgatgtagcaaaaggcaaccaatagtgtctttgtcaaccacagaagtagagtatagagcagcaacaatggcagctcaagaaagtacgtggttgatgcaactaaggaaggatttacacaaatctacagattctgcagtgccactttattgtgataatcagtctgctatccgtctagtagagaatccagtgttttatgctcgaacaaagcatgtggaggtgcattaccttttctcagagagaaagtacttggggaagaattagagatgcaccaag

SEQ ID NO: 371361 - DNA, 534 bp, Cannabis indica
ccccgcaagattggatcaagctgaaccgtgacgtaaaagtggggtttgactcaatgtgcatcgcagttgttgcaagggatcatctgagcaaggtaatctgggtttatactgctagagtggattttgcgaatgttttatgcggtgaggcggcggcgtgttgcttagcgttggatatagcgaagaactatgcctttaaatttattatggtggagagtgattcgaggatagtcatcaacgctctcaacaggactgagtccaggtgggagcttaagaactatgtctcattttgtattaggtcctcttcctcatttattagttgtattttctatcatactagtagaaattgtaattttagcgcccataatgtggctaagtgggcttttacccaccagaagtttggatgacttcctattcattccatccctgaacaaattctttgtaatgaccgtgaggtctaactttatttatcttatatatgcacgcttatttaaaaaaaaagaataataattataataatacaaaaaaatataaaat

SEQ ID NO: 371362 - DNA, 549 bp, Cannabis indica
acttgttcctatacttggttgtctccaaaaatgcggttagcgcggccctagtacgggaagaggtaaaaactcagcatcccgtgtactatgtcagcaagcgaatgataggagcggagacgcgatacccgatgatcgaaaaactagttttttgcctcctgatggcctcgagaaagttgagaccttacttccaagctcacccaatcaaggtattaaccaaccacccactccggcaagtcttacaaaagccagaggcatccggaaggctcctcaaatgggcaatggagttaagccaatttgatctacaatacattccacgcatttccataaaagggcaggcgctagtagacttcatcacggagtgcaatgaagctgaagctaccgaaaatatacccacactgccagtcccggcgtggaaggtatcgtggacggcgcctccaacgaaagcagatccggagcaggggtcgcaatgatatcccccgaacggacttcgaatccaagcagccctacggttcgaattctcagcttctaataatgaggccgaatacaaag

SEQ ID NO: 371363 - DNA, 636 bp, Cannabis indica
aaagaatataaatagttttttttttgttacaaacttttatttttatgtaataataaaaactctaaataataagaaaaatgaagatattagaaaaaatatatatataataaaaaaagctcatatgcattaccacatcaccttcctataccattctcctttattattattattattattattattattattattattattattattattattgatagaaagagtaaaagatgatgataattacaatttataattgtattatattattattattaattgatagaaaaataatttattcctaagagattgttcatattcataataattgttattaaattattaggtaacttattatgtgttgtaacttacttattaaaagctattattaattagttgttatcatcttttatattttaatagagaaaatagaatatcaaaagaagatgataccattttttaaaaaatagttaaatagctataaactaatttgagagcgccacatcatctttttgaaattctcctttatatatatagatattgatgtcatataagtaattaattagagtcgaatataataataaaaaatcagaaaaattacaaaacaaaaaaaatatacacaatgttgaaaagatagtaatt

SEQ ID NO: 371364 - DNA, 595 bp, Cannabis indica
cccgtagtcggtgtttggatcttacaattgtaccgagacccaaacctggaaccatttcaagactaggacccaaacaaggactcagacccaggacctgaaatagtaacaagaaccggaaacaggacatttgaacaggaattggacttggaccgagaactggatctagacgcagaaccgaacaaggacccggacctagattgggatcaataaccgaaccgaaacctaaacctgaacctagacttgtgccacgaccagcgacccagaacatggaacccaaaacccataacccaggacctagataagaacccagacccgtacaagaaccctgacccaaacatagacccagaccaagacccaaacccatacccgaacaaaaacccagacctagacctagagtcaaactcgtactagaactcaaactcgaacccgggacttgaacctggaccgagatcaggactaggacccagactcggactaggatcgagccctgaacctggactggaactagaacccatattgggactcggacctgggacctgagactcggacttgggacctgagaaccgagctgtgacctagatgggggacctgggcc

SEQ ID NO: 371365 - DNA, 526 bp, Cannabis indica
ttttcgtagacttttatctgttttagcatttaaaaaagttttttggtctatttttttttcatgaacatgattttttttcttatatgtgtggtaaataattgtttaagttttatttttggtactgtaactatttaattttttattgaaaatttacaagttcgacctccaattattagttcataattatagttagtcaaaatacttgtttacccttctaattatctcatgattacttatataccattaattcaatgtgaacagttaatctataacttattatagatttggatccaactgttagcactctcacaattaacactataagggtctcgtttggaacatagtattaagtcgtattgtattgtatcatattgaattagattatatatcatatttttatataatactatgttaaactttaatttatactaaaatattatacatttaggtgtccataaaagttaatgggaataattacatgaggcaccatttttttttgtaaaaaaaatttacattttttacgttt

SEQ ID NO: 371366 - DNA, 521 bp, Cannabis indica
aatagggaaaaacaaattttctgaaatttttccctgtattaatttttatattttttacaaatctgtatagtcacaataattaaactaatactactatcgtctaaatatatttaaaattctgtatagtcacaataattaaactaacgctaatatcatctaaatatatttaaaaatctataattaagttaacgctaattataataatctacatatatttataaatctatatagtaacgataaattgagatttatacacactgactaacacgcaactgttgtcgctctgcttctgctttcacgtaatgaatctaccgatcacacataatatttatctcatcattagtgaacggagtggataacctatcatgttgggtcaacagttgtattggatcttctacggtcatgaaactttaaatgaatttcatgacgtagtatccacacaatttgtcatcggattgttcaggacagataggagtcatccattggataggtcgatcaggttgtcctatcatttggttata

SEQ ID NO: 371367 - DNA, 1102 bp, Cannabis indica
gcataaaacccaacacatccaacatgtcgacttcttctgggacaacaatgttgtgttcttataggcactggtgggcactaagttttctttgtcactaatggtgctacttgccagacgggcaaatgcatctgctgtggaattcttttctcttggaatttgcttgatcgtgttgcctttgagctaacttagcaagtctttgattttgctcaagtaggccaccattgtatcaccttgagctgggtattcccaggacttgatacacaactaattgagaatcgcttaatatgtccaagtggtcagtccaaacttcatgccgaaactttaacctcattattcgaggaattgaacccgaatttgattgctccatgtagttgttgcccctaagtgttgtaagggcaatgcctgcatcaaacatttggtcagtgtagctttcgtcaacatagaatttccatgttagttctttgggattttgttcctgctcttgctctcgctttttctctagctctttctgttctcccgagtgttgaggggtctcaagagttgagttggtgcactcagctacgaagtctgcaagggattgaccctttatgactattcttagttggtatgtgatcttgaactggccaagcacaatgacacatctaagtagtcagcttcatgctttaggtttctgtaaaaccttctgcaatgattgattggtgtacacctttatggatgccatgagcaagctgtaagttaccttctccattgtcgattagccttttgcttatgtagtatacagggtgctgtacactaccttgctcccttgtgaggatagcactcacaacatgctctgtgactgttaggtacatgcgtcgttcttcatagtgtaggggattatagaacaccagtagttgggccaattgcttcttcaactcttggaatgtgctttcacattcctctatccactaaaatttttgtttcctctgagaatgtttaagaagggtacgcatttgtctgtagacttggacacaaatttgcttagtgcagcaatgcgtccaattaagctttgtacttccttgacagttgtgggcgacttcatgtccaaaaaggcttggatctt

SEQ ID NO: 371368 - DNA, 693 bp, Cannabis indica
acttaacagctgaatcactgcttcagatttgattcttcttcttcaatccctaatcgaacctacacatatgaaaaaccaatccaaaaccaactaaagaaaaaccagcagaaaattaaaagaggaacacaagaaatgattttggagttccctctaaatcagaggtacgtctctgtcaagcgaccctcgaagttgcttgagtcttcactatcaaaatcaatatcgggtgacaaggattttaaagattccaagttacaaagtcagctggtaatctttatgactctttctctattttcttccttttatttttctggtttgtattataatatatatttctaactctctctctgtttttctctcttgactgaggttatatctccatgaaaaagggctgctgctatatcctctttttgagccgaaaaacacaccacatttaaagggcaggttgaaccccttatatatattgttgtcgttgactgtaatgttgtgttattagctgagaaaaacagttataaaaactgttattgtttttccttgagttactgaaagtttgttggagtcttgaatgttgttatttattttttgagttgtgattgtagagagcttataagatttaagcctatgaaacagaatcgactactccaagagttataatggtctgttgaggcttgtaaaaaatcttactttatttttctt

SEQ ID NO: 371369 - DNA, 534 bp, Cannabis indica
attgtgattcaggcaacataaacaaaaaaagaaaaaaaacgtgtctaattggtaacttgatatatagcttactttatatggtgtttgtttatactgaatacttaacaatttgtttatgcatttaatatttcgtatagattacttgttatatatatatacctaactttaaattttgtttgttaatggtgtagatatggccaactcgggttcaggatcagattcatacccagaggcagagtgtctaataataatacctacacgaggacctactcaaatgaatgaaatatccaagctaatggatcaaggcaaaagagtggccctcgaggttaatgacaaaggacaatactgcgacaaaagctacgccaagctcttatcaactttaggagtcagatggcgtcagccaatagggttgtcgtataaaaattggaaagaagtcaaccctactctgaaaaataaagtttggacagatatacaagtaagcagttatttgttagaattttgatttgtttttattaattcaaatgttaactctaa

SEQ ID NO: 371370 - DNA, 638 bp, Cannabis indica
acatttttgttttttaaaaacaaaattttaaaagtaaaaaatctactttcatttttctgtttttaaaattaaaaaacaaaagtgttatcaaacgccacctgaatgttttaaaaagaaatataagagattaatagttgatatttatggtgcattaaaagctagggaaaattttagtattatacctataatataatcaattaacagaaataaccttaattaaaaaaatgtaccctaataacgtgacacgtaggcttctcctacctgaattgaaaaaaaaaaataataacggaaacaaaaaaaacacgatcgaccatacgcgccaaataattaacaaaaaacggaatatgaatcttacaaacagtgcgtgaaatacaaacgcacatacaagaacatataaattcacgatttgctaagttttcaaatcaatttgaatcatttttacaaaaaaaaaaaaaaccattaacgaccaaaaaaaccttcgaatacaacctgaaatccaataatcaacaaatcgaaatcaaaaaacgatttcgaatctgtctacgatttcgattctgtgttactgtaagtaaaaaacatagacaagtcttattagatcctgaaaacagaaaacaccattgacgaagaaaaaagcttcg

SEQ ID NO: 371371 - DNA, 656 bp, Cannabis indica
ttacgcaaacaactcaattccaaccaaaaagcaagaggatctaatccaattgcgaatcagcaatttggaaaataaatttaagaaataccaagatgggaaatagcctgattacgactcagatgaggagatcgaacctttccatctaaatattatgagcactgaggatttaaaaaccctcacgtcttgtcatacgatgggactacaatctggtcgtttacctcaacaactttaatacaataacgcaagccaacaatgtcacgaataagttacattgtattttattcccctcctcgctgactggggcagcgagcagcttgtttaataaattcacccatcactcaattatctcttgggaatagctgtctaaagatttcaagaaacaatttcaggcagcaataaataggtgacctgacgcgtcttccctcaataatgtaaagtagtagccaagcgagtcattcaaagcatacttgagtcgatttagtacagccgctgccagagttagaaacttgaacgacagtatacagcatactggccttcaaatagggatcactactgatctctcaacaattggaggtgagttgtgggatgacttacagggtcgccctgtaaaaaaacattagtgagttcaatgatagagctcaagtgtttgtacgaaa

SEQ ID NO: 371372 - DNA, 307 bp, Cannabis indica
ttttgtcgcaaattactcttaaagtttttatttttattttaatttttattttgtaaatatagctacgtaacataattttttaatgacccgtcattgctacgcgggcaaaattaaaacttaacgaagctggacagacgatacttaaaaatataaacagaacagtactttagagggttttttttactaaaatatataattggatgatattttgtaagtaaattaatagtcgagagaatttcaccgtaaattactattttgggaaaaaaacaaaaaaaaatacaaaaaagggaaaaaaattacaaaaata

SEQ ID NO: 371373 - DNA, 559 bp, Cannabis indica
tgaaaaatactaaagtgtattagtagtgaggtgttataaatgttgtacagtttaatattctcgtaagacaactatttatttatagaaagtattaaataccacaagtttacgtatataatgggagctattataataagaattatatgttttacttattaataggaataataatttataaattttgatttaattcaatgactcaaattaacttttaaaaactatactataattaatataattttatttataactaattttaaatatcattaattacaggttcaactaaccaaactctaacttaactccaaatttatattttttttttctttttattttatatctatttaaactttaattttaattatatatttttttaatttcaaaattttaatatattttaattaaatatatttttaagacaataattatacttatagaaaactacaacatcttcaacttataataattttataataattaagtactcttaaaataattaaaacgtgatgagtttaatcctttagaagtaatattttttttctttattttatatttaatt

SEQ ID NO: 371374 - DNA, 578 bp, Cannabis indica
tcttcaagaaacctgatcttagaaaatgggaaactcaacacaagatcagaataacagctggttagcaaagaatcaatgtgtaatcaaaacttaccatttttacctcaatttccataaataggaaagctagtcaactttccttccaagtttagatttacacaaatagggaaaccatatcaataaatgccagccgaaatatacattaaataataaaatatttttgtcaattaaatatgccaaaaatggaattaacatatataaataaatataaatgcaaaggagcataatcatatataaatataaaatttaattttatgtaaataaaatttacaaattaataaaaggaaattgtaactaaagttgttaagttcgtaaccatatgttacaattttgtaaataatatttagaaactaaataaaatttgttgtaaattgttattatttttataatttttataaaattccaatgtttttcaatttttttttttaatttactaattgcaatgttatgtaatttttgtctatttataagtatatatttaaaatataaagtttaacaaataccttaaccaatcttaa

SEQ ID NO: 371375 - DNA, 916 bp, Cannabis indica
taaaccaatcatgggctcctcgagcgttgccgcaagaatgcggcattttgcaagttgtggtacctgatccacttccattatagtataaatttttcaagataatctatagggttagaggtacctttatattttagggattcggatagacgaaatcccttgggaagttgggcttgtcgcacttccgtagtgaaaggagaggtcccatgcagcttgtatatgggctttctttgctgctcgagcattttcaaagcttgcaaaagcatgctttcgtcaattcctccagccacaggagtcgggactgctgcgactgcaggagtcgcaactactgcggcgaggttcgctgggatagtgatcccagtagtcgcagtcggtgcgataggcgggttattgtgagtgtttataccctgatcgcccacatggggatcacggggtgtttcctcgttatggggggcgcgagagcgcgctctgaaaactgcgttgaggtgatcacgcagatcacctcgatgtacctgatagtgtccccctgctgcgtttctacagagccggaccttgtgtatctacttggtgtacgaccatgcgaagacgaagaggcggattctgcgtcgttgtctctcgatggtcgactgcgaggattgcgtcgctcaggatcttcatcagcctgtgttccttggttaggatatctcacggattggtctctcgatgttggctgattcaggtccagaccctcagggttggctcttcgttccctgcgaacacggttattacgacgtctagaatttgttacctgagggttgtccgtgcgagtagtagggactcgaggggggcgtcgggcccggttctgtccatccacttcggcctgtagtgcacgcagttggtcctggatcgcagtatattgatcagtggtgagctggatgat

SEQ ID NO: 371376 - DNA, 761 bp, Cannabis indica
acactgaattaaaatatgccactaatgactcaagtttaagttttcaaactcaaacttgatcatccaccaccacaaacaacaaaaccagcaacaataacttaaaattaactcaaaataagcttagaattctaaccatacacaattcaaatcctaacagcccctataactcaaaatcacaaactcaaccaaagtaaaagcttcaaaaacacaagtctatggattctagggttaccttagcttgaatcccacttgaattccttgctgaaaacaccaaagatcagcagcaaaaccccctggttcttgctggttcgaagagagagaagggaaagagagaggttttctattttcttaatttttggctttttcctcttaattctttattttccaagaaaatgcctaacactaaatattttttagcataataaaaggcagctgtcaaattaggaatgagtcacctaatcccctagcaaaatgactaaaatacccctttacttacaacttaagcaaaataaagcctaagggtaaaatagtcaaaaaccataatcccgctcaaactcggtatcctattttctttaatatacatcccactaaaaaactaaggttctagacttacccatgtgatcaaactagccatccatcggattttccgttgtcgccgagcaaaaattgtaaaaattgcataattcatatataattcaaataataacacctagagttttaataaaaatttttctagaattgagaaattataaactctaatg

SEQ ID NO: 371377 - DNA, 708 bp, Cannabis indica
atggtgcatttacctgaatgtcttcatatttcgtcctccaccacaacttggcgtccccggacaaatacatggtagctgttgctaccttagcttcttcagagtcggtccgcacgaccctaaagtactgctccatgtcaaacagaaagttttggagctccttggcatccctcgcccctccatagcatttgggctcgggtgctctcggtcggccatactccatacctccgtgccccccggtatttgcacgctctgccgctatcatggtaagatttagcttggttgacatccctgctaattcttcccggatggctgtgacagacacattacaatcctcgatcgtatcattgagggagtcttgtaatgcagcctgcccattttgtagtacagtgatagcagcctgcatgtctgctgttgcttgttctaatgccttgatgcgatcctccatctgaggtgcacctgatgttccggtagcagcatctcttctctcgatcgcagctaccctggccaacaagttagcatagtcttgagccaacgaggcaacttgttgttgtgtcactgttggccctgagttctgattgttaggggctagatccctgaccctctcgtccaggccatctaattcccctatgcgcctctcaagctcttgaatcctttgggtgttgctcaccattatgtcgtgttaccaagcttcccttttctcttggctct

SEQ ID NO: 371378 - DNA, 298 bp, Cannabis indica
cttctacgacttttggaaggctaatcctcaggtgaactttgactacttgggagaagctaaggacatgtaccttgagttctgcgcttctcaagtgacttatgctgaaaccaaggcagctgcttctacctctaaccaaaatgctgatatatatcccgttcaaacaacagatcctgtagctcctgccggcccaggcagtccagctgtttaaacacttcttcttttatccttttatttttatatatcttattcggccataaggccttttctaagacatcatgaccggccaagcggtctttaa

SEQ ID NO: 371379 - DNA, 513 bp, Cannabis indica
ccccacggcttttgctaaccttaaccctgcaatcaaggcttcgtgttcggcctcattattataagctgtgaattcgaaacgtagggccgcctggagtcgaagtccatttgggtatagcattgctacccctgctccggatccattttagttggaggcaccgtccacaaagactttccatgctggggtttgtggtgtgggcacgcttgcgctagcctctgcctcatggcactccgttatgaagtttgctagcgcttgtccttttatggaagtgtgtggtatgtaatgtagaccattcgaattttttggcatttcttcaggatgttgaagagggaaggcacctgtctatggatcggaagataaaccggctcagggcggcaagcttttcggttaagctttgtacttctttgtggttcttgggataaggcatattcaggagagcttggattttttccgggtttgcctcaatccctcgttggctgacaataatcccagaaatttccctgatttgacccc

SEQ ID NO: 371380 - DNA, 564 bp, Cannabis indica
atgcccaacgactccaagcctcgatgacccagcgttgatggcccccaagacccaatgacccgctccgatgaccccaagccctgatgactctttattctctctttctccctctctttctctttattctctctctatcactcctttgtcatcttatttttctttttctcatatctcatttttttccatcaacgtgtgcaggtggttcactcggtggttgtttgcacgacgtacctttttttttttgtttgcacggtggtatctgagatttttattttggttgcatctgtttataataacttatgcaaatgagaaatatcatttttggcgcagcatttgcatcggttatgaaaagataaacaaaattaaccttatgcctctttttatagccgacacaaataaagatgcacaaaaccaaaaagttgaagatagtttttaatttgatatttggttgggaggaataaaaacatatgaataggaataggaacaggattatgggaataagaataggaatgaaatggaatggaaaaaattttaaaatgcataaaaaaattgataaaaaaatca

SEQ ID NO: 371381 - DNA, 583 bp, Cannabis indica
gcccgattacccacatcaaccagtttcctttgcagatcaaagcttatgtgggtttaaagctcaagaatcaatggctggaggtatttcgatccttaagttatatagtgtatatgtttatttattccgcatgttatattcacatatatgtttcagtttatacatataaattgtctaacaataaagtcataaatacttaatcttttattattaagataaaagtcaaaatatggagaatgtttccaagctttcttaatattcacgcactccagcaaagcatgctccacagtttcccatttcaaatgacaaaggggacagataggagaaggtataatgtgtctaagaaataaaagggaggcaactggggcagaattagataacacatgccacaccaggtgtttaacttttgaaggaaccgagaaagaccaaattttagaccagaaacgtttactctgatcaaaagatgaagaagaaggaatatcactagaggtgactgctaaatgatatacagacttaaccgtgaaaagaccagaagaattcctactccaaattagatcatcactacaaccatgaccagatatgggaa

SEQ ID NO: 371382 - DNA, 815 bp, Cannabis indica
tgcctcgtttagtactttcctagctcgcgagaaccgttagtattcagttttgtacgcgagttataacttttgattttccactcccgtcagataggttataaataaaaaattatagttgtttgatcccttctttgtcaaaaagctttgatcaaggtgttattacgattcgacccctttctcgtcaaaaaggtttggtcaggttgttataacggttcgactccgctttcgtcaaagaggtttagtcgagaacctttgaatttcaaaaaataatttgaaatggcgggtttgcattataaaatgtatttccagatgaattccagttagtcatacataaatgccccttaagtaattttaaagaatgaaaattcgtaattacttaatataaatgattctctttattcataaatgaagtttaaggcttacatcagtaatgcgagttacatcatttatttattgatagtagggtcgcaaatgttctacgttccagtagtttttatcaacgaggcatcatgtcgagccaatttaaagactccgactccaactactacttcgatgacatatggaccttcccagttcgggttgaacactcctgctgatgcatctctcgtatttgcaaagactcttcttaacaccaagtctctaacattgaacagtcttttcttgactcttttattgaagtatcttgtgactcggtgttggtatgtatcgttggtgatttacgactcagttcgtttttcctcaagtagatccaaggacaattttaaaagttcctggttttcttcttgattataaaactctcttctgtgagttgatat

SEQ ID NO: 371383 - DNA, 659 bp, Cannabis indica
ctcagttctcatgtcaattcattcatattggagccaagttatagtgcttccaaagcgaactataagggatatcgaagccatctatcgagcatatttatggaaaggaaatcaggtttctcaagggccaggtccaattgcttgggatcatgtgtgccaaccaaaagcagctggggggatcggtttgaaaagaatagcagaatggaattttgctgcaatgacaaaatatgtgtgggcaattgcgaacaaagaagataacctgtggattaagtggatacactgtgtatacattaaaggagaggattggtggacttatcaagctccacctcaggctagctaatattggaagaaattgaattcagttaaaagcacaaatcaaaggtgttatggacattcagcaattcgtaagcgccaaatacagtatatcaaatggctacaaatctctttgcccctcacaaagcaaagtgaattggagtcatgaggtatggaatagactcaacatccctaggcataacttttgcttgtggattacaatccaagatagacttaaaactagagaaaggttgtacaaacacaacatcattggagaagactattgcttgttctgtatggatcatccaaagactacagagcaccttttcttttcttgtcctttctctact

SEQ ID NO: 371384 - DNA, 984 bp, Cannabis indica
aaaaaaaaaaaaagaaaggatttatgaggtggcgtgcgtgtacgtgtgtaaggaagaagggaaaaggtaaaattgtaattattaaactttttgaaaagtaaaattgaaaaatgtaaaagttaaaaatgtttaaaaaaccgtgtaaggataaaaatgtaaaaaaggtgtcaattttgacatgaggtgtaaaaatctcctttttttataggtgtgaaattacaatagaataacttttaatttattataaaaaattaagttcgaaattgagtcaattacaaataagaataatctttaaatcataatttgttttacattttcaaagtcctgtctaaagaatgtataaatctgtataagaatatttttatcttaaataaaaaaaatatgtagattataaatttacttatgtagaattaatatttttattttaaattgtaatatatatataaatattatatttaattaaaaatagtttattatgatattatattagaaaaaaattacataaattgctattttcagtgaaatatatacactttttaccttcaaagttttatttctacattttttacaggattatataaaaacataagaaaccaataaaagtaacagaaaaatacagcataaaaataatatacaaataatagaaaattaataacaaaataacaagagtacaacataaaaatacatcaaaagaccgtattttatgtaaataaaatcttaaaacccgtaaaatatttaaaattctgtacaaccgtattttataattttttttagttttgtatttttttttttgaaattatcccatatcatttaggattatttattgttattgttgttacatttaatacttttggtaattttttttgtctagtgtatctctatttagttataacctctaaattaaaatatagtttgcttgatctcaaatgtattattagataaatattctactgtatttatattgggaactttacaattatatac

SEQ ID NO: 371385 - DNA, 1248 bp, Cannabis indica
ttaatatggtgttcgttgattatgtttgtccaagtaggagagatattggaatcttgtatggactaatatagtcacaaacataattccatattcacaaccatgttagatgttttctaaagagaccatatgacattagtctttcgcaacaactctcaagatactgagattcaatggatcatatcgttttattctgaatagcctcatgaatgttgtcactgaataaggatttacatctaaggctatttaaggagttttaatattatgaggcaatataagacattgtatttgacaatcttggactttaatcatataagtgaagacgaatatctcaaaggttttattgagaatatccagtttaatacgtatgtccctcctagctattactgttgataagtaaataaagctacatatgttgaagttttaagctggcattagacaagttttaaattttttttatgggataattgggtttatccctcattttgttgcttccgctgttattattaatgatctactattggccagaatatggtaagaaactctatatgtggacaaataaagataaaggatcgagacagtttgatgaacctgtgtttctatacacgagacaagtttgattacatatacctctaaagttctaatctatagccattggtagttcttaattcttatttggagaattgatatggttatatcacgatttccaagatacgatcaaatgtgaaagttttaagcttaaatcccatatcaattgggagattttcttgatggtcaaagtaaggtgaattaaagcttgtccactagaacggttggagcaactggagctcctattacacctagaagctattgttggttgttggctaggctcgatctgtaccaccgggcttacccagctaagtctaccactataacaatggttttgttatgagttgtaaagtggtgactatttggaaatcaatacataaggatatgagaactaaattcttgtttaaagatcataccatgttaaatggctcgattaagcctggaaaaggtaactaaaaggacacccgagttcaatagatttaatcccttttgaggaaggacatcaagatagtgatgactgtaattctcaaaatggtcaattcaaagcattatcgttagtcaatactatgtgagagatcagtgggagcaatgatatgtttatattattacttgatatagtacattgctcatattttatgatagtgatctattctggagacgatt

SEQ ID NO: 371386 - DNA, 530 bp, Cannabis indica
gaggagctttcggccgcggtggcaaggctgaaagagaaggttaatgctttaaagacagtcggtcttgagctcttctttgacttttggaaggctaatcctcaggccaaatttgactacttgggtgatgctaaggacatgtacctcgagttttgtgcttcccaagtggcctatggtgaaactgaggcggctgcttctacctccggccagactgctgatgtacctcccgttcaaacaacagatcttccaactcctactggccaaaaagaaccgaaccaagagcctgggactccagctgtttaaacacttttccttctatcttttattttttatatatcttattcggccataaggccttttctaaaacatcatgaccggccaagcggtctttaaacttggaattatttttcatttttcaaacaacaggttgaccgggcagcttttaatcccgatattacatgctcttgttatccttaatgaatttcattctctgtttataatcatcgtgcaattgtgattgttttatttttacc

SEQ ID NO: 371387 - DNA, 384 bp, Cannabis indica
tgtcacctacagacccaaggaggtgggggaaatatttttctcgaggacgttgatgctccgaatactgaagaagtcactgatgaggctgccagtaaagtcgcagatgagtctactattccaactgcccctattgctcccaatgcttactttacttactttatgaatattttattttgccaaacttttttaagcggtacgcgggtactcgcgacttgtacttagacaaatttatctttattgtctttaatatttcgaacaacagatatcccttcggggatatttatttatgttatcatattcgtagtacacgggtactcgcgtcttttgctatttcaattgcggttttatttacagcttggtgtaaaaaatgctaaggtaaaatga

SEQ ID NO: 371388 - DNA, 1107 bp, Cannabis indica
cacttcgggacgcgcaaaactcaaggtacatgtccttagcatcgcccaagtagtcgaaattagcctgaggattagccttccaaaaatcaaagaagagctcgagaccggctatctccaaggcattgaccttctccttcaacctgtccacctcagccgaaagctccccctccttggcttccttttcctctttcatccgatgaagaactgctcgaagggaagtcctctcgtcttgaagactgttcacctcagcagataaggtctcgatgctctcctcaaaacggtcagtagcctcgagatccttagtcagcacagtgattttcttttgagcggcgaacaacttcttgtgggcttcaccgaattcaaaccgaacagctccgactttcgccctagcttcttgagcatccttcctggccaactccgcctccgccttcaaggtgtcggacagagccgtgttcttggaagttgcagacttagcctaggtgtaagtgtaagccaacttcagaccggccttcacaaggaaaaaactttagcatctgagctaagtatggaagattaaagggaagtatcaagaaagacttaccctcgtgaactccttaaagactccgcccaccagcaattccaaagaagagtcattgtcagcaccagccagttgctcgctgacctcaggaactagccggttcatataatgggccagcatctccttggccttcttggcctctggaagcaccgacaaaggtggagtaggtgcacgcacccattcaggatcactcctgaccagttcagacccaacctttggtggtccagactccttggacttagcagctttggggtagaggggttcgcagcagtcaactcgtcaaaaagatccatgacctccccaacaagcctcttttccttagtagaggacccctcaccgcccttagacttcttggccggaggagaggcgttagagcttccgcccattctcttcttcagagcctcaaacatctgccgagacatgtctgtatagaacaagaaataacatggttaaaaaagagacatcagaaacataaggcatgaaagtcaagaagctcaaaaacaagacaaagtagaatgcaaggtgactgc

SEQ ID NO: 371389 - DNA, 463 bp, Cannabis indica
taatttaagttgatcaatcaaatttaaaaaatattaattttcaacttaaatatattttctaagaaaattcaaataattaagtatctagaaaaatctaattagttataaattcgtttatttaattaaatagagaaaaatacatatagtttatcttgaattaatttcattaaacaaagtgtgtttttcttaaattaattttaaaataatctgatgaaaaataaatttcatttatattaaaaattaattatgttgttaatcaattttattagattaaactagtataattaacctattacaattattcaactaagccaaataggccttcatagttgggtatgtatgtgagggagggctagagtcagtatgtcgtacccactagtaatccctcctaactctcatacaaggcccaaaaagagaggaatttaaccttaattaaacaactgttattcattgaataagccca

SEQ ID NO: 371390 - DNA, 551 bp, Cannabis indica
atcttaagaggagggaaatgaaatttaagatggggaaaataaaaatttgaaatttaagatgcgagaaatgaaattttagatctgaaatgcatgaaattgaagcatgggaattaacgacggtttaaaaccgtcagctatactataggtgacggttatattatagctgacagttttaaactgtcggcaattcctttttacaaatacacgagattttttaaggcacgtgtggaaaccatcgcctatacctcctgacagtttaaaatcgtcgggaatacaaaatttttcccaacggttttaaacactcgcttaattttcttagtgacggttccctaaaaaaagtatttttagaaccatcacgaatacccttttttatagtagtgtttggttaacgtcattagcttgactgtatgttgcgttcatgtgatcttcatgttgggtcttctaacaaagactcattccttactatcaatggaatctaacacattgaatttgagtgtttcaccatcaaattccattctaagtatcaatgctttcgtatccaacttcttact

SEQ ID NO: 371391 - DNA, 629 bp, Cannabis indica
ctgaactcacgggtgctcgatctgaattgaaaccaggagagagtcttcgaatcactcatctcacatttgctcatgcatctcttatgcggtttgctctaagcaattgggttcctaactccaacaagaccgtagtgtctcaagatgtggcatcattcttataccgcatcacctctggaacttcaattgatttggcctcacacattctgaaccagattgtttccttccgaagaggtaaaaagccaacctttaaacttgtatttccaaatctaatctataaggttttatcttctcagaagaatgtggcccaatcacatgaaacacttgagcctcctatcattggacctacattccaaccctcggaatactttgatggtgtgtttcaaaaacggccaaaggctggagctgttgctgctgctgctgcaagttcaagttctgctgcagcagaactcctggaagtcaagtcagaagttcagaacgtgaacaatcgtcttgcagcaatggaagaacttcagcatgagatgtccaagcaattgacttctttggttaaactctaccgagactaagttgttgttttttctttgcttttgattgaacttatttctatttttctttctttgtttactttggca

SEQ ID NO: 371392 - DNA, 507 bp, Cannabis indica
aaactactcaaaatttgacatgtcaattaattttttatttataaaaaaattaaaccactaataaagtcatcaaaattagttaacatatttaatataaattagattagttgatatgtcaaactttgataggtttaacacagtataagacaccaatttttaacaggggatcttgatttcattaattattgctatttttttaagagcattactattatgtatcaggtgtctagtatcttctagatatgtcgtcttacgattgactagcgatactttttaaaaattattacattatattatatgggacccgatacttaattagaccaataacgatattgacactaatggcctcaaaatactagttttcatataggtaagtaataactacacaagcatcatattactaaaggaagtaatccaagttcagtacttattattactctgcgaaaaaaaagaaacaaatgttagagtactgaacgaaaagactcatatttatgttgggttttatgc

SEQ ID NO: 371393 - DNA, 515 bp, Cannabis indica
gaaataagaagaaaccaaacatggttagtagatctaaaattaataacccaaggggataataattctttaaaaaacatgagtttaaagcatagatagaaataccttgtttctttgctagattcttagggcactggggtttctagtggcccttttccttgcaatagaagcactttcctttttgctttgcatcgggattttcagcctttttctttttagctattttaacagtttaagagtcttcttgctattcttccaattcttcttgttactaggtctccaagtaggggcaatgtttgcctcaaccttggccgtacaattagcagtgccagaactaggagctttagttcctcctttctgtggtcctccaatcaaagtttcaaatgtctgaaggttgttgattaactcgtggaagtcaagctccaacttattcatgacataatttgatttgaagggcaaaaaagttggagtcaaactatttaagatcaaactcacttgagttgtctgatctataacag

SEQ ID NO: 371394 - DNA, 516 bp, Cannabis indica
taatattttaaatccgattttctctctccacagatgacatttgcactcaattacttttgatttcccatattcatttttgaggcgggaagctaaggtgtctgaggtttctttgagacagttacctcttcgcctatagatacccacaacattggcacataaattcatttcatcacccttctttgctaagcaagctccagagcgaaaagaaaattttctagcttcaaagtcgccgaagtgccttcatacaactactggttggattgacgttgcctgaacccagatactcgaatcttgagtaagtttctgatttcctttatgcttatctttgcatgtttacattttgaatgcaacttttactgtgctgtagaaaaatacttaggaaaccctagcgttagaaacttctgcgattcttctttatcacatcttcatgtgggtttacagccatagagcttgtctctgaactggattgcgtctgcctttcatcctgcttattctaagcttcatgaacttttttgc

SEQ ID NO: 371395 - DNA, 1347 bp, Cannabis indica
attatgaatttgatgctctaaataaatattgatcttggttgatgattatgagtaataaagattagcatttaatgttttttgttagctcataatctgtagaaagtttaacaattggtatcaagagccaaattattgattttagagctcaaattttttcataaacccttttttattcaaatctgaaatttgtgataattattttcggattaatatgttaatgttgtataaatatgagttctatgattttaaatgtgttcatatatgttttgggaaccatttttttatattttccatggaggtacatggaagcttaacaatggaggaacccatttcagatttaccatttttggtatatcattttgtgttttttgaattaaatgggtgttggaaaataatagagggttgaaaatggaacaaaacccctcaaacggcgtcggatttggtggccggaggtggtatatccgtccgggtcacgaaccgggtcgcgccgatccggcttgcagacccgcggacccgagtgtgggtttttttggtgacagggacgacagaaaacgacatgtcgtttgccactgtcgggcaaaaacgacatgtcgtacgcccttcggttcagcccccacgagcaaaaaacgacatgtcgttttattggggctctggttgtcgttcgcgttgaacgacatgtcgtttccaaaaaacgacgtgtcgtactaacgggagactcagccctttgcagcgaaaaacgacgggtcgtttatgacccagctgcatgtcgttttcaccaaacgacatgtcatttttcataaacgacacgtcgtacgtcagattaaaaaaaaaagaggaaaaaggcaggagtgtgggggcgcgtgcagggtcatttttcaccaatttttccatttttagcattctatcattcccacatctttattttatgcataatattaattcatgaatttattcataatcttagttattaatattatcttgttatggcataaattaatgtttatttaaacaattagtgcttattttcttacctatcgtaagattaagcatggaaaattatttggtaatgaggaacatttaaatattaatttatttaaatattgtatcttcctcccatataagattaagatccttataaataattaattatcctatcgataataattgcttgctaaggatgcttaatatggtgaagaaaatttattaaatattatgaatcacaatttatctatcctttcgatagtaaattaatgtatttgattataatatttaatagattgttcttacctgtgtatgagttctactttattaattttgtctaagaactctagcatacatgatgatcat

SEQ ID NO: 371396 - DNA, 780 bp, Cannabis indica
atgataaaatagaagcaagaaagttgcgacagcgagccgcccgttatgtaatatatgaccaaaggttgtatcgcagaagttttagtcaacctcttctcaaatgtatcagcggagaggattgtggttacatacttcgtgaggtacacgaggggatttgtggcaatcataccggaggtaactcccttgcattaaaaatcatgcggcaagggtattactggccaaccttgcgacaagatgctctcgcgtttgcgaagaagtgtgacaggtgtcagcgaatagccacatatacccaccaacctccaagtaacctccattctatcacaagtccatggccctttgcaatatgggggattgacctaatcggcgagttacctaaagggaaaggtggagtcaaatatgcggtagtcgcagtagattacttcacgaagtgggccgaagccaaagcactcgcaaccatcacagcaacaaaattgcgcgagtttgtctatacctccatcatttgtcgctttggcattccacacaaactcatctcagacaatggaagacagtttgattgcaaagagatgcgacaactatgcgacgatttgggaatcaagaaggcattctccgcagttgcttacccgcagagcaatggacaaactaagctgttaataaaataatcaagcacaccattaaagggaaactagaagatcgcaaaggggcttggccagacgagttaccgcaagtcctatggtcttataatacaactcctcgatctacaactggcgaaacacccttctc

SEQ ID NO: 371397 - DNA, 618 bp, Cannabis indica
ttttatccttccaaactgtattgttacgggcattccataatgcccaacacaccatagcaacataactcacttggtcgtcttctagagtacggaacagtttgtcaagccaactaccaaaggaagacaacacatccggaacataacgtggaccgagctttatccaacaagagtgagcaaacgggcaagagatgagagcatgaacaaccgtttcagcgtgtgacttacacacagggcaccgtgagtcaatgttcacatgtttaagtaaacttaagacataacatgttaactaattaaatttgtcttaataaattaagagataattattttaaaatgattaaaataatcaaagataaataagcatcttttccattttaattagatttgataaaaaatagataaattttactatttaaataaacttaagacataaaatgtcttaactaattaaaactttcttatctttcaattttagttagattaaatgataaaaaatttattatttaaactaaaaattatcctattagctaaaagtattttaattttcaaataaaataatataataattatctttttatttagttgtcttcaaataatctatatatatggaagaggtttcaa

SEQ ID NO: 371398 - DNA, 707 bp, Cannabis indica
aaagaaacaaggtatttctttctatgctataaactaatgtgttttagagaattattatccacttggattgttaattctggacatattaaccatgtttatttttcttcttatttcagcttcatttgcttgaactcagatgctatcctagcgagttgaatcggatggttggacaaatgggtggagatagtccaagatgaagatgaagctcggaatcttctattttaaaattattatttttgaattatttttttttcaaaacaatttggatttcaattattactttcagattttattccctacttttcatagtattgcagacaattccttcaattttggagaattttataataatgttttctatttttaaaatgaattgcatttatgaattgagcttcatttactttatcttgtgtatgcaagtaccaattatatttatatgttttaatgtttgtatgtgtatgtgtttttattattgatacaaattctatagtatattcaactctgcaaagagttaatactacataaacacttagaatctcaattacatgtttatgaataattgttaattctaaaacaattattaagaatttttttttaatagaaagatcttttgatctgatagggtttggaaaaagttaagaataatatgcacttcaacaatcttttatatctatttgaactctggattatattcataacttcacatg

SEQ ID NO: 371399 - DNA, 577 bp, Cannabis indica
ctggtctttaaacatcttgtttaacaatcttcggtatgtggttctagcattgtggagacaaaagggcatgacattataacaatatagacccatatcttttcggaatttgtatgttcttggtccggtggatgcattttgatttggttttaccccgaataagcgtccatgaagctcaatatttcgggccctgctgttccgtcaacaaactgatcgattcttggaagtagaaaatactctttggggcacatcttgttgaggtctatgaaatcaatacacactcgttatttttggtttggcttgggcactagtacgggattggcaacccaagccgggtagaaatattcaattatgaagtttttattttgtagcttctctacctcttccttcagcggtagagttctctctttgtccaatagcctttgcttttgttgaactggtcggaagttgggatcaatatttaggacgtgcaaaattacaaaaagatcaattccaaccatatcctcatgtgaccaggcaaaaatgtcaaggtttgctctcaaaaattttatcaatgctgattttacttcgagcaacaaac

SEQ ID NO: 371400 - DNA, 382 bp, Cannabis indica
tctaaaaatttcagttaagtgccacagtacgtgtacacttagcaaatttttagtagtgcacctaatattaattattaaaaatataatttttaaaatattttaaaaaaaaaataaataaataaaaaatagaaaataattatataatttttttttcttttcttttcttttttctttcttcttctaatgaagagaaccaaaaaaaaaactctacatcttccttatccatcccaactgtctcccctatctctttttccttttttttttcttctgagttattcatctcattatcatcatcaccaccacacaaccactattaccaccatcaccacacaaccaccatgccactattttctaaattaaagaaaaataaaaattaaattaa

SEQ ID NO: 371401 - DNA, 675 bp, Cannabis indica
aagttattgaaaagttgcgtgtggctattgattttgatggtgcaatttcagtcgatgctagaggtaaaagtgggggagttgctttattttggcgagttgaggaggaagttacagttatggaatttggtggagattacattgacgtgcgcattaccgatagtgatgttggagatcggcggttgacgggcttgtatggtgaaccaaatcgaagcttgcgcaagaggacatgggagttgttaaagacgcttcgggataagtcaaggcttccttggtgtgttattggggaccttaataatgtaacttctcaagaggacaaacgaggaggtaatccttatccaaactggttaattgatggttttaatgatgctttggttgaatgtggtctttgtgatatggatctttatggctatgcgtatacatgggaaagacatcgtggcacagacgattgggttgaggtgcgtattgatagagctttggcaagtcaatcttggttggatttatttcccacggctaagttgtataatttggaagcaaccatttcggaccattgtcctcttcaccttgcaactcgtaatgcgatgacggtggctttcaatcgcaagttcaggtttgaaaactcatggctcaaagaaccctttgttttaagattattgaagaaagttggtctcttttacc

SEQ ID NO: 371402 - DNA, 570 bp, Cannabis indica
ccccgaggactattaacctctttctcggattgttgaagtgccaatctcactataaccgggttgtttacaataccggtgccaacctcacctcaatcacaatatgaaaatgtgtttgatattacaagcaaaatcactctagaaatatgatgatacaatggaaacctagagtgaaaagcaagcacactcaagatgaataaacacaaattttagctcaaagtgtgtgaaaagtgtttgttggattttaaacttggaagctcattaatctcacttagataggttaggtattagacataaatgctcagccaacttcattttttgagtgaaaatcgagtttatatagtgtttaagagaaaagtagtcgtttatagccgttagcgcgcttcctgagacaaagtcaaccgtgagctgaaattccgaatgggaatcagaattccggattgatgacaaccggaatttcggaaggctaacagaggcaaaaatgccatatttcgggactaaaatgcccataacttcttactcgattatccgattttagaaattacaactttgttctcttagttaaacaaaatg

SEQ ID NO: 371403 - DNA, 554 bp, Cannabis indica
ggcatgacaaaggcaattcctacaccaaatagctgatatgtagctgacccatctacatgtagtttccaggtcaacttatcttcattgttacttggctgaggtgtttgtactgactcagggttgctttctggtatgctttcttttttgcctgtacattctaccacaaagtctgccaagccttggcctttgattgttgttcggggctggaaagtaatttcgtattggcccaactctatcgcccactcgagtagccgtccaaaggcatctggcttttgcagtatttggcgtattggctggtcagtgtatactcgaacatgatgagcttgaaaataaggcctcaacttccttattgctagaataaggaagtaagcgagtttctctatcaatgggtatcggccctcagccttaatttgtcttttactgatgtaatagactgggtgttgtacgctgttttcttctctgattagcacggcactcacggcatgttctgtgacagctaagtatattccaagttcttctccgtctggaggtttcgagagtacgggaggttttgc

SEQ ID NO: 371404 - DNA, 557 bp, Cannabis indica
ttcttcctcttaagtggagtcacctgatcttcctcaacttcatcttcaggattcaagggctcctgagcatactgcttggcccttgcacctcccttcaacttagcttcacgcttcagttgaatcagctcattctctggatgagctcgttcggtccgtccagcaccagatttcctcttattccccgtcacggacttacgaatgaagtccttaggatagatcccgtacttcacaaagttatcctcggaggtcaactggataatattccggtctttccccggcagtcgggcaagtttttgagctctatatatccctaagagcaagagtgaggggagggcgatgatatgtcagaatctgctggaaccaagtacgattgatgcccgtgccatccaccatgaagtacttatcagtaaaacgcctaatcttgctgatggccgaatcgtccgtgcccgtcaaccacttgaagcctggttgagagaaatagaagtaccccgacctgccttgctatggggtggacttcaaatcaaagaaccaggcaacttcatgaggagaaggagtac

SEQ ID NO: 371405 - DNA, 583 bp, Cannabis indica
tttgtttcaagggctcaagcttttctcttagacttcttgcctttttccaagtgaagataatttttccatctattgttatgatatgcaagaagaggaggttcaatggttggtggactcatcttgctttgtgaggagcaatttacctttaaaataattaggtataccaatatgttccaagatactcttggcaactgagagtgagattttagttgaaaagatgacacagagaattaggattttgagttctcaaaatctctcttttgctgggcatgttatagggttgttcatccgatccaattcgtacttttttggtcaaacaacatccaatctgcactaagtgcggatcctaaattttagatcaatccaatctgcataacagtttaaaatccaatccgcaatagtacggattggatcggttactttttttttaatgtttaaaacttatttaatatttcattaaaaatttaaatgaaaaaaaaaccttacacaacaacagtaggtagcacaaccaggtctaaaaatttaagtttaacaaacactaaaaaaaactattagttctttttcaacaacacattacatttcc

SEQ ID NO: 371406 - DNA, 704 bp, Cannabis indica
ctacaacatgaaaaagctcaaacctaaacaagatccaagcccttttgaagatgaagttgcccacaacaattaatgaagtacaaagccaaacaggatgcactgctcactaagcagacttgtgtccaagtatacagacacatgtgtacccttcttcaacatgaagtgaaagcaacaacaaattcgagtggacaaaggaatgtgaaaccacattctaggagctaaaagaaacagattggctcagccacctgtgttgcccaaatccaagacaaagaagagctagacgtgcacctagtagtcacagaacatgctatgagtgctgccctcacaagagacgaagacatgtatagcaccctgtatactacaatagcaagagactgatcgacactaaaagttggttcccactcatgaagaagctgacccacagcttgctcttggcttccagaaagctaaggctatacttccagatatgccctataaaagtgtacaccgatcaacagttgcggcaggttctatagaaacttagagcatcagaccaactactcaagtgaatcattgagattcgaccaatataaaagcacctcacaaccatgcatggacaccaaaggccatgctctcaccagtttcacggctaatcatagaagcatatctccccaaatctctcagagttcaggagaaaagtaggagccagagaagaagcaagagcg

SEQ ID NO: 371407 - DNA, 702 bp, Cannabis indica
ttcttcacagtcttacacactatgattgaggaccaacttgttatgtgtgggcatgcactcaatcactaattgctgaatttggtttgtaaagaaaggctatggtattttgaaaattcaagaggaagaagaagaaggaataggtctcatcagaaagctaggtttttagctttggaggcattagttggatgatgagaccttagctatcattttatactaatttccatacggttagagttgatttatttagaatgaaaaattgataaaaaaatggagtataaagccattaagtggccggccatgatatggaccccacataaatttagtttttgccattttctcaattattttatttatttttcacaaataccactttttgcaacttcaaccctataaatgtcaaaactatttatttaataattaaaataattatcaaataaaattatcatttataatatttattaattagactccacaaagtctcttaattaataaattaaccctaaaataccaattcttcacaattaagccataacatagtgaaaatttataaactagacaaaagccaaatttagaaataaaatagattaatttaaatcaattaactgaatcttacaagcagtttgtctcaacttgtatggggaccatgggcctatataatcgaggttttaataagtagatctagaatttaccaaggaaattcac

SEQ ID NO: 371408 - DNA, 966 bp, Cannabis indica
agacctgaaatttgcatagccgtgaactttaggaagaatgtttgaataatcgcacctttcctgcttgtttatttcttgaatacacgtaggtattcggatgaacacttcgaatactcgcatacctgcttgccttaggctttacaaagactttatcattcctagtcgttatttagaacctagggttttatatcctctgtatattttgttgtggggacactagttaagtcttccaaatggtgggcgtgtcgcaatattccaatgctcatatgtgcaatcgtatgttcctcgaggtactgcgatacgcccaaccatttgcaacatatgccagtgctttccgttccaatataagcgtattctttggctagtagatttgctcgaaacggtgggtgtttcccagtaacttcagggtcatgctcgaaaacgcatgccccttgggtcactgggatactcccagccattttttgaggtacatcgctagctggatatgcgtgacacatccgcaggttgtgattggttaggttcctcgaaacggtgggtgtttcccagtcacttcagggtcatgctcgaaaacgcatgtcgcttaggttactaggatacaccaagctgttttttgagatgtccttctattcgcacacctgcgatttcatgccttggtgggctgattggttttcgcaagaatccaaatcggtcctctaaggagattgtaaatttttatatgcagggtgaggtcacttattttgtttttcgcacattcaccacgctgaaaagatcttttatctttcagatgagcgatctatcgaacagccaaatgcttggctcgggaggcaacacgttcgatggcgatcaggaagatagctttatctagactttaatctcagaagaggaggtccctactgctggagacacagagctgggtctgttgtcctctgcagacatcgagaggatggtccaggagctcgctaaact

SEQ ID NO: 371409 - DNA, 635 bp, Cannabis indica
ttctgatttctttggtgatagaacccactgttccttcggttacctccttggttgaacccataattgttgttgttctgagaataatttccaatggcttttgcttcatccattggaaaatcatccacatctgcctgacactcagaaaagtgatggggacctccacatatctcacaaaccacttgagcttgtttggcttgccctgcgatcagctttgttagggcctcaacctgagctgtcagctttgtaatggcatcaacctctagcacaccagctaccttcttagtttgacttctttcagttggccactgctgattgtttagagccatctcctccaacagatcataagcctcatttgcactctttctcataaatgctccaccagctgctgcatctataagagttctagtgttaccaaccaacccgttgtagaagttgtgaaccagcatccacttctctataccatgatgagggcactttctgatcagatctttaaacctctcccaagactcatggagagattcattatcttgttgacagaagttgttgatttctcctcgcaacttggcagactttgctggaggaaagaactttgacaaaaatttcgttgccaagtcattccaggtggcaatagagtt

SEQ ID NO: 371410 - DNA, 657 bp, Cannabis indica
aaaaaaaaaaaaaaattagtgggagtggctgctatcctttgattaattccatagcttctccacaaaatcagtttttctcattctcacgttaacgtcttcttctatgaggggttcaagagtggtcatctgagagtggttcggttcggctcaacgacgtcctccgttttagatttttattttcatttattaatttactattattagtttaactccaattaatgtttttgtggggttagaattataaggagttcattttttaattaattttaatgttgtgatcgtgtttatgtgttgaaactaatttagtttttcccattagtcttaattttgacatggttctttactcttttatttttagtttttcccattagtcttgtcttttgccatggttttttagtctttcttattagttttttctggttcgagtcttgtcttttggcatgggttgtgtagctcagaatcatcatggtgctatggtagaagcattcaagaaggagaagattagatgtgttcaacccgaaattgctgagataataggcattaaagaagcattgagttggattgcaactcattcgtgggatagagtcatgttggaaacagatagcttggtgtgtgtccaagcgattcaaagcggtatttttatgccttcacagtttt

SEQ ID NO: 371411 - DNA, 1256 bp, Cannabis indica
gagaccctttcagaaagggttgggtggcggcggctgatcatatggataaaaccgaggaggtggcgccaagtaattcgggtcatcaatcccgatgttcattctgttgatgagagagttgagttggtgaacttgtccctcatcatgtatactcctctgcaccatatagttttgcatgtggttgttctgctgaattatataactcagctgggcatgagtatattgcatcgccggatcgataggcccaagcagttgtgggggctcttcctcctcttcttcgacactaggctctctttgccgccttcggccttgcggtgcatcaggtggaggctggccataaggatgtggctcttttagcctgttgacaaatgtgatgtccatctttcgtagtggcaccacagtgttatcatactccagttgtggcacatcatatgccccgcagagttcagttatcacacccgccaaaccaagaccaccacccgtggctccttgaacaatttgctcaatgctgcttctgatgacttgtccaatattaatgttgtaccccttcataatggcgtacacatatttgaggcgatccatttggacatctgaaaagtgtttactcggcaccaaccgagcactcacaaagtacagccatgtctttgccaccgggtttatctcacacctatgtagaatgtttggcgacccgtcttggccatcattgtcgtggaacctcaaccccggaaatcccactgtttcagccacatccaccaaatcaaactgctcttcctcctcaataattcggaggcgttgttcctccctagaataatccgggacagagaacataacattgaatgcatcagcagtggcgggaaccttctttcctcgcaccttcacctccccatttctgcgctcgggccaattggcgagaaattcacatgccatagtcacattagcccggccccgagcatccacaaaactaccccatttcatcctctcaatttgagcccgaattgcttcgaacctaggttgacgcctcaaggggttttcagggaattcaataccccgatcttcaatgtaaggcctaatttttaacctcatgaaacgattttgagcctcctcatttacaaatcgggttctatcgaaacccgtaactggcgggtttcacatcgaaccttcttgagcatgccttgttctttttggtctcattttctgtgaaaaaaaaaacttttttttttcgttcttctttatttttttctttttctgtttttttttct

SEQ ID NO: 371412 - DNA, 821 bp, Cannabis indica
taatgattattattaattatcaaataaaatttgcatttaacttatttattaattgaaccttacaaagtctctcaattaataaataaatccaaaaactttttttcttcacaattaagcccttggttagtaaaaattcataaataagacatagtctagttttacaattataattaattaattaaaactaattaactaagtatgcaagaagtattatctaaacttgtgtggagaccatgggcctatataatcaaacttccaataatagtagaattaggatttaccaagtaaattctctaacttattaattcctcctcgcgccactatagattcgaaatttcactcttaattatattgaacgctctatatgtaccaagacataaatacgctatgaattatccatcgctctaatccaaataatcaatgatcctctatagatgatctagatcaaatagggacaaatttatcgttctacctttcaatgtattttatccttaaaatacttaactacatataaatgatattttagtaaactaatataattactgaaatgaggcctcaatcatttatctcttataactcaagctcgaaggagatcattatttcacttctaaatacgtataaaagttatagattctgtggtatttgatcctctaaacaaaactaaaactaacttacctacccttagctaactcaactaactttcagttatgttagttggttagttggtgctagttttgcaccttagtttctagtggtgagttgtacctataaataggatattcttttgacttctgaagcagagaatagagagagagagagag

SEQ ID NO: 371413 - DNA, 912 bp, Cannabis indica
tggaactcgtaaccagggattggacggttgaccatttgttatctgggaggcattcatcgtcgcgtcatcctccgtttctcccagggggatgacgttcggcatttgctgacctacagtctggtaggcgctttgtatcagcatagtagcttgccgactatgatcttcgatctctacatggtgagcccttaatgcctgcatctctttgtctctccattcagcaaacatacgcctttgttcgtcaaacactactgcagcacgcagttcatcctgatcatgatgcaaagtgttgctatgactctgcatgagtccgagcatagcacggagattttgaattcggttgtgtctccgatggtcgtctgggcgttggttccaggcaaaacagtcgtgttgtgaatgccctggctgtgtgcgaaactgttattcccactctcttgcacaccaggcgcagtttaaagcaacaagagctgtttcaccgttcaccacgctctccgcctgtctagcattgacagcaggtggaacccttgacctccctgggtcctgcaatgtcagatccagcatctgtgaatttgctgggtctgataggcctctacgagtttgcaccatcgtgttgaatgtcgaaaagagcgatttgcgatccttctcttaatgaaagtaccaaatgttgactttgcttttagccaacgacaatgagtctttttgagaagcgataaacgatatgtcgtaacgaatatataataaagcaataataagacacaggaattttatagaggttcagccccgagcagtttggtaatagcctaatcctcgttatttatattgactcaagaaaaggaagaagattccttttcttatagctcttactaacagtatctctgaattatataattcttagataatatagtcttagcttag

SEQ ID NO: 371414 - DNA, 941 bp, Cannabis indica
ttacattaaaaaagatgtatagtttaaatcattactctatcttattatttttcacccaaaaattatttgctctatctctacatgatttcataatagataggattgtaccttttagatttaataaaaggatattaacagtaaaattatttaaattttatatttttaatacttaactatataaattaaaattttaacaacaaaatctattaattaaactccaatatttctattttgctttttactttcttgttcaaaaatctcaattaagtgtcacagtagagtactcatgtgtacacaagtatacacatggcaaaattttattagcccacataatattatttattaaaatattataaaaaataatttaaaaattataaaaataaataaattataaaaaaaatacatttctatttttttcttttcttctgttttcttttttcttgaaaccctaatctatcttgcttctctttcttcttattcttctccattatcactgggtgtgtcaccacaatcactactaagggtgttcataaaataactgatccaatctgcacgatctaattcaatccaatccgcaaagtgcagatatttgcacttgtgcggattagattggattggattagaaaattcaaaattcgtacttgtgcggatcgaatgttgattgacatgtaaaagtaactgatccaatgtacgtaattaacatatatttataaaaataattaaaaaattatatatccaaataatattttaatgtaaagaaaatagtaatttaaaagtctaatacatataatacaattatattttaaaacttaataaatcacatgtatattccattcttatatataatttttttctacatacaatgtaaaacaaaattaaacatttctttatacatacaattttttcttcctttgaattcattattttatttattttaattt

SEQ ID NO: 371415 - DNA, 686 bp, Cannabis indica
aacaacataaaagtgtttaagtatttgatcaagcacatatatgataaatggaacttacaatccggtcagcgacctcctgagcagggccatcgagctcgccgtttttgttcgtgtgtattctaatccacaagtctgccctgtcatatatagtaagctggtggcccaactctttctccaacttttcttcaactttcttaacaccacctcggcccgcatggtgattgtatgtattttgactcctgatatcttgcattttctttctcttttttgcccattcgggactacatcttttggcaacaaattctttccaatcttcgggcttgtaacatgaagcataagcatctggaggacgatcgagcattgctggaactttatctttgtatttgaaaattaggttccttgttaggaatgctttccagtctttccatcttcgtccagcagtttttaaggtagaatgcttagcttctgggcctaacttgaacattgactgcaaaaattagcaataatagttagaatggcaaaaaatattcaactacatatgcaaattaatcttagctattagcattaccttgatgtactcccataatagatttttaaattccattggaacttttctccaatcattgtatgccagtggaagatttcgtcttgcatacaagccaatctggctaaccagtttcatttgc

SEQ ID NO: 371416 - DNA, 636 bp, Cannabis indica
ctgagtggaacaactgctcggctaattaaaggctcctaaatcacatcgataacaacacgcataagcgactcgctaaatctcagccgggacttaggttttaaaaccaaaaccttatctactgtaaattaatataaaagtatcccaaactagcagggaacaaccaactagaaacctgaaactaacacgaaatgaatagctgaaaaattggttttcgcccctgctgcaaaatctgggtaaccggttagccggttttaccaagaaaacaaaccaagcttcaaaccctaaccaaaacgtttccaaatccaaccaaactttccagacctgcatttcacaccccaataaacatattccaggtgataaaacaactacccatacacagaaaacaaaatcaccattgatgagccaagcttgagttcaaaaactcaaagcttgctcacccaacaaactagttatcaaaacctgctcaaatcaccctaaataaacataatttaactactgaaaacatatcccaacaacaataacaagaacaacaagcaaaacaacaaaaacatgcatgatccacttccttaaaaaatcaagaaactaaggggaagttgtctaaaaccttacgttagcttggagattacaaacactagc

SEQ ID NO: 371417 - DNA, 560 bp, Cannabis indica
atcatttatgtaccctctaaatatccaacaactatatttttatagagacaatttaatcacattcaaatataattataaatcaatttactaatttaagaatgatgataatatagatgatgagttataaattttataatcattaaagaacttataattcattctagatcatcattcacacataatgttgtaagtttgtgcgtgtcatgttggcccgatttatatatctgtgttttttaaaaaaatagtttcgtatcgtgccacaaaaaaatatgagttgattgtgccaatatttttaaagaggaagcccgatattttcatgttatgctcagattcatatcgtgtttttacttctgccggcccataattcttaaatgggctaacccgtttttatattcgggattgaattcgtgcttcacttttccatattatttttttacaattactaaaatatatatattataacattagttatatttatgtaacttttaacaatatgttacaaataatcatataaaaaatgttatattatttttaatataataatatgtagattaaaatgt

SEQ ID NO: 371418 - DNA, 535 bp, Cannabis indica
gttaaggtgggccttgagagcttgtgcacagcagtggttgcaaggaatcacttcagtgaagtgattcaaattaattataataaactataaaacaacaaaaataacaaaactcaaacttcatgacaaattataaaaaaaatataccgaacaatttactgaaatccgtatttttataaataaaaaagtaaaaatcttaaaaataaaaatttctcattattaacatatttttataatttttttcaaatttttaatcattttaataaataattctctcttttttttattataatgttggtaagcaaaaatatgtaattacactttccttggtttgaaaaaaatatgtaaatatgttagttctgtcatttataccaaaaaaaaaatacaagagttaaacttccaccgataatgccaaccaaccaattctgaggtcttgaattagccaaccaaagttttcacctttaagctactctctctacctacctaccctttacctgtcaccaattccaatttaatgactctctctctctctctctct

SEQ ID NO: 371419 - DNA, 517 bp, Cannabis indica
cacttactctcgagctaagtctgttgcttccaagaactcagctctgtccaacaccatgagggcggaggtggacttggccaggaaggacgttgatgacgccagggtggaacttggagctgttcggatggacctgggtgaagtcaacaagaagctttttactgctcagaagaaaataactgagttgactaaggatctcaaggcttctgatcgacttgaagagaccatcgagaccttatctgcagaagtgagtagcattcaagatgaaaggacgtctcttcgagttgtccttccttggctggaagaggagaagaagtccaaggaggaggagcttacagctgaggtggaaaggctaggagaaagagtccatgccttagagactgctggtctcgagctcttctatgacttttggaaggctaaccctcaggcaaactttgattacttgggtgaagccaaagacatgtatctcgatttctgcgcttcccaagtggcttatggtgagcccgatgcgactgcttct

SEQ ID NO: 371420 - DNA, 698 bp, Cannabis indica
acaactttctttttttcataccaataagattccttcgaataaaattgaataggaattagagagatctcctaatatcgaaagaataagtaattatatgaatgtgtcataattattagtctcaaaaataaatcttaaaatttatttatttatacgtgtgactattttttttataagtgtggtaaataactgtttgaatcttttttttttacactaaaaactactcattttttttttttggtaaatttacaaaaattgtcttaaataactataatattacgatcatgaaaaaaaaaatagatgctgaaatagatgaaatggcctaccaaaatagctctttagaggagtactgcactaaaaattttctaaaaaaaaaattagttttcttttaattattttaaatgattacaagttgttgtctcaaaaaaaatgattacaagttgaatatttgatagtagtatatatatcgtaggaagtttatacggtgcactcctaaaaaagagtacatcgatgcacccctactgtttcagcatccaatgaaatcttttagtctattttttttatggtcatgtaagttataattatttaaaacatcttacaaaattttaagaaattcaaaataatttacataaaatagtgttcaaaaagtctgtaatgcccactttagaagttttttcttactcttatatttcaaatataat

SEQ ID NO: 371421 - DNA, 598 bp, Cannabis indica
tttaggtccgagtttggggttggctcccagtagtcaggtcctgggttctaggtatagggtcgagtcttgtgtctcgagactgtggtcgagttttaggtctctgtcccagttccggggctcagttttgggtccaagtccctcatctaactttggatgcttagtacatgtctgggtccaggttcaggtctggggcccaagtcccccatctaggttcggatccttggtcccggtctaggtccaaattcagattcgggtttggatctcgagttttggtgcgagtctaggtcctagtacgagttcgagtttgagtttgggtccgggtgttggtcgaagtccaagtccctgttcgggtacgggtcggggtcccgatccgagtcctagtcaatgtctaggtccaagaccaggttctggtctgggtttgggtccgggttcaggtccttagtttgggtctcggttcgggtctcaattcgggtcttggtctggcttctaggttctgatctcggcatgggtatgggtctaggcgcgtgtccaggttagggtttagggatttaggtttagtgtttatggatttagggcttagggtttaggggtaagtgta

SEQ ID NO: 371422 - DNA, 502 bp, Cannabis indica
tgtaacactaaatttagtgtatcgttggagatgctcttaacaaagttatttgattttaaataatttaggaatcttaattacattaattctcataattatatgataattgactataattataaaatataactattttaaagataattaatgttattttttatacaattattaatttatttgtcaaacataaatataaaaattcacatatagttattgttaagtaatgatgtgtgtaaataggggtgtgcataaatcgatctaatctaatgataaccgactgatccaattacaactgaccgccaaacattggatatccaattgtgatcggatcggattggatattatttttgaatatccaattggatcggatcgaatgttggatggagtgtctaaaaatccaatacatccaacatccaattaaactaattagtatatatttttatttagtttggatgagtaaatattagatctataatgttatacgtaaaatatatatgtatac

SEQ ID NO: 371423 - DNA, 502 bp, Cannabis indica
gaatttcagcaagaattcaacaaataattccatataatttcagctagaaactacctcaatcccttgcacaatcaagctccaagcttataacacccttttccaacaatgaagctccaaatcaagtttaaattttcacaactcatgttgaaatacgtcaagagggtaagagagggagagggttcgggtgagagagagaattaactagaaattacattgatttttcataataaaatccaattttccaaatataatagaaagaggtcaaatgaccaaaatgcccttggggccaattaatcatgcatacacattttcaagggcaatcttgccatttcacactcaattatttccaaataaatttcagattatcacttatgaaataaaatgccaattaaatcaatcccatttgcatttcggacctgaacccggttcggctcgaaattcccagttgtgactataccgcgccaacctgtcaaaacacacctgaaaagacaacacaggcata

SEQ ID NO: 371424 - DNA, 599 bp, Cannabis indica
atctggaaagaaggtaagaactgaatataatgtgcgacatcaatatctgagtgtatgtatatgttatgtgtatatgcatggtttacgtgttatttgcactactaacacttgtacagtatggtacagactgcattgggatagtgaatattgtttaggagtacagtacagtgataccagcacaagtacaggaaggtactaagtgtgtgtggtacatcacgcactggtactcagggtatgaaataaaccctaccataactcgtacagtgaggtacgtagtgtatgtggtatagtgactataccctagtttggaacgttcttactcatctgttgatccttgaaaataggtgtatgggcgcctaaatacaagtcggaaattatacaatatgttacatgcttttcttactgagtctgtcgactcacagttctacttctatgtgtaggtaaaggaaaggcgaaagatgaacaggagtgaacccgagctaggataacattgtacatgtcgaagcagctcgacctggagtgttcggtctcgagacatctggggattgtattttgtagtcactgtgcgacctgattattatgtattttggtataatatg

SEQ ID NO: 371425 - DNA, 583 bp, Cannabis indica
tctagagtgatcgtcttaagaatttaacgagaactcatatccactcctgaatgtacatccatatatgcgaatatagattatcctactatcaagtggatataggcatattttctctttgcagagaatcatcttgtcaaaaccactatgaacaagatgcaaatgccatagatagattgaactatggttgtggtcttttgatgaatcttaatgatacctaggtctagttacaataaagagttcttagaatagtctaatggatcttggtcacagaatacaaaactcatattccatacataaacatacagtttggatccactgattaaaaatggatattaacaacttgtgcaagttatactgtattgtacaatgcattcttggaaactcaatttaaattttcaatttggtatctaaaatttaaagtcaaagacttaaatttataccaaatatacatgagtaattattctagcttggaccaccactactaatcttactctaagtctaagttgccttaagtaagcatatacaagtaggagatttctaagatcgaggatttatatcgttttgggatagaatgtcgagaata

SEQ ID NO: 371426 - DNA, 477 bp, Cannabis indica
aaatgatatttaagtttaaatatataaaaataatattttattttaaaattttgggtttaaaattgggaaaattcagaattcggaaaaaatcccacaaaaatcgggttttggagtgtgctacccatgaggctacaggtgcagccaaatgaggtttcaaatgggccagacgcgcgccgataggagaattgcaacatccttgcgccgagtaacttcggcgtgtgcatggtcttcgtgggcgaggtgcagggtcggtacctgtctgaacaggcgtggcatcgagttttagacaagaggcacgtgcgcgctcggtcgtcttgtccgaagggtctggtacgcatgagctgttgggttttgtgccctaaataaaacccatttcaatataatcagatttagtagttaataaagatcagaaataacatttcatgttgcatggttcacgtgatttatttcatgattatatatttaatgtataaattc

SEQ ID NO: 371427 - DNA, 574 bp, Cannabis indica
tatatattgcataattcaaaaatgtatttaaaataaatatatttttcgaaaatgctatcaaataaaataaaataaatcctaaaaaattactctaatttatgttgatccaaagttaattaaaaaaaattaattttcaacacaaatataatttttctatttaaataaatattatgaaaataatcaaatatttaagtatctaaactttcactaactaattactttactttctaattataatatattttagtctatttattttaattaatcattaaatgaaaaatttattgatttaagttggtctaaaattaattaaaataattaatttttcaaatttaatctatttttcgaaaaaaatcaaaattttctgcattaaaaaaaatgcaatttcgaatttctaaataaaatgattaataaaatatactttgaacattatttaaatttaagttgctgtgaaattaaaatttccaacttaaaataattttctatttaattaaatattctgaaaataataatatttatgaaatcaacttatatatttaaaattcaatttaattaaatgtattaaatacaagaa

SEQ ID NO: 371428 - DNA, 548 bp, Cannabis indica
ccgcccctgaaggccaaaaggagaaggaatatccactgtgctttggactgcctagacaacaaccaaagagtcggtttcaaccacaacaagtccccattgtttcctctttatccaactcaaagcctccttaacccctaccaattcggccatagccgaatccacacaccccactcgtaaaactgtgaagccttcaatgaatcgaccctgatgatcccgggccacccctgccgctccaaatcgaccatcacttgcaatgattgcaccatcgacattaaccttaatcgttcccataaccggtttcacccaatgctccaagtccattctcgaacccgtaggaacaagtaaagaccccattctcctttgttaagcatttctccattgattaagaactactcttgccaatagaatagcttccgccgctgacattgatttgtcccgccaaaccacctcatttcgggcaaaccaaatcgcccaaagaaccatgagaacctcttcctgggccatggttgagtgttgtaacagaatgtggctaaaccaatcccaaaaag

SEQ ID NO: 371429 - DNA, 530 bp, Cannabis indica
atcacgatggactttgtagttgggttacctagaaccacgggtttatttgattcaatttggattgtggtatatcgattcacaaagtcttcacagtttttaccagtcaagacaaccttaagagtggatcaatatgtggatttatgcgtcaaggagatagtaagattacatggtgtaccaaaatatatagtttcagatagagattcgaagtttacctctaaattctggcagagtttgcaatgggctatgagtaccaaactaaaattcagtacaactttcaatcctcagactgatggacagtccgaaaggataattcagatactggaagatatgttacgagcctgtgttatggattttgagggctcctggagtaaatacttatcgttggtagagttttcgtacaataacaattatcaaagtacaatagggatggctccctatgaattgttatatggcagaaagtgtagatctcccattcactgggatgagacaggggagaagaaatacttaggtctagaatcagtacagcggac

SEQ ID NO: 371430 - DNA, 417 bp, Cannabis indica
aaaaaattatatattttatacacataagtcaataccaaatttagtaatatataaaaatatgacataataatttgatataatattatacattgtaatacgacgtaatatagtgtagtgaacaaactttggtttattttctggttgttttgttacaattagtcatcgaactagtcatagtgttgtaaagtgattattctattaagttttgttacacggtgaacccgggccttagatcagtggacctgcgtcgtggggttcgagattcgagattcaggatccaagttcgagtttaggtccaagtccagatcgtggtttggattggggtcgagtttattataaggaatttataattttacacaacttattagtacacgttaatatcaaatatagtattgtattaaataatactaaaacaat

SEQ ID NO: 371431 - DNA, 883 bp, Cannabis indica
tactaaccccatatattactatatataataacaataatatatagttaattatttatatatatatacaccatagtaacattaatgatatttattggcttttggtcttagatacgtgcatgtgttttttttatacctaaataaaaaaactacgtaatacttagtctcttcaaataataaatatatgtatacattaatatacataaccctatagctagttgtatatataaatatatatttataaaaattattaatcttaattaataaaataggagcatattaaagaaattaagaatgaggatcgattttgttgattttttcaatcttagctaccttaatattaatttttaatttaaagtttacataattaattaataaaccacttttaaaaaagaaataatgattaattatatggtcggaaaaaaggtgtatatttttttatatatatttgtatattgtttgattaaattatgtatatatgtgtgatgtcaactcgttttgcttgcgttgcaatcatcataccatataatatatagagcaaattaattaattaattaattatatattattttagttaataattatagaatccaatgaaaaaaaaacactattaaattaataagagattattttacaaacacacaaaaaaaattattacaaaaatataattgtacgaaattttaaataatatttttacgtattttatttgtcagaaaatacaataattttaaattgatgtatttttatgttgtactcttgtcaatttatatgtttttttttatttattgttcatgatattgttttggatattattttccttattacttttatgtaaaatagtatcccatgtaattattctaattaataataatcatgtgattattta

SEQ ID NO: 371432 - DNA, 685 bp, Cannabis indica
tccagacttctaacatgcccaaaaattgaattcgacaaattagtctgtctaattcaatttagtcttgcatatcaaagaggccctatgatttcaattagtactgtaaatcacattgccaaaaaaaatgttgtaaatttatgtgtagtgatagctcaaacttaattttttcatactttttaaattattattctaaaaaaatatgagttttgctgtattaatatttttaaaatataggtccagtttaatatttttcgtgacgtgctcgaatttgtaggctatagtttgaaagaaggattgcctcttttattgttttgatgcgtagcaaagaattaatagttactgctacttgtatttttttgagctcaatgtagaacatacaaaaattgttacttaatagcttcattggtattatttttgatgatttgttaacatatcttaatatgttttctgttctattttatcaactaaaatagattgtttagtaaagaattagttgaaattagtatttcagctattattttgacacctatacttaatcacacacacataatggtttagtgaaaaataaagtcaacattttacggtaacttatgaaattggttttttatttaattttttttttggctaattagtaatttttcccctcgaattttgacatgtactaaatcgtgcctcctgaactttt

SEQ ID NO: 371433 - DNA, 653 bp, Cannabis indica
gggtgattgtgacagtcagtagtcccatgatccgtaaggaataatatcgggtaagctatgcaatctcacattgcttggggaaggtcaagtgtgatgattctgagactgtgtaggcatgggactacacagttgaagaaggcttaaatggattaattgtaactacctatatcaacaagatgcatcttattttctaatagcccatcacttaagaactccaaagttaagtgtgcttgacttggaataatcttaggatggcttaccttctggaaagtttttttaagaagcgtgcgagtgaggacaaaacacactagaaatacttgtgttagtttgcagggtctgtcgtcaatccaaaaagcagccaaagtgatgtatctgtgtataagagccatgatttagtgggaaaatgtcaaatggaggtttgaagcaaggtgttacaagttttgtgtccttaattattctattttgtaagacaatcttgctaagcttcgttacttacctaattgttcatgttgcagatacgtgtaaggtggaatagtgagtgtcaggatctatttgcaccaagtgtatgttggggattatttaccaggatctagatttactaccatgtaatgttatttaacatcctaaatataatttctaaaacaatgtaattt

SEQ ID NO: 371434 - DNA, 700 bp, Cannabis indica
accagatcagggagacgtggaaacttggaagttatatgtggatggcacatccaacgaacagggtttgggtgcaggggtaatactaatatcgccggaaggctttaagtttcactatggtctaaggttctaatttgacgcattaaataacgaggttgaatatgaagccttgatcgccggcttaaagatagcagaggccttcaaagtcaaaaatctcatttgtcatagtgattcgcagctgatcgtgaaccaggtcctcggggaataccaagccaaaggcttaaaaacggcgaagtatttagagaaagttcggaagaacttggaaagattcgattactttaaaattgaacaaattttgagagaacaaaactccaacgccgatgccttagcaaagctggccttacaaaatgaactggatgaactaaatctggttccggtagaaatgctgagggagccaagtatgtgtgaaactaaagacatcgagatgatagatagctctcgaacaggatgacgcctattatcaactatttactcgacgggaaacttccaaatgacaaaagcgacgtgcaaaaactattgtatacagtgcctcgctacacaatgatcgaaggtaaactatatagaagagggtattcaatgcccctacttcggtgtgtttctcccgcagaagcaaacgaaatcattagagaaattcatgaaggct

SEQ ID NO: 371435 - DNA, 453 bp, Cannabis indica
atgcataatatagcctctgaaaacaactaaaaacatacaacaacatcacagcaacagattcaagtacatttctttcaaaaatcatatattttgcatagaaaaaccatagcttactcaacctaagaatccacaacaagagatcactagagtttgcaaaataaagcttgaatcacctaaggaaaatggctggcttatgatgctccaagagagccgaaaaagagagagaggtttgagagaaaagctttccaatttttcttatttttaaactttgttaatttttgtaaaatgaaatgaaagttatttaactatatatcaaccttatttcagccaaataataataccaaataaacatataattccactaataaaaacactagaagacaaaataataatggggcaaaaagaccattttgcccctccacactaaaaccttacataaataacactaaaggg

SEQ ID NO: 371436 - DNA, 505 bp, Cannabis indica
agaaataatactacctttctaacgatatgtaattagaaaagggacaatgatagaaagaaaaaaaaaaaaataaaagccaataaaagcaccctaaaaataaaaattataaagatattgataaaagtactatatctatataaaaatataatatgattaccaaaagtttataaagaattaaaaagttatttccagcataaatacttaaatttaacttctgttctggttgctattaaatacttaaattatatttctagaatttttgtaggtatctgtccattaagtgtcaagtcaatgaccacgtgatagtcctgattggtccaggtcattaattgtttttatttaaaaattaattttaatataccaataagaaaatgacacgtagataatgattacacacttaacggccaggtacctactttgacctcgcttttagccaacgacagtgagttaattaataataaaaaatgtaattaagacagagcaaaatcagtaagcaataaagaac

SEQ ID NO: 371437 - DNA, 681 bp, Cannabis indica
tctacccgactacctttcccaccacgcatcatcactcacaaaccagcaattgcatccctgtcaacctaccaataccacacatactatcactagccgaatgcctctttctccagcattccctttagccaaacctgcaccctgttacatcctcttttccacctgctgtaagttcttgctttcaagcaaattcctccccacttctggccaactctggtgccaataaaggcaagcaaaaaatacaccatgatagcaatataaatcaacaaattcccactgtcacttcctgcaatataaactagcaaccatctcatactgtcactcatcctacaccctcttcaccctctcctgttgcaataaatgtaacccataaaaacattgttgctgacctctcccatgtctacataccggaccttcacaataatacttttgccacctatcctccaccacttcacccctcacctacaaacactagccttgcctctcccatactcatcatgccccaacgagcacctccctacctatacacaggccacggtttcacttggaaaagagaaccagccccacctaccacttacaaacgacacaatgactccttatccatgaggaaatttttgtaagagatgtcgcaatgcacaaggaatttcatcctctattttgtcaagagacgatgatattgagact

SEQ ID NO: 371438 - DNA, 559 bp, Cannabis indica
aaattaaaaaaaaaaaaaaaaataaaaaccaagcctacatagtaggagacttggatggtctttcttcgataacttctcatgatacctcgacttcctcttctgcctttttagcttgctcgcagtaagcaaggacttcctccatggccttacccaggaaactcaaatccatttctggattcgcaatccaggctcgatagatggagcgcatggaaatgcaattgcatcgctccttggtgtcaatctctttcgcctcgagcgctgcattggctgcattaagttcctcctaaagtttctggcatagctcggacttgtccttcacctctttttgagcagcttcatgttcagccttgttggccctcttcacttcctcggcttccttgcttaagcaagtgatctctgccttagcatcattccattccttggacacagcctcacgctgaccaatcaccttctggatctcactctccaggtacttcatcctttccaaaccccaacattggcgatgaaggagatgaaagtttgttgaaaacaaataaacaaaaatgcataagtattttca

SEQ ID NO: 371439 - DNA, 565 bp, Cannabis indica
aaaaaaaaaagtattgtgttaaatattacaaattataaattatttattacttatttaatttttaaaataattatatttgatagtaatttatagtgatactattatcatcatcacaactaaattaaaatggaggtcaagtgattataatgaggtaaaacatttaagtgaatggataaaaaaactatatgtttaaaacattagttcctggtactttaccatgttattaaaagattattacgtaccttcaatgaatagtttttataaatttgattagaggcttagaagtaatactcaaattccagtttaatatttgattaatatattatatcttgaaaaaacaaatcaagataaatatatcaatcaaatatagaaaaataaaaaagaagaacgaaaagtgatgagatgataattatagttatatagatatagtatatagggtgattctacaatgcacccatttaaaagggatgtaccgatgcactcttaacaagtttcggcatccagaaaaatttttagtctaatttttttttatattcatgtacgttatagctatttaagataacct

SEQ ID NO: 371440 - DNA, 754 bp, Cannabis indica
tttttttcttctaaataatgctaaaaaaaattgggcagcacctccccttaatttttctacttcccaaaagttcaaaatcaatcactactatttccaaaccacaatacaatattaacaatcccaatatcaacaatatttttccaaaacacacaattatcaccacccaaaatctataacaagtgcatcaaaatccttaaagattgaaggaagtgatacttacaaacccaaagaagctttactccacctccattgttgaatgttcttgaaaacttgaggttaaagatgaagacaatggtaattttcggatttggggtattatgggtgatttttggtatggtttttgatggtatgtgtagattgatcagtgaaattgggtttttgaatggattgggtttgagaaattaaagaaaagatgaaaagattgaagattggtgatgaaaattttgaatttttgagagaaaaagggtagggtcggctgagaagtgtttgaaaaaatttgaattgggtttagggttgaatgagggggaaaataggatatttatagaaaaaatcgtgagctagtcgcgacttgcccaaaaactagtcgcgactagcttacgattggatttttggcttctctggaaaaaaaggaagtcgcgacttccaattgtgctagtcgcgacttctggaaccaacaatttcatcgaggttctgttaaaacccaagtcgcgaccagggtcgcgactccaaaaagggtcgcgacccaggaacctgg

SEQ ID NO: 371441 - DNA, 322 bp, Cannabis indica
aattaatgcctcgaaacacggttgcctttgcacattttaacggttacacttgattgtgtttaatttcccaatatttgcttttgggggaatcgaagcgtctggggatatttcgaaatgattatcccttttccctaaattgcctataagtaaggctggaactcctttagaattttactttaaccattttctccactaaacaaactcaaagcaaaaaagaaattttctccaagtatgtcgtgagatctctactagaagcatccgagcagcttcatctaaactacatttaggcttcaaatagtgagtaagttttcaatcttctcct

SEQ ID NO: 371442 - DNA, 703 bp, Cannabis indica
aaggtgggcccaaggaagcgacggaaccagtccgatagggggtccaggttaaggtcccacggatcctggtactccgggtggttgatgctcgcctcaacctcagcccgcaaaaccctcctaagggcttccacctcggcgtacccccgggagtactcgtccatggcatagttatgcttggctatccgaagctcttgcctcacctcatcccccgggaccggagtaagcacgatgttgggaggagcaggattttcttccataggggagaccccccgtcaagaccatgggcgggagtgtcggctctccgaggcttcttgggctcgtcctgggcaatcattttgcccttgcgcttacgaatcagagccacctcaggctcctcttcgccttcttcagcttcctccggaagggctcggggctctcccgtaccctcagcgacttcctccgagaagtcccactgcttcccttggccttctcccggaagcacctcctcgtcatccactaaatcaatagtgtcggggggagcgctggaagagaccttcagggaaggggccggggggaagaggtaaaggccggaggagccacgggagtgtgaactccggcaagctgttccaaaatggcatccatggagacacctgtttcacaaaataagcaagtgttagatgtccgtgaggaaccacttatacaagatacaacaaataagctactc

SEQ ID NO: 371443 - DNA, 431 bp, Cannabis indica
agaaaaatctaaaatctgcacttgtgcggattgaatcaatgttaattgatatgtaaaaataaacgatctaattaaattcaaaacatatttaatattttaatacaaaatagtaagttaaaaatttaatacataagatacaaatatatttcacattcttgtttgcaaggaaaatataaatttaaacaaaattaaatatttctttatttatatatttttttttcttattttgaatttattatttttttattttcatttgttttattttattgttagtttggtaaaaaaatatctgttaataaatattaaataattcagtattaaaaataatcaatccaaaataattaatcaaatttgttataaaataatatagaatagatgagaagaaagaagaagaagatgaagataggaagagaaagtgaatgaaaatttct

SEQ ID NO: 371444 - DNA, 595 bp, Cannabis indica
ttaattttgcctaaagtaagcatatacaagtaggaaagtctaagattgagaatttatatcatttcaggataaaatatcgggaatatagtcatctgtgccattcaatttcataagaaaaaatagaatgacaacataaggaaatgatttataaaacattcatccaataatataccatgtaaagaccgcttagtttaatttggaaattagcagttaattatgtttgatcatggaaaattatttatagatatttaaataattgtttgtgctgttattattgaattctgaaatgcattttatgtcatatagtgattttcataattttgagtattaggggacggttatttagacattgggaatgtcgggattggctgggaatttagaatttcccaaaatacccttttagtacccctctgttattttagtgtggaggggcaaaatggtctttttgccccaatgatattttttccttcagtggactttgtaattagaattatgtgaattatgtggtttatgttggctaaataaaggttagagattttattcttttgtcattctttcaaaattcaaaaattagaaaagaaagcaaaaaccattt

SEQ ID NO: 371445 - DNA, 686 bp, Cannabis indica
attgaggtggcagccaaattttgagtattacaattgccccttaaaaagttcttttttagtaaaaaagagcgttttaataattacagagagtattttcgttaagatcttttcttggaaaaatgcatcctttgattttggcagttgtacggttttgagagtaattatgaatcgtctcttcatattctgcccttcttccaaccgtttgatttcccaatctttagctttcttgtcactggactctgtgtataaaagggcagctcaagcttgttatttttcacaaacctctgactttttggtgaaatccattttcagaatggatcacctctttcctgctagaatgtcccttctaagttcagaagttcatcctcccaaaatcatcttacccagacacaccaaccaattttcacttgttcccaaagacttcaagcctcaactgaagacgcaccaatccaaaccaggggaacctcgtagcctgccatggccgatccccacaagtgatccctgagggtataaatcttgtgagcgatcttgaagatcctcctcaggctggtaaagaattccagaagaaggttggcatggttgcagatgaacctgggaagaaagttggcgaggtttctataagagagtccagccaacccaagcccaaacctgcgccagaagacttttacaccatcctctttctggta

SEQ ID NO: 371446 - DNA, 589 bp, Cannabis indica
ctgttatgactttgattatttttttcttgttgtttattttatttattattctttatatcctatttcattaatattatttttaaccggtttttcaatattgttaaatataaaatcatatttgttttatatataaggttgttcttagtttttttctcttgaattaactggttctttttgtttttttatattgacattttttattattttatgtatgtattctaaattgcagagttttatttattttttagatgatatatatattcttatataattattagaatatataattttgattattgagtttatatacctgttttgtttatactgagaattgttgtcgaaaatttgttactgtgtataatttggtttgatttttcattttctagtatgtgatttatgagcattgatttttaggtttacacagctgaggaagaggatcaaaaccaattgaagaacttaacggagctagagaagacaatcggagatgacgattgttgctgcaactttgttgtcaatcgatcaatattctggtttgtgagattgatttgctgtgtgaaatacttgcgtttgagatcgaattgcagacttt

SEQ ID NO: 371447 - DNA, 689 bp, Cannabis indica
atacaagagtaggttatacatccaatcataaaaaaaaaaagtgatcctgcttcctgaaaaccaagacaacacggtgatatgtacattgctgggagacctctgactcgtggccaaacagaaccgctgatccttacctgcaccatgaagcacccgtgagtcatagtgacacagcaagaaaagctattaaacaaaagaatattatggaaagtgacagtagatttcatttcaacagattattcataccaatagattacactctttcaacgtacatttacaattcaacgtctttacgagcaaactcattacaaaattaagagtatttacagctatacataatcaacaatctcagtatttcataaaacaccttaatcatgcattatcataaacattcattttcaatgcttcataaagcaccctagttcacacattagcatatccacacaatttcagtgcttcataaagcactccaatcatacatcattacaaacctgttttcttacatccctaagccactgagactataagaaaaatgaccaatttcataagctatataacatttattcaatcataccttaacaaaaatgtattcaattacaactcatcacataataacacgcttgatcgttccacaacattataaccacataatttaggtacttcataaagtacccctaccactcgttaaccac

SEQ ID NO: 371448 - DNA, 901 bp, Cannabis indica
atcgcattgaggaaggatgcgcgtgaaattgaaatggctcaaatacttcgtgatggttgtgcgtcgttgaggagggaaacttttggtgccaactgaattctgttagctagggaatttactttttctttcttgttagtttaatataaatactcttttgtaattggaaaaggtttggctattgaatgaattagcaataatttgcttgggagacttgtcctgtctcgaagagggtagtttattctatcattcacccactggttctttcttctctggtgatactaaagcgcaaatgcacagaccttactaaagtgtgatggcttagaatagtaatttttgaagagctcttgttgacgacgtcgatcgacaatcatgaatccgctgcaaatcattttttccaatcggttcttcacgatcaaccggttgcttagcactaggatcttcttacacctttatcctctgttcttagtgttctccatgatgaatgtaccaaatcagtacatttcattattgaatgataatttttagtttccattatatatcaaattgtttctattcttctatgttaattttatgattatcattttaatcttgtttagatggccactaaattaagttttactttaatctaccgtcattttagaattattattcacctaatagtctaggattttaagtgtttgtgacaaattacaattttaattgtgatgaagaatagaacctaggttaaatgaattatatgcttcattgatttgttgcctagattagtctatctccataaatctcaaagctttatctaagttaaataacttgcatgcttcgcggatttactgcttaggtaaaagagttaattattgtagagcttctccttgattacatacaatagggagattaggataattga

SEQ ID NO: 371449 - DNA, 502 bp, Cannabis indica
ggtaagtaataaaaattaagtatagttgtaacgaatttttttagttttaacttaactagaaacaaactactgtagctctaaataaacaaaataaaaaaaaaaaaaacagtgcataaacgtaaaaatacacaaggtttttggaagtggttttaataattcttgtagattgttactaatccacgaggtcatgcccagaaataagattcattagatagatctcgaaaatacaaagtaatagacttatgcataaatactccatcttattgtatgctgtaagtttgatatattccaccttctaattgaatcttgttgaaacttcaattgctcgacctacctttcgatctccttgaagagtgcctgcttcctcctgagtcaagacttgaaaagtaatctcccaaaagcttgtaaaaccttttcccgaaggtagcactattgttcttcttcttttgtagacttgattacagacttaagacaatacaaaagacacacacacacacacaca

SEQ ID NO: 371450 - DNA, 335 bp, Cannabis indica
atctaatctaaagatgttatgatcaaactaattatattttctatatctattcacgttagaaattgtcttaaagttagttatattaaaaaataaaattgttaaaaattaagctcatagtcgtattttgataaggtctgctttgtcatttattaggatttttgccccctgaactttgacatgtaccaaatcatgccccctgaacttttaagatcgttgaaaaatgccccctgaactattgagattgttggatttaaggacttttttccaattttagtaaaaaaatactaacatggatgaaattcagagggcatgatttagtacatgtcaaagttcga

SEQ ID NO: 371451 - DNA, 858 bp, Cannabis indica
ggcataaaacctaacaaaacccaatgcttatttttagcggtataagtacctaatgtttgtaaaactataattttcttccagttttatcagtacagattctgttttgaatttattaaaagaacatttggaagtaactgatactatatatttctatctagacccgatgataaaaaatttaagccttatatgtgccctgtttaagacaatatcagagtctgtactgacaaaattagagaaaaattacagttttacaaacattgggtacttatgccgctaaaaataaacattgggtttatgccgcttacaaacataaaactttgggtacttatgccactatttattctttacaaaatataatgtttaaaatagtatatatttaccctttaaaatacatagttgtgtttacattattaaaactacttgaatctttttcttttactgctggtcattatagatcatgtcaataataaaagtactattcttaaaaacattattgttataatatataagtcttgctcaaatcaataaacttggagctataaatttatatggcactttaaaataataataataataataataagagaattgctaaaaaatactactggtgtctagcatcctcatcggtgtcaatgttgttcgtgtaattaaatatcgagttccatataacttaaaaaaataaattttaaggaatatcgctaactaattatgggacgccacctatgaaaggtgttagacataactgatgactaatagcattactcttgttagacttagtatgactttgtaatatgccacataagcaactgttttaactaacttgattagttagttaaaaccgttacacatgtcggttta

SEQ ID NO: 371452 - DNA, 510 bp, Cannabis indica
gtggctaacggtgattactaaaatattgaattttatgggtgtcactgggaatgacagggtggtgtgtgctacctttcagtttcaagaggacgcgttagtctggtgggacatggtgtcccagattcacgacgtcacaactatgacctgggaaaggttccaggaactcttcaacgcgaaatattacaatgaggccgttagaagtgccaagagaaaagagttcgcacacctgacccagagagagaatatgagtgtgacggaatacactacgcagtttgatcggttggcgaggttggcctcgggaattgtgccaaccgatttcagtaagaaagaaaaataccttgatggaattaatgtgaagatcaagcatgaccttatgatcaccaccgaccacaagaccacctatactgagatggtggacaaagcactgcgagctgagggcgcagttggatgtatgtcagagtcagttaggactccgtgttgagttggccaggctcctacccctcctgcatc

SEQ ID NO: 371453 - DNA, 515 bp, Cannabis indica
agacccttacacttgtcaactattttttccccaatttgtttgagatccaagtaatcatttgagtccacaacaagtgaagcatgttttgcaaataattgccagccagcagcctcatttattctttccagttgataagttgaacctgttttcataacagatgcaacaattgtgctccgtgttgtcacaatgatcctacttccatgcaaccctgatttaaagcaattaattaagacatcccacttggaaggatcctcatcccaaacatcatcaacaacaaacagaaacttctccacactcagagccttctttacttcttcttgaagatcatacggctcctcaatctcacattttctaaaagtgaccttttccatgattagtttcatcacttttatgcagtcaactttgtcatctcccactgtaatccacactttggttttaaacattttgttgactctctcatctttgtaaacaagttgagcaagagtagtctttccaataccgcccatccccactat

SEQ ID NO: 371454 - DNA, 608 bp, Cannabis indica
aatggtcattttgccccattgttagttgtctttttgtggcttaataattggaaaatacatgtttatttaatgcttttaatggctgaagtaaagggttatgtggcatttctttcatttttccaaacttagtaaaattagaaaaaaatttcaaaaggaaaactctctcttttcctctccccttttcggccatttgaggcagcaagaaagtggattttctcttgtgattttggtgattttcagcaagtctagtgtgatccttgaagaggtatttcttgtctagtttttgttcctttgttttcttgatgaattttgatgaaaatgatgtgttgcatgcttagttttaggtcattgttgttgctgggatgttgtgatgttttcagagatttaatcttggtattttaagtagtttagagctagtgaatgcatgataattgatttgatttcaagattgaaagtttttagttcaaagttggttttcaaagggaattttcgaaatttgtggctgtgagtattgcatgagtttgttttgtttttctccagctttagtatgcatgattatgtggttttaatctagttttgggagttgtaagtgagctttagccaagttt

SEQ ID NO: 371455 - DNA, 802 bp, Cannabis indica
gtcttgtcgtcagtggtgatcatcaagtcgtgtttgatcctcacatttaacccgttcaggtacttctctttcttgctgaagtcggtcggcactattcccgaggctaacctcgccaaccggtcgaactgagtagtatactctgtcacgctcatattctcccgactgagtcaggtgggtgaactcttttcctctttggcgctttctgaccgcctcattataatacttggcaatgaagagttcctggaacctttcccaggtcatggtggtgacgtcatggatctgagacaccatgtcccaccagaccagagcgtcctcctggaactggaaggtggcacacaccactctgtcattcccggtgacacccataaaattcaaaattctggcgatcaccgttagccactgctcggccttcaccacatctggacctcccagaaagaccggaggtgcttgcttccaaaacctttcatacaaaggttccattctgttagccgccacaactattttggcctgagcagcaggggcgggtgccactggaacttgtggcacaggcactacaagagcaccctactgcctcaatctctgaatctctaagtcttgctcttcaattcttacttgcatttcagcaaacctaacctcccaattctgggcttgggcagcctgcggcgagttaacatcaccccaaccacgaaccctgcccctgggacctctacctcggcccataacacttgagggaaactgagctcctcgaccttgatctgacccgactgagatgccctgactcctaatatttcgtctggcgtcc

SEQ ID NO: 371456 - DNA, 619 bp, Cannabis indica
aagtgttttattcttagtaacgaccatccgaatagtgactactaagagtaggacttacaaagtatgaaacaatggtagaagctcatgaaataggaatgaccttgactctcgactaaaacgaagcaacgttggattctcttttcgatcgaataaaaggttgctagaatggtttccattttagatgagttgactactctattcaatggatgatatctttgactctcaactaaaacaaagcactgtatcagtttgtttgaaaccttagaaaatctctgaatatgttttattttggtattattgcaaacatgtttacttactgttatattctgaacttgtgtatgaatatagttgaaccaaatgatttattattgtttattgatatttgtagtgtcaaaatgaataacccacaccccaatcctcatcttttagatgccttcacaaatgaactctatagtgtgaaaatgtctcttggtaagagcatcaattcacacttactcatgatgaacctgaagttccagaaagcaaatctgctgggaattgatttatcaaaagagcaatgggttcaatccgttctcaacagccttccacataagataatggatttgttgtatcatacatg

SEQ ID NO: 371457 - DNA, 702 bp, Cannabis indica
taagtctttcataaaaagacttgctcaactcttcctttagcttctcaatatttctgacatcatggccaacaatcaacatatcatcaacataaagcaggagaataatgaaatcatcatcagaaaacttctttgtaaacacacaatgatcagaagtagttctggtatattcatggcttgacatgaaggaatcaaacttcttgtaccactgtctaggtgcctgtttgagtccatataagctttttctaagcttgcacacaagattctcttttcccttgactttgaaaccctctggctgctccatgtaaatttcttcttccaagtcaccgtgaagaaatgcagttttcacatcaaagatttctacttctaaattcaagcaagaagctaagccaagaacaacactaatataggacatttccacaacaggagaaatatatttcttcaaaatcaatacctttcttctgaccaaaccctttcacgaccaatcgtgccttgtaccggtgtgagccattattttcagtcttatgcctgtaaactcatttgttcttaagagctttcttccctttaggcaacttcaccaagtcatatgtgtgattctcatgcagggatcccatctcttcttgcatgtctccatcccactcattcttatgctcatgtagaatggcttcttggtaagtttctggctctcccccatcagtgagcatt

SEQ ID NO: 371458 - DNA, 613 bp, Cannabis indica
cttctcggcttcaaataacgaggccgagtgtgaagcattgatagcagggcattagcaaaggttgtgggggccaaaagagtagaagtctacagcgactaccaactggtcgtgaaccaggtgtcgggagagtatcagaggcgtagagaaagaatggctgcgtatgtggcgatagtccggcaactgctccacgagttcacagattataaagtagaaagaattcccaaagaaaagaacgctcacgcggactgtctggctaagttagcttcagacagtgagattgaggaactgggggtagtacccgtggaacgcttggcagagccaagcatcaaaataaaagagaccatagcaacggttgggcaagaacccagctagatggtcccaatcattgaatacataacgaaaggtgagttgcctcaagaaagggcgctgtccagaaagattcagtatcaagctcaccgttatgtgatgatggaaaaaattctctaccgaagaggactcaacatgccttatttaaggtttgtatcgaacccttaagccaggcaaattatgctagagatccatgaagggttctgtggagatcatacaggaggaccaagtctctcaaagaaaatat

SEQ ID NO: 371459 - DNA, 600 bp, Cannabis indica
tttttatgtatttttaattatttttctccatagtataaatttatatatatttgataaaaataatttattatatttttatcaattgtaaaatattaaaaattatagtttataagaaattttaggtataaaaatataaatataaaatacttcttaaacaaaataaaaaataaaaaaaaattatatattatttattttaatatattttttaaaaaaatatttttattttttgtaatatataactaataattaaatacatttttagtaataatttattataatcttttaatcaaaataattttttcataaagttgggttctacccgctttagcttttagctgtagcttttccataaattctttaataagttattttttaactgcttaccaaatacttttttatcataattttttttgaaagcaacttttagctttttcaaaagctgtactaaacgagcccattgacctgttttaaaaatctactattttttgacctgtacgcccataaatttttctatatgtgttagaatttttggatcttaattatactttcaatagtgaattaatggtactaaaggataaagaagtaattagaagaataaaa

SEQ ID NO: 371460 - DNA, 754 bp, Cannabis indica
gttgaaaagttgttcattttagatcaacttaaattgggatacttttcaaattaaggtgattagttcaagatacataatttattatttaattaaattttaaaaattattaaagtagaaaatttagttattttagaacaacttaaattagatatttttatttattttattatcttttgtataatttcaaattatatatcttatatatagagagttttgaaattcataatgaaaattaaattaaagttgaaaataaatttttaattaattttagaccaacttaaattaagtaatttttattattaaaatatatagattaaaataaatgattaattaaaaataaatcattttaaataatgacatttaattaaagagacattcaatctccattgttggttctacacagttcttattttagtgagattcatccctaatctatgtttggtcattagcaatttatcaacgtagaatctcgaaagataagtattattgtaagtcttttattcttagtaacgtccaccctaatagtggctgctaagattagggcttgtaaagtatgaaataatggtagaagctcatgaaataggaatgaccttgactctcgcctaaacgggacaatgtcagattctctttttcgatcgaataaaaggttgctagaatgatgtccattttagatgagttaactactctattcaatgaatgatatctttgactcttgcctaaacgggatactctatcattttgttggaaaccttgg

SEQ ID NO: 371461 - DNA, 533 bp, Cannabis indica
aagacccaggacgcgaacccacacccatagcttgatttggacctagactgaaatttggacctaaacctaaacttagagaagaactcgaactccgacctgaactcaaacccaaactcgaactcagaatagcaaatggaactagaaccgaacttggactaggaccaggacaaggacctaaacccaaacccgaacccagataaaaacccagatagagacctaaacccgaacaaagactagcactagaacccgaacctagacagggacccaagcccacacagtaaccgggacctagaccaagagtcaggatagggacctggcaaacagaactaggaccaggacctagtacccgacccaaactcgaacttgaaccttggacccagctcgtgaccggcaccagaaatggaaccagactaggacccgagattgggatctggatctggacccagggcttggacaaaacccgttgtcggtgtttggatttaggacacagcccatgacccgaatcctgacaaggacccgaacccacacccgga

SEQ ID NO: 371462 - DNA, 713 bp, Cannabis indica
ctcacccataaataactacaaaaagaaccaaaattgtggacaactaataatggcatcattttttttattctatactttaaaataaattattaaaattttatattttttatttatctcaaaatttatatattacatcgcacattaattttttcaaaataaatcacgaaaatttaacttttaaattttaatatattttattcaaataataaataatattttataaatttaaaacataaataataaattttaaaaaaattaaaataaagcaaatgtttacaacatttaatgttacctatttttagttaaattatccaaatatttttaaaattttttattttaaagctttaaaatattattgtaaatgaggcaaaatcaaataaacgacagatttgatttaattaaaaaaattaaacaaataacgacaacgatcacacagtactttctgaatcaaacttttgaaactgaaactgattttgctaataaccaaacttttctaacatcataaaccatataccaattatactttatcaaagaaaaaaaataaaaaggaaaaacaaaatatactcaagaccaataaatcaagaaaaaaaataaaatataattgatatagaaataacctgttgtggagaagaatcatggtaatcgtctttgttgtaatcaacgctgatatctttacgtgcggtggacggttgtacgattgtacagtgccggag

SEQ ID NO: 371463 - DNA, 1180 bp, Cannabis indica
ctaaggtcctggtaaaataatttccaacaaataatcaattcctatttttccctaacttttctgtcttctaattatctactaatttatgattctatatatcctataaatagtgtaataaaactatccatataaccttttatttaaaatgaaacaaaatatctaatttgatttgaattataatttaaattcaaatataaatatctaataaccaaatagcaaatatcaattacatattctattttaattattatctttgattcaataatttatttaattaataattaaaagatattaattactttaatttaaattattttaactaataaattaattaaactaaattaatcacatgcttttatatgtcaccctacacatgtggaatgggcttacacgtgtgggccatattttaaggtccgaaattgacttctctattttgacataaaataagatttattatttattttatcaataaataataattgattaattctcattaatctcttatttcataagagttaaaattatatattattttccttaaaataatatattcttttttaatattatttaaaataatattatgtgtaagtaattaatataattctttacaaataaaattaaatagttaaatactaattaattttacaattcataattttcataattaatcaagacaaaaatttcataaattactattttcccttaggaatttatttacccatagaaattaattctcactcaaaatttattcatcaaataaaatctttccttgtacattgttgtatataggtgactcagagatcatggacctatatttcaaagctccaataaaaacttgactattatcgatctcattaatagaataatttattttattaattatattattaatccactataaatatagtataacactctctgacaatataaaattatatttacagaattcttactttaagtctattgttataatcaatataagtagtttatcctctaattattatttcataattatagttgataaaaatataattttacccttctcattatctctttattccttatgtaccattaatttaatgtaaacagttaatttatagcttattatagatttggatctaactgttagcatttccaaaattaacactataagggaactaatattcaatccattaggaaa

SEQ ID NO: 371464 - DNA, 362 bp, Cannabis indica
aaatttatagaaaactcatcatataatttcaaaatcattatcatcatcatatctcatttgttgttgccactatattcaaggttattgtcatcagtatatctcacatatagttgtcactacattaaaaatcgaagttatcatcgtatctcacttgtaatcatcaccatcattgtcattaggtttgccttcaacataaagcaaatcaaattaatgagtcaactactatagaagaaaatgtaaagtctttttggcaagttagttgacaaaatattttttcttttatagtaagattcttgtgcattcaaaaccgatttcttaccttgtttattcggattgtagttgctcttttccttgttaggaaa

SEQ ID NO: 371465 - DNA, 652 bp, Cannabis indica
ttttggacttaacaaaaattgtatacattaaactgtaaacatgaaaactacatgtaaacataaatgacttctaatcttctattgataacaaatcaaattatattgaagtgggttttatttagggcataaaattccaacaaactcccacttgcactaacataaaacaagtagtgcatttcaatcaatctattgtcttgatatccagatcaagtgtagtgtatttgactaaacccaaattataggaactgtaagtctgtggtaagcaacttctttctccaccattacttcctatgtgttcataaaacattatgcaacatcatttttctatatgtactactcctctagggatattgaattctttactgcttattaaaaacatctgaatatacaaagacatgtctctaattctatctaaatggaatagagataaaaacagttaagaactttcttcagtttgaataacttttctagtgcttttcgaaagcaactaagttatttagcttcactggtagaactaaattattatagacgggtttttacatccttctagaataattcctccaccctaagagtaaccaacatctcgaatattctaagttggtgtagataaaaggattctaatatatacaactatcatctaacatataggtca

SEQ ID NO: 371466 - DNA, 510 bp, Cannabis indica
atgatgtcgacaacatgccaatttagtggcacggctaacttatttgtcaatacaatgtcgacgccatgtcgatagcttgtcgataggacacgtgtctgacaggcaacatggcagttgggaacgtagataaaatttaataacattaaatgtgcaaccgtaaaatacgaaacgcatgcactgtgtgtttcgattgaatgtcgatactatgtcgattgtttgtcgacataggaatagatttattaccattgtacacgcgtatgacatgcatattcctttgggagaatatgttgatatgatgtcgatagtgtatcgattatatgtcgatgaggagcatgcttggtatagttgtcgacattatgtcgacattatgtcgatattatgtcgacaaaatatcgataattcgtgtcatattttctgctgttgttgttatcgacattatgtcgattgatatcgatgggatgtcgatatttattttttttgggtgtttttcctttactcaccttgtttgtt

SEQ ID NO: 371467 - DNA, 563 bp, Cannabis indica
acaagactcagaagtccatcatcacctgacaacggtcttgtttcagacataacagctttcccttttccgaacacggaaggggatggccgaacaggtgaaatgggctcccttatgcgaatcgcatgttcaagaggcctgggcagggccaggagtttcttcttccttttcagtggagtcacctgctcttcctcatcctcaccttcaggattcaagggctcctgagcatactgcttggcccttgcaccacccttcaacttagcctcacgcttcagttgaatcaactcatcctccgaatgagctcgtttggtccagcaagcaccaaatttcctcttcttccccgtcacagacttaggagtaaattccttgggatagagcccacacctcacaagattatcctcgaaggtcaactggataatatttcggtcttcccccaggatccgggcaagtttttgagctctatccctaagagcaagagtgaggggagggcggtgatatgtccgaatctgctagaaccgagtgcaagtgatgcccgtgctatccaccatgaagtactcatcagcaaa

SEQ ID NO: 371468 - DNA, 584 bp, Cannabis indica
agttgagagagcgaggaagcctgattacccacatcaatcagtttctgttgcatatcaaagtttttgggtgtgaagcttaaagattcaatggttggaagtatttcgatccttaagttatatagtgtatatatttgtttattccgcttgttatatatatacatatatatttcagtttatacatataaatgtctaacagttggtatcagagcggattatatatctctgccttgatttattttgagtttcatatatatatatatacatacggggtttttcatttataatataaattatgtatatttatatatatataccttcatattatataatcccgattatatatattcgtactcaatttattttatatatactcattcatattcaagttcatatatatatatatactttcatacacatacatatatatccatatacataaaagtaattcatatatatatttatatatttatgtatagttatttatattttcattatatatatttcatattggattgataattttatgtgatatatattgtatacatatatatgtatatatacataaagttttaagtttcgtactt

SEQ ID NO: 371469 - DNA, 697 bp, Cannabis indica
aactaatcagattgtaaagagttttatttagggcataaaactcaacattttcatcatattttgatttaaggccatcactatctatttataggcaaccacctaagtttaggtttgaattatttggcattaaatattgaaaaaataaattataaaatccctttaagtggtcggccataggatgtgggccccactttgcaattttgccatttttcaacaatttatcttattttctcaaaaatgccatttttctaattcaaccacttaaatgccaaaactatttatttaataattaaaaaataattatcaaataaaatttccatttaatatgtttattaattagactcaataaagtcggttatttaataaataaatcctagaatctcttttctttacaattaagccctagcttagtgaaaattcaaaaactagacatagtctaattttagaattttaattgattaattaaaatcaattaactgagtcttacaagtagtattgtctcaactagtatggggaccatggacctatacaacctagcttccaataagcagatctagaatctaccaagtaaatttcctaacttattaagtccttgttgcagccaccatagaacttggaattgcataaccattgttctaattccaataataaaaatcctctatagatgaattacaccgagtggaacaaatttaccgtt

SEQ ID NO: 371470 - DNA, 593 bp, Cannabis indica
aattaaaattacataaaaagtataaatattgtccccaccttatgaaaatatttttgtaaataaaatgtcaatttatattttcaatgtaacttttattttatcttacttttacattattttttatatttttttaagataattttagtactttttaaaattattaaaataatattatattattatttaatatatattaaagaaataatttttttaaaactttatgataaaataataataaaaaaataaaaatatatatataaaaaatattatatggtatgatattttttttatagtattcttttttattttaatagtaaatattaattaaaaatactaaacatatatctataatatcaaagtatctttcaaacaaaattaaaagattatctaaaaataaatgctgataaattgggactaatgatgagaaagaaaagtctgaactactcgataaaaatgaagaaacccatacaaaacaataagttataattaggggtaagttgaaaaatgcctcttttattaatcaattaattaaatttagctctaattttatatttatttgaaacacacctctttttatatgtattgtacccaaa

SEQ ID NO: 371471 - DNA, 786 bp, Cannabis indica
ttatatgtgtttaatttatcgttttagaaagttcatatttagggtgtttaaacaacatacttgtgagtagatctaagatcctggtaaaataattcccaacaataattaacctgggttataacctggcgcgcatagacctgatcataaccctaatccccgtgtcccacacggtactgagtctagaacgtttataagacaatactatccacaataatgtcaggctatactcaatatgctagtcatactctagccatattgatgagacagcatcgatcagtattctagccaacatacatttatcaataatcagtacaactctatgtataccattattgctatcaatgtaatctaacaagcaataacacatgtacgctaaacatgtaataccatatgcatgatataatactaatcttaccttaattccaaattcaggtgtgccggtcaacctgagtggaacaactgctcagcgaattataggctcctaaatcacatcgatatcagcacacataagtgagttgctaaattacaaccgggactaaggtttaaaaccaaaaccctatctactgcaacttaatataataatatcccaatctagcagggaaatcaactactagaacttgagcgacaagctaaaaaactggttttcaccctgctgcaaaatccaggtaaccattttacaagcagtgtaaaaccggttagctggttttacccataaaaccaacaaaaacaaaccctaccaaatcgttcaaactcaaccaaactttccagacatgcatattatacccc

SEQ ID NO: 371472 - DNA, 493 bp, Cannabis indica
tgctttgtggtctctaaaaatttcccaaaaaattaaggtcttcgcttggcgtgtgtacgcttttagctcatcatgttctgatttttggaagttgctttcattgtgcttgggagtttgatgatgtcctacatgctattttcctttgtgctctctcaattcaaatttggaagctttcaaatttttagaattttgttaagcctagtctctcttggaagatcatcgacatttttagggatattggcggctaaactacttaaactttaaattttttaacacttaaccacaaaaatcgatttttcgggggcaaaactaccaaaactctcattctgttttgctctgtacccctccgtttaaaaatcacagttaagtatcacgatcgactgtccacgtgtacacactttacacgtgtcaaatttttagtggtccacgtaatattaattttaataaataattataaaaattataaaataaataaattataaaaaattatttt

SEQ ID NO: 371473 - DNA, 638 bp, Cannabis indica
ttaaagcagattagtgtgctaatctatttgtcaaagaaatagatgaaccctgtgatgctttaaaagtaattacctcagattgtgatttaaagtttatagctaaggctgagagagtcgatgacaagcatatgtaatagattttgaggttccttgaaataagcatcatccgctaaatgagtcttcatataataacagttatcagagtactgttaatctggcattgatgcagtttaaagatttaagttcgtatgttgcttatataatggatggaagagctatgctggtccaaagtatagagatattaaattccatgttggggattttatcttacttcaggtgattccaatgacgggaatcggaaattgggaagaaaggtgaagttaagtcctagattaatcggtctgtttgagtttctagaaggtaggtgggtagcttattagctagccatactccgtgctttatctggagtctacaacatgtactttaatgtttcaaaagtacgaggtagaatcgatccacatacggagttacgagtaatattgaatttcaaacaaacttgtcatatcaggaacaatcggtatcctcagttgtttagataaatttcgaggacgaatttctataaggaggggatagttgta

SEQ ID NO: 371474 - DNA, 559 bp, Cannabis indica
gtcttttatgttttctgggtttgcgatgagtactcttggtgttggtccaaaccacataaatgaatctttacctgaattaatattgttattggattgatcatcaaacactatgatatatttattaattataattactaattatgtccatttacaaaaaaaaaaaaaaaaaaactaaatcatgtgaaatcgatctaattagttaaataattagaccatctccaagaatatgtaaattttgtacaaaaagtagatttgtgatgtttttacatcaaattttactattgtgctccaatacataattgtaatttttaatgtaaaatttaatatattatttaatacttacttaataatttattaaaaaccacttgaggctagcttaactggccataggagggtgcgtgtgtgttggaggtcatggttcgagtcccaaattatgtattgtgtaatatataaacgcttatgtaagctttttgcatcataatttagtacactattggagtagacttttcacaaaataaattatattttacatttgtatcacttatttgaatcttcgatg

SEQ ID NO: 371475 - DNA, 913 bp, Cannabis indica
taaaataagaggtaagccataacgaatcaccttaatgaccaaaccccgttgagcagtcaaattagttatattaattttggtgtagaaattttactactttttttaatgtataattgttttattttagtgtaataactttaacaattatatcaaatatattcaccaaataaatatatttacttaaaaaaaattctattttctattatttacattaataacatgaaataattagtttatgatataattataataagaatataaaattttaaaacaacttagtaaatttaagttttattaaataaattaaatattacacattttttttctatatataaaaacttattgaaattttgtaattaattttaataatattaaaagttatgtaaaaagagcttaccaataatattaagaatatcaagattcataaaatataatattagtatttttgttattagtattagtatttttattatttttattttgtacttttaaatatatatattagtgttttaattaattattagtttttgtaataaattttaattttgagaattataatataagattattttttaaaataaaataaaataaagattaagagtaaaaaaattacactaataataattggtatataaattaatgtaaatcagtttagtatataatctagtatgtcattgaataaaaattaataaaatttcatactaatttagtgaaatgatgtactattaaaaataatctaggtactctcgccatgcttcgtgttgtggaggaagtcccctcttggtgggtttcgctgttgacgggtcaggtgggtattgggcgtcgctttgtgttcggttccatggtgcctgtttttcaggtgaccgatcaccgttcttggaggttgtctgtctctgttgagatggttcttgcc

SEQ ID NO: 371476 - DNA, 613 bp, Cannabis indica
ttgaggaaatggtggaggtggcttttgtaaagacttttctacagcagaatgctgatttgatactgtaacatctgagggaatttcagcaactgaaattggtggttttttcttcatttccccctctttttggattgaagagggctccttactgcctgttgcaaccgcatttgactcaagaatttttccacttcttaaggtttgtttgccatctcttcgtgggtttatggtgtcactaggcaaagtgccttgtggtctattcttcaaatcattggccaattaccccaattgaatttcaagattctgaagagatgctgcctagctttgaattacagcgtcattcttggccatataatctctcattaagctctccaaagaacttgtttgagagccttgaggttggtgtggttgttgaggtcttggttgttgagaaaatcccggtggaaatgattgttttccttgtgcttgtgctccacttgaacttgccctttgacctccccatgaaaagtttggatgatgcttccatgccgaattgtaggagtttgagtatggattgttgttgcggtttaagtttgattacccacatagcaaaccgaagctggatttgaagggtaat

SEQ ID NO: 371477 - DNA, 511 bp, Cannabis indica
ctttcacacgttagtcaatgaccttcagacatatgaaaatttagattggaggacccaagaagaaagggagtaaacctcataattctggaaatggtaatgggacgattaaagctgaggtaaacattgcctctacttccagacctcaggcaaagaagaaatggaaaaataccaagaggcatgctcaagctgtgaaaacagttaaaaagaaaaaggctgcttctcctggtgatccactaaaaggaaaatgtttctactgcaatgagaaaggccattggaaacctcaatgtcctaaacttcttgcaaagaaacaaggtatttcttttcctataaactgatgagttttagtgaattattatccatttggattattaattctggactactaaccttgtttatttgtttttcttcttattacagcccaagctgcttgaactcagttgctatcttagcgagttgaatccgaaagctggcaaaggggtggagttcgtccaagataaagatgaagctcgtt

SEQ ID NO: 371478 - DNA, 537 bp, Cannabis indica
ttggacgacccaacaatatgttgactacccctagtccgatcagtgttggacgacccaacaatatgttgtaagtcgagggcaagtcgacaactaagaagtcttgtataacagtaacagataaggtgcttctaaagttaatgcgagctcgattatgccaaggctagcgatgctatctccggtgaatccgcaaaggttcaccatacaaggccttaatttggctttttcgagccccatttttctttagagtctccttataaaagatatcaactaagctcccattgtctattaataccctcttaatccttttattggcgagttgaatggttatcaccaatggatcgacgtgaggatatctcacgtttttctcatcttcctccgtgaatgtaatgggaggctccttggttttcaccttctcagaaggttctggggcaaagtgttggaatttattttaccaggatcttagatttactaacaagtatgttgtctaacatcctaaatatgaacttctaaaacgacaataaacacatataaagttta

SEQ ID NO: 371479 - DNA, 530 bp, Cannabis indica
aattatatataaaaatgaaatatacatttgatctattaagttttcaaatatatttgtattatatgtattagatttttaatttactatttttttcttacattaaaaatagtaattgtatatataatttttaaaattttatataaatatgtgtgagttagatatatcagttatttttatatgtcaattaatattcgatctacactttaaagattggattggatttgatcgcgcagatttaattggattaactattttatcaacaccctaattaagatttgttacagtatttttgtaattagcttcttttttaagtacattcttggaaaaataccataaaatagtgtatttttaagagctcccctatattttgggcattttacaaaaataccggatttggggtaatacttttcaattttactgccacacggcagaattaacatttatactgtcctcccttttttttttcttttatactgtcaataccaaaacaaaagtatgaggcctccatctttaacaatcacagacataac

SEQ ID NO: 371480 - DNA, 754 bp, Cannabis indica
gtattcgacctagaatggcgagtacccagactgggaacacaaattcttaatgaaaactagaaatacaaagaacacaagggaatatagtggttcagtcagatcacggtctgcttagtccactgttgcaaagattatgtaggtgtcctatttcacggtggatcactcctttatatacaaagcaagtgtccgatcatttacacaaggattgcattcattgtcaatctatttgtacattgatttacaacaattaagctaaaaaacgtaaacattaataaatgaagaacagtttctattcactaaatacagcaacgtatgcgacttctaatgtgcgagctggctgttcatattcttgtgtaagctcgtatacttagagtacacctaacacttagttgagtctaagatgtttgcgttcttgtatagtcgcacttacggacatcgtataacgagatgatagaaccgagacatgcgagtctatattggcttatcgaggttgttggatcattaggaccagcttgcttcatagagaatcgatctctatgttttcgcaggaggatcgtgaggatactcgcatatatcgtggtatatgcgagttaaatccgttccttggtcctacataatgcgagccttgcaaatgcgattagacttggtcatgttcacataatctcgccgagtttagctcaggcgaagtttaaactcgaggagtctctcattgacatctcaactttccttgaggaaattgagtacatgtgtcctt

SEQ ID NO: 371481 - DNA, 793 bp, Cannabis indica
ctgaggaataatacgaatcagcaagtaatataattatatttgaaatggaataactcgtcaaatgcgaaattgacagagtatatttacaactcgattgactgaatagtcttaggcgagataaaaatataccaactgttgtctcgtgcattaacgagaaaccatacaacgtcagatgtacaaggcgaggcatcaacctcgctatgcattaggagacgagacatggagactggtaagacacttagtgtataatacaccttatttagactaagtataacattcaggtaaatccaaacaactaatagtgaagcacctatctctccataggaagatgcgctcatggtatcttcactaaatagctccgtacatctttcaatgagatccacagctccgttgagtcagctctctcaaatagaagctgacactcaaatgatgttggctgctagagttcaccttatcaccaagaactgtgattgtcagatggagcgttatgtcttcaatagcataaatgacgagattcacattatcaacatcgaagagacataggaaaaactctagctcgctatgagggttattgttgttatgttcccaacgagattttccaagacgatactcgttacaacgtatttaatacacgtttaaattgacacggtaaaagcggacatatcacagctgtgtgattttcaaatattaaccacatttattttacgtggtatgtaatcaaaccccacgatttcaggagataattgttgtaaagatatcagtcaactatgtaattaactgcctgactatgtaa

SEQ ID NO: 371482 - DNA, 569 bp, Cannabis indica
tttttttggacctacgttttcgccttaatagtcttcggtagcgagatttttttaacctaaaaataaaaccagcataataactaaaaataaaatctaattttctaatagtgtaatattttattcatattatgttatttattgtgtattaaaaaaatagtataaagaaaaaaaatacatagtgaaaaaaagtacttaattatagcgaccatagataggagatcagctggatcaaagactttaaggtagagtgtgatttggagggaaaaaaaaaataggaatgagaatgacaataagaataggaatataaatagaatgaaatcaaatctaaaatgtgtacaaaaaaattgataaaaaaaaattgtgaatttttatttttacacttcaaaagttttagttttttttttttttttttttttttttttttagttgtctatttttatgaaaattcaaatagcaatccacatagcaaccaacagagcaaacataaatcaacaaccaaaattcacgtagtaacacaacaaagaaagaaactactagaacaactaatcgaaaaaactcaaaccgtaaaa

SEQ ID NO: 371483 - DNA, 666 bp, Cannabis indica
ctctgataccatgttgagaatcatggggttccatcttaaaaccaattgacaatgagtggagtagcccatgttcttatatatggctcaatacttttacatttaatccatgtgggacaatgttctccaatattatatatattaattttttttttctttattaaactattatatatatatattgcacttttaatttttatgtataaaaaagcatagcatcaatgccattgtgtggcatcaatgcaaatttcaagatagcattcttttatctccaatgatatagcatctctatattttgccacataagctttctacctcatcaagcattcttcaaaatattaccattggagatgctcttatataatatacgaaaccgcgaggtctagttatcgatttatttcatatatgaatgtttttcttcaaaaaaaaaaaaaaccaccttatataggatgtctaatattttagtacattaacatattttcatcgctgcaatttaatagtgaattctatatattttaatttaaatatgcgagacaataaatatttattttgtataccaatattaatgatatttgatggttaggagaaatgttaattacaatctcctattacaatctcttagtcaatctctacgtccgaaattatcagagtcttgacccagccgaaagt

SEQ ID NO: 371484 - DNA, 595 bp, Cannabis indica
ggacgaatgcttcaaagtcctcttggaatacaaaatgaaactcaatcccttcaagtgcttctttggagtaagctcgggtaagtttctgggctttattgtcaacgcccgaggaattgaaaccaatccggagaagattcaagccctcctggatatgaaatcaccaacaagaaccaaggaagtacaaagtttgactagttggatcgccacacttagtagatttgtttcaaaatcaacagacaagtgtgttccgttcttcaacgtgctacgaggaaacaagcaatttgagtggacaaaggaatgtgaaaaaacttttcaagagctaaaaacgcaaatcgcaaaacctcctatactttggaaatttctggacggagaagaacttggcatatgcttggctgtcacgtagcgtgttgtaagtgccgtgctgataaaagaggaaaacaatatacaacacccggtctattacattagtaaaagagttattgaggccgaaggtcgatacccattgatagagaaactcacttactacctgattctagcaacaagaaagttaaggccctattttcaacctcatgctgttcgggtgtacacagaccaa

SEQ ID NO: 371485 - DNA, 602 bp, Cannabis indica
gactccggttcctggagatgaggcgagacaggaactccggatagctaaacacaactatgccatggatgagtactcctgggggcatgctgacgtggaggctctgaggagggttttgcgagttgaaatgcaaaatacccttaacgatctgaactaccagaatccgtgggatctaaacttggaccccctgtaggattggttcggtcgtttcctcgggcccaccctagctccctttgccgcggggatgattggcgagtttgcgtctcagcttacttggtgtgcacccaagcggttcgctgcttgtgcatccttgaactccatcttccaagtctaggatctcagccactctctcaccgtggtaagtattttgtagttgactttttccctcgtcattttctcataaggacttttattcatacttgaatcctttttcagcttgctgctgaggccggccgtctttccaaggacttaactaatcatggctttgtcctgtccgactttaggggcatggacgaagtcatgaagatccttcaagatttgaccgctgaaaggcggctttaccaggaggatgccgagcgccgggaggcccttgccaaggccagtga

SEQ ID NO: 371486 - DNA, 948 bp, Cannabis indica
tttgatttacattgttacaattgttagtcggttgaggatggtttgatccatgatatagatttttttttttaaatcatattccctcctttgttcgtggggttttccccttaatagtgttagattgtttttatggttgttactcgttcatcttcaacttctcatctcgtcaaaaaaactcccaaaaaaatccaaataagatcggcattgagtaagaaaagcctcgctaagaaaaatttgaaagatcatccccttagccctacctctccagtaagtacgaaaaggaaattagtggttgactcagtggacaagagaaaaacaaaacgttctaaaagtgtcattaaagatttggacttagattctgattttgagattaagaaagtgcccaaggtattactctgtttttttttttttttttaatttttatttaggttttaatcatcttaatattgtctatgttattttattatgttaatttttttttatatatattttttaggatttatcgttattttattattcttttaagatttttctatatgcatgctaacagtagatatgaatttaggactttttcatatcttatcaatgtttgtttgattttatataacttatgtcgttcccattctatttatcatatttttataattattttttagggtgagggtgaacctccgaaagtgaaggttcattttgatgctgatatagtgaagtttccattgaaaaaaaaaagttattgaggtatgatatttttttatatatatatttattatatgtgtacatttttaatgagtattacacatgaataagtaatataaagaaattttaagtttttatgtttaatttttgaattaaaaaaatttatcattttacattatatggattgaggttgttccatcgactgaaaaaaaaaataaaaaaataaattctttggcaaaaaaaaaaaaaaaa

SEQ ID NO: 371487 - DNA, 555 bp, Cannabis indica
gtgaatgggaatgcgaatgcaaaagggaaaaggaatgggaatgggttggggaatgggaatgggaataggagtgggtcgggaaatgggaatgggaatatgaaaggcccagggaatgggaatgggctagggaatgggaatggaattggaaatggggatgggaatgggaataggaatgggaatgggtcaaggaatgggaatgggaatgggaatgtgaataacgatgagaatgggaatgggaatgggaatagaaattggaatgggaatgggaatgtgaatgggaatgggaatgggactgggaataagactgcgaatgcaaataggaatgggaacaggaataggaatgggaatgggctagggaatgggaatgggaatcggagtgggccggggaatgggaatgggaatgcgaagggaatgggaatgggaatggcaatggcaacgggaatggagatggggatgggaatgggaataagaatgggaattggaatgggaatgggagtgggaatgcgtcgaggaatgggaatgggaatgggaattggggtttggggtttggggttt

SEQ ID NO: 371488 - DNA, 650 bp, Cannabis indica
tcgaagaatgggtattgagactaccacatcctctgtgggaataatcgccggattggtaaaggaaaggtgcaccctcagagtaggtttaggtcgcaatgaagcgagtcgcagtaggttcaaccttgtaaaagtagtaaggtccgatttggtgaccctcaagaccaagtcctcgcattagaagggctcgttcagctgagtgttgtccaccgaatcagtcccactcccttctgcctcttcttcttcctcgcctgactctcgagctggggccgcccaatcgtcatccatctcctcgacctcgacgtcaggggcatgcttggaatggacgagataatcgcgtgctgacaccgtagactggctgtctcgaatctcaatggcccctggttcagcgagctcctgcaccattcttttgatgtctgcgaagacatcagacctaattctatacctccagtaggcgcgatctcctcttctgagatcgaggttgggataaagctatcttccctttggtcctcgtcaccatcaaacgcatcgcctcccgagccaagcagctgactatccgacaggtcgctcatctgaaagatagaagatcttttcagcgtggtgaatgtgtgaaaaacaaaataagtgatctcaccagcatatcaaactataaa

SEQ ID NO: 371489 - DNA, 960 bp, Cannabis indica
caatagtaagaggttgaatgtactcctatgtacgaatttaaccagactcttactattgagtgagccatctaagatgtaatcaaacaaggaacattgggagacaatcaagaaagttattatgaaagtgacatatatattatatgataggggtgtatattagaaacctgttatctacaccaactcagaatattagagatggtggttactctaggggtggaggaattattctggaagagtgtaaaaacccatctataataatttaagctccattagtgaagctaaacaactttgttgctttcaaaaagcactggaaatttattcaaactgaagaaagttcttaactgtgttatctctattccattttagatagaattagagatatgtcttttgtctattcagatgcacttaataagcagtaaataatttagtgtccctagagaagtaatgcatatagaaaaatgatgtggcataatattttatgaacacgaaggaagtaatggtggagaaagcagttgcttcccatagatttacagttcatgtaatttgggtctagtcaagtacactacgcttgatctagatatcaagacaatagattaattgaaatgcgctacttgttttatgttagtgcaagtgggagtttgttaggattttatgtcctaaataaaacccatttcaatataatttgatttgttatcaatagaagattagaagtcatttatgtttacatgtagttttcatgttcttggtttaatgtatacaattttagttaaatccagaacatatagttattcacaattacagtgatgtcaacacagtgaaaggtaataatgattatatgcttcaaaagataatgtcccatgattcatcagtgcactggatttacactgatgtgatagtcagcgataaagcttagttacaccttggattagtgttatgttctttccagaacattggcaaagt

SEQ ID NO: 371490 - DNA, 632 bp, Cannabis indica
ttagagatctgaatggaatgagacattttattccgttgcaccaaatgtaaggtttctaatagtttatatgtgtttatttcataatcgttttagaagttcatatttagggtgttaatcaacatacttgtgagtagatctaatatcctggtaaaataatttccaatagagacatgcaatccaacagtaggggtgtgaatatcaatggtcaagcgagagttagtcgtcctaaccttaccaggaggagccatgggaggggcgttagagggggaaccctcttgctcctagtaggtcgtttgtcgcaacaggctggccatatctacaaaacacacaaaaattattagtaacatataataacatgcaaaataatgaagaaatgcaataagaaagacaaatagcgatcataaccaagagagtcacactccttaattggcattttcttagaagacccgagcatagtgcttttcgctatggctgtcagtgcccagcattggaggtcccaagggtcgcaggatttctcgtactctgctagaaggggtaacaacaaagttaaacccaaaatcatctaactctcggggggagtgttagtaatgtttagatcctcttatagtcaggcagttgggctaacgcaagag

SEQ ID NO: 371491 - DNA, 1107 bp, Cannabis indica
tagaatgtttaaatatgtgagttaattcaagtagactattcaatttgaatatttatgtatctactaatgattttttaaatgaacttttattatacatgattggaatagaattttatatccatgtatatatttgaatagtaattcaaatcttccaattaaatcttatttaattcttaagtttagtaatatagaatcaaaaatgtatttttaattaattataaacttaattatagaaacatcgataaattactataactaaatagttatttattcattatttagtcaaaataaataattaaatacatttaaacttgattttagaattatactatgaacattgaactctttagtttactttgcacacaaaattttgaaattaaataaactttattataaaacataattgttaaaaataaattatttaaataaaataaatattaaatgtgctactaaaatataaaacaataaaacttaataaattgtctttaaaattttaaactaaagttgacttcttcatttctcttctaaaatcatccttcatcaccttcatcacgaactttgtagaagtctcactttttcgaatcatcataataaggccttatatagtaaataggtgtgtgagcgtaacacgtggcgtctatacaagatagactaaagatgtggtggcatcatcataaatgcagtgcgtattatattagtgaggtggcacagtcatctacttatagtggcgtattaaatgcgatatgtatgttatatgttatatgttatatttgggtttgattatgcttacttgctgtgccttggctcacgggtgctctaatgtgcaagcaagggtaaagtagtgtcaggtcagccatgagttgaagagcttgacggtggattgtacatgttccagccaagctagactgcgagagtttgatcctatagggagattgttgttgggttttgtgccctaaataaaactcatttcaatataatcagatttactaattaatataagatcataaatcacttttatattgcatggttcacataatttatttcatgattatgcttaatgtataaattctattaagtccagaacatatataaatatataaatttgtt

SEQ ID NO: 371492 - DNA, 734 bp, Cannabis indica
actatgttttttgttctatctttgtaggttgtttcaaaatccaatcttcctgaatatgatgatgatgaaggtgggctgcaattgtcactcgttcgggaagataaggttgtatgtttgtttctttgttataatggatgtgtttattataactgtttttttagattgtaagtttaattgattcgtgtttttattccaggttcactctggcttaggtgaggggagggatgagggcggtgtgttttcgtatgaaacgattacagtcgaccaatccattttggatttggttgatagactcactcgggcatattcttccccacttagtgcaaagaatgagcaatgggatttggtgtcaattcctgagtctgcatcccctgctgtggaagatgaggttgaggttctagatgtaatgcctttgcaatccagtgttgctgtcaagagacaagcaaaacctggattgcattgtagatctccttttgtcaacgagtttggttcttctgaaccaaaaattcagaataagaaggataaggaggcatctagtgaattagcttttgacctaaggagttgtttccctttgttaaagagattgggaagaacaccggccctgaagattgcgggggatacgttaagtggatcgaaggtgctcggttgatgaagaagaagtatgtttttattgttatgttgttatttttgtttttaatagttgctgagatttattttttaactggttttttttt

SEQ ID NO: 371493 - DNA, 634 bp, Cannabis indica
ttttacgagatgaaatgcaaaatacccttaacgatcagaactactagaacctgtgggatctaaacttggaccccctgtcggactggttcaatcgtttcctcaggcccaccttggctccttttgccgcggagatgaccggcgagtttgtctctcagctaacccggtgcgcgcccaagcagttcgctgcctgtgcatccttgaactccgtctttcaagttcaggatctcagccactccttgactgtggtaagtatttcgtagtttacttttttcctcattatttttcttaaggactttactcactcttgcatccttttccagcttgctgcagaggccggccgcctttccaagaagctaatcaaccatggcttcgtcttgtctgaatttgggggcatagacgaagtcatgaagaccctgcaggatctatctgctgaaaggcggacgttccaagaggatgctgagcggcaggaagcccttgccaaggccaagttcggggaagaggccaggcggaggaaagcccaagaagaggcgatgatccgggaggagacccttcggagggacaagctggaggccaagcaccgggaggagctgagggcggagggcgaggctgttgccaaggccaaacgcgagctccg

SEQ ID NO: 371494 - DNA, 546 bp, Cannabis indica
aaactagagagtagaaaatgatacaaaatgaagaggagagcaagagaaatgagtttgaagctcaaatcatctctttgtaggttgccttcttctccttcttcttagtcttcttcttctcttctttgtattctcttcttttcctttctttctctttacttttttctagaaaaattcgtacctaccctttttaagtgcagccaccacttctattctatcctcattcttcttttgctccccaattagggtgctaaagtttaccctaattggaaatccaagtcattgtccacttgtccatcattttccacctattagttgagtcattggtcacatttttcgccacctcagctcctttctttcttcgttaatgctagctggatgttctgccaaaatacacttactgggctgacaaattgctacgcgatgattgctatagcaatgccagccagcaataagccttttttctgctccttttcctccttgtcccaaacatttccaaatacctattcttgtattttttctgcttaatacacataagaacaacaacat

SEQ ID NO: 371495 - DNA, 574 bp, Cannabis indica
atagtgattacatgattaaaatatctggagtaacatcactactcctgataacacgatcagcaactaaataggatgctcgagctaagaagtgagcaacactatttgcagaacgtctaataaaactgacagaaacatctctcaaatcatttaacatcatcttacaatcagaaataatacttccaaagtatgaaaccgtaggaagagaactacgtaacacttgcaccactgtaagactatcagtttcaatgaccacctccttcaaatcctttgccttaatccaactcaacgcctccttaacacccaaggcttccaccatttcaggctgcaacactcctaaacgacagtagctaaacgcctctaccaacgcaccagtttcgtctctaattacccccgcgatgctataagttccattctttgaaaaaatggcagcatcaacattaatcttcaaggtattaacagctggtttgatccatgtttcatctccatctacatctgtaaggaaagcagcagtaggaatcatagttgtatcttgagcccgagtccaatctgtgaggagggctttagctaaatgaac

SEQ ID NO: 371496 - DNA, 500 bp, Cannabis indica
atatatatgtacatacaaatataatacaatagacgggcctggctaaagaccagtaaaaaaaaattaggatggacgtgtttatttaataaagaccattagatttaaatcaatggtagatattttttaaaagtaataaaatttgggtattaatgtctcttctgcttagctataccggttacacccggttcatttgtttgtttctttaaaaataatcgatcgacttgccatggaagggtctcttcctctttctccgactccggcgaacaaagggcatctccttgttcttgctccgacaccggcgaacaaagggcatctctttgctcttgctccgactccggctaactaagggcatttccttgctctttctccgactctggcgaacaaagggcatctctttgctcttgctccgactccgaggcagggccgtctcaaggtgttgagaggcctagggcgaattttgaaatgaggctttttttttttttacaaaaatttaaaataaa

SEQ ID NO: 371497 - DNA, 641 bp, Cannabis indica
ttctttgataaactctacccggcagcatgatctccacagaatctgtcgtgcacctcagataggagtcgtccagcttcttcttgagtaacacatatgagcaatggcatagagaatcctcttctgtacataattccctctactaggatataccgtgcagccttccttctcatctttcgagcttcattccgattatctgggagttccctagtgttgaggtaggtagctatcagtgtcatccagtttggggaagtatcaatcatttcgatctcttccgtgccagtgatgctaggctcttcgaggaactggataggaaccaagttcgccttgtcacttacattgctacttgccaatcgagctaacgcatctgtagttgtgttttcttcccttggaatttgtttgagaccgtaacttttgaattgtgcaagcaagtcatgtattttgctcagatatgctatcatcttttctccccgagcctcgtattctccggatacatgatttaccaccaactgtgaatcattacagatttcaatgtgttcggttttcatcttctgggctaactttaggccagcgattagagcttcatactcggcttcattattagatgccttgaatccaaacttgactgcagcgtgcatgtgttg

SEQ ID NO: 371498 - DNA, 239 bp, Cannabis indica
ttactctatcactatagggtttgaaattattaagagaggaagagagaagagaggttcgaatagggtagaatagatggctcaaaaatttgactgaaggcaagtgttttcatcatctttttatttgaggccatcactatctatttataggcaacctcctaggtttaggttttaattatttggcattaaaatattgaaaaaaataaatggtaaaattcccttcaagtggccgaccataggat

SEQ ID NO: 371499 - DNA, 904 bp, Cannabis indica
aattaattcaaaagataaatattttttaactttaaagttaaaagttattacaaatattttatatggtcgagatattccctcaaaataattgagagattctctctaagtggttgaggtattctctcaagtaattaaaattatctcaattggttattggatattaatttaaagtaaatacttaaattaaaataaatatctataacagaattggttatagatatttattcaaatatttaaatattattattttaagacaatagtggcattagtcactgtgtaaaaacacagtgataagtgcctatagtaatactaggttgatgttacatgcaatgcacgtataaaaatctcactacaaatcagcatcatttattaacttaattttttcttgaataatattattaatcattttttaaaacaaaaagtttgtggtgaaattaaggtttaaatatatatacatatatagatgaaatataaatgtaatatatataataaaattatttttttatataatatctatataagttttgaatatatataataataaaaaatatttatcaagtaactgggatatttttaacatagaaaacctaaaaataccgttaattatgcattttcaacggttgaatttattgatcataccatataattaatcacacgatattcttatcttaaaatcataattatcatcactcgtatataatgtcatgttacttgtaaatatttttaaaataataataattaaataaagggtaccattttggatcctgtgttttgtaaaagttaccgaattggaccctctgttttgttaaatgacaaaatggaccctgtattttccaaaatggtaaaaataggaccctaaactgttttttggtcaaaataaaatttaataattatctgatctaaa

SEQ ID NO: 371500 - DNA, 850 bp, Cannabis indica
tataatttgtagttccaaattttaaccaattcggatcaaatcttaactaattggaactaaactatttgatattgtaccaaaaaaatccggtgtcaatggttggtcaattcaggaccttttataatttttaatttggttacggttttaaaattctcaatagtggtttaaaaatagggttgttcatccacgtaacagtttaaatctaatctgtaatagtgcggattggatcaattgttttagtgtggagtgcattttaatatttaaaaaaaaaaaaaaacaccagtaacacaactaaaattggagatggagtttccattaattttgatacttgtacaattgtctcaattgtagtataaggaaagaaaaacgattatgtttagaaattagaattttagagattttttttaatattacaataaaaaaattgatatactattatatatatttaaatatacataattaagtacgtattagattggatcgattatattttgaggtcaaacaatatctaatctgcacaagtgaaggaaaagaaaaacgattatgtttagaaattaaattttcgaggtttttttttaatattacttaaatatactttatatatttaaatatatatataattaagtgcgaatttgggtgtgaataaatcgatccaatctaatgagaactggtcaatcaaattataaccgaccgtcaaacattggatatccaattgtgatcggatcggattggatattatttttaaatatccaattggatcggatcggatggtgcatgggtgtccaaaaatctaatacatccaacatccaatcaaactaattagtatttttatttagttttgatgagtaat

SEQ ID NO: 371501 - DNA, 589 bp, Cannabis indica
tcgggaaacctaaaaccttaaccctaggttctgttatgctttctaggggttaacctaactctggaaatagggaaacacccatctccggcactgaaatgatgaaaattgacaaaatgaagtgttcggaaatcttgccaaaaccggctagccggtttgcaccagttttcccaaaacatttcattccttgctcaattttccaccaaatgctaccaaactttccagagtacctacacaatgtatacacaacatattccaaccagaaattcatagaaaaacccaatgaaactcaactttccattaaagaccaaagctttgaactcaaagcttaaacttgcacaaaacctaaaccaatcaacaataccagctgctaggatccttaatcaactcaaatgaacatagaaaatcaaaccttaaacaaacctaaccctaacagcccctatttctcaaaatcaaaaacttaaactaagcgaaactcaaaaactttagaagggttcttttagggcttaccttagcttgattctcccaagatttctttggtgaaatcaccacaaattagtagctcttccccttgttcttgctggtttcgaag

SEQ ID NO: 371502 - DNA, 349 bp, Cannabis indica
gtcccaagtgtattcttgaatagaggttctactgtatatacattacgtgtaatacacatatacttagttatattcttagtttttattttaattatatgtatatttttattgtataatttagtcttttttttttgtgtgtgtggatgttattcaaactaattttttttttaaatctttaatttaagtgttatttatataaaaaaaatataaaaatattcaaaatttatcattgattaattataattttatttttattatcgtaatactaataactttataatacatttcattgtttttgttcatacttttctatttttttttttgaataataataatagaaatatatttt

SEQ ID NO: 371503 - DNA, 791 bp, Cannabis indica
tttgggacatgcattttatctggttatatccagagtatgcatccatcaatgacataagctcatgcctagcaattgcatccaccaactggtcaatccttggtagtggaaagaaatcctttgggcacgccttattcagatcagaaaaatcaatacaagttctccaagttccattgggttttgggacgagaacaggattggttatccacgagagataaaacacctcgtgtataaagttgttgaccaacaacttatccatgtcctgtttgagtgcatgttgtctctcggaatccaagggcctcctcttttttctctttgctgggtagtttggatcgacatttaagtgatggaagatgatattagggtcaatccctatcatatctccaatttaattgttcatccaggttcttcccaatgtaaacacactttgtgggatttcctaggtccagaacaacctcttccaactctttaattggtttcaataaattcctttcatcttgaatctgaggatcaagatcttcatcgttcttctcgctttcttcagtcaagactgccattagctagtgaccagcttttctgtgctatagctctatgcgatagcatccgcgagccagcatttgatcatctcacactactcccacacccacttgtgtctgaaacttcagggataagtgcttaatcgaactaactgcccctagttcgattaatactggacgacccagtagtatattgtaagccgatagcaggtcgacaaccaaaaagtcttgcattattgtggtggataaaggtgcttc

SEQ ID NO: 371504 - DNA, 644 bp, Cannabis indica
actaaataaataaatgattaaatattagatacctgttcactaaattaaataggcttaggtagcttattagctagtttaactcttgccttgtttaaagtatataatgtgtttcatgtctgtgaggaaatatatatcaactcatattttgagttgtgatgatgttaaatttcagacaaatttattatatgagaaaaatcagttgtttaagttttagaataaaaagaggaggtactatcaaatttcataatacaattctactagttaagaaagtgttagtaaaaaaaaatatagcaagaaagaaacaacaatttgagagttagaatcataaatatgaaggtaatatgccgaattatttaaataaattttgagaacgaaatttctataaggaggggatggttgtaatatcctgataaataattagggtttatatttatattatgggttaataaggtaataaatgagattatgatcctactaatttatttcagcataaaattaaattttgttataagtgagtaaataagcgtaatttgttaattacggagatttatatagtatctgtaaatgtaatatgagctatatgtggaataaaaatattttcaggtttggggatcaggaatatataagcgtaatttgttaattac

SEQ ID NO: 371505 - DNA, 481 bp, Cannabis indica
acatattgaattgcaataattaaactaagcaacgttaacattaataaatgaatgacagttactaagttcatcaacgtatgcatcttccatacctgcgagttgactgttcatattccgatgtacaactcgcagggtttatcattatgttcaggacatctgcgtcttttaaatagtcgcttcttgtagacatcgcgtgttgagctgataaaacctagacatgcaagtctatattgcattataaaggctgcagggttcttaagatcaactcgtacttacagagaatcgttctcctggtttatacaaggacaaggggaggatgatcgcatatatttgatatatgcgatctactctcttgtctcggatgcgattagacttctgtcatgctcgccacctctcgctggttatatcctaagcgaggtttaaaacttcgaggagtcccacagggacatcctagctttctgtggaaaatctgagtatacgt

SEQ ID NO: 371506 - DNA, 619 bp, Cannabis indica
cgtttcaaagcttaaaatagctacattttttatgaaggaagtgttgtctggatcggggtttaaatatttttaaaacttttatttttgggctgtattcagaaatcggcatgatttaggattttaaagaaactgttttaataaaatatgcataactcctaggttataactccgattttgatgatctctatactgttagaaaggtttttcgattatctaaaaaatttgtgaacagtaggatttctaattcgaacgttttatgagtcaaattctgggctaaacttgttgtatagtaagagttataaatatattgagttatcggtggtctaagggtttcactaattgttgatagggtctaaggtatcgtaagagttaattaaagcggagttgaggtaaggaaaaataattatactttacacttgctttttatatggtttgagtacctagtgagactgcttgaataaattgtattgaaattgtagaatgtgatagtttcggcgaaatagtattttgttgatagattgtatattgctgtttaatcatgttccaagtacttgtaagtcgttggaaactacacatgtatggtgatgtggtaagtgaggcagtggacgtaagggtgcac

SEQ ID NO: 371507 - DNA, 502 bp, Cannabis indica
tatcacataatatattatatgaaaaaaaaataagaatcaagctaaaaaaaatacaatttttattgttttttacattcaaaataaaaaattaaaaaactagggttcattcacttaccttgaatgtaatcgctctcttgacaataatatattgatcttatttatatgtaagtgtattataaatttatttttttacaaatttgaagaaatttcataagattttgagagatttaaaaaatggtaaataccattttggaccttgtgttttgcaaaagttaccaattggaccatgtgttttgttaaatgacaaaatggaccctatattttctaaaatagtacaaataggaccttgaattgatttttaaagtttaattataattcgatctaaaagtgctatgacaaaactatttatattttttgtatctgttcatattaggaattatcttcaagttggttgtattaaaaaaaaaattgtcaaaaattaagctcagggtcctatttttac

SEQ ID NO: 371508 - DNA, 938 bp, Cannabis indica
attttataaaacataattaataaaggataatgaaaaaagggaaaaacagtgaataaatacaatgataggcaattaaaattacaagtacgctgaacaatggacattgtttgtatatagttgtataatagtttctatatagttgtgcgactggatataaaaacttgaaaaattagaaaaacataaaaattctgttgatacaaacatacagaagaaacatattataaggattaatgtcaaatatcataaaattttaaaaccagatccacagtataaaaccaaatataatacttagaaacataaaatcacaaacaattgtctgataatagattcaaccaataataccaaattgtcactaaattaaaagaccctacttttttaatttagaagccttagaagacttgctttgcttctcatcctcgctatcaatgctttcatcaattttcctttggccatatcagaagaaaagggcagcaagtcgagtacgataaacttcgatgtcaaaatccgtaggaacatcttttccatggatgaagaactcggcaaatgcagccacaaatgctctgcaatcactaaaaaccagaaaaaggaaaaacagttaaagaaactaaaaacaacataaaagaaacttaaaagaaaaactcactttttctgctgagacggaagaccactaatctccacaattcttagaggagctttagggtcagaacctaaatcaggagcatgtgacctattcttccagaatccaaggagatcaaaaaacaaagggaacaacacagaataagccttcattgcattcctagctgcagcattcattttggtgtcctcaaagaattataaagaacaaaatcccctcattcaagtcaagacgatcaaacacccaatgactttccctccttagatttatgatgaataacacatgatcggcttcataccaaggc

SEQ ID NO: 371509 - DNA, 481 bp, Cannabis indica
atagggtgattctacaatgtatcaaattaaaagagatgcactgatgcatcttctatttatttcggtatccagaaaaaaaaatttagtctaaatttttttcttcatatttatgtatgttatagttatttaagatatcttacaaaattttaaaaaattcggaataacttacaatataaaaaataatgttcaaacaatctattttacacgtgtataaaataaaatagtcacgcgtgcaacaaactgtttgaacgtaatttttagcgtgttaaacttctctaaatttcttaaaatgagaaaaaatttgactaaaaaaatatttcagatactaaaataaatagagatatatcagtatatccgatggtacattaaatatttaaatattctgtcaaaccaacaaaaattgttaaagtaattacattttatatataaagatattattagtttttaaatacattaaataaaatacagagaatactgatat

SEQ ID NO: 371510 - DNA, 758 bp, Cannabis indica
aaccatgtgtccatgggacatgataagtgtataaaaatgcacattataaagtaataattaagtaaaaaaattaagttttagtatttatttttataagttttaaatgaaaaatttgttagagatgaaaatattattctgacttaattttatttgtgttattttcaaaatgtgcaaggttttaaaattcaaagaaaatgaagcccacattgaaatataatgctcacgtgtcaagctttcttttcaaattatttatatgtatatggtctaaatttatgggttgggtccatcattaaatagcccaactaaagctccaccgattgtaaatgcacgcaagctccaacaatcctacgaaagaggacccaccagctaatccacttacccatgcacaccatgtctaaccaatgctctattcgaatcgaataaaaatctgatgtcttaaatttcctataccaactctgtcccaccaaccacttggggctagctcaagtggtcataggtgggtgtgtgagtgttggaggttctgggttcgagtctcaggtaaaacatgttataatatataaacgcttaattcaactctgtcccaccaataatttaaagacacatcatttatgtagaatagggttgtacatcagtcggtttgggtggtttatcctatatattttctaacccaatctaaaattccggttgctacaatttaagtgcaacccacctaatttaaaaaaaaaattgtaaaccgaccaacggtttgggcgggttaa

SEQ ID NO: 371511 - DNA, 481 bp, Cannabis indica
atcgatcttttgttttttgtggtttctatgtttagctaccttaaatagttcgttattaagcgcaaatggttcatctggccttagaacataaagcccctgttccatagatgtaatacaaatttgaatgtcattttgagaaatgaaggaaccagaactcaaaaatattcaatttgtattgttgcaattgtaaacatgaaatagaaatcaagtttctactgaaatttggaataaataggacattgtctagatccaaaattctattctgaaacttgagtttggcttttcctgtaactctagccgataccatttttccattaccaactttaagtttcaactctctggattttaaataattctggttttcaagcaattgcaatgaacaatagacatggttagtagatcgagaatcaagaatccagatggatttttcattctctaaaacgcatgattcaaaaactaaagcattggaatcactgcttaa

SEQ ID NO: 371512 - DNA, 550 bp, Cannabis indica
aagtccattctgagtataatatcgaactcgaccaatggtaactccacaagatcagcactcaattctctatcttcaattctaattaacactgacctaacccactttcttgaaacaattaactcaccattaggcagcagggttccaaatcccatttcaaaaatatcactaggtctatcaagttggtcaagaactcttgatgacacataagatcaagtagcacccgaatcaaataaaacagtataaacaaaaccgttgattagaagctgagctgtaactactgaagggatggcagcagcatcagcctgagttatagcaaatacacgagcaggtgtaggcgcaggtttagcttcaagttttgattcttctttcttcagctgaggacagtctttcttaagatgtcccaccgaaccacactgaaaacaggctctccggttacaagtcccggggtgatgttgcttgcaacgcgggcattcaggataggagtaaatctgacgtcctcctttgatttggtttcctcgaaaccttttctttgccctgaacttcccgaaga

SEQ ID NO: 371513 - DNA, 587 bp, Cannabis indica
aatattaattaaaaaaataagataattagtttttgaacaattaatttatatgtttgtagttgtaaaatgtagaataatgtgtttgtagaatgaattggatcattttttttttgaaaaaagaagttcggtttgggcggtttaagccgaccaaactgaggttcaaaatggtgggttttaagataggttctatattggtcagttggttttcagattgcaccaatccagaccaaaaactgaattctatatttttatatagaaaagaactgattgatgctcaaccctattagaatagtccaagtgggttctggtcacataatacaaaactcataatctatacattaacatgcagttcggatccattattagaagatggatattaacaactcaagaaactcatattgtagtgtctaatgtattcttggaaattgaaatttaaatttctagtcgaaatctaaaatttaaagtaaaagactcaaatttataccaaatattccttaagtagttattctttcttgggatataatatctggaatatagtcatctgcatatacaagttggagattctctaagatcaatgatttatatca

SEQ ID NO: 371514 - DNA, 613 bp, Cannabis indica
ccaaatacaagtaaactcttgttgtagattatcatatcagtaaaaccctgtgtctgataaatctaagaaactttattcacatagtcatgtttactttccaatgtgatgacagcacaataaacatgatcaagtatgtgaaaagggtttaagatgaatttataaatcaattagacaagcaattgataaagtgagccaaaaacatacacaaaacgtaagtagtaaaagtaaaaacttacttcgttttcgtttttactttttagttagtagtttggttaagtaaaaaattaaaaagtaagttaacttaacttagttaaagtaaaggtagggttttaagtttttttaagggtttacgggactaaaaccctaaaaacccaaaactaaccctaccctacgttcgactaactaataaactaaaactatcgtatacatcataattaccctaaattctgacggtgcttttcaaatgcagtacgaccaagactttggtgaataaatcagctaagttgtcttctgtgtctattttctcaaccagtacatcccctcttgccacatattctctgatgatgtgatacttcatttctatgtgtttgcttctcttatgacttcgaggttc

SEQ ID NO: 371515 - DNA, 800 bp, Cannabis indica
agcaaatcctggtcgatctgatgtctgagttcccaagactcatctaagttcatctacaaaaggcaacacacgagatgagtgttggacagaatatcaaacgataaacaagcaaatatgccgaccaggagtactcaacagattaaagaacggctatgtctaaagaaaagtcagaactcaagaagtcagaaagttttcttgagttagggaaaaaaagttcatgaagcttagaataagcaagatgaaaagcggacacaatgcagttcagagacaagctttatggctgtaaaaccacatgaagacatgaaaaagaagaatcgcagaagtttctaaccctagggtttccaaagcatttttctacagcacaatgaaagctacattcaaaatgtaaacatgcaaagaaaagcataaaggaaattaggaacttactcaagattcgagtgtctgggttcgagcaacgtcaatccaaccagcaattgtatgaagacactttagcgactttgaagccagaaaattttcttttcgccctggagcttgcttagcagagaagggtgatgaaatgagtttatgtgcgaatgctgtggatatttataggcaagtctcgaaaaggggtaactgtctcaaagaaacctcagacgcctcaacttcccgcctcaaaaacgaatatgggaaatcaaaagtaatccagtgcaaccgtcagctgtggagagagaaaatcgtatttcgaaatattaattgtcaaagcatttattatccgaaaaccgaagggatgcccagtcagcttcacatcgagtctcgaacgg

SEQ ID NO: 371516 - DNA, 685 bp, Cannabis indica
agatactaactgcctctttgctagaattatatttattttttctaaataataataaattaattaataattagtaattttattaaaattttaacattctaaaatacaaattaagagcttgtatatcagtttaaatattatgcttgaaaatgttattaccatcagagaaaaattgagaatatctaataataatatatactatatacttaatttgttgattatctaacataaactagctagcactgtgtaaagaggaaaataaaagttgacaatcagatatcaaatgttgctttaagattggtaaaaatatattaagtgttgtgtggtgtagtggtaagaattatattatggaattttcctatttgagtcaaggattcgaaactcacttcagcttttcttgaaagagattaaagaaaggctaattggtccttattgatggtggtgatatctgtgtgatgagaacctttgaggtgactatcgatgacccaattaagatagtttgaggtataaaacctctatagttgacacgtggtctgtgacagtcagtagtctcgtgatccgtaaggggaaacaccaggtaaactgtacaatcccacaccgcttggggaaggtcaagtaggatgattctgagactgtgtaggtatgggactacacagttgaagaaagcttaaatggattgattggtact

SEQ ID NO: 371517 - DNA, 970 bp, Cannabis indica
ggtatataatttaagttaaatttgacttaataaataaatcaatattatatttaactaaattttatattttttttctaattaatatattaatagtaaaatttagcatttcttaatcaaatgatgtaaaaaaaataaacaaaaatattttaaatacattttagaaatatatataaataaatatatatttattaaattgattagagtttatttttataaatatattgtaatatataaatgtttaaataaaaaaattattacggataggggtgttcatcaaattgcttaaactgctcaaaccgcccgcactgcaaaaaaaaaatgcggtttgaaattctttgcggtgcggtcgtggtttgaatttttcctaaatcgcgcagtgcggtgcagtttacggttttgaattgttaatatgtggttcaaaccgcaccgcacattataaaaataccaatttttatatttatttagatccaatataactcaaagtctactaattattgaatcgttgacacttaatttttttttcatatttattttcaagccttatgatgttttgacaagttttattcaaagtttattatatttgtgatagtttaattatttagtgatagtctaaactgtataaagcacaaaaatcgcaccatttcatactattttttgcagtgcggtttttaagaatttttagtttcgcgaccagttgcacaacgaacaccctagcgataccactcttttaagtactctgcattcttggaatagaaaaacaaattgcacattttaaatacatttttttaaaaaataaataataatggtaagagcaaatttaatttgtaccctttagcctattttaatagttgtattttttcttatgtcagtagaacttgtaactttgccgctcataatgtggctagatgggccttcgcccaccagatgtatgggtctctaccggtctcttctattccggatactctatttt

SEQ ID NO: 371518 - DNA, 675 bp, Cannabis indica
agtttgggttcgggtccaaattttagtcaaggtccagatcaggctcttggtctgggttcacgtcctaggtcttggtctagcttgggtccgagtcccaagttccaatctcgatctgagtctgtattcaattgttgatctatgtccttggttctgatctttttctgggttcgagtttgggtttgggtccgggtctaggtttggatctgattcaaggtgtgggtgtttgagttcgggtgcaagtctgtgttcgagtttgtgtccaggtctgaaccccgatctgggtctgggttctggtccaggtccaagttccggtatcgagtgcgggtccaagtttgggtctgggtcaagatctcggtctagatctaggtccagcatttctatcacagtctgggtcttggtccgagtccatgttcgtatcaacatccctatctaggtccaagtctgtatttcggattgggtcccagatttaggtccaggttagggtctcagttccgttcttggtacacgaccgtgtccgggccagagttccagtctcagtttggttctgaggctaagtctgtgtttgtgtctaggtcttggtgagggtcctggtcacggtcctattattgttctagggttcttgttcgacgattgttgttcaggttctaattttctgtcctaggtctaggtctgggt

SEQ ID NO: 371519 - DNA, 498 bp, Cannabis indica
aatctgattatatggaaatgggttttatttagggcacaaaacccaacacgtagcaactaataacctgcacaaatcaacatgccactaagcataatctcttcgtagtattttttttttcttctaataatgcttagaacagataaatattaatgaagacatttactgaatcagttatttccattccaggcttcaagcacagtagttgttgccgaaaaagttcaagtttttgaaatttcacaaaagggtacctgccaatgagacaatggaattaggtacaatatatggtaatactaatacacagtcttactcaactaccaatctactaattaaagacttaccctttatcaaaaatttttccgaaaacgaacattgccagcttaaattcaatctcgcttgctggctccttcaactggaaagtgtccacatacaattccttgcttgagtggaatcttttttcggtcttttgatacgcgtttgaagcaaggagaactttgatgg

SEQ ID NO: 371520 - DNA, 567 bp, Cannabis indica
tttttttaaaattatttacgtagaattaataattttattctaaattgtaatacatgtataaatattatatttactcaaaaataattctattattatatagtattataatgttattattgttacattgatatttattggtgttttaattttttttcctagtgtacctctatatagttataacctctcaattagaatataattttcttagtcccaagtgtattcttggatagagattctactgtatatatatataaattagtattttgaagtgtggtaattacaattctttattataatttttttagttaatttttacatttgaaattacaaaattgaaatatcttttttaatatttgttataattataatatcattcttgtaaattattgaataatttcaaacagtattaaaaatagagttcttgatatttcaatctatcgtgttcaaaaaaaattaaaatctatttttaatattgtaaattattcgaaattttacaaaaatttattgtaattataaggaacactgctgtaaaaaaaaattcggtatgtgtttttcgacacaaatatt

SEQ ID NO: 371521 - DNA, 612 bp, Cannabis indica
aaatattttatttcaaaaatggtattcacgataaccacatgttttaaaaataatttctgtaattaataaattatgctttatttaatcatttaataaatttacactaattattctaagtgagatcataatcttactccattaccgaaataattacatatttaataaaatatgtctaattaaatactatattatttttcgtgatattacaaacatgcacagctcaattagcagaatatttgacaaattgtaaagacaaattatgaaatgacattaacatgaatttacaattttcagtaaccaaacaaaatatataactgttgggattttatgctctaaaaaaacgtatttcaatacaattttatttgttatcaatagaagattagaagtcatttaagttaacatgtgattttcatgattatagtgtaatatataatttctgataaatccagaacatattgtcattcacaattatagtgatgtcatcacagtgaaatgtaattgtgattatattttgaagtttaagtctcataattcatcattacgatagatttacactgacttgataatcagcaataaagtttacttacaccttgaataagtgttatgtcattt

SEQ ID NO: 371522 - DNA, 527 bp, Cannabis indica
cttaccaaatcgtttaatgactttcatcagagatattcggagaaataccatgtccccgacctggaaatcaatatccccccacttcatcccagtgaatgggagatctacaccttcttccatataaaagttcataaagggccatcccgattgttgcctggtagctgttgttataagagaactcaattaggggaaggtactttacccatgatccttcaaagtcaagcacacatgcccttagcatgtcttctaaaatctatatcgtcctctcgaattgcccatctgtctgaggatgaaacgtcgagctaaactttaactgagtacccatatctcgatgcagactctcccagaaccttgatgtaaacttcggatctctaaccgaaacaatggactttgggacaccatgaagacgaacaatttctctgacatataactcagcatactggtcaatggagaaattcgttcgaacaggtaggaagtgtgctaactttgtgaacctatttactatgacccacacagagtcaaactgt

SEQ ID NO: 371523 - DNA, 506 bp, Cannabis indica
tactatttcagtgattgtttatgtactaaaccatgctctccagactttgatatctacaaaatcatgtcccttgaactttgacatgtactaaatcatgccctgaacctttcatccatgttaggctgttttactaaaattggacaaaagttcttaaatccaacaatctcaatagttcagggagtatttttaacgaccttaaaagttcaggggacataattcaagggacaaaaacttaattagccttaatttaattacactaaatacaattttatctaattactaaaaaatttatgctatgttataattttgattaacccgtgtcaattttttttttctctaaaaaaaagggagtcgacagaagtacacaagtttttcaaatgaaaaaaaaaaaaaataatgactataaatatattgggttttttttatttttacacttcaaaataatttttttttttgtgcatttttacggtaattctactatagaaactcctattgcaactaacgct

SEQ ID NO: 371524 - DNA, 508 bp, Cannabis indica
atttttaaaagtaactttttagttactaagagtgttgataagaaatcaattagttatatttacataaaaaaatttatttttatattatgtaatttgatatacatttttgttatctctaaaatttatttgtttacattttagtaattagttatttttaaggtatattattataaatttctcttaattatttacaaatactgtcttgatatccaaaataaaagaagttaaaaaattaaatattatgttagcattcccatcagcttctctactctatcctttaaaatacttcacaaaaatttcacttttgcttctttatattttctctacatcatttaaatattatacttttatatatatcttattaattaaaacaatatataagacaaaagaaagtgaaaaaaatataaaaatattaattaaaataataagagagaaataaaaaatattaaaatatatttagctcacatattatttgagctttagagcactcacaatagctaatgtaaaa

SEQ ID NO: 371525 - DNA, 1179 bp, Cannabis indica
agatacctcccaatttcatagtgcctacctacaaggctatattagtcaatagagaaaggtctcctttttttactttttactttccccattctttctttttctttttctttttctttttcttttcctttttttctccttttcattttatttttattaaactttggaggaatatatacttttgtatatagaaaaatatgtggagatgataaggtatcttaaaatacctttatacattacaatgatagaaaaaaaaaatttggcttaagggatagtagcaaaaaccttctttatgtttttaacaagaaaaattcacttttggattttataaaaataatatgctcctcttcaattaaatctaaatttttgaatcgaatattttcttaacttaaaggttaaatactcaattcggtactttatattttattaaaaatacagattttgtatctgatatatttttaacagtgtttatttggtattctatactttaatattgtacttactaaaataaaattttatcaatataataaaaaaaattcatagttatgtagtttaaattaaaatttaattaattatatatcttagtgcagtgtggctatgcttataaaattcgagatcaaagtatgaaatatatacaatttttagttacatattaataagtataattaatattgtatgatacaaaatttgtatttttatatattttaattgcttaatggtttattagacttttttttagttttaaagtctattgtttgaattttttttttttattttatttgtaaatagctttataactatctttttgtttttgttaattttgcactataatttatatattcaaatttgtccaatatagagactcggttttctgagaaaaataaagtggagaaaaataaaataagtatttacatataagagctaatttataggagttttttttttaatttttataattcaaaacagttatttttttttattattattatttttacataattttatataaaaatacttatggtaattaacggaataacttaaatcacaattaaaaatcgtataacaactcgtaaattactgagaaaccattttaaaaattcaaatcgtaaatttaaaaaaaaaatatatatatatatatagaataacttctctaatttatattattattaacttatcatgaac

SEQ ID NO: 371526 - DNA, 873 bp, Cannabis indica
ttatacatattgatacaacaaacattcttatcctgtcctgcaacacagtacttactaaaatcaaaagaataataacaactttaaatactatagtacattcaaataacgtatatggaaaagaagaaaaaagaatcattactactattcacctgctggtaatatgacgtgaagtgtttacccaattcaattgcaatgttctcaacttaaaattgctctgtacattccttaattagcttttgcatacacctatatagcaacttagataatcttgcaaatttaagtggtcccaaaagaaagaaatactctattgctataaagggtaatgttcatttcttattaagagaattttaagcaaatacatacagatttaggccaagatattatctagaatgctgaatgaaaaacatactctaatgttctatattagaatgagaactaaattggagtataaagctgcacttcaatgtgttttctaatctcaaagttgcttatttttatctctctagtggtctcccctttaatctgatttacatccttttttatataagccaacaaagatagatcaatcctcttagaattaggaatattttaaaaaaaaatgatatgtgtggcgctatagcgcctataccccgcgctatagcgccaagagaaaaaatctcgaatacgtgctgaagttatctttttttttcgtaaaaaattatttttttttactaggcgggtcgctatagaacatactcccagcgctatagcgcccaatccaaaaaatttcttcttcgatcttgcttgtaaatcatgcaaaacttttgcgttccgactccaaatgagatgatttaacatgttttggaaagctaggaatgagctctatcattttgg

SEQ ID NO: 371527 - DNA, 520 bp, Cannabis indica
cgtgttttcgtgcatgaaatctaatggataccttaatttttgcatttagatccatttgggattgatttgggcctttttggtcatcggaattgtcttttccgatcgggtttgggtcaggtccgtcagacccgcgtgacaaaaaaagggtaaaaatcgacccaatttggctgaagaagacgatgcaaacgacatgtcgtttgtggaaaacaacgtgtcgtttgtaagattttttgtcgtagtcgtttgttacaaacgacatgtcatttttcgtcttgtgaggctgccctttaggagagtaaacgacgtgtcgtttttgcatcatattcagcctcttcggaattgataaaatgacgtgtcgttttgcgttttgcaaaaaacgcatgtcatgtatgcattgcaaatttttacaaaaaaaaaaaaaagggaaaaattccgaattttttataaatttttatttatttggaatattaattattttcctattttgtgttaatttagtcaataaattgcatttagttaa

SEQ ID NO: 371528 - DNA, 535 bp, Cannabis indica
tggagcttgaaagttcccccgaagatagctaatttgttgtggcgtgcttgctccgaatgtcttcctactttagttcacttgcgaactaaaagagtggtgagctgtgtgttatgtcctctttgccaagttgaagaagaaacaaccttacactgccttgtcacttgcaatttcgttcagcaatgctggaaccgggttggaattggtacaaatgttgcaccagatttttcgtttctgcagtggtgcaccagcagttttttgcaggcggatggtgagcagaaatgtttgttggcagctgtttgttgggcaatatggggcgcccgtaacagactcgtatggcaaggaaaagagtttaatcctaataatgtagttgtgtttgcaacaaagtaccttgagcaatggaggaatgctagaaaatccaatttggattcatcttggtctgagcttcagactggtgatgggaatgagcattggacaccccaaccgaatctagtctcaaggttaatgtagatgcggctttatttaatggaggaaattc

SEQ ID NO: 371529 - DNA, 593 bp, Cannabis indica
taaatcacttccagggacttaactgaaactaaaagttccctatcgataaataacatggcaataccctaaataacacaaaaatgggaaaaactagggttcccgaaatctgccccaaccggtagaccggttccccaaccggaattccagttctgggaaaaattcctggaagccaaccagaattccggttcctacaggccaccctgaaccggaactccgattcagtgcaagaaaaactaaaaatttcataactcatgcaaatcaaccccaattcaatccaaactttccagacctgttctacacaccctagagaacatattcaaggtaacaaaacatccacccatacacagaatcaaattccaccattaaagctccaagtttgagttcaaaactcaaacttggttaaatctaactaatcaatcaacaaaacctgcttgaatccacataactaaacatattatagatactgaaaacataaaccaacaacaacagcaagttcagcaagcaaaactacaattcatgcaagactttctttttcttacaactcaagaaaccaacaaaaagctacaagaagcttaccaagaacttgagatcac

SEQ ID NO: 371530 - DNA, 772 bp, Cannabis indica
aagttcgccgctaataacattaaataatatttaaaatattatacttttaattattaacgacgaatcctattattatcggcaaacctccgcccttaataattttatatatatatatcagaacccttatttatccctccctcttcgtcactctcttcatccccaaaaattttgaccacacattcatctctccctcttcatccttaatatcaaaacccctattcacctctccccttgttcatcgtcgactagcccaccgttctgaccacgcaacgatgagctcaccacctccaccgttgtcgacattcccattgcttctgtcgaactcatattcatcattgttcaggtatataagtatagttaagattagttaaattttccttaattattcactactcataagattgaaaattattctaatattagatttgtagaaggtatgaatatttatatatttatatatttggaacacttctcaatgggtattattcattgtaagtactaaataaatttaattataaatattatgtttaaaaatattaaatcattagattttgatccgattgcgaataataaaagagaaattttatattttatgcttaatttagctatttaattaaagaaaatatcaaaaaaaaaaagaaattttacatgaaaatccttttactacactttattacaaattaccctcacacgcctattactacatttctacttacaaagttattttatttacacatttaccacttactcatcataccatgcatacacgtgt

SEQ ID NO: 371531 - DNA, 502 bp, Cannabis indica
ccacttagtttaaatttggaattcagcacataattagtgtttaattatgaaaattatttatgaatatttaataattatttatattgatatatttgaattcagaatgcatttttatgtcatatagtgaaatttcataattttgcattttcggcgcccggcaacatcgaacgcggtgtatggctcagtagaatcacaatttagtattttagcatagcggggcagtttatttagacattgggattgtcgagattggtcgggaatttagaatttcccaaaataccctttgtacccattttatgccattttagtgtgtgagggcaaaatggtcatttgcccatttgagttttgtcttttagtggggatttaatattgggttttaaatctgattttttgtgattattagctgatattaattcaagttagtcaattatttacttcatttcatttatttttcaaaaataagaaaaattgggaaaaagctttctctcttcactctctctct

SEQ ID NO: 371532 - DNA, 532 bp, Cannabis indica
ttcttctctactcaaggcagtacatacttgatgaaatgaaagcatattctgttgctttaactgtgagttgatcctctttcttgaaggtacgctggttttcagcttctggaagacaatgctacattggctgctgaatccacctcaggtgaggatttattgtttgttttatttcttattgaaaccaatagggggtttctcaaatttattgaagagtgccaaatacaaagatgaaatgtgtatacacatccaccttaggatcccctcatatttaacatacacaattacacacttaccttaaatcctaatcgattgagcagttaatgtttatattactgagatagccatttctctgttgttttcaagaagaaaggctgactttctatactcaaatgttgttttgattagagaatgtgtcccggcacaatatgaataattaaatcaatactaatctcatatttattctcacatttaatcttctctttgggaataatttttatgtgttttttttacttattctttccttttctcccaa

SEQ ID NO: 371533 - DNA, 553 bp, Cannabis indica
gcataaaacccaacagctatatgagttagttgactcgagagtcacatcctgcgggatgcacttttagatggcattattttcatgaagagttgggacggtcaggcatttgtgtgtgggcatgttgtcgaggacgccaacagttgaagtgggggagagaccttcacggttcactcaacggactagttgttcattacaagcatctagatgagtatcacggagattgattgttgttcagaatgtaaagtcaagaagactcaggacacaggtagagccagttatcttgggtgaaagtttgcaggactcaggtactaagataacaccatggcaatgctggcctaaggtgaaagttagtaggactaaggtactaaggcaacattgaaatgtcgaggggcgaagagtcagaaggaccgagacattagttcaacatcttcatcaaagtgacgtttggaatggaggaaccgtatgcgagtatacggttagcttgagagctatatcttgaggggattcctctaagtgaagtttttcccaagttgaagtgggggagcccactaat

SEQ ID NO: 371534 - DNA, 595 bp, Cannabis indica
gaaacttctcataagttttatcccttaatctagttgatgaagaatatgcaatttggactcacactagtgcctttcaaatcgacccaccacacacaaggaatagtctaggctattaggataaagtgtataaccttgttcttgttgagttctcaacacatgagcaagaataatagagagaaaaaacaatttccttttctctctatagatttcaaaatttactgtgtaaaagtgattttctaatttctcaaatcagacttctatttatagtagttaaatcccttcaattaaatcattatttaattgtttgaataaataaatatctataatcgaattcggttaatgatatttatgaaggaatctctcaactacttgagagaatatctcaacaaccttgaaatatctataaccatttcaaattagatatttacctaattgaattaattaaataaattaattaacccaaaaagataaactttatataactctttatccctacccttgatagtgtttcaaggtggcgactcgtggaccatggacctataattctaagttccaataaactagattatttattgatcctcatcaaccaaataat

SEQ ID NO: 371535 - DNA, 563 bp, Cannabis indica
caaaagttattaacgttcaaagtttttaaaaaatttcatgcaaaatttagccttctctgatttttccatttattctggtctttaaattattgtttcattttattggtcatgaaaaattatataaaaataaatgatcacattgctaaattagttaagaaatgagaaagttatgccattcaaaatttactaagtgatcttcactcacctcactttctgcaccccagcacatactcgaactaaaatctgcaccatctcaatttaatacccaacattaaaatcataaaaagttacacattatttattattcaatatactaattattatacaaaatataacttgaaaaaattataaaaatgatactaatatactacaaaaatacaaacacataatataaaatagggtaaatactattttggaacctggggtttgtaaaaattaccaattggacactctgttttgttaaaagataaaatggactctgtattttctaaaattatacaaatatgaccctgagctcaatttttaacaattttattttttaatataaccatctttaagataat

SEQ ID NO: 371536 - DNA, 827 bp, Cannabis indica
atccacaaaataagtccagctggcactaactaaaacttaaaataagactctcgtaaacaaacgttagtggagatataacagactaaaaatccagatacgactagacattgaacagaacaaacactgtcacaaaataataacactaacaggtttgatgatataatcaaaacctacggctttcaccaaaacgatgatgaaccttgtgtttaccaactcaaggataatcaagtggtagtattcatggtcctttatgttgatgacattttgattattggtaacattatcaagaaaatgactaacattaaggaatagcttgacactcaattctaaatgaaagatttgggtgaagctgcttattttcttggtattcagatcatcagaaactggaagaacagatcactttctctctcgtaagcagcttacattgataaggtgctagagagattctcaatgactaacaccggaggggcagtgctgccttctagacccggtatccgtatatctaaggaacagtatcccactgatcctcaagagatagaggacatgagaagggttccttatgcttcaacagttggaagtctaatgtatgcaatgttatgcactagaccagacattggctatgcagtaggaattgtgagcaggtatcagacaaacccaagagaggaacattggactgcatttaggcatattctaaaatatttgaagtatacaaggcattatgtgttagtctacatgggtggtgctttaaatcccctaggctataccgactcagatttccaagcttgtcttgatgataggaagtctacatctgggatggtaattactct

SEQ ID NO: 371537 - DNA, 1393 bp, Cannabis indica
aatatatcctaagaatgactatttgtattcatagtttggccattagaaatttaggaagattgatcttctattataatagtttaagataaatatgtatatataaataggggcataatattatttgtagcacaccaaaaattatttttcatttaagaattagtaatattaatatagtaataatgaatatcataaattgtgtgagttatagaaatgaaaagacaccttgatcatttaaaaatatataacaaataaaattataaataaattagaaaaattaaaaaattgagaaatcaaagaataggatgaagaaatcatacaaattgccacatcataatgtttgtgtttttctttataaatagatatatatataggggaattctagtgtggggctgcttgttttgcccctatgctatagggaaacaaattgacccaatcacaagcttaagaaagtagagtgtagataaattttataaaactaaaataggagattatttcattattaattgatattttactgtttacttaatttttttttctggctaactatttatttagatgctttataagtgatcagcttatattgggaaaaccaaataaatatttaaatatgttgaatagctaaaacactttttaaataaaattagaaaaaattgactgaaacaaaatcacttaactggtttttgttgtaaatagctctctgtttccctcactcaagactcaataattatatgtaaatctctctatatctataacataaattacatgtgaatatgaatcgttgtacattagtttactatatatgtcaagatcaaattctttttactattcctttttttctctccttatcaccattaagattaagtaatagttctttgttttataatttattaaatcaggtttatttatcgtaataataaatattttggacttgtactcatatttaattgattgaaaaacaaaaagaagctatttgactttataacttaaattatttttatatagatatttattttcaaaagttcatctgatgtaggcttacttgaatgattttaaatgctctttaattggaaccgtaccaacttgcttcttttaaactcaattttttgggcagaaaaaataatatctaactaaattaattaatttttttttataagtggcgtctcaaaagagtaaccaaacaacaagataaaaactattaaaaaaatagttaataacactagaactacgcatagcctaaaagcaaaacaaataaaaaactaggtgtaaacataaaaaaaccatcagtaaattatgaaaagccaaaaagaaaaatgaagtagaaaaaaagtaattttttttaaaaaaattaaataaccaatataaaaataaattcaaagaatttttaaaaaaataa

SEQ ID NO: 371538 - DNA, 583 bp, Cannabis indica
aatgtttttgggatcccaacttctgtaacttttagtttataaagtttaaaatattacaaatctatttccattcctattgttattaaagtttaaattttgcgctaattttgttagtaatcccgtttaggggattagggtttcataagtatcttgggtagcgtgcctaattatttaggacgttacagctaggccacacatgtggaccatattttaaagtcaaaaattaattttttttttttaatttttgcataaataagatttattatttattttgctaacaaataataattaattaattttcattaatctcttatttcacaagaattaaaaaaatatatattattttttctaaataacttttctttcttttaatattatttaagatcaatattatatttaagtaattaatatagttttatataataaaactaaatagttaaatattattaattatacaattcataattgtcataattaaccaaaacaatattctcacaaattactattttacccttaaaaatttattttcgccaaaaattaattctcacttgaaattttactcatcaaataaaatcttccccta

SEQ ID NO: 371539 - DNA, 838 bp, Cannabis indica
cttttatcacattaaaaattataatttttttttcaaattttatttttattaaattagaagcaaattacttaaagattatgatatatttatattagttttattaaaatctttttttattttcaaagttatgtcgtattttttatttttattttttattgagttgttgtgggttgttggtacatagattttgttgtacaatatatttctgttttattgtatagtatattattattcttagatgatatttattttttattttgatatgtatactagtattatataattgtattagcataatataaatattttaatgtatgtatataattttattgacatgctacatatatttaattattatttttatatattttataacatacattaattttaaataatatttaattagtttctattttactatatatataattttgttgtcatactatatataatatttaattagtaatatatttttttattattattattgtttgtatatatgttttggtgaatagcatatgtatttttgttatacgggataatattttattaaataatatttaagttctattttctattgtactttttttaacataatatataattttattagcatcctatgtatttttatttttatttgttgttattatatatatttcgattacaaggtatatattttttgttatatggtatataaattttattgtatagtatatcattttattttagatcatgcatgtttaatttttattttattatatataaaggtaatatataattttgtaagtatggtatacttattttatggttgtatataattttgttaatatgatatcta

SEQ ID NO: 371540 - DNA, 773 bp, Cannabis indica
atgaagtgtaacttgatatcaatgtgctttgacctctcatgaaacattggatatttcatgagatgcaaatcactttgattgtctcaataaaatgtgatatcctcagatttgaaacctagctcttctgtcaaccccttaagccatatagcctctttgatggattctatatcagccatgcattcagcttctgttaatgataaggctactactttctgtaggttagatttccaggtgatgcagcccccaagagcagtgtacacaaaccatgttaggctccttctagtgtctaggtttgctgcaaaatctgagtccacaaaaccaatgattcttccttgaactggttctctgtactcaacacaatactagtgtccagagtacctttcaggtacctcattgtccatttcagtgcttcccaatgttcaggaacaaaggtctgaaatgtacatgctgaccacactcatggcatgagctaagtcaggtcttgaacataccatggagtacatgagactcccaacaaaacttgcatagggaacattgctcatcttggctctttttacatctatttttggtgactgagatgcagacaacttgaaaatgttgagcaagtggtgttgcaattagttttcacttgaccacgccaaacttattcaatactttctgtaggtaggcagcttgagaagtactatcatgacaggcttaggtctttttatatctatcccaagaattctcttactttgcctgaatctttcatctcaaactcatcactgagtttc

SEQ ID NO: 371541 - DNA, 905 bp, Cannabis indica
caatggcaatcagtcttcttcctttccacgatcccatcaatcagttttttttttttttagttggtaagcaatgagttcgtgacctccttaatgtgaagcttcatcttcaacacaatcactaatttgaaccatatatgtatataacatttgcagaaaataactcgtaaggacatgtatatatatatacttcttctgcaaaccagtgaatatagagggatcttcgtcaactctgtttgccattgcgctctctgcaatccgacacgaccaagcttctcgtcgtccgccagtgacctttccgctccgttcatcttcgtcaaagttcgttcgtcgtcttcgatcaatgatccattgacgtccccgatcaaagatccgcctccgatctttcagcggcaccgtgtgaatcgattcccacggtgaactaccattaacacccaacacaatctctcgtagcaccattttacgatccataaacattcaactagtatcaccttcttctatgtacacgtaagacgatcgtattgcccgattaagagatggcgagattttcagatccccaatctccattcgagcagagagcttttcctctacctccggcgaactgcgattcaaccttggcagtgcatcgcagccatctcggattataccgataggatcgactgaagaatcatccattgaatccaccgctgaaaggtaccacatggccttcagtgagttcttcgacatccacgaattcctccatatttacaggagttgatttcagagtagattgtgccgccacatataattgatcaaattgatcgttaatagttgtaaagtgttgctcaagcatagactaatcttctcaaattgagaatccaaagtttgcttgaaaaatgactccatagatttgaagagttgaacaatct

SEQ ID NO: 371542 - DNA, 531 bp, Cannabis indica
acattcttcaaaatggatagaagctatggatgattagattgagtccatgaagaaaaatgatgtataagagctagttctattacttgatggttttaaaccactagattgtaagtggattttaaaaactaaaagagacaaagagtgacagattgaaaggtataaaacatgtttaatggcaaaagactttaatcaaagaaaggatattgattacactaaaactttctcgcttattttcataaagattcattcagaattattatggtttagttgcgtactttgatttagagttgcatcaaataaattttaaaactacttttctgaatggagaattgagagagcatgtctatatgtctcaatttgaaggcttcaaggaaaatgaaaataaaaatttagttttcaaattgaaacgatccatttatgatttcaaataggcatctcgccaacggtacttgaagttttataaggttttgacaccgtttggtttcatcgagaacaagtttgactagtgtatttatatgaaaattagtagga

SEQ ID NO: 371543 - DNA, 522 bp, Cannabis indica
aaaattactacagtttttttttagtaaagaaacaaaaggaaaaaaaaaagacacactatgtatactaaacacaatacgtaaaacggaaaaacaaaaaaaaaaaacagataaactactaatagggaaaaaaaaaaattatatagttttttttatataaacaaaataaagagacaaaaaaaaatacgtacaaaaaaaaataataataaataaataaactactatactaacctcttgtagcgcagaaacctccccggcaacggcgccaaaaattgatgtcgcccaattagttacactgcggtcgcggtagtaaacgggctatgtcgtatccacagggagataaattaccactaaagattaatataaatagaaaatgatataaatgtgaatgaactaaaaataataaaaatgatgagaaagttgatcagataaagagtttggtaaggtagaaatgtagttatgcaaatcctattctaataccgatattaattcaaaacacagttgcaattctacaacattaattac

SEQ ID NO: 371544 - DNA, 258 bp, Cannabis indica
  modified_base (30)..(30): a, c, t, g, unknown or other
gaatgaacaagacaactggatgacgccaanaatgcagcacctagaggatggaacccttccacatgacaagaacgagtaaagaaaactaagagctaaagcaaccatatttacactatacaatgggaaactctatagacgatcattctcaaggccattgctcagatgtctattaccggctgaatccaactacattctccaagagctacatcaaggtgaatgcagaaaccacgcaggccattagagtttatgcaacaaagc

SEQ ID NO: 371545 - DNA, 402 bp, Cannabis indica
agaaaaaatgctaactactctagggcagagggtattcatatgcttgccttgactaactacttcaccaaatgggtagaagctgaagccttcgcacaagttagagatcaagaggtaaaaaaaatatctggaaaaatataatatgcaggttcggaattccaaagaagatagttacggacaacagttcacagttcataagccaagacttccaaaacttttgtgcagaatggggatacaattatcattctcaactccacgataccctcaagcaaacggacaagcagaatcaaccaacaagacaatagtcaacacactcaagaaacgtcagagaaagccaaagggagatggggcagatgagttaccaggggtactgtggtcttaccgaacaacagcaaagacctcgac

SEQ ID NO: 371546 - DNA, 758 bp, Cannabis indica
tatacatatgtgcccacaatagattttaattccaacagtttatatatatgctaagaagaagaacatttcataaatgttattgtcatataattattaatttagaataggatttcataactttatacatattatatatatgaattccaaagtcaaataactacttattttgtatgcatatgcccaaaagttgtattgtatatatcttttaggagcctcttagataaatattttcagatattatattcattaattattttagtttcgaaagtcctttttatgctaattatgttttttttttcgaactttttgacatatattaataattagagttgaagacttttgtctaattttattaataaaaacatgacgtggatgaaagctcataacacacgaattggtatacatgtcaaagtttgatgtcacaatttcgtagatgttaaagtttagagaatataattttatacatggataaatcgtcgtgttattagtaaaattgaacagacattgaattcaatattctcaatgttacatggagaatttttaacaatctaaaatattcacaagtataatttaatgcatgttaaaattcaaaatcaaaaaactctaattagccattaaaaatatacatattttacttatttaaatataaaaagaggtatattacatatgatattaatttaataattagttcatctattttaaataaaaaaaatcaagtaaaaaagatattgtagaaaaaaaatgttcattttatttca

SEQ ID NO: 371547 - DNA, 503 bp, Cannabis indica
caactaaaaattaataaaaggagacgattgtggagattggaaagtttaaccataatttttccagtctaagaatttaatcgtgcaaaatttaagagttcaaagaatttgatcgtaaattacctatagacaataataaataatagaaattattataataaaattaaaagatataatatttttaaagtgtgtaaacaaaattgtatatgtaattatgtaggtcccaacaaaaaaagaaaatgtatatgtaggtaaacacttaccaaaaataaaacaggtatacatatttgaatatagagagtaaagacacagtgaatttaaaaatttaaacatatttaataaattaaatagaattaataattggatgagaatctgttttctcatggcaatttagcactaaatcaattcttattactcttaagggaattttgtggtccctacttatttttttatatttaggtagttttaatattaattttttatatgcgctaaaaaattgtattcat

SEQ ID NO: 371548 - DNA, 800 bp, Cannabis indica
caccacctccaggtttcacatcgagcacaaaaggtatttttattttatcagaattactggtctgatttatctttgaaaatggctgattgaatacttgttcagcgtgaaagttgcctaattatcatgtttgttagatcagagattttcgttaatagtgtgaataataggattctaggattaacatttgaaacttaatttaaattgaatttcactcgacagccatttctttcatttaaaataatactaatttcacgatcaaatagtattgaaaataaaaatataagcaatgatataatgatttaacttcttaattagcataaagaaagtcttaactctttaaaccatctattgctgaaaaaaaaaattaataaataaaaagaaaatctcaaccttctatgaaatggttttttccttttttcaaaagccatctatgaaaaggctttggttaattttaataagcttatttttcttcttgaatttttataacaagcttcttttaaagcaaaaattattaaaaagttcttctattaaatttgggtctaactcaaagtaataatatgtgactactgactacttactttccttacaaataaatatgtgactacttatgagaggttttatgttccaattttttttttccaacctttttgttaagtctttatttgtcttattgtccgaagatcaggcatgcatatggctagtagcaagataacgttattatccttaattgcttgcctgtttgtatctttcctatgtttataatatatgatattttggctttgatgtagacaaaaattaac

SEQ ID NO: 371549 - DNA, 515 bp, Cannabis indica
agctataactattagtttggggaacaaatttaggtataaaaaatgacatagaaaatcaaaatttcccaatgtatttatgaaattaagaagggaaatttaaaaaactatccataaaacactctaaaattatttttctaaatctatatttattaaaattgcccatatataactacatttaatttttttttcccataatactcctctcatttaaaaaacaaatcccaaacaaatcccatttaattgctcatatgcatatgtatatcgtatgcaaattccccacctaagacagctaatcacaaggcagtactagagacgaccacccaccaccatggctttagcacccgaccacgcccgaccaccgacgaccaccctccaccaccggcagcagcccccgaccacgcacgaccactgtccgatcacgcacaatcaccacccgcagtcgcgaatatgtcgaaggttagttttttctcggtcggttttgggttttttcaaatctgaggttgaagacatcggac

SEQ ID NO: 371550 - DNA, 774 bp, Cannabis indica
ttagctattcagatattctttgaaaatatattttaaattgaaaattagttagttttagatcaacttaaattgagatatttttcaaattaagatgattaattcaagatacttaattttttatttaattaaatttttaaaaattatttaagttgaaaatttagttattttagaacaatttaaattagatatttttaggtatttattttattatattttaattaatttcgaaattatatataatattttatatatagattttgatatacaactgaattaaagctgaaaattaattttttaattaattttagaccaacttaaattaagtaattttcattattaaaatacatagattaaaataaataattaaataataatgtattttttttttaaataatgagctttaaatataagaacattggattttcattgctggtcctacatggttaattgtttcaatgggacctcgagatgctagacttcgttccccttatgaaaggttatccattgaagcattaacaccgtaagatcttgagtgataagtattttgcatgttttcttttctattagactctcccctacagtgactacttagaaataaatttacaaatatgaaacaatggtagaagctcataaaataagaataacattcactctcgcctactggaacaacaatggatttttattttgatcatataaaagattgctaatgtggtgtctattttagatgagctgacaacactattcaactaatgttatatttgactctcgcctacc

SEQ ID NO: 371551 - DNA, 643 bp, Cannabis indica
gacacggcaaaatcttatatatgccgtgattttgttccaaggagacatcaattgtgccactattttaaagttttgtcttaagtgtgcactgtagatcactgctattgtttttttataatttaattaatatttatatataattatataattataattataaaattaagaattattttttggaaaattttacaatatacatttttaaaagtgatgtactaatctactcctatttgtttcggcatctgataaatttttttagactattttttatatagtagtgtatattgtagttatttaaaatattttgcaaaattttgaaaaaaattagaaaaatttaatacgccaaaaactgcaattctttaaaagtggtgcactgatatactcctacttgtttcgacattcgagagatttatttagtctttttttatggtcgtgtacattatagatatttaagacatcttgcaaaatttcaaaaaatttaacacgtcgaaaataaaattcaaactttctgtcgtatgactcttttaaatataataattgtggcaatttttgttaattaatatgaaattaatttttttattttattaaaaattaatataataataaggaatatttttttagtataatttttagtgttgtggtt

SEQ ID NO: 371552 - DNA, 623 bp, Cannabis indica
atttttacttttttcttaatagtataaactagtgttgtaaatataggttgggattttcgatacaacacgagctcaggaggcacgagcatgacctaatacgaaaaaatatgggcttaaatatgacaccacgacataaaaaaatatagatttaagcacgacacaacagaaaaaaataaacttaaacaaaacacgacacgtgagcacgaacagactaactcaaaaacacaacttattaaaaattcttataataatactacatatgtatttactaatgaatatttaaattataattatttgaatttattgtttatatggttatatgttaagtattatagtaaaattatacaaaaacaatctaaactataaaacatacatataattttgtgattaatttattaattgtaaaaaaaaaaactaataaaatataaaatccaatttcgagcacatattagaaaacgaactaacacatgtaaaaaaaaaacaagtcggcataagtaaagaacgatacgagtccaagcatagtacgaaaatatgggcttacaattgggataagttgaggaatacctcttctttgtatcatttgataaaaaatacccttatattatatttcattgaaacatacc

SEQ ID NO: 371553 - DNA, 401 bp, Cannabis indica
atatccatatattctccacccctatcagtttgtaagatctttaaagttttacccaatttgttttgagccaatgctagaaattcctgaaacttctcaaacgtttcagatttcttatgcataagttaaatatgatcatttctagagtaattctcgatgaaggtgacaaagtactcataagtacctatagctttgatattcagtggtccacaaacatctgaatgcactaaccctaagggttccttggcacgctctccctttgcaaagaaagaacgttttgtcatttttccttctaggcaagattcacaaactggtaattcacctaaggtgacatttttcaatggaccacctttggggtcttagaacataaagcccttgttccatgttagcaacacatatatgaa

SEQ ID NO: 371554 - DNA, 825 bp, Cannabis indica
gttgaatgagatttcgcccagttagactgtcaaaggtagatacgagtccgtacgcaccggcgagtactgcagccacagctacggcgtcctgcgtcaaatcagcgccggcaacaatcggtaggccgcgacacacggggaaggaagcgtgtcggggaacattcggagcacggtagagaaactggaggcgaagtggggacgaaggctccagcgagaggagggcgggaaaaggcggggtacgaaggaattcgacggcggaggtacggaggaaggggggttggcgcacgataaatggtggagtgtaggttaagagggtcatggtagcagaacaatgctctgtgagtttagcaggtaccttcttctctgtgagttatcaattcaaaaaaattgtcgagtccattccaaaaacgcattgtaaattgtaaaaatgttttattcaggtttttttttttttttttttgtgtgtgtaactgaaaacatttgtggttgttgtataataatagaatatttacacaaaccaactcaaattcaaaacttttcttattttaccttttttttcttttatgttctgatatattgtttctctgtgtcagtacaaggtgtgatgcgcgtggccccaattgcttgtggtggaaagaggacgcgcgtttggaacttattttgttctttttaatgaaatcattgaaatgtatcttttgaccatgttacgtttgtttttagaaattttatttgcacctaatattacaaaataattaatttaaattaatttttaaaaaattacttttaatttttttttgaatttttttttcacattattttcatttaata

SEQ ID NO: 371555 - DNA, 503 bp, Cannabis indica
agattctagatcgaggaggatttatatcattttgggatagaatgttggaaatatagtaatatgcgccattcaatttcataagagaaattagagtgacatcgtaaggagatgatttttaaaccattcatccaatgatatactatgtaagcaaattcgaaatgaatatgctaagaggaaaaattaggataatttcgatttaaaaaagaatccaacaatgtctcggtaggtgagtgtcaaagttattgttattttacacgaaatttacaactacaattaataacagaaaacaacatagttcaatataaattcacacacaattcagaaattatcatagcatttagcaaataacaaagacatgtgaaaatacaaactatcatatcttaaataatatccaaggtttctaacaaactgatacagtgtcccggtaggcaagagtcaaagtaatcattcattgaatagagttgttagctcatctaaaatggacatcattctagcaacctttt

SEQ ID NO: 371556 - DNA, 508 bp, Cannabis indica
atttttgtgactaatactttttgtcacggcataggaataataatttataattagtcataactttttcacttttagtcacaagttttgttgtgactaaaagtaagattttttataatgaaaaacattatagccacagttataaattgaagtcttttttttaggggactaaggataagtcaaattaatagcttactagtagactagtaagatcaacaacaaacatctcgggaacaacaaagtacaggaaaaacaagacaagagactttgttagtggaacaaaaaagtataaaggagttccacttaaggcacataaatagtacaatttgaagagcttacttagtttatgcaaaaataatccaaaaccttattatagatgaccataaacgagacgaatgtccaagcaccactacaaaaaactacaacttttagtgacaactttttagttgcaacataatttttttgtgattaaatgtgacttttagtcacaacaaaatattacttgtgacta

SEQ ID NO: 371557 - DNA, 425 bp, Cannabis indica
gtgaattccttgcgaattggcccgaccgccggaatggggaagtgaaggtgcgtggaaagaaagttcctgctactgctgatgcatttaatgtgatgttctctgtccaagattacactagggaagaacaacgcctccgaattattgaggaggaagagcagtttgatatggtggatgtggcggagacagtgggatttcctgggttgaggttccatgacaatgatggcaccgaggggtcgccaaatattctataccggtgtgagctgaacccggtggcaaaaacatggctgtactttgtgagtgctcggttagtgccaaacaagcatttttccgatgtccaaatggatcgcctgaaatatgtgtacgccataatgaaggggtacaacattaacattggacaagtcataaggcaaagcattgagcaaatc

SEQ ID NO: 371558 - DNA, 730 bp, Cannabis indica
aaaacaataccaaacatgctcctggtctctctctagatctcacattgtaacaccccttttcaaacttctattgggccttcccctatgaatttaggactcttatacattctaattttggctgcttcttggaataataatggggccctacaaatcaacacaagtgtttccaatatgcttcccctattatatagctaggtgtccataaaagttaataccacatatagttttacataaaaatattacataaaatacaattcaatataatacaatacaatacaatacgacctaatacggcgttccaaacgagccctttacaatctattcaatattcttttttcatatttgtttgaaagggattctttcatctctctagggtaaatgtatattgtttcaactaagtatttaggatttaaattacattttggtctatttttaataattaccacacaatgaaataattgttattgccatttttttcaacttgactatttctttttgcaggttcacttttgactattatcatacgcgttttttatttagtatttattttttccgaataaatattgcttattaatagatatgcaacttgagaattatcttatctcttcatcctatgtgtcataaatgagtacacatggaaaatgttattccaattacttcagtggaaattgagaagcgatagagatagtgtactgtacttggtaaacttaattagctaacactatcatat

SEQ ID NO: 371559 - DNA, 500 bp, Cannabis indica
aaattaaattaattatttctgatattagatttgaaaattgaaaaataaaaatctaaatacaaaactacacaaaaaatcggaagttaattctatgaaatagcatgaaaaatcgaagaaaaacaaaaaaaatgcgagctgtacggatagtatgttgcgcatactgcccgcgcgcgcaggtggaagtgcacaaccgagaaaactcggcacagggggaatctgcagcacgtccgcgcgcggagaaggggttacagacacctctgggcgtgttgctcggacaaaaccttgtccgaacacgcgtctaactgaggatcactcggttccgcgcgcgtgggtgagtgcatcatcccgatatttttttcgaaacttcgaaaaatcataactaattcaaattaaatcgaaattgagttctgtgaaaaggtaaattgcttaattttttccatactatccaacaaaaataattctagaaacagaatttcaattattttttacgaaaattcaca

SEQ ID NO: 371560 - DNA, 472 bp, Cannabis indica
agtcagaggtgaaactatgtgtgttgtggcaattgcgagagaccataacgaatcagttttgtgggtggcggcaaaaatgctacacttcactgaaccactcactggaaaagctgcagcctatcttttagccatggagacggcggtctctttgcatcatccttttgtgttggtggagagtgattcagagattgttatcaaaaacttaaaaagggatgactctatttgggggattgagaactatgtgcgacattgtaagctcctctttactattatgactaattataatttttcttgtatttctagaaattataactatgcggcccataatgtggccaaatgggcgtttgccaacaatgttacgggcatagtagagatatctactatacctattaatatcttttgtaatgaccatgaggtctaacttcagttttatttataaacgcattcttcaaaaaaaaagagagagagagag

SEQ ID NO: 371561 - DNA, 825 bp, Cannabis indica
ttaagtatcttgaataaattaacttaaatattaattttctatttaattaaatacatctagaaaaaatacaaaatagtctacttagaaaataaatatctatatattttataaactaattattaactttctaatataatatattttagtctgtttattttaataaactattaatgaaaagattacttgatttaagttgatctataattaaggaaataattaattttcaaatttaatctaattttcaaaatttcgaaatatctacataaaaaatgtatttcaaaaattatattcaaatgattattaaaataaaataaaatatattttgaaaattattctaatttaagttgatctaaaattaaaaaaatttcaacttaaatataatgttctatttaattaaatgtattaaaaatagaaataaataattaaatattttgaataaaatcaagttaattattaattctagtttaatatctaagaaaaatattccaatttaagttggtctaaaattaataaaattaattttcaacttaaatatatttttctacttaattaaatatttgaaaatataagttagttactagaaattactatctagaatttatttcattaaactaagtgtgcttttctaaattaattttaaaaataatctaatgaaaaattaatttagatttattttaaaattaattatgttactaatcaacattaattaggttaaactaatataattaacctaaatacaattatttaaataaggtaaaatagaaccttcacagttgcgatagttcatgtgagagagagttgggttcgagtatgtcgtacccacta

SEQ ID NO: 371562 - DNA, 690 bp, Cannabis indica
caagcacggaaaagatgaaatcgaattgggtaggatgaatcggaaggaggaaaagtaaataaaatgagaaaagaagaataataaacatacctgtgttagcgtatgaaaagggttataggcgagtgtggaagaagaaaaagaggattagaaaagagagagtgcggaaggaaggaaggaagaagttgcaattcaagtgtaggtttagctttgtcttgttttatatcagagtcacaaactcacacacacctctcctgaggtaggttccttgtcgaatatggacacgaccaacttctaatagaattagaagggaataccactgcctatattttaggcaacttttcttttcattaaccaaaaattacacaaaacaaacatatacatatttaataaggggtgattctacaatgaattggaatgatactcttgatttgtatttaaaacaacttccaaaattgtgagaaattctgaataatttataatatgaaaaataatgtttaaacagtctattttacacgcgtataaaataaaataatcacgcgtgttttcggcgtgttaaatttttttaaatttcttaaaactttacaggatgccttaaataactataacgtacatgaccatgagaaaaaatttgactaaaaaattatttcagatgctaaaacaaataatatatccattttaagaaggtacatt

SEQ ID NO: 371563 - DNA, 707 bp, Cannabis indica
aaaattatatattatttttaaaatattattaattaaataatagttacttaaattgattttaagagaaacaatatgacaataaaattatatattatttttaaattactagaaaatttatataaatattttaaaaaattaatattcatattaaattagtgattaaattagtgtttaacataaacaattttacattattcaactatttttattttaatattttaattatttattaaataaaaaatatgataaattattttattatatatttatgatataaacttgattatattggatatattattttattttattatataatttaattatttatattatttatatttattttaactatgaattattcatttttatttatttattattatatctttttattttaatttaagttttttttaaaagaaaataaataaaagggatactggcggctaaatcccctgaactttacagtttgtaacacttaaccacaaaaactgaaattttggcggctaaactacctaaaccctggttccgttttgctctacacacctccgtccaaaaatcacaattaagtgccacggtggactgtccacgtgtatacacttgtacacgtggtaagtttttagtagtccatgtaatattaattttaaaaaataattataaatattaaaataaattaaaaatcagaatttttttttcttttttacttt

SEQ ID NO: 371564 - DNA, 621 bp, Cannabis indica
aaaaaaaatgtcattggtaatttagtttacaaaaaacttttgttattacaaaataatctattgaacctaattttttttctaaaaaccaaaacttttaggtaaagaactaaagaaaaataacaatacaataagcaatgtgtacaatatatgcaaattaaccacctaggaatgattttaattgacttatgcaaattaacaaccacaataattcatgtaataacaattcaaagcaaaaatcaaactactattaactatatagagcctttctcaaacatgatatattgaggattaataaaactatataaagattaataaacagagatgattactctttgggaattgcagagtaaacagaaaaagcaatataaagattaattaaactagcagtggtacttcactatgttttttaggtgaactaaagacaatataaatatatttattcaattaaaactaagtaaagacaatacactaatatcgaaaaccatggacaagaaaatatgcaatgtgattctttagaaaaacagtcatgtcgtgccacaagagaggcatataaagattaatgaaactagtattgagattgtaatattttttttttatttgtttgtctttccttgaggaaaa

SEQ ID NO: 371565 - DNA, 1106 bp, Cannabis indica
cctggacacttattaatcggctgcatgatgtctcccctcttgaaccttggatgttggttggtgatctaaatgagattttttctcacacgcataaaaatggggggcctcttaggagtgacaatcacatgagtgcttttcgaactactcttgaccaatgtaatttgcatgaattgcctttccatggggatgattttacttgggaaaaaataggaaaaatccagctgccttgaaagagagactagattggtgttttgtgaatgaagtttggttgaataatttaagttcacctgaaatcagccaccttgattactatggatctgatcacagagccattttagttgacatcaacttctcaaaccagatgccacttgagaaaagacgatcttgttttcgttttgaaagactttggttaaacaatcctgaaagttcggacattattatatctgtcttcaacaatgtgctcacaaccttcagcgatggcacataggaaaatttggcagcatgaagagagatattaaggaagcacaatcaacagttcaacgtctgcataatgttgtccaacctggtcctgatcattctaaagatgtgttctcggctgaagctattttagatgacctgttagccaatgaagaacaatattggcagcagagatcaagggttgattggcttaaatcgggagatcgaaacaccaaatttttccatgccaaagcctcggctaggaaatcaaataaccatatcagcaacttacaaaccgaaagtggagtatatgttcattctcgtgaagaaattgctggtgttgttactcagtatttcacacaacttttcactgctggtgcggatgaccattgggcattatcacatgttttgtcaacaattcctactacaataacagatgaacataatgcctacttgctccaagatttttctaaggatgatgttcatatggctttgaaatcaatgggaggggataaaagtctaggattagatggtatgtctgccatgttctaccaacataattggaatattgttggctctttggttacagaagttgttttggaagtcttaaataatggtgctaactgttagaaattattttactaggatct

SEQ ID NO: 371566 - DNA, 827 bp, Cannabis indica
ttctcagtcactcccttaaccataaaggtaatgaatgcattacatttttaatattattatatactactaaaagtcttcataaagaatataatatttttatatactttaatttaatactgatatatgttattattatttttaaaaggttcaaacaatgttaaaaataaaaaaaatggcatttttaaaaattaaatatcatttcagcccataaattaaatattcgggcttagcccaataggaccggctcgaacccgagtacgcccaacctgaaaaagcccgacctgatacccaacgcacctgaacacccgaaaaccgtgttcggttgtgcatttccaagacccgaagcccgaaaacccgaacccgactacccgaaaacccgacccgtgtgcacccctatgagctggtctgtcacttggtccccgtttgagtgtcggggtctttgttggcttgggtgctgacttggccttccctttaatgaattgtactgccaagtgccacacattctgtccacgtaagcatgccacgtcatgaggacaaaaaattaggttaacaagcaccattggtgcctttatagcaatgctacataaaaaagaaatagctaaaaaggtgggtctaacactacatagaaatattatatcattattggtataattaagtattatgtctcacataattttttttttttcattaaagcgtttaaatatacaataaattgcataatttaagataccatctgaggatccccaacagacaacacacatgcaccctcccatacttcttacggccacttgagttagattatttagattattaaatatatatatata

SEQ ID NO: 371567 - DNA, 803 bp, Cannabis indica
gctgacattcaaatgactgctcatgctcgatatcaaggtcattggtactgagttacctgtcgagacatcccaaaacgctatatttaaaaagtgtttaaatacatgatcattttaacccagtaaaagcagattaatcagagctagtgtgattttcatatattaaccgcatttatactacgtgatacgtaatcaaaccccacgatttcaagggataaatgttgtaaagattacgatcaactctgtaattaactgcctactatgtgattataaatagaggcaagttagattaaaaaagggacaaaaaaatcataagagaaaaggccctaaaaaaaccataaaaaatataataagatttactcgtggactatgtagaattataacagcaaaaccaagtaaaaacttctttgtgttcaaattttttcctttactgtttttatttttttgtgtgagattatcactcttaggctcatatttggttaacgaaaatttgtgttaacataagtataccttatcaccgattatcatgtcaatttaaatccaatgaattgacaaatcatgggaattaaacttttgaacttataatcatgattatattccactatgttgatgactctataatcatgtacaaatatatacatatttatatactagataaattttacatgccaagtcacgtatgttaattttattttagttttagttttttttttaattatcatattttaaaattaataatattcaatgtagaaataatcattgaaatttgaaagcataatagtgatttaaataaaaacaaaaattac

SEQ ID NO: 371568 - DNA, 628 bp, Cannabis indica
tcggagttcggttctaggtttaggtccacgtcctagtcacggtcctaatcttgttcgatagtcctggtcttacggttcttgtttaagctctattttcgggtcctaggttttggtcagcggccgtgtttgggtcctggtgtgagtcccaaatctagttcgggaccaagattggggtgtggttctaggtcctggcccaaagtttgtgtcccgagtctggttccatgtttgggtctgagttcgggtccaggttggacatcgagtgtaggtttgggttgggatctaggtacaggtttcggttcgggtctaggtcagggttggagtttgggtgctagttcggttacggttccaagtctaggtcgaggtctgattacggttccaggtccaagtccaagtcgtggttccgaacctgttcctaagtcccagtctacttccagtgtcggttctaattttggctcacaaggtacgggttcgggtccaggttgcgatttggggctgggttgaggtctgcgtctagtttcgggtcccagtctaggttcgagttcgaggctgggtcccagatccaaacaccgactacaggttcggtccaagccccaggtctagatctagatcctgatctcgggtctcggtc

SEQ ID NO: 371569 - DNA, 1048 bp, Cannabis indica
tgcgttcttctttgctacccgtaagagtgggtaacgatgcatatttagaaccttattatcctaacagatttgctcgccagtttggtttcgatcaaggtgtgccctcagataagttttgtctgagtattcctaagaggaggcagtgtggaataagcaaaatcgctaaagcttgggttttaatattaaggagaaatactggcatacactttcacattcctaggactctccgtatgggtcaatgcacgtggtggtactgtcgttggtgggtgaggagttgcattccatacttggggagatctgtgaaggccatccattcaacattgtccaagcaaccattcaaagaagaggagtcaaattatgtaatcaaagacattcgcttactttactccaaccctgaagaagtttttgagagatgtcctccccaacataatgaatttactggcgccaactatgctgatactgagtcggacattggatcagaaaatgtccattccttagtcccacatttcaaacaaaagaaacgtgcgaagcatgacgagtctagtcgtattgaagatgtcttcttcccactaactcagagttcagaaatgccaccatctgatacttgctttggagcttctagctctagggatgaacaacttatcgactttgatgggtctgatgattatgttaacaaaggatttgacagtgaggcattgcctgcagagccaaccattccaccagaactgattgtctcagcaaagacgggtattccatcatcacttgttccttcagatttgcttattcctcgaccgaacccagtgttgacagtgtcagcttcagcaatcaccaactcagacttgaatgagcataccaaaaagtttgtgattgaatgcatgaaagacattcttcatttgtcatcttctcctttgaccacatcagacatttcaaaacatcgtgctgacgtgagtatgcaactcgacgtgttgagtaccctttgcgggcattataaatgtggtttagcagaggttgcatggttcactgactctgtcaatgatttgctcaaggc

SEQ ID NO: 371570 - DNA, 685 bp, Cannabis indica
ggaatgtagcaatccagctcgcccaggtacccgtcctggttgagagttcgaaggcgcgcctccgtaatcttggacggaggacttacccacctggcgcctaaggcaccctgcctcctatgaggaaccgccgtagcaagctcctcactgacgaagtccacgccctcaaccaggacgtctctgtcagcatcgagtggctgtccagcctcgttgtactccccaaagtttgggggttcaacctctccctccgcctcagaaggactgcccggacgcgcatcgtctagctcctcaacctcctggacctcagcgtccccttcgcgatcctcctccatcgggacggtcgaatcctgttcggcgtcgggcagagtggcaagccgagccacttgaggatcagaagcgtcggccagacgtgtggttttctttgtacaagccatcatcctctggctgggtacaagatcataagaatgtccttcgctagaaggaggactagcacaaagacgaggatggttttcgtgcagaagttgaagcagatcctggtggatttgatgcccgagttcccaagactcacctgagttcatctacaaaaaacaacacacaagatgagtgttgggtggaatatcaaatcgataaacaagcaaatatgccgaccaggagtactctacagattaaagaacgactatgtctaaag

SEQ ID NO: 371571 - DNA, 770 bp, Cannabis indica
tcaatataagtagtttgtcctctaattattagttcataattagagtttaattagagttggttaaaataccgtttacccttctaattatctcttcattctttatgtaccattaattcaatgagaacaattaatctataacttattatagattcagatccaattgttagcactctcacaattaacactataagggaactaatattcaatccgttatgaaagcttagatcattctactattgtataacatgttctcagtcactcatgttattaagctcccaaaataaaagctgtaagaatcatcttatttgagaaactttaacgagtgaatcaaagaactcaatgaacacaaataagagttcatgtatacttaggatttgggttgatcatcattgtgatatgaataactctttcatgataaacgacacattaataaaagatatttattatatatcggtccagtcatgtataatctaattatacacagtacctttactacatgtccatctacatatgtgatccgaatcaaaatcacacacactagaagtatagtgtatagtaaaccgtacttagcagttctatattaaagattctccttactttaatacactaccggcttattttattcatattgtataatcttaattctcttatacattcttacaaaattataccttctccatatgaataagtaatttttagatttttaataattatactcttataattaaaatatatttatcttataattatatttcatatattttctaata

SEQ ID NO: 371572 - DNA, 294 bp, Cannabis indica
gtgatacgtcgaaggggaaggctcccatgctttctccacaaggcggtcatgatgaagaagatgaactattctcgaaaaaggtcatggattcgatccctaaatcgctaaaatggatggttgttgaatttgtgaaactctaagataaacgtgatataatcacgataccagtgccccaaggattcataacactgcgtacccagatcacgttatctagagagaatttgcagtcggttgcattgtgtgacttcatctaggggtgagcataaaattcaaaaaaactgaaaaaaaaaaaaa

SEQ ID NO: 371573 - DNA, 621 bp, Cannabis indica
tttttgtgtcgtgtttggattcgtgtcgtgatttgctcgtacgactcatattttttaaacatgtcagcccatttttatatttggactaaaattcttgttttactttttcatatttttgtttataattactaaattatatgtatatttaaaagctttagatatattcatataacttttaaataatattttgcagattatcatttaaaaaaattattaacatcattataatttaaatatttacttaatatcacgtcttataaataaattattatataattttaattttcaatattttaatagttttaatcatagaattataatgtttaatattatatttaagttttattattcttttgggtaaataccattttgaacttaatttgtgttttgcaaaagttaccgattgaaccctctgttttgttaaatgaaaaaatagaccatgtaatttctaaaatggtaaaaataaaatcctgagcttaatttttgtataactttttttagttataaccaacttgaagacagttcctaacacgaacagatacggaaaatgtaaacagttttgtcataacacatttagatcaaattattattcaattttattttgtacaaaaaatcagttca

SEQ ID NO: 371574 - DNA, 745 bp, Cannabis indica
tttctgacttcttgagttttgacttttcttgacatggtgttctttaatctgttgggactcctagtcggcatattttctgtttttcatttgatactcgtccaacacccatcttgtgtgctgcttttgtagatgaacccaggtgagtcttgggagcccgagcatcaaatcgacctggagctgcttcaacttctgcacgaagttcaccctcgtcttcgtgctaactctccttctagagaatgaaattcttttgattccgtacccagccataggatgatggctcgtacgaagaaaaccacgcgtctggttgacgcttctgaccctcaagttgctcggctcgccactttgcccgacgccgaacatgatttggcagtcccaatggaggaggaccgtgaaggggacgctgaaatccaggaggttggggagctggacaaggcgcgtccgggcagtcctcccgctgctgagggagaggaagagattggaccccctaattttgcggagtacaatgaggttgggcaaccagtcgatgctgacgggaacatcctggttgagggcgttgactacgtcagtgaggagcttgctgaggcggttcctcacaggaggcagggtgccatgggtaccagtgggtaagtcctccgtccaagatttcggaggcacgcctccgcactctcgaccaggacagatacctgggcgagctggactgttacattcccgcccacgacaatcgtgccacaaaccctgataaggg

SEQ ID NO: 371575 - DNA, 1087 bp, Cannabis indica
ataactcacacttttgagacactctttggaatacttttacttgtgcactagagttatcactaactcactacacaccatcaaaggacctactcccctatttatagtactcaagggtggtggatcaatgtgctagaatgttctaataaattgtcaaacctaaatttttcttaaattttttttgtgaatattaattctatataattttagataattttataattttactagaataatagaaaattttagatatttgtaaagcaggcgttcttcttttaatatattatagataaaattatgacttcattaatatagtttttgctactaataagaatcattttatatcacattgtattgaacaataaaaaattaaaagaaattatattatacaatactaaataaaatttatttatttgttaagataaatataatagtgataattataaatttttaattttatttttaccataattcaaatagttgaaattaagttttttttttttaaaaaaaaaattaaatataatctaatgaatttattaataacatatataataaaaaaataattgtaaaatacattcagagattaaaaaaataaaccgtctatatatttttatattcagattaaagttcacatcttattatacttattgttcaatttacaatcaaatagaatagtaatgaaataaaaataaaatagaaaaaaaattatttcatttctttatttgattgcattttaaaacattaaaaaatacataaaatagaaagaaaattaatatttttttatatattttaaattttattccattttatttctatttttatctatttattttcgttgttttttaaaaaaaaaataaaaataaaaataaaaatgatgtatttacaacaaccataatacagctaattaaaatagagacattttactgatccacatatttgggactttttttcttccaaactctttggtatttgttattcatcctcgttatgttagagttggaccataaatatcttatatttatattttagcccctaataagaatgctctcatctcatactttgtcaaaataactatattaaaaaaaaaaaa

SEQ ID NO: 371576 - DNA, 789 bp, Cannabis indica
ttatttttttcaaccgatggaacaattccggcctataaaatgtaaaacaaaaaaaatatttagataaaaaaattaagtataaaaactcaaattttcataatactactcttttaaaaatatatccatatatattattattattttgctggaatattctatgtgaattagttttttttaaaaaaaaaaaaataattattttgaggcttttttcatttttgattggttatgaattttatttctttttatccaagtttagctcctaggatagtgtctatagtttagttaaaaagtatcacccacttgggattttcttattcttttgggactactctaatagatcgatttgtttatttgggatatttcctaaaacctgtaaaaaaaattgtcggtactaaatcctgtactatattcaaataagatgcaacatttcatttgtcatatccttttcaaaatttattatatattaaagaagtcaccctaatgtattaatatttctaaaaggtttaaaatcatgtaaagacataaatcacttgaaaatcttatggctgaaacaaaaacgcattcggcccgtgatgtttggtttattgtaatggtaatcgtaatggtaatgaataggtcaattacattgtttgctttttttttaacttttgtaattcatattacaatgtaggtggtgtttgctttgtgtaatgtaattgaaatggtaattgtaatatgaatagtaatgtaatggaataagaattgaattaggaatggtattatgatatttagtttaactctgtaatgaac

SEQ ID NO: 371577 - DNA, 606 bp, Cannabis indica
actaacaactctaagaacataaataacactcttgagatcgaacctaaccatattaggattaagatcttttgatataagatcaaccagtgatattaacttagaaagatacaacagtttgtttataatatctttaccaagatcaatatcagtcacagtccaatgtacagtctatacaattgatactagcatactttacctatgccctgaaaagaacataacacttatccaaggtgtaagtaaactttatcgctgactatcacatcagtgtaaatccagtgcacggatgaatcatgggacataaacttttgaagcatataatcacaattaccctccactgtgttgacatcactgtaattttgaataactatatgttctggatttaacagaaattgtatattcaaccatacacatgaaaaactacatgtaaacataaatgacttctaatcttttattgataaaaagaagattatattgaaatgggttttatttaaggcataaaatcccaacaaactcccgcttgaactaacataaaacaagaagtgcatttcaatcaatccattatcttgatatccatatcaaatttagtgtatttgactaaatccaaat

SEQ ID NO: 371578 - DNA, 445 bp, Cannabis indica
cataaaacccaacaaaaacatctagaaattatcgaaccaccttgatgtcttctggccgaacagagtcaggccgagtggtatccaataccacggccagaaaccctagacatccctcttgtaacaattccctatttgttagcactgaaatcactgggatccgagatcccagaactgaaccgacaaaaacaaacggttcttcaccttcaggttggaagattaccatcttcctcttacagtcaatactggctgagtacttggacaagaaatccattcccagaataatatcaaaatccactaaattcatctctatcaaatcagcactcaactctctatcttctattctgatcggcatagacctaatccaccttttgaagataactaactctccgccaggcagtagggttccaaaccctaattcatagctatcatgtggtctatccaattt

SEQ ID NO: 371579 - DNA, 533 bp, Cannabis indica
tttgtcctttagtggacttcatgttgtgaaaaatatgtgattatgtgggtttgtgttggctgaaataaaaggttaaaaaattatattttcttttatcatttcattcaaaatttaaaaattagaaaaagtaagagttttcctctcaaagctctctctctcttttcggccctccttgagcagcaaggaagtggatttcctttgtgattcaagtgatttccatcaagtttagagtaattctagtagaggtaatccttgttctagcttctcttctatgtttcttggaatttttggaagaaaataatgatttgcatgcttagtttgggttgttgttgttgctgtgattttatgttgtttctgaggtttaaagcatgcttgtttgagtggaatgaaactgattttgatgcatgtttggttggttttaaactagtttagaattttggctcaaaaactatagttttcaaagaaaaatgaagaatctgttgctgcacttgttgttgatgcttgctgttgttttctgagattattatatgcat

SEQ ID NO: 371580 - DNA, 538 bp, Cannabis indica
acaaatatggatataaattcaaatttcccttttgattatattattatagctgaacatcgtgggccaaatgtacaaacatttcaaattaccattaatttccattggccaaagtctaacaataatggaattgctattttttaaaacaatatattttagaataaatatgatttttgccttgaaattggtcctgagaatatataggcctaaaacgaattagaatttaggaccctcaaatatatataaaaaaaaaatattaaaaaaaagtattatgaatttgaaacttggatattatgtaatatgtcatacacttcaactaactaagttataactatttgttgtttacaatatacttaattttacttaaataaaaatgtaatgaaattttttatttttattttgagcttccgaaaagtgtggacccgaggcacaggcttagcctgcctatgtctagagtcgaccctgcctgaaccataacctacatagaggtgaggcgagagtagagatggaaatttatagatgggtaaccgcggggacccac

SEQ ID NO: 371581 - DNA, 612 bp, Cannabis indica
gaagaatccaaattcaagagaatgagaatcgagctctaaacattgtgatgctctgctacaaaaaggatacaagggttagagatctgagcggaaggagccattaaatttcgctgcaaccactataaggtttctcataccttttatgtgtttatttcatatcgttttataagttcatgtttaggatgttaaaaacatacttgttagtaaatctaggtcctggtaaaatatattccaacaatttcaagtatcaatgaactacaattcaacaattatatcaaattgatatgataaaacctaaattggatcctaaaactcaaaatctcctacaccaaacttagcagcccttaaaatcattcaactcaagctccaacttattccaatgtaggcctagaatcaaacacataccaatttcatcctacagccacgaaattacccaatccctagtctaaacccaactcaaaacttaaaattctcaatccacatagttaagaacttacctcaaatgcctttaggttatcttaaggagtgatttcagctaggattgggtaaattgcagagaaaaatcctccaaccttggctggttccaagcttgcacgagagagagagagagag

SEQ ID NO: 371582 - DNA, 909 bp, Cannabis indica
gtacgatattccgagcaaacactcatcttgtgtgctgtcttttgtagatgaactcaggtgagtcttgggaactcggacatcgaatcgaccaggatttgcttcaacttttgcacgaggatcatcctcgtcttcgttctagtcctccttcttcagtgaaggacattcttctggccttgtacccaaccataggatgatggctcgtacaaagaaaaccatgcgtctggctgacacaactgaccctcaagtggctcggctcgccactttgcccagcgccgaacaggatccggccatccagatggaggaggatcatgaaggggacgctgaggtccaagagatcgaggagctggaagatgtacatcctggaagtccctccgaggtggaggaagaggaagaggttgaacccccaaattacggggggtacaacgaggctggggagccagtcgatgctgacggagacgtcctggtcgagggtgtggactacgtcagtgaggagcttgctgcggcggttcctcataaaaggcaaggtgccttgggcgccaggtgggtaagtcctccgtccaagattacggaggcgcgccttcgaacccttgaccagggcggatacctgggcgagctggactgctacattcccacccacaataatcgtgccacaaaccctgacaaggggatgtgcgcttggtctggagcccatggtcagcaaggagcgttgatgcccttgcataaatacttcaaggatgtggcggatttcttcggtctctgcccgacccagttcactcctaagggcatcaagtatttgtctgccctcttcgtcctctatgcttcccaagggtggggtactccttctcctcacgaggttgcctggttcttcgatttgaagtccaccccgaaacaaggcagatcggggcactt

SEQ ID NO: 371583 - DNA, 791 bp, Cannabis indica
ggtttttgttaaagaattcgataactaattgtaaattattttttaaaccatttgttttataaaaataaacttgttaagaatgctataattgtatatataaacctataatatgcacattgttattaataataaacggtaagtttatctcaatatattcaaactcatatagtaattatctttaatgtgatgaaataatttattataagtcatacaaacatatgattttaacatttattcttagtttcgggaaaattcaaaggatcaatatatgcgttttgaaaaatttaaaggaaatattatgtaaagaaaataaatgaaaaaatataatcttaaaatagaaaaaaagaattattagttaaagtttcaatataaccttaatttttttttaaaattattttcttgaagttatcactgcagagcacttgattagacaaataagaaaaaaaaaaaaattaagcattaaatgattcaataaagttaaaccaaccatttaaagattgggaaatttgattttttattgcttacttttggttaaaattttttttcttaaactaaataataactaatatttgtaggatatgacaacttttatgatattcctaaaatatccccatttacatcaccccatttacaccatcggaccacccatcggacccatcggaccacccatcgaacccatcggaccacccatcggactaccatcggaccagatttgctaccttttttttatgtttttgttacatacaaaagtagcatcaggtgactatcggaccaccatcggaccccatcgg

SEQ ID NO: 371584 - DNA, 545 bp, Cannabis indica
taataaagttaccattttccttaaaaaaaaaaaaaaataagtgcacttaaacgaaaaaaaaaaatatattgagatgatcactctagtgactctattgttatgtatgccttttagcattatccatgaagtaataaaaattattgaaaaaatgtacaatgataaagttgaaaatagttttgttttcttttttacatttttctatattgatgaggtttataagtattcttatttatactaaaagagacttttcaagtcatccactatttactattattataaaaataatatataaagtgattgccaaaattttgtaatattaataaaaaaaaattataattattattattataattgaaaagtaattttttcaattttataacaataatgaatgtgaaatgactatcaataaatacaataattttgtaaaaataagtatgctaggaaggttgaatgtgctaataattactattactattatttagataaatagataaatgaatgtatacaatgtaaatattggttctactatcaagattatatatata

SEQ ID NO: 371585 - DNA, 894 bp, Cannabis indica
taaatcctgatgcaggaggggtaggagccctgccactccctggagtactagccgactccgacatgcatccaactgctccctcagctcgcagtgccttctccaccatctcagcataggtggtcttgtcgtcggtggtgatcataaggtcatacttgatcttcacattaagtccatccaaatacttttccttcttgttgaaatcggttggcactattcccgaggccaacctcgtcaaccgatcaaactgagttgtgtacttggtcacactcataaaattcaatgtccccataataactgttagccactcttcgacttccatgacgtccggacctcctaagaaaaaaaaaaccggaggtgtgtgctcgtggaacctttcatacaggggttccattctgtttgctgctactaccatctcggcctgagcagcaggggcgggtgccacaagaacttctggcacaggcactgcaggagcaccctgctgtctcaatctctgaatctcattatcttgttcctctatcctgactttcatttcagcaaacctagtctcccaattctaggcttcttgatcggcttgggcagcctgtggcaagttaacatcaccccgaccacgtgccctgcccctgggacctctacctcggcccctaacatttgggggaaactgatctccttgaccctgacttgacccgacaaagttgccctgactcgtggtattttgtctggcgtccatctagtctgaacagccttgaaaccccgagttggcgcatcaggtcatgatcaacgagagcttactaatgccgcttaatttggaaattaaaaaacatgcgcctattctactatcaggatactaacatgcttcctatcattcttaaaatcacccaaccggcagactggttg

SEQ ID NO: 371586 - DNA, 513 bp, Cannabis indica
gttttttgcaaataaattgatagttagaggggttttgccgcaaattactctatatattttgaaaaataaaattaaaaacttaataaaaatagtacaattactttaaaaatatgaataactataaattctacttaaacagtggtttcgaactaaaccaaccgttcttaatggtttagtttgaaaaatttattggtctggtttgatttttaatatttaaaaaactgttatactggtttagctcaaaaactataaaaattgagaccaaattaatccgtaaacacccctatcgttacccatgttataatgatctgcatttgagatgaggtgaaagttagaactttatcaattcgcctaaaaaaaatgaattaaaaagacttagaatggtttgagcgattataaatttacaacgtacaattaattttacaaattctacaagttgtatagattataaaggtcgtaaaggtacttttaagttgaaaaaaaaatatttagcactgcactaaacttcaacta

SEQ ID NO: 371587 - DNA, 595 bp, Cannabis indica
agtaccgcgtgggacacagggatagggttatggttgggtgtataggcgcctgattataacccgggatgttattatgttttatgttatacttttcttgctgagtctgttgactcacagttgctatttccatgtgtaggtaagggcaaagctaaggctgagcagatggagattatacatgtcggggcagttaggcctagagcgtacgatctttgggacatcaggacttttgctgtatagtcgctaggcgacagactattgtatatgtatagttaaacttttgtaaaggtttttgtaaacgggatctcgaaattttatatgtatgctattttatgtttttaattagataagcaaaattttaattaaccacaatttttgattacctcgttgattagcaacgagctgcacagtaagttaaaaattactctaacatgcctaaaatagttagggtgttatattttggcattgtaagtttttaacccacaaatttaaaaaacgtttgtgtattaatttaattgagatatgactaatccattgtagtatttcctcataaatctataataaaaagaaatcgttcaattctacatgcttctctttt

SEQ ID NO: 371588 - DNA, 909 bp, Cannabis indica
ttatcaaggcgtcgtgatgcctcgtttagtactttcctagctcgcgagattcgttagtatttagttttatacgcgagttataacttttgattttcctttcccgtgggataggtttcaaataaaaaattatagttgtttgatcccttcttcattcaaaaggtttgatcaaggtgttataacagttaaactccactttcgtcaaagaggtttagtcgagaacctttgaaattagaaaaaaaaaaattgaaatggcaggtttgactatgtatttctagataaatttcagttaatcatacataaatgccccttaagtaattttttaagaataaactttttatttacttattctctttattcataactgaagtttaaagtttacatcagtaatgcgagttacatcatttatttattggtagtagggtcgcaaatgttctacattccagtagttttttattagcgagtcgttgagttgagccaatttataaactccaactccaactactgcttcgatgacatatggaccctcccaattcaggttgatcactcctgcagatgcatctctcgtatttgcaaagactcgtcttagcaccaagtctccaacattgaatagtcttttcttgactttttgttgaagtatcttgtaactcggtgttggtatgctgcgttggtgatttgcgactcagttcgtttttcctcacgtagatccaaggataattttaaaatttcctggtttccttcttggttataaaactctcttctatgagtcgatatattcaccttaacaggcaccatggcttccgagccaaatgcaagcgagaaaggagtgtttcccgtagctatcttttcggtagttctatgggccccgagtacctgagttagcttgtcaacccatctacctttggcagcatc

SEQ ID NO: 371589 - DNA, 476 bp, Cannabis indica
attatttgatcaaactctcatggctttgttgccttacttagggtcgaatcactaggtgaattttcacattagttttggactcaaagctaagatcctttatagtcacgaataggatttcccttggaagctacaattcttaaggatcattctcacaatcaaattagtttttccacattcgaaataagaaaattaagtagaaattaatttttaaattttttgttatcaaataatgttaaaaaagaagtgagaatgaggtataagatttttgccctatttttgtttgttcaatattatattatgttgtttaaataatgaacggtacaatatagattcacattatataaactttagatatgtaaaagtagtttgaataatggtaggtacaatggattcgtattatataaattagttatatattttagataatagacggtacaatggattcacattatttaaacaaagttacgattatgata

SEQ ID NO: 371590 - DNA, 791 bp, Cannabis indica
ccatggatggttgacttgagttatgttggatgaagctaaaatcaagttttcttcacttgaacatctgattttgagttagagattgaattgtggtgttttgaagcttaagataagttgtattatggttgttatactgttctggaacgtttagacatgtttggagaagatttgattggttttggagctaaaaacccgagtttccatttcctgtagtaggggaaaccggttaaccggtttcacaggcatagtgaaaccagacaaccagttttggcagcaatgggggaaaaccctagttttggcttcgaaaccggtttcgctcggggtgtttttcaaaacatagaataggttatattagtgatgtttaagctattttaaactagtggagagttggaaatttgtctgattatggagctagggtttgtttggaatatggataagttgtttatcaaatttctttgttgtgacatatgacccgggatcgcttagcttgttttccactcaggtcggcccgtacggttgacttctgaacaaaggtaagaaaagtggtaagcaccatatgtgtttatttgttgacagttgaatgattatatcttgattattatcaagatcctgattaaaagtatgtttagcccaggttataacctagggattaggagtggttattaccattacgagtaattagtcttgaaacagaggttaggtttcttacttatcattcgctttatcgggtaacgatagtgacatattcagcttgttattaacagtggtaaaggggtactttatgaagtacc

SEQ ID NO: 371591 - DNA, 684 bp, Cannabis indica
gccagaagagattcatggaagcaaaatcaggtgctggttctggtaggggtactgatcccggtgaccgcaagaaaagacctagtgaatcatcaattgcagggccaaataaaaggttccagggtaaccaaggtttctgtcctggtgggaacgaaaactggcggacttttcctgaatgtccgaggtgtaaaaggcgccaccagggcgagtgtcaggccagggcctatttccactgtggggtggtgggtcacatgaagagaaattgtccacagctgctacgactagagcaaaagaagaatgatacacccactcctgctcgagtgtttgccctgactcaagctgaggctgatgctggtccttccactgtgacaggtcagctttctgttgctggtactttattgactgttctaatttattctggtgcaacacattcttatatttcaagtagaatattgagaagttgaatagacctagtgatgtgctttctagaggtttcggaaccttgctgcctactggggagttagttatctccagcaggtgggttcgatcccttccaatatttgtggaaggaagagagttatccgttgatctgatagaattgaatctggaggattttgatgttattttggggatggattggcttgttaaatacaacgccactattattgcaagagaaaaattgtaact

SEQ ID NO: 371592 - DNA, 178 bp, Cannabis indica
gaaggcttcaggaaatttatacataactttcacacttttcattcagagaaaaacctgagccttctctttctaaaccctagccgccacttctctctctctcttcttccttgagatttcgaaccacttagtgattagagtagtgcccacacacagcaagtgatacctcaatcatagtgag

SEQ ID NO: 371593 - DNA, 609 bp, Cannabis indica
aattaactcagcactataatattttcaaataaaaatatattacattaatttcatgaaaatgtaagatagaattaatttttttttgtatttttacactaataaatatgcatttttaactacttaacaaatccgtaaaataaattatttaagttattaaataataaaatatgggtatattaaattgagaaattactctatatattattttttaatttttttttctaaaatttacagtttgagttgctatgttggtttctctgatgatttttatgtaggttgctatacagattttagttgcgatttaggttgctctattaattgctataatttttgtgtggaattccataaaaatatatatataaaaaacatcttttaaattttggtcggtacattagtagttatttattttataatgtacccacgtattttctttcttcctttactttcttcttttttattttttatttttagttttttacttatatttacattgaaagttctaatttcttcgatagctaagtgatagatctaaatttggttattactatggattgaaacagaaatcataattaaagaacaccaaatttacaagcttcctctgcattggaa

SEQ ID NO: 371594 - DNA, 1059 bp, Cannabis indica
gaggaatggttcaagaagctggagccaggatcagtggactgctagaacaagctgcaagttagtttccggaggcaatttgtcgccgcgagaaaggttaatctagaggtcagtgccctgactaacatcaagcagctgcccacggagatattgaaaaatttcataaagaggtttaaggaagaagcctcgaagactaagaaagttaatgacggacaacaacttgcacttcttcaagcagggatccgtacagggactccattctggaacgagttacagcaagaaggagcctccaaccttaaagacttccagaaaagagtccaaaagtgcatcaacttggaagaggcccaaatagtggcttatgggggatactatccgaccggaatagcagggtatgtacccggagcccagcttccggaaaccctaccagcggctactccaccaatgagcggcatgcaattttccgctaccccaagatataatcagaattaggcattggctcctgcgtcttctcattatgggaatccctctaggataagtggacaagtcctgtctcactccgctcctactacaagcctagcaggtccttctcaaggctctcggagcaagaggtcctcgaaaggtagcaactggacggaggacaagcggcagaaaagggggtccactccccaatacacctagtacacggaactgacagactcccagaaacgtgtgtacttcgcgactaggcaaaatacacactaccggagaccgcctcctctatacaaagatagctccagaaaggatcccaacaaaaggtgcgagtatcataacgacattggacacaacaccaatgaatgtaaaaaccttaaagatgaaatcgaaaaacttgattcgattgggtcatctttatgagtggataaagaaccggctgcctcatctcaacccggtttaggcaacaggacctttgccccaaggagcaccagggggtgcgcccggagcattggcaccactcgcttccccaggggaacctcagcaagttcctggtctgccaccgagacccaatggaagagtagctatgatctc

SEQ ID NO: 371595 - DNA, 655 bp, Cannabis indica
ttcatcgttcgtaatgcttactttttgaactgcataattcctgtccttcatcttgcttattctaagcttcatgaaattttttgcgctaactcgcgaaaattcaaactttctgagttttgacttttcgtcgaatatttttattctttaatccgttgagtactcctggtcggcgtatttgccttatttaatgtccgatatcctgaccaaacactcatcttgtgttttgtcttttgtagatgaacccaggtgagttttggggaaccgaacaccaaatcgaccaagatttgcttcaactcttgcacgagggtcatcctcgtcttcgttctagtccaacttcttcgagtgacggacattttagcttaagtcttccgtctggccataggatgatggctcatacaaaaaagacaatgcgtagaatcgacacatctaaccctcaagtggcccgacatgccaccttacccagtgtcgaacaagatccgcccgtccaggaggatgagggtcatgaaggggatgccgaggtcgaagagattgaggaacaggacgatgttcgtcctagcagtctttccgaggcggaggaagaggaggaggttgctcccccaaactttggaggatacaatgaggctggggagccagtcgatgcggatggcgacgtcct

SEQ ID NO: 371596 - DNA, 683 bp, Cannabis indica
gggaaggccaatgtagtggccgatgccctgagcaggaagggtcccgggtaggtagctagtatgattcagatttcacctcagttagcagaggccatggtcagatctagcgttgagtttgttgtaggcaaacttcacaacttgacgctgcagtcggatctattagaacgaattaaagttgctcagatgactgatccagagttagtaaaaatcagagaagaggtttcagctggtcaagccagagatttttcagcgtcagacagtgggatgttattgtttaaagccagggtttgtgttccaaatagtgtggaacttagaaacgaaattctcgaggaggctcataccactccatattccctacatcccgacaccaccaagatgtatcagaatcttaaaccttacttctggtggagcggaatgaagaagaatttggtagaattcgtatcgaaatgcctaacctgtcagcaaatcaaggctgagcatcagagaccggcagggttgttacagcctttaaccctacctgaatggaagtgggaggacatcacgatggactttgtggttgggttacctagaaccacaggattgttcgattctatctgggttgtggtagatcgattcacgaagtctgctcattttctaccagttaaaacaacttattcagtggatcagttggcagagttgtatgt

SEQ ID NO: 371597 - DNA, 745 bp, Cannabis indica
tgaatatattttaaattaaaaaaaaataataattagtttttatgactaaatattagtcactgaataattaatttatgtaattctttatttattattgccaactaaactatttagtcacaaaatattagctttttcgtgactaaattttagttgttaaagtttacttttttggttgttgaaagtgcatattggtatttatgtgaccaatacatcaatcttactgtgactaactttaatatattttgtaactaaattttagtcatagaaaataacattatttgtgactaaatatattagtcactaaatctcttctacgaccgacattcagcgactaaatggtgactaaaaataattagtcacaaaaaattttgggtgactaattaatgagttttaatgaccaaaaaactagtcggggaaaatgagtttttttttttgtagtattgtcagctacttgaaatatgtttgacattgataggaactggttatttgtttctgatggttcatcttcatattctatgtcttgatacgatggctagtttgtaatttgtaaaaccagtttctgaacatctgtgttttgtgttactactccagtgtcagcgaatcgtagtggatttagtagcattgcatgttgttgaattgttgtgatacaaagtggagagtcgctcactccaggctgcttctttcttagttcaatgtaaaacaatagttaggtgttacttataatcttcattggtgatgaacttgg

SEQ ID NO: 371598 - DNA, 578 bp, Cannabis indica
ggttataaaattgtaaaaaccgaccataaccgactgattttcacccctaatttttatagtagttaatcccaattttattacattaattctgaagaaagtgctggagaatcagattttgaaagaaagctctagaacttagagagtctaaagtgaatgaatgtgcgtagtgaatattaatagagcttcctatttacggtgaatattagcatttaaaattagccaaataagaattgttgtcttttaaattttaacatgtattaaattatgtccctgaatttttttagccattaaaaactacccttgaattattgaaattgttggatttaaggacatttgtccaatttcattcaattttactaatttgatgattgtttatgcactaaatcatattcccatactttaatatctactaaatcttacccttcgaactttaatatgtactaaatcatactctctaatttttatttatgttagacttttcttattaaaattagacaaaagtccttaaatccaacaacctcaatagttcatgaggtatttttaatagtcttcaatgttcaaggagcatgatttagtac

SEQ ID NO: 371599 - DNA, 407 bp, Cannabis indica
aattattaaataatagtattgacatttattggattaaaattaaaaaacatggcatttgtgaaataaaaaataaataggttagaaaaaaaagaaaaaattataactagtgggacccatctatataaccgaccactttaaggcttatttttgctattatattatcattttttactccatataatttaatcctaaccctaagggaaatagtataaaaggaataagatggtttcattatccaactaatctctaataacctagtttacattctgtcagacaacttgagttcttgaaacctccttctcccttcttctatttcgaatctccttcattgttattcatcaaattttgagcctatagtgagtgagtgcatgcccacccatatcaagtctagtattcaatcatagtgt

SEQ ID NO: 371600 - DNA, 1192 bp, Cannabis indica
ctctctctgttcactcttctcactgttgtttccaattcttgtagtggcattttcaaagaccttcttctttgttggtggcaattcttgggtgtgatagatttgattggatcgaatcccttcatcggtggtcacgtcttcggtccaagctccctgccatctctttcgcatccccctttatgaatatatttataaatatatatgtatcttttggattcggatatttatgaatatatatatgtataatctagatctatggttaaggaggacgagatttgatggaaaagagtacatttttattattctgaatatcattgattaatgttacaataaaagagactttatatagggagagatatccaaccttagattatacaccaaacccaactaggaatagccttatctctataaccaaacattaaatataattatataatacttaatatgccccctcaagatggagtgtaaaaatttgtgacattcatcttggaaaataaattcttcaaatgagatggaaaaagaggcttggtgaggagattggcaaggttgtgtttggtgttgacatggaggagtttcagctgaccactttggactcgttcatggacgatatggcagtcaatgtccacatgtttggttcgttcattaaaaacctggttttcggaaatgtgaatgggagctttgttgtcacattacataaaggctggatgtgaatgagtgatccccaagtctttcaataaggcaagtaaccatagtatttcacaagtagtgttggccatggcacgatattcggcttcaatggatgattgagaaatagtgttttgtttcttagatttctaagaaattaaggaatctcctaagaagatgcagtaacctgtaacaaagcattgagtgtcgggacaagtgccccagtcagcatcaaaaaagactttaagttgtatttcattgacaaacaagttactctcagtataggccttgagttgggtagaagaagtggagttgaagaacaatcctgggcctagagagcccttgaattaatttaaaaaaaaattaaattaattcaaaatgataattagaattgaattaggaatagtaatagtatatatacaaaaccatacaaaaaattggaagttaattccatgaaaaagtatgaaaaattgaagaaaaaggaaaaaattcgaaactgtacggacagttc

SEQ ID NO: 371601 - DNA, 806 bp, Cannabis indica
ggccaccttcaatctaaacgaacactacaaaaaatcttatttttagtcacaacaaaatttgtgactaaaagtgaaaaaattgtgactaattataaagtattattcttatgttgtgactaaaatgtccgtggctaaaggtattagtcacaaaaattacaatttgttgtgaccaaatgtatttttagtcataatactttttgtgactaaaattaaattagtgacaacttgtaactaagtactatgttttactcacaaataacattttattgtgagtaaaagtcacatttaatcacaaaaaaattatgttgtgactaaacaattgtcactaaaaataacagttttttgtagtggaataccaaaacccaacttctcgaccttacaaacccattctttgaagtttttctttcttgccttgaccttgccggaaaccaacaccagaacaattgttattctccctctcccacgaattttcgcccattttcatctgattctccctcttccgcaactcttcatcaataccacatagtcgcaggggttcaccagttcatagttgggttcatcgtggttcaatgggtctgtcaaagaagaagaaggaacgaggaagggagagatctgatggttctagtcgttgaagaagaaggaggaggaatagggggagatatgatggtttttgcagaagaagaatgaggaataggaggaaatctaatagtctgttgggttcgcttgttcatcttctccaaccacagatgaagaagaaggaaccccgatggttccaaaagaaagaagaagaaaagaaaaaaaacaaa

SEQ ID NO: 371602 - DNA, 790 bp, Cannabis indica
aattcggtcaccagttaatggcagtcttggcagaagaaagcgaaaagaaggatgaagatcttgatcctcgaattcaagatgaaagaaacttgttaaaactaattgaagaattgtaagaagtttttctcaaccaaaaaatcccacaaagtgtgtgtacattgggaagaacctggacgagcagttgaaatagcagctaatatgtttcttaagggctaaccaggatcagttcgccttgaaccatggagatatgatagggattgaccctaaattatctaccatcatttaaatgtcgatccaaactacgcagcaaagaggcagaaaaggagacccttggattccgagaggtaaggggcgctaaaacaggaagtggataaagttattaatcaatgactttatacgcaaggtgtttcacccctcgtggatagctaatcctgttctcgtcccgaaacctaacgaaacttggagaacttgtattgactttctgatctaaataaggtatgcccaaaagactactcaggaacatatcagcttcgtaaccaacatgggactttactgctataaggtcttgccatttgggctatagaatgctagggcaacatatcaacgattggtgaaacaatatgaagttaaacctgaaaaagtgttcctttggcgtttcctaaggaaatttcaaggattcatagtcaacgcgaggggtattgaagcaaaccttgaaaaaatcaaggcttcgatagatatgtcgtcaccaaaaaagcctaaagaagtacaagccctaataggaaggatggct

SEQ ID NO: 371603 - DNA, 580 bp, Cannabis indica
gagacaatttatatggagcaaccagaaaactttgtggttggtgacccaaagaatatggtttgcaaattaaagaaatccatctatggactcaagcaagcttcccgtcaatggtaccacaaatttcatcaagtggttctcttatttggttttgagatgaatgctgttgatgattgtgtgtatcataagtttagtgggagtaagtgtatatttctggttctatatgtcgatgacatattgcttgccactaatgatataggcttattgcacgaaaccaagagatttctatcgaagcattttgagatgaaagatcttggtgacgcctattcaaatacatcgagaccgttctcggggtattcttggattatcacaaaagagctatatcgataaagtactcaaacggtttggcatgcaagattgtagaccaggtgatacccctgtcgttaaaggagacaaattttgtcttaaacaatgccctaaaggaagccttgaaattcaagaaatgcaaaagattccctacgcttcggctgttgggagtccttatgtatgctcaagtttgtacgcgtccaaatatagcgtacat

SEQ ID NO: 371604 - DNA, 687 bp, Cannabis indica
taaataagaagataataaaactgaatgaaaataattaagcaaacttttttcttttgaaaaaaataaaataattaaaagaacaaaaataaacgattttttttttttttaaaaaaaaaagtaaactatgagatgatgtaaaatacaactcattttctaattaaacgaatagcaataggttttcttaagaaagaaatttacaaaattaatagtagatataaatatttatatatatatattatttttaatttttaattgttacaaaattaatgcaagcatgtttttattttattttttattgaaaaaaatgttagaccctcaaaaattagaaaacatataaagaaaaatatagaggatgacatatatatatatatagaggatgacatatatatgcacttcactcaacactaatataagtattttttattagatcaaactgtaaatgtagtcttcaccaaaacaaaataagaatactactaataattataaatatttatgtttgtgtgatatttataatttaagatgatgataaatgattaaacttcagatctagctagttgacacatacctaggagcatttgaaatagataaagggaaatttacatggtatactaacttttgctaattttttacaaaaatactgtcaagcggtatttttacttttttactgtgtttttttataagtttcat

SEQ ID NO: 371605 - DNA, 554 bp, Cannabis indica
aaaaattgtaacaatcaaatcaatttttttagtagtggagtaaaaataattattttggttattttactaaaggttaaatatgtaaatctattattggagtataattattattattgggaaattatattttcacccaaataaattataaatacaccccaatttaaataaaaatcttaattaaatttttatccttgtacaaaattaccaaaatatacaattttaaatgatgagtctattttaatttttattgtaataattacacatcattttcttataaaactaaaattatctccttcaagtcttaaaaaagaatcattaatagaggaaaataattgaggttttatcaataaagaaaatttaatgaaaagataaaaaaaaatatttaattatttcattaaatttataatctctagattttttgtatttattttcgtatgaatctcacatatatatatatatacactaatatatgaatggaggaggttctaatggttacatttttaatgtaaccatcatggttacattttttttagccattagatcactattaaatg

SEQ ID NO: 371606 - DNA, 1167 bp, Cannabis indica
aaatttcccttgcaatccacagttctcgagagtaagaagctccaaagaagatgatatgttggtgaaagaagtaagtagttcaacattagacatgttgaccaaagaaagagaaagttctatgagatttgtaagttttgaagcattcttttcaagacataagtcttcacaataatatcaccataaaatgaatcaaaggtgagatgagtgagtttagagagatgagataattcgacagggatataaccgctaaaattggcagaaaagaggcgaagctgtgtcaagttgggaaaggaggtgccaaactcagatggaattggagatccatagaaatcattactgtgatcaaggattaaagtttggagatggtgaagtgagaaaagggtggtgttggagtgaagagggcctttaagataggtatcacttaaatcaaggccaatgacatgaccagattgttgatcacaagacactccatcccaaaaacaacaatcacttccattcttccaagacagaatttgaatggaaaatgagttgatgaattggagcaaagcagaggtgtcatgagtattacacaagtgaaagtgaatgattattagaaggtgaaaaaagagatgatgaatgggttgttaaggaatgacttaggaatattagtacaacaatccaatagcaactcatcatcatcttggatcgtatatattattatctctcagctataattatgtagttgagtttgagtctatttatactaatttcataaataccactcatccatgcatatgcttatcaatcaatattagatacaaatatgatgaatattcttcaactcatattttgggttggaaaattctttgaagctgacatattgttccatataaattaaaagcttattttgagtcataagttgtggctacaaattttgataactcttttcgttcaaacttttcaaagaatcatatcattaattatacatatgaaatatccctttaacttatattttgggttagaaaattctgtgtgtggtgcatatgtaatcaagttggcatccatggaaaatgacttattttgccttgattattataaaatttaaattatatatcagagatatttttaatgaatatttattaaatttagttaacttaaataatttttattttcttaaattacaataaa

SEQ ID NO: 371607 - DNA, 665 bp, Cannabis indica
tcagtgtaaatccaatgcactgatgaatcagggacatttgctttttaaagcatataatcacatcacgttctactgtgttgacatcactgcaattgtgaatgactatatgttttggacttaacgaattttgtacatattaaaccataaacatgtaaaccacatgtaaatataaatgatttctaatcttctattaataacagatcaaattagattgaaatgggttttatttagggcataaaatcccaacaaactctcacttgcactaacataaaacaagtagtgcatatcaatctattgtcttgatctccagatcaagtgtatgttggaaatattttaccaggatctaaatttactaccaagtatgtttcattaacatcctaatatgaattctaaaacaataaataaacacataagagttggaatataatgacttcttccattcagaattctagcccctaattactgtctgtagtgaagtattatatatcaagatctgaagatcttctctctttcaatttggttagacacaatcttgctcactatgctaggtattacttttacatgagtgggtatactcttaattcaccatagacttcaaaatttgaggaggaagaagaagcattcgaaatagtgttggagattcttttaccaggatcttagatcta

SEQ ID NO: 371608 - DNA, 430 bp, Cannabis indica
atcaaccattagatatttgatccaatggtgaagaataaaatacccatacatgggtaatacccattaagaacatacccttatatattcttataaaaaaatatatataattatatttcttaaatttgtgagagcgagtttcatattattttctctttaaaaaaaagtacatgattctttgataagtttattttttgtgataatctcacattatttaaaaatgatagtgagtcttcacatatacattataaataaatcattttgtttattatttttatttgtctcaattaatttgttataattattgaaattcattcattttatagtctgtaataatatagggattagaaaaacataaaaaacaataaaaaaatttacaaaaatacggttatgcagaattttaaatattttacggtttttaagattttattta

SEQ ID NO: 371609 - DNA, 590 bp, Cannabis indica
atataatatatatgtacagagtaatataatatatacataagttattctcaaattgcatgaggaggtagtagcacagctggtatgcgtgcgatattatatgcttgagttagtgggatcgattcctatcttcgccatattgatgatttttttttgcttcacatatatttgttgttttaaaatgaaagagtgatggttttaaaaaataggtaacattttaaaatatgttagaatatatttaatgtatttattattatttaagaaaaaaatattaaaatacacaaaaatataaataaatattatgttatatatttatacatatattttttttcctgatatatataaaaaatattaaaaggcattagtgaatctaatacttttaaaagtattatgttcatattggtgtaattaagtagtgtattttatataatttaatataataattttttaaaagtatccttaatataagggtaaataccattttggaccatgtattttgtaaaatttaccgattggaccttttattttgttaaatgacaaaatggaccatgcattttctaaaactgtaaaaataggaccttgagcttaatttt

SEQ ID NO: 371610 - DNA, 641 bp, Cannabis indica
tttctagtaatcccagtttagtgggattaggttaagtttatcaggaaatcatagcgtgcctaatttttagggcattacaattcggtatcaaagcaccaaggtttttaaacttcctgtagaccggctgaacatgtacaatcatcatcaaacaagatcgactcgtggtgcagtaagtgttgagactaaatgcttaactactagtgtgattatttatttaccgctttccaatttaggcagtatatgagcatttagaatgaaatgttatatgaaaagcatgattagtgattaaagaaatagttagaataagttagggttaaggcaataagtgtgtaaatgtggatttggtacttgactcgccggggttgttgattttagggctatttgagagaaaatggaccctaatcaatcaactagaccataggacgagcttgtagagcctggttataacaaaaccaatccaccagcactgcctgtgcctcttcagaatacggggggataatgcgggggttaatgatgctaatccacctgccgactgccagcaaatgtttcttgaaatgtgaagcatcatattttgttaggaagatgaattacgttgctttaggcaactggtgttgggttttatgccctaaataaaactcttt

SEQ ID NO: 371611 - DNA, 778 bp, Cannabis indica
gtattagagccaccaggttgtctttggaagatcgtcacgacaggtacaatcatcatcagcagtcagctcgtttcacggttcagtaagcttttatggctttagtagtttattttttatagtatgatttaagaaagcctgataggaagcatgctagtagtctgatagtagaatatgcgcatgttttaatttctaaataagcggcattagtaagtttttctttgatcacgatctgaccaaactagctcttggttacgcagactgttctaaattagtatggacgctaggcggagtaccaggagcctaggtaattcggttggatgtagtggaggtcagggagcttagattcccgtcaatatccgtggccgaggtagaggtcccaggggcagggcacgtggtcggggtgatgttaacccgccaaaggctacccaagctgcccaagctactcaagatgccaaaaattgggaaaataggttggcagcgatgcaagccatgattaatgaacaagatgatgagattcaagggttgagacagcagggttctcgtgtagtgcctactccagaaatcctagtggcacctgcccgtgctgtccaggccgaactagtggtggcagtgaatcggatggaacccctgtatgaaaggttccgcatgcaagcaactccagttttttagggaggtcctgatgtcatgaaagccgaatgtggcgtgctgccccatggcacacccacaatggggccattttgtaacatgagcatgcattggtgcttgatcattagtcaag

SEQ ID NO: 371612 - DNA, 603 bp, Cannabis indica
tagcagtagagaccaatatctgttccgaaacttgtatgttcttgatctggcagatgcattttgatcttgtgaggcggaggcaggagattgatctctggtgagaagggatttctgcgagaacggtctaacttaagatcattgttacgctgtccggccatgccatgaaacatattcttcaactcgtcaagctgggcctgtacggctgggctgacttgctcggcatcccggtcaacttggattacgtcagtgtctttctgagcagggatttgagtatgggctccgggctgcacgatcgttgcaatattctgcttgtctgttccccttcttctgtttagattgttccttaggtcatgggttgttcccagcctatcgaacacagaagaaccttattgccttagcgattgactcgcttggttaacaggtggaataacaccattattctggttgaatccgttaggtatggctcctcctaatgaattcccgaacaaggtctgcccgcctacctcttggcccacgagtggaactcataaccggggattggacggctgaccattgcttgtctaggaggtattcatcgtcgggtcatcctccgcttctcccagg

SEQ ID NO: 371613 - DNA, 544 bp, Cannabis indica
gcgaggaaacaaaaagtttgagtggatagaagaatgtgagagagcttttcaagatctaaaggcacaactcggaaaacctcccgtcctctctaaagctctcgacggtgaggaactggggatatacctggcagtaatggagcatgccataagcgtcgtactaatcagagaagaagatggtgtgcaacatccagtctattacatcagtaaaagactcatcgaggctgaaagccgatatccgttgatagaaaatctcgcctactgcctcatcttagcaacgagaaagctaaggccatattttcaagctcatcctgttcgggtgtacactgaccaaccgctacggcaaatactgcaaaagccagatgcctttgggcgactactcaagtgggcggtggaattggggcagtacgaaatcaacttcgaaccccgaacagctatcaaaaggccaagccttggctgactttgtggtggaatgcacaggaaaaaccgaaagcatcccagaaggcgatcccaagccaacaccacagccgatcaggactgaaagcaa

SEQ ID NO: 371614 - DNA, 740 bp, Cannabis indica
caagtactttgggctcataggacgactgagaaaataacaacgggacatactccattctccctagcatttggctcggagataatgttgcctatagaagtaaatatctcgactcatagatgagagttttataatcaagaagaaaacaaagaacttttaaaaatgtccttgtatctacttgatgaaaaatgcactgagtcgcagattactaatgcagcataccaacaccgagtaacaagattcttcaaataaaagggtgaaaaagaggctattcaatgttggagacttggtgctgaggcaagtttttgcaaatacaagagacgcatctataggagtattcaacccaaactgggagggtccttatgtgatttaggcgatagtagggaccggggtttacaaattggctcgctgctaaagaactactggaacatggaacatttgcgaccttactaccagtaaattgatggtgtaactcacatttttgatgtaatattttgaacttcagttatgaataaagttaatcatttgttaaagtaattagaaagtgttaccctttaaaattacttgaggggcatatgtgtataattaaccagaatttatctagaaatacatggtatattgcaaacccaccactttaaaatttttcaaatttttttaaagttctttttgattgaacctttctgatgtggaaggaaaatcaaaaattgtgaatgacattcgattaaacctttctgaagagaaag

SEQ ID NO: 371615 - DNA, 535 bp, Cannabis indica
gttctcttcgtggagagatcgatatccagagactgtaaattggtgtaatgttcgaataaaaacggtaacccccagaataagcaacgcttgaacgaggcctgccaagtgttcgtcgaaatgcacaaacgaactcgttatcacgattacgaattcaacaacttcaaatcacagaacaaacgaataaatatggaaataaccgacctacagaaggattcaggcgctcgaacgagagagttggccgcggcgatcgagatggtgcgatggattgcggccgatgattggagaagacggtcgatcgaaaccaatgctcttctcaaactccccatttcagactcaaatagatattcttcgttgagttggtttgtttggcttattttgggatggggaagataaataaaatttgtttcgaactctataatttatatagtgaatcgtggctcgctgtttaaccgaggaactctcctatggatatcgtggattttctttctccgcatgtaatcgcacgagtttctctcaataaaaaaaaaaaaaaaaa

SEQ ID NO: 371616 - DNA, 734 bp, Cannabis indica
tttcagatcattcgcattccaaaaaactccaaaaggagtttccttcaccctctcggtcaagttaaaggcttcaaagtttgatttaattgaagcaaagtacccattccctctgtaagtgatacgcccatgaaaatgctcaaccaaggggagaatgagttctggagccatctgcaaattaaaacaaaagattataaatcgcatatacgtcgcacaaaattgcacaaaaattgcataacaacttaagcacaacacaatatatcgcacaaagttgcacatatatcgcacacacatcaccagcagaaaaaataattgaattgtgcttgctggcaaaatatttgaatcaaaatcgcacaaggcatcgacctaaatcgcataacagctaacaaattaaacacttgcacatacagccatgacaaatcgcataaaatcgcacaaggcattgaccaaaatcgcataacaactaacaaattaaacacttgcataatcagacgtcataaatcacacaaaattgcacataatcgcacaataatcgcacacacaatccccaaaacgaaaccagatctaaacttgcataactaatcgcacaaaaatttcatatacatcgcataatgtcgcacaaaatttaaaaacccacaaaatctatatccctaaactcaatttcttccccaaactctaaaattcataaatccaaacaactacatttcagttttttcgcagattgtgaatttaaagtt

SEQ ID NO: 371617 - DNA, 502 bp, Cannabis indica
cactcttgcccatctgcggttctacggctctgaccaccgcgcccttgaacttaacacttccaatcctccgggcactcgccttaataataataacaaacgttttcactttgagaatgtttggcttaaggatccaaattggaaccatgtttttgaccaatcttggactagccagccgagccagcatgagcccatcctcaagctagtcgcgactcaagcctcttgtgcagagaaacttaacaattggaatcacaaaaaggattttaattttaagaagcacataaccaagcttgagaaagacctggaaattgcccaatctgctcctgtttgggatgacaataccatccgaaatataaaggagctccaatccaggcttgactctcttctgtacaaagaagaaacttattggaaacagcgagcgaggacccagtggttagcccagggtgataagaacaccaaattctttcatcgccatgcctctcacagaaagaaaataaacaaaatc

SEQ ID NO: 371618 - DNA, 432 bp, Cannabis indica
tgcgattgatcaagaatggtatgctgatataggagctacaaatcacattgctcttggcatgaaaaatcttgagaatgaacatccctatgctcttacattcttatatagaggtatactttattaatacaagacttaaaaagtgtataactaattacaatttagaagttattcttatttataattggtctaaattaggacttaattttttataacaaattagagattattcttaaatagagaactgtacatttgaatttgttattaaagatatagaacaataataatttgatttattttgttgttaaatttaaaattaatatttaatttttaacatttaattaattttagtgatgcaagaaaaatatatattataataaatattaaatcatttaatattaaaaataatcaatttaaaatataggcttttttatt

SEQ ID NO: 371619 - DNA, 575 bp, Cannabis indica
attatggtcgatagtactgtcgtataaacgttcttgacgcagtaccatgtaggacgcggggaagggttatggttaggtgtatgggttataaagattgtattgtaagatgccaaaaattcaaagactttttaaagaaaaagaagctgctaattttggatactttacttaaaagaattttaaaaaatgatatttattgaccccatctaagccaaaacctgacctgacccatctaaacccgtactcccaactatatgggcacttttcgaaaactcaaaatctgcacccgaaaaattcgaaaatagtgaaacccaccctatgtgtagccctaataaaaaactataagatgcatttaggggaaaaaaagacgacattgtaagatgcacatcttggtagggtgcacaaaatataggtcaaaccattcaacccagccaacccaacccagtttttgtagtaaagggttatgttaagagtaggtcatggcttattgggttaaaaagtgataggtcatataattatgggttggacacattttaactcaatataacccaaaccaacccatttcttaaaaaatgttc

SEQ ID NO: 371620 - DNA, 531 bp, Cannabis indica
ttttttttaaaaaaaattctaatcatatagtcgtgtctaacaaataaaaaaaaaaaaagaatatctcgattattgcaaattattatattttaattgattatcattaataaaattctatgatttatttaaaaaaaaaaaaaaacctaaaagaaagtttatttcatgaagatagaacaaatatgaatatcttcaaagtaataatcactttatcaactaatgacacgtttactatacagtaatcagaatcgaaataaattaatggaaaaatataacagaataaatgaaaaataatcggaatcaatatttgtaatatattgtttactaaaattctttagaaatggaatagttgtgatttatcttgtttactttattaggaaacgtaatcggaatgcttaaattgactaaattgcccttttgagttaaactatattatatggtagttattttgcaagacatattttaaaagacaaaattgtcattatatatttaatattaaaaaataaaataaaaataataaaaatccattaccct

SEQ ID NO: 371621 - DNA, 577 bp, Cannabis indica
aaatatatatatatatatatatagggtaatactatggtaggacctagcaaaagttccctaccggtagggaactttttttttaaccgttgattttagatcttgtggttattatgatgtaaggtatatactcttactataggactgcttgtatacaattaaaactttatacatattataataatatttaataatatatttattttaaaaaataaataatattaataattaaaaaattattttctaaaattaatttaaattatttttatatagatatttattttcaaaaattcgtatgacgtaggatcacttgaatgattttagatgctctttaattggaaccataccaacttacttctcttaaactcaattattttggcagaaaaaataatatcaaaccaaattaattatttttttataactggcgtctcaaaagagcagccaaataacaagataaaaattactgaaaaacagtcaataacactagaactacgcacagcctaaaggcaaaacaaagaaaagactaggtgtaaacataaaaaaaaaaaaaaaaaaaaaaaaaaaccagcagtaaattatg

SEQ ID NO: 371622 - DNA, 516 bp, Cannabis indica
aatttaataaattttggtgtttctttgtgtcataattattcatataagtagatctagtaacgcataaatcggatatttattttagccccagaaccagctcaaagggtaggtcttaactgatgtttcattataattatcctaaacttttacttcatacacggatcttgcttggttaaatttatatgtaattaaaaaaaagactattttcttaagtctaaaagatattattggtacttagcatttttttcggtgttgtaccgtgtaattatcgggttccatataacttaagaaaataatttatttttttttataaaaaaaaaataatttttaagaaatatcactaaccaattataagacaccacccataaaaggtgctgagcaccactgcctaataataacgctcaattacaaaaaatgtagaaaaaaataattttgttattaaatattatagggcttttttcataaatgtacaacaaaaacaaaataattaacaaaaaaatgtagaaaaaaaaatta

SEQ ID NO: 371623 - DNA, 960 bp, Cannabis indica
cttaaaaaaatgtaaccatgatggttacaataaaaatgtaaccattgaaacctcttcctatatattaggtcaaaaaaaaaaaaacctacttcctatataatatatatatttagaaataagttttttgtcaatattgtacataaactaacaatgtaaaattttttgttaatagtattacaaagagaagatttcaagattatctattttggattgaaagagtaaaagtgactgaaatctgagacaagaaaagagtcaagacattatggtaatttttttttttatttttaagtaaaccgaaaataaaatacaatgtgtacaataaatatatgtgattcgaatcaagcaaagaaatcaaatatcattgacaattgacaaaataaaatacatgttatgcttttaaggaaaataactaattagtatctcaggaacaaatcatacttaattgatgttgaggaaaaagatatgcatgttactaaaaattgtgaaccaggattatcaatttaattttaatagaggagacttacaaatttgaacacacttgtcagacataagtgtgtgcagtgaaaataggatcattgtccttggcaagatttttcattttcgcctttttcaatttgatcccgcaactggatgctatcacaccatactgaaggtagcccttttctatggtagtgcatcctcatcatagttgctaattacaatgttccagcttactcaacagatggctttcacacctcagtatgggtagctctattccagcaaggggcctgacaagactgaaacaaaaattgctcaactctgtataagtacattatttaatcctagacacaaataaagagtaacatgaaccttttaacacaacatcacaaagtatgataagaatgagatcctaactaattataatccaaaagcataaacatgatttgtcaaaatacaatgaaagaagattaaaagctagaa

SEQ ID NO: 371624 - DNA, 527 bp, Cannabis indica
gtgccttttagcatttctcgtttcaaacattattaattggttacaatttacaaaagaagacaaaaacattcacctaaataattaatttgccacatatacatactatattttgtatagaaagagattatattatatcatatataatatacatatatacttttttttttacatgttagagtgaaagaaaaactctgatatattaaatgagtacagctgaatccaacttggctgattaggtttttacaaaaaaaaataataataataggttaaatactattttggatcttgtgttttgcaaaagttacagattggaccctgtgttttgttaaatgacaaaatggaccctgtattttctaaaatagtaaaaataggaccctgagcttaatttttgataactttttttttaatacaaccaacttgaagacaatgcttaatacgaacagatacaaaaaaatgtaaacagttttgtcatatagcacttttagatcggattataattaaactttattttgacaaaaaatcaattt

SEQ ID NO: 371625 - DNA, 954 bp, Cannabis indica
gaacgaactgcacggcggtttacaggctcctaaaccataacaatcacaacactgataagtgatacgctaaatcacttcccggggacttaaactagaaactaaaagtttccctatcgataaaaacatggaaataccccaaataacataaaaatgagaaaatctagggttcctaaaaatcccccaaccagtagaccggttctgcaaccggaattccggttctgggaattcctaaatcctcatccggaattccggttgcacatccagaatttcggttcctcataggaaactttcaaaaattcataactctttcaaatcaaatccaattcaccccaaaccttccagacctgttctaaataccccaaagaacaataccaaagcaccaaaacagcccagaacacacagatgctaaaaatgccatgtgagctccaagctttgagttcaaaactcaaacttggctaaagctcacctacaagcatttaaacttgatttaaactacataaacatgcatatagaaactggaggaaacattctcaaactcaagcaacaagcacagcaaccaatttcacattttctctttgaaaactataattttgagtaaaaatttccaagcttgaaacaacataacaatcacgcataacaagcacctttattctactcaaataaacaagattaaacctctgaaatcaatcataaaaacagagcaacaatatcaacccaaactaagcatgcaaaccactttcttttcataatttttaacaaattcaagaaagaaagattaggagctaacctagcttgattagaacaccaaaaagagtttgaattcacaagaaaattccaaagatccttgctacacaagcaggccgaaagagagaggagcgtgagaggaaacttggtttttctttcttttctaattttctaaccttttttccaattttgtaaaatgaaagtaaaaag

SEQ ID NO: 371626 - DNA, 515 bp, Cannabis indica
gtaaaataatttccaacacggacgttataaaagtcgagcagtggctaacagtgattacaaagatattgaatttcatgggcgtcactggaattgatagagtggtttgtgccacttttaagtttcaggaagatgccttagtttggtcggacatgctgtccatgattcacgactttactactatgacctgggagaaattccaagagttgtttaacgccaagtactataatgaggccgttagaagtgccaaaagaaaacagttcactcacttgaatttagaaggaaaacatgagtgttacagagtatacgatccagtttgatcgcttggcaaggttggcctcgggaatcgtgccaactgatttcagtaaaaaggaaaagtatctggatggattgaatgcgaagaatagacatgatctaatgattactacggtcgacaaaaccacctatgctgaaatggttgaaaaggcactgcgagctgaggacgcagttgggtgcatgactgagtctgctaggactcc

SEQ ID NO: 371627 - DNA, 1239 bp, Cannabis indica
ttggaataggtgttgtgcgagtttgagctttgagttcaaagctttgatctctaatggaataaattgattcattgggtttttctgtgaaatacttgttggaaaatattttttatgcattgtttaggtactctggaaggtttggtagcatttggtgaaaaattgagcaaagaatgaaaagtttggggtggactggtgcaaaccggctagccggttttaccagaccgccaaaaccggctagggcaggatccccaaacgtttcattttctcaatttttgtccattttagtgtcgtggttgggtgtttccctatttccagagtttgtgtaacctttagggaatatagcagaacctagggttatgggttcgagtttccaggaattagggtttcaatcatgtaacttacccaatttcataatgtgattagggcatccatctagcacgagacttttcgttcaggtcggcccgcacacttgaattcggaaagaaggtaagaactgtatataatgtgtgatatcaataactgagtgtatgtatatgttatgtgtatatgcatgcttaaagtgttagttgcactaccaacacttatacagttaaggtatagagtgtattggtatagtgaatgttatctgagagtactatgataccagcataagtacagagaagtactgggtgcgtgtggtatatcactcaggggtactcagggtacgaaataaaccctaccaacactcgtatagtgaggtacgtagtgtatgtggtatagtggttgtaccaaagtactgaacgttcttactcgtctgttgagccttgtaaataggtgtatgggcgcctaaatacaagttggaaattatatgatatgttatatgcttttcttgttgagtctgtcaactcacagttctgcttccctgtgtaggtaaaggaaaggcgaaagctgaacaggagtgaacctgagctaggatgagattgtacatgtcgaagcagcgcaacctggagtgttcggtctcgggacatctgggaattgtattttgtaggctgagcgacctgattaatatgtattttggtatattatgttttaaaagtttaaaaacgggatcccgacacttgtaaatattttgatataatataaagtttaatatttaatataaaagttttaatttgacacgtttttcaagaaaaattctttgattagcaaagtttgcactgcaattggaaaagcactgtagcgtgccttagcattagggcg

SEQ ID NO: 371628 - DNA, 731 bp, Cannabis indica
cataattttttctaactcatgtatatatactttttatttttttctaaaaaatttcgtataattttttattttaatttttttgtcatagaatttaaaatataatttatttttgtttgataggtatattttttaagaatatgaatgggaagaaaaaagtttaaaaaacttactacaattaaagatataaatttcatagaaaataaaaattattaaaatggggtgtctttagacatttttggggtgtaaataaaatttcccatatttgaattaactgatctctctggctacaattaatttgacttaattaatgtttgaaagacttaatttaggccttcaataaaagattaaaactgaaattagatttcttgtaaaaagaaactgaattgagatttaattattctttttgtaaaggattaaattaagatgatttttttttttatcaatgtttattagtttatttgctaatcaagctttgttgtcctgaattattaaacagttgattttatgattcaactctaataattgatttttttctctaaattttgaagggaacgtttagtaatatttttttaaaattttttaattataaaaataaagtaaaatgtatatttttaaaacataaaaatgtgttctataatcacttctgttttttaatttataaaacagaaaatagaaatgtgttatataatttttatttttattttttgattttatttaagtcgagtctgggt

SEQ ID NO: 371629 - DNA, 583 bp, Cannabis indica
tcaccatcctctccacagtcatctatctttcaagtaactgcctctgcacaataagcacacacaatatagtacattttaaatgaaagcatagtcgacattgtattaaagcacaaatacaaaaggttcatgtcaatttttaaataacaaagttcgtacagaaatttttgtgggcataaaccaagttctctatgatccaatgtcattgcgcttcctctctcaacaattcattatttgagcaaagcaaacaatgagctaccatttacacaaacagtatctattatgttgtgattcatacaatcacagtacaacgatgaagaactaaaataataagatttatgagcaaagcattcgaaatcaaatgcggtaagcagaaaacaattaactcaactttcaagtatgcttatgtctagttatatacataactaacataactaaccaaactgtcacaattcacaaacagttaggcaatagtaaataaagaacgtgccttaaaaccaccaaaaacaaagtgtactttctagaccataacacaacatattacaataattaaactaatgaactaaaaattagaaagcaaccaaat

SEQ ID NO: 371630 - DNA, 546 bp, Cannabis indica
gaagaacagtggccaagttaatagggcgctgtggcggtgccttggtatcatatgagtactgcggtaccccatgtttctcacacagatcagtgataattccagccaacccaagtcctccaccggaagatccctcaaccattatgtcaaaggtcactcgaacaatatcccccacattcaaattataccctttcataatgccataaacccatttaattctgtctatttgagcatcagaaaaatgcttgttggggagcatccttgcactaacaaagtaaagccaagccttggccactgggttaagttcacatcggtacaattggtatggttctccattaagctcatggaacctaaggccaggataccctagagtctcagcaatatccacataattcaaacttctctctcgaaattgtcgtttcaagggttgttcctccacagtgaaagttgggaggtcataaagggcatgaatatcggctgtggtagcaggcactctaacccccctaactcttactttgccatcttctctttcaggccagttggctaaaa

SEQ ID NO: 371631 - DNA, 622 bp, Cannabis indica
attagagccgtacaaaattgcatccaaataatatattaagatatgattatttttatatatatataaaaatgaaaaaaatgattcagctctgagtcataagaccatttccaattacttaatttctaattttaaaataaaactaataaataactaaatattatatatacacttttagtagaataagtattacatttgatactatttaaaattatatatggttttgaaattactttaaattatattggaataccttttaaaaacaaaaatttataatgctcaataaatgaataactaattattttaatttttttttttcttgacattgggcttagtgataatttattaatgggattttttttttttaaaaaaaaaaaccacaaaaaataaaattacaaaaatatagttgtatagaattttaaatttttttttactatttttaagattttatttatataaaataagggtcttttaatatatttttatgttgtattattgttattttattgttagtttttttgttatttgtatattatttttttttttatattgtttagatgtatttttttttttatcatttttagtgttattttttataaacgccgtaaaaatatatatatatata

SEQ ID NO: 371632 - DNA, 1171 bp, Cannabis indica
ttatgatcagacgcccacacccctgaccataaccctaatccccgtgtcccacacggtactaagtctagaacgtttgtaagacggtactattgaccataatatcagcctatactcggtacactagtcatactctagccgtaccgatgtgatactatatctgcctatagtcggtaagctagtcatactctagccgtaccgatgtgatacagtcaaatagtacggcactatcgaccataatattagcctatactcggtatgctagtcataatctagtcgtaccgatgtgatactgttggatagtacaaaagccaacatacatctctaatgtaatctaacagccttactaacatgcacgctaaacatgtaaatacatatgcatactgttatactaatcttacctcgattttgaatttaggtgtaccggtcaacctaagtggaacaactgcttggcgaattacaggctcctgaatcacggtaatcacaacactgataagcgacacgctaaatcacttcccggggacttaaacttgaaactaaaagtttccctatcgatgaataacaaggcaataccctaaataacaagaaaatgggaaaaactagggttctccaaaattgccccaaccgaaattctggttctgggaaaaattcctggaagccaaccggaattccggttcctacaagtctctctgaaccagaattccggttcagtgcaggaaacactaaaaaaattcacaactcacacaaatcaatcccaattcaatccaaactttccaaacctattctatacaccctagagaacataatcaaggcaacaaaacatccacccatgcacaaaatcgaattctaccattaaagctccaagtttttgttctaaaactcaaaacttggctaaaccttcatacaacctctaattcaagcatagatcaacataataaaccttaactaaacttttgaaaacaaaatcaagcaactacaacaactacagcaagcaaaatctcaaagcatgcaaaaatttctttttcttccaactcaagaaatcaacaaaaagctacaagaaacttaccaagaacttgagatcacaaaatccttgcttaaaccagtttgaaatgcagaaaaaacaaaccaaaacctagctgcctttaggtgggttcaaaagagagagagagagaga

SEQ ID NO: 371633 - DNA, 520 bp, Cannabis indica
aataaaatttttattaaaatttatttaaaatttaagtgtattgtaagtaataaatattcatagtttagttggttgaggtggatgaaatattattttaggtcatgagttcaaatcaaatttaattcgtcttaggctcatatattctcaaggctggccctgcgtgcaacacattgtttgaacacaattttcgatgtgttaaactttttcgaatttcttaaaattttacaagatatcaataatttacatgaccataaaaaaaaattactaaaacattatttcggatactaaaacagatagagatgtatcaatgtatctattttaaggtggtgcattataaaatttttctaaattatttattataaggatttctttctttctttcttttataatttttttaataattaaataaaataaaattttacttttttatgttcaaattttttttatatattttcacggtattttgtaatatacaaaaaaaaattatagaagtaacaaaacaataaaacaacataaaaaa

SEQ ID NO: 371634 - DNA, 695 bp, Cannabis indica
cggtcctagtcttgttctagggtcatggttcgtcgattcttttacaggttctaagttttgggtcccaggtctaggtctaggttcgagtttcattcttcgtctgggttctggtcctagtgtgagtcctagatctagacaccgactattggtctgttccaggccccgttacccgaatcccgagttaagatctagatcactataacgggtctcggtctggttcttgttcaggtcccacgtcccaattctgagtttgggtttgggatcgagacgggggtgacgttctaggtcccgaccctggttctgtgttcctagtctggttccatgattgggtctaagttgaggtttgggtttaggtctctgtctgggttttgattggggttcgggtttcggtttaggtcctagtcctggtcttagtcctagttcggttcttgttccatttctgattctaagttcgagtttgggtttgagttcgggtcggagttcgactcctggtctgaattttaggttcagatctgcatttcaatctaggtccagatctggctccgggtgtgtgttcgcgtgctacgtctttgtctaagttgggtccgagtcccaagttccgatcccgatcttcgtttggattcagttttgggtctttgtccttggttctgatctggtttgggttcgagtttaggtcctggtccgggtgtagcttt

SEQ ID NO: 371635 - DNA, 713 bp, Cannabis indica
tttttaaaatttgattgttttatcttatttttaaatcagatatattatattttaaattatttaattaattttataaaatgaccttatttgaaatttaaaagaagaatattttaatcaagaatttttaaattgtaacaagatattttgttaacttttaacttttattattttatttaaattaaattataaattagatgaatggtatttatttatcattttattttattagatatttaattttattttttaaaaataatatgaattttgaaaagttgttagcatatcattgaatagatatttaggtttgttgaaaacctaatttttcaaatttataggtttaattttgaaattaattatttaatttttttttaaagtttctaaaaataatatttttttatttagactttttcgaaaattaattaattatttaattaattaaaattaaataaatcctatatctaactatccaatttgttgcatgtgtgtgttttatattgtttattattaaaacaagttttataaaacctattattgtttgatctaaatttccatggttaacttgttgacagatccaataatctgattttaaccaatggttcaattgtcaataggtcaaataaataatttgtaacaggtaaattttgcaatcttctttcatctgtgtataaacctagtaacatgataggattcatgcttgtgtgagcctatatgtt

SEQ ID NO: 371636 - DNA, 566 bp, Cannabis indica
tattacaagtaagtttctctaaatcttcgaacctattaattaggaataaacataaacttttataaactgcccaagccgaataacctgcctaaaccaaactgagataactcgacgaaaaatgcaaaccgaaaaactcgacgaaaaatgtaaaccaaaaacccgacaaaaatataagccgcctaatcaacccaaactaacccttgaattatatatatatttattatatataatctatatattatataatttatatacatatttataaaaaatagaaagatcaaactactatatttcttttatggcggatgatttgaactttgaattcaatctctatacttgtctcattatcacaattaactaaaatataataattgaatgtgaaaaaaaatattagtgctcggtttagacgagttaacccgaccaaattgaccaattcattgggcaggtttaattttttttttcttaattgggtaggttgcacttagatttttgtaaccctgttcttacatttggttgaataaaatgtaacgtaaactgaacaaaccgaccgacatacacccctacta

SEQ ID NO: 371637 - DNA, 627 bp, Cannabis indica
tcaataataacagcataaataattattcaatatctataaataattttccataattaaacataattaactgctaatttccaaattaaactaagcggtctttacacctaatcacttagaatagttatcaaacaagcaaaccgtagttaacagttctagcttttcataagttcatgatcaggacatccctaaatctagtaatggtttacactaaggtggggtttggttaggaggtaatgaaatagaatgcaaaagaaaggaaataatctaccattcctatttctttgtttcggttgcatattaaagtgttggaatcttattccaatggaatggcgtttacgccattttgttagaatgacaattctattttaaaatggaaggaaggaccatttcaatgcatgatgagaaaaaatttaataacttttttatcaattttttatgcattttaatttattccattccattcctattccaattcccattctcattctcattcatacgttttcgttcctcccaaccaacgccaccttagtgcataaccattccatcattatgaagttttcctatcactgggtatatccctagaacacttaggtagctactagtaactaatcatgacctttcactttc

SEQ ID NO: 371638 - DNA, 552 bp, Cannabis indica
aggccgcaagggataggcgacccgaagcatcctcactcactaacataaaggaacagttgggcaagacgcttacggcctacttaagtcgtttttgcacagctgctgcgagggtgagaagcctggacgatagtacctagcttactactcttcaggcagggatcactattgatctctccactgctgggggtgagctatgggatgacctacagggtcgtctagtaaaaaacatcattgagttcaatgaaagagctcaagtatttgttcgaaaagagatgaaattgttaaagactggctcgggaagcaaacccagcaatgtctcaacaagcactgtctcgaccaaagctgataatccaggagcctctagttcaaagaggaaagataactctaaggagtcagccaaggacaagaaaaagtaaaagaagcacgacaagtacgtgccaatctacaccatttatgccgagcttaatgaaactcaagaaagcattcatctcgcacatgagcacagggtcgcatttcgtaaacctgagctcatgaggcatgtgagacataaga

SEQ ID NO: 371639 - DNA, 509 bp, Cannabis indica
ctactttgatcctgatttagcaaggatcaaattgactcaaatgatcgttaagcatgagtatccattgtccatggttgagcatagcacgtttatcgaatattcaagtactctgtgtcctacatttcaaatggtatcatcttcttcgacacggcgaatggatgccctttctaactttgacatatatgttagagcttcctatcgagtagaaaatatgaagtctgaattagatttatatttggaagagaacttggtacctaggactgaagagtcatttgatatatgcaattactggaaggtgacgggccttaaataccctttgttgagtatgattgctaaggatgtatttgctgtgcctgttagcactgttgcttcagaatctacattcagcactggtgataaacacgtgagtcctcatcgatcgagacttcatccttctacattagaagcattagtatgcacacaaaattggttgatgactgacaaaaaaggtaaatatcattaaataaata

SEQ ID NO: 371640 - DNA, 660 bp, Cannabis indica
actgcagtgtctattgatataatcaattctagttgttagccctccttgtgtcggttcgtaattaattttggtcaaaatattattttacccttctaattacttttttatcttttagtaccgttaatttactagtgaaagtataatttagaatattccatttaaatttgtacacaacttttcggttccagaattaacacttaaagggaactaacattcgatccattagtaaagttaggattgcataattgtagatcatgttcccaaccatccacattattagatttccaaaacaaaatttgtaaaaatcattttctttgagaaactttaacaaatgaatcaaagaaactaataacatgaacagtagttcatgattactcaagatttaggtcggtctatattgttattatatgaattaggtctttatagttaaggatacatatttgataaggatagttttattcatatcggtcattatcatatgtaatctttattatatacaccactttcactttgatgtaatactacattagtaattcaaatcgagattacttgttctgaaaaacgggcatcggtaaaccatactagaaactattgattaaaaatttcataactttaatatattattgactgagataagaaattttctgatatttatataaa

SEQ ID NO: 371641 - DNA, 645 bp, Cannabis indica
aaaaaaaaaagtaaaaaggaaaatatattttctacattataataaaagcctttttttttaatatataattttttttttatctttttttcatattaacacttaataataaaattatcagaatatcgaaaacacaaaagaatgcatcgatacattgcttttttagcaggtacgtacaccataaattttccttatatttttaatgtcacaacactatttgtacgtaactaaaatgaaatctatatattatgactaagaagatttgtctccaaaggattatttttggtaggactagttttgtaaattattactttaatcgaacattatttagctatattttcactttagttttatataattcagttatattaatttaatttgttttctatttgaacaagaaagagatcatgtaccaccagggctggcccaaccaatttgggagtcttgggcgaaaaattaaaattagactttttattattaaaaataaaatcattaattaatacttcataaagttaacttaagaaaataagggtttattttacaaaaacataaaaataacaaaaatacgatttcacggaattttaaatgtttttacgatttttttgattttatttacataaaatatggtctttttatgttgtaatcttg

SEQ ID NO: 371642 - DNA, 716 bp, Cannabis indica
tggaactagcaccgaacaggactagaacaggaccaggacctaaacccaaacccgaacccagatcaaaacccagaaagagacctaaactagaacccgaacctagaccgcgaccaaaacccacacaataaccgggacttggacccagattcaggatagcgacctgggaaacagaactaggactgtgacatattacccgacctagacccgaacttgaacctaggacctagctcgtgaccccacacaagaaatggaactagacttcgacacaagattgggattcggatctggacccagggcttcatccaaacccatagtcggtgtctagctttgggacccagccttagacccaaacactcacaaggagcctaacccacaccaagacctgaacccagtcccaaaccctaaaggggacccaaacccgtaacctgtgaccaaaaattggaaccaaaaccggaagttgaccgggacaaaacaaggacttggacttggaatcatatttgaaattggacctagatccagaacaataatcggagcaggacccggactccaaataagacctagacccgaattgggagccggacccgattcccaacgcaaacctggactcggtacccgaacctgaacctaaactcaaacccaaacatggaaccaaactagggacataaaataagggtcgggacctacaacggcaccccagtctcgatctcgaacccaaa

SEQ ID NO: 371643 - DNA, 673 bp, Cannabis indica
tattaattatttttatttttatcttatacgtatactttatttgttttttattcaaaaaataataatgcctaaacaaaaccgcacaaagcgcggtatattccctagtttcaaataattgaatgcaaaatcaattttaattgttaccatattatttgtagtgcccgttgacgtttttaggcacgaccaaaaggacacaataaatcgtgcttacatatctataagcactaaaaattgagtttgttagcattaatttgatcgtgccaataatatttttgttctcgtagtagtgtgttataagtaattaatatttatcttaaatattagttttgaaagccttactactttttatgaggttatgcatgacttggtgaattagttaaagaaggaagagttagagttgttgattttgatcttgtggagagtggcaaagaaagaatcatttatctcagagggcccgtttggtacgcaggactggattggattagacaggttaatttgtccaatccagtgtttgggcatgttagaagtctggataactaatctagttgacctcatctgtctgggagtatttatcccatccagcagggtgggataaataatcccgtgcaggtgagattttttttatcattttttttaaatttaattttattaatatattttaaatttaattaga

SEQ ID NO: 371644 - DNA, 673 bp, Cannabis indica
atagtgatctagatagtatttccttagtataaatagtaaccgaaaagggaagtaggtcattacccgctatcacaagggggccaaacctttgtaacaaatctctatgtttattgccttttcattctgtttgtgtaacacgtgacaagcatcaaatttatacgacccagttgtcagttgatcactttttgagttgaatagaaagtataatctaaaataaactaaattttccttttatatacaatatttttcttctttcttggaatctattatttattgtttgtttattttaatttgttattagagacatagaacagtaataaattattttattttgttactggttatttgaaaataatttataatttcataaatattaaataatttacaattaagtaactaatttgagctcttgtgcggattggatagggtccaaaaatatgaattctgtacttagtgcaaatcgaatgcactatgagcaaaattgtatgaattaaattagatgaatactcttactaacaataataataataataaacatatttggacgaattatcctaaccaaatcgataaaagtaatgggcaggttaactttttttttagtgaaaaaattattttgacatattgttaggttatttttagtattaattttagattaagtttagtatatttttaa

SEQ ID NO: 371645 - DNA, 857 bp, Cannabis indica
caccaagaaattggtttcttcatgaatcaaaaaattgggttcttaaaactggtttcttaatgaataaaccactttcttggtaattttttcggtaattttgccaacgacaatgccaattctaatgactttctgggaccagcagcaactccgatgactttttcgaaaccagcagctactccagtgaattttccagcgccggcaacaaactccagaaaagtcgtcggaattggcttgataagaactagtttctggtgatttttccggcgacaatggcaattttgacgacttatccggtaccggcagcaactctaacgactttttcaacagtggcagctactccagaaatttttccgacaccaacaaaaaactccagaaaagtcatcagaattggcattgttgccagaaaaatcagtaagaaattagtttctgaagaaaccaatctcttgatgtagaaaccagtttcttggtaattgtttcgacaacaatgacaattctgacgacttttctggggccgacaacaactccggggacggtagctactccggtgaattttttggcgccgacaacaaactccaacgaaattttcagcaacagtgacaactccggcgatcactgtaatttcatttgttttatttttttaaaaaaaatatgaaaagaattttaatattttttatggtaattcaaaatgacatattctatatatgttaagtttttactttaatagtatattttttcctattaaattttcttaacatatttatataaactagctttatatttttatatttacctaaatatgtcttattattattattggctacccttgtaaccaatgtgtgtttttttctctagaaacc

SEQ ID NO: 371646 - DNA, 810 bp, Cannabis indica
tacattgttaaaaaattgttgccaagcaattatcaaaataaagcctacttcagaagatcaaacactctaggtctaactatctcgatatgtacaatcattattagctcgatcttactactatttagcctttgatttgcctttacctacacatgtaaataatatctgtgagtcgacagactcaataagaaaagcataaacgtaacataaacataagccaaattataaccagacacccatacaccaaatcacaatcctatcctgcatccaataggtactaagtctagaacatttgtacgataataagattagccataacatcagcctatactcggtatcgtagtcatactgatgtgatagtgtcaatctgtactttgcctaacatatatccctcggtattcagtgcaattctacgtacactaatactgctcttactgatatgttatctaataggtaatcattaaatatacacgctaaacatgtaaatatatatgtaactattatagtagtcttaccttgtgtcatatcccaataagcctaatagttaataattagggtttataattatattatgagttaataaggtaataagtgagattatgatcctactaatttagttgaacataaattttaaatttgctataagtggataaataagcataatttataaattatggagatttatatggcatatgtgaatgtaatatgagttattggtgtaataaaaatattttcagttttggcgaccttggagactcgatcgggggtcaaaaatgtcataacaggcttaattgatagaattagtgggaatat

SEQ ID NO: 371647 - DNA, 528 bp, Cannabis indica
atcagattattattgagttttattttgacaaaaaaatcggtttaattagggtcccatttgtgctattttaaaaaatacaaggttcattttgttatttaacaatacagaagatctaattggtaatttttataaaaataaggtctaaaatggtatgtaccattatcaagattcacacgacagtgcaatttagttaattaatggtgttttattattagttaattagtagttatttaacttgatcaacataaaatgttataatatctattgcgcaatcatcgctacaaaaaaattagttttaggcacaataaaatttgtgactaaaagtaaaaaaaattgtgattaattataaatcgttcttcttaagtaaaaaaagttcgtgactaaaaatattagtcataaaaaatcataatttattgtgactaaatgtatttttacttacaatatttattgtggctaaaactaaaattgtgacaaattgtatctaaatgctatgttttagtcacaagtaattttttgttgttgctaaaa

SEQ ID NO: 371648 - DNA, 963 bp, Cannabis indica
ggcagaatctccgggtggccaaacacaactacaccctcgacgagtatagtcgggggcatgctgaggtggaggccttgaagaagattcttcgggaggagcagcagaatactctccacgaggaagccttccgaaatccatgggacttgaacatggatccgttgacggactggttcaatcgcttcgtcgggcctaccttggctccttttgcctcggagatgaccagccagttcgtctcccacctgactcaattcccggccaagagatatgcggcctgcgcgtccttgaactccatctaccaagtccaagacatcagctctgccatggctgcggtgagtacttgtaatctatttttctcctttgatattttatctaaggcatctggtctcactcttacttcttttttcagatcactgctgagaccggtcgcctttccaagactctaagtgaccatggctatgtcatgtccgaattcgggggcatagacgaggccatgaggatccttcgggatttgtctgccaaaaggcgggcgatccaggaagaggctgaacggagggaggccctcgcggaggcgaaacttcgggaggaggccaagcagagggaggcccttgcggaggcgaagcttcgagaggaggccaagtagagggaggccgaggtggaggcgaggcaccaggaggcactgaaggtggagggtgaggctgctgcccaggccaaacgtgagctttgggaggccagggaagccatggacgaaatggctgccaaggtgaagtccctagaggaattgcagtaggcggacttgcagtctaatgccaacctgaccgtggagttgaaggagctgagggacttcagagaccaggccttgaagaaggctaaaagagatgagctcctgacccccatctcctgcaagcattgcgccaagtgctttgacgacggcgtctacatggcctggcagtcaaacggccaaag

SEQ ID NO: 371649 - DNA, 620 bp, Cannabis indica
catcacatgcatgcataaagattcaccaaacgtgatttttttttctctaatgagatatggttgttggtttggttcaataatattgtatatattggtatatactgaattcctcttaattatatataccttttgatcgactgttctacacttcattcaacaactacagatgttcctatatatactcacttataatggtttatagctgtaactttcaagtttgtgtgtatacgtattaagattttaatgacctcacttttgatatttcctataaatatctataatacctaattatgaaaaaagcatatttattcacgttatttaattttatgtatagtactcatgcacaaaaattaaatgttataaattataatatctattcagattctctgtcttgggtggattgaggaggttttttactggtcttgaccaagtaccaacctattataatttaattattattcattggtttaatcaatggaaaattagagtaactagctagatatatatatttccaatccaataatttagattttaacattaatatatagatatattatgtttaatttttgtagaccctcatcatagccacaaaccgtaattaatattatatgtatatatat

SEQ ID NO: 371650 - DNA, 675 bp, Cannabis indica
aaattaaaatacaaggggatttcaacaccaattatcaaagaacacccagtaaacacggccaccacactcttgccatatccatagacaatgcaagttaaaaaaaattgttagctaaaaagttcgcagaatgattacaaaaaagaaacttagaaatattaacacggttacaaatagcaaaaatatctttaaaaattaggccaaactcagccaagaataagtttcttttctgcaagatatggataacacgttgataatctgattcgacctccacattgttaaagccaagatgctaacatagaagtaatttatatgttaatttcactatttttagtatttgtcacaaataatatcactatctttgtatatatttttaaaatagcaaattatgtttctaattttaatactattattttatttataatacacatacataaaatattatattttagattatatataattcaataagtacaaaaagaaaatataagaagattagaaaagttgaacaacaccgcgctaagcgcggcttagttccctagtatttatataaaagaaatcgtttcaaagtgatgatgtgacctctcatatttcttttcatagtatttttaccattttgtgagagctttaagttttgtctaatgaaaaaaaatctactaactttgtaaaaaatcccac

SEQ ID NO: 371651 - DNA, 561 bp, Cannabis indica
atatgattttggtaaagatgccaacaaaataatagcttgatcctcttcatcaattttaacctctacacttaacaattgagttatgcacttattaaatctatttatatgatccctaacatcttctccttcaactatttctaactcatataattgcttcttcaaatataatctatttgttagggattttgacatataaagtttttctaactttttccataactcagacggacatatttcatttaatacactatactttaattcaggagccaaacttaaatgaatagtgcttaccctttcgtcgcaattcctcctaatcttcatcagttatactcccaggcttctttccttgcattgcctttagcagcccttgttgtaccaacacatctttcaccgtgctcctccataaactgaaattattcttcccctcaaaaagttcgatctcaaattttgtagaaaacacaatctttgacattttcagtgtagatctaaaccttggctctgataccacttgttgggaaaaatgataaacttcaagcgcagtaaaataacaaagaaacgaag

SEQ ID NO: 371652 - DNA, 464 bp, Cannabis indica
ttattttatgatgttattgtatattttttattttaagtttctttttattattttgtttctaggtttgaaactggttttcacatttatattttgttttagattattgttgtgcattgtatgttgttttgtttatatttatgagtattttttttgtatttttttctccatttggttgattgatgaaaatggtttcaattattttcattttatatcatttttgttttattttcataattttttattattgttgtgtgatgaaactagttcattgatgaagaaacgatttcttgatgatttttccggtgattttaccggcgacaatgctaattccgacgattttttcggtgccgacggtaactctgacgacttttatgagattaaatatatattattgggtgattctacaatgcacccctctacttgtttcgacatccagaaaaacttttagtctatttttttttttt

SEQ ID NO: 371653 - DNA, 1137 bp, Cannabis indica
ctctacaatttttaaacgattgtcggaccatgcaaattttggttcctgtatcaattataaaccaaccaataattagtgtaatgtatttatttatttttttaaaaaaagaaatgtaattaattagaaaataatatatataacaaagtccattcaaaaaatatatatacaaagttttttgttgctctctcactttatttttcttttgaatatatatataataaaaaaaaaatattagaaacaagatcgaccagaagtacattacaaacagttatagaggttgtttagtatgatattatctttttatagattgataattttttacatattatcatgtttaaagttttcctatttttaagtgtggaaaaaatattactttagaaataagattactacgctttattagagtaatcttaaataaatattcctttcaatcttaataccacgaacataatatattaaatttttgtatataaattttcacaacactttatcgtattcctttatttagctaaacaatatccaattaacagtaatataataataacaaaaatttaaaaagaaaaaaaaataatatatatattttcataaagtattgggttgcttgtgccattgcatcatctacctaaacttttttgttttttttgaaagaaaacacttatctttttttttctttttttatatacatgcctaaatagaaaatttataactaaaagtttagatataaattttttttgagagaaacttataaagtaattataattggaacaaaagcaaaagcgtcattaaatttattacacaggttaaataaaaacgtcaaaacggtattatattatattagatgatcaaccacgttagttttgaaataaagattaaaagaagggtggctaatgtaaattgcccatttgtaaagggaaatttgaatttatatccatattttgtacctaaattaattttttaaactaatacttatatctattgaaaaagtaggatcacttttccctatatcctaaaaaaacccctcttattattttcaacctttctctttcttcctcttttctctgtcaaagaaagcctcccaaccgtatgcacaccaaaaactcaacccgtgaggctagatcgcaccacccaaaactcgac

SEQ ID NO: 371654 - DNA, 652 bp, Cannabis indica
ttgaataaaatagattacattgaaatggagttttatttagggcataaaacccaacaagaagatcttggtgccaacctctttctagcatcgaagaatttcctgaggctaggaaaaagatctcggcttcaacaaatgggatctgatgatgaggagaatgaggtctgtgcagagatcaaggctctctacatgtacccggtctttctcaagctatgtgtagacgttctttttctgagctacgtgtagactgtctttctcaggctatatgaagtcggtctttttcgagttcatcagcttcccctctcatcctctgtttaggaagatgacttaatggtttgcctctagtggcatttttgtaaagacaagtttgtaaccagttttaggttttttcttatcttaaatgccttgtactgttttcattcgaacttaataaatttgtgtttgcttgcatttttattcacaatgtaatcaaatatattttgatcaaatgtacagtacttttgggtttttccattgctcgtaatcttcctgtttaagtagttggtaatctactagacttttcgattttcgagcagttgtgaattctacctcgctatagcagttataatcttccttaagcaaacttaaatatgctttaaggattttatcactttgt

SEQ ID NO: 371655 - DNA, 1026 bp, Cannabis indica
tgtcggtaatagcctactccccttgagttttattgatctgagttgcaatagtcaataacaggctattgattgcaaagaatgagaagtgtttatttttctaagtgtttcccattgtccctcccctcccaggtcatgggtgaccccttatataggggagggggtcggtgcttctcgcttcaagagacgcgaccaacgcggagccatctcaaccgtctccttgatgttcggaggcggttggagtctgatatttaagataatatcccgctattttcgtgggttgacaactgtctttgagcctttcgcgggatttgaacatttgaaggagtcactgatgacaagggtcccttatgggtgtgacatggtcgtcaaccacctttgaggattaagcccatacttgggggtaacacccccgggactctcgctgaggggggatgaccaccatcatagttaggtgaccccccaagcccaacttgagagaaggggaggaaggggtccccccttgaaacccaagttggaagtgggggggtcccccccttaaacccaagttggggggggggggggtccccgttaaacccaagttgggcgaggggggggggggtaccccccgtaaaaccaagttgggggggtaacccctcgttcgttgtcaataactatggtgcaatgtggatgtccccatatacctttgagaatgtcattatgtctatggtaaaatgcatgacttgtaccatgagtgtgtacggggtaggggtatacccctagactaaccctttagggggtaaggggtgtacccctagactaaccctctaggggtaaggggtgtagccctagactaaccctctaggggtaaaggggtgtacccctagactaacctttcaggggttaagggtgcactgctaaactaaccccatggagatcattacatttgatgtaggagtagtagtatatatcccctagattaacttggcatgtgggtgctattgggttttatgccctaaataaaactcatttcatataatcaaatttact

SEQ ID NO: 371656 - DNA, 541 bp, Cannabis indica
aatctccacatttataatttttataccaaaataatattattttatatatagtaaaactcatatttattgtcaatataaatgcccataaattaaattaaaatgagctaattaatataatcacaatccaatttgactattatgacttaatatttccttatttactgtttatataggtagattggaataccaacaccataactaatattaaagcccttctaattattattgccactcaatttacttaattaatttttaaaatatatccttagaaattgattaataaaatttttgaaaacttccccctatttgcaaattggtagattccaatccatcctaaataaaacataagtcaattagagttattaccatttaaaactttaatcttcttaaataatacaacaattcattttaaatctttccttaaatcataacttagccaaaatcaacccttttataacaattagtaaaatcagaacaacgcataatttattaactttaaaattttattatatttttaaagtttatgatatcgtgatatttt

SEQ ID NO: 371657 - DNA, 679 bp, Cannabis indica
gatgcttgtgaaattttatgaaaattaattgaattttaatttctggaattatttttgttggatagtttggaaaaaattaagcaatttatttttttacagaacttaatttcgattttatttgaattagttatgattttttgaagttttgaaaaaggatagagtgatcaccctcatcccacgcgcgcggatgacccattccctcggttaggtgcgtgttcgaacaaggtgttgtccgagtaacacgcccagggatgtctgaatccctcactgtgctcgcagaaatcattcaagggaccccttgcgccgagttttctcggctgatcacctagtgggcgcgcgcggatgtgtatgcaactgcataccatccgtacaactcactatttttttttttttcgattttcttcgatttttcatgctatttcatggaattaacgttcgattttttgtgtagttttgtattttgatttacacttttcatattttaaatctaattatcagaattaaattaattgagttttttaaaattaatttaagatattagtgttaatttgaatttgaattaggtaaaaatctatttttttttgcttaattaattatcttaattttaaaatttgattattttatcttatttttaaatttaaggtcagatattaatatttttataaattattctattttt

SEQ ID NO: 371658 - DNA, 559 bp, Cannabis indica
aactttaatttatactaaaatattatatatttaggtgtctataaaagttaaaaccacatatagttttacataaaaatatttcataaaataaaattcaatataatacaatacaatacaatacgatctaatacgacgttccaaacaagctctaagatgcttatctatactatttattaaattaaaatatataaatatataatattaaaattcaataatatataacggaataaggtaactcttaacattattagaccaattcttgtccaaaaatacattttattggatatgtccccacgctatatgtttacattaataataaaattccaggaaaaaaacattaataatatataaattaataaatgagaattttattggtaagaatgttataagaattgtaatgtatttatataaatttattaatgatttacattatactataccacaacactattctatcatttttaaaaaatttagaagaattatttaaggtactcgtttggaacgctgtattaagtcgtattgtattgtattatattgaattgtattttatgcaatattt

SEQ ID NO: 371659 - DNA, 753 bp, Cannabis indica
aaataacactttattatctactaaagtaatcctacatgaccattattatctactaaagtaatcctacatactccactcaagattactccataagctttttttatccctaacaaaagtgctaaaatgagtgtaatacacgatgataaaaacgtgcgataatgtattaattatgtatcacaataatggaagattataagttgcttaaaagaggtggtgtattagagtaagtgagtgggctttaaaaaaatgagattaagtttacaaaaaaattggggataagttgaaaactaccccttttcattacacattaatcaaatataactctaaaataattttaattgataaataccctcttttataatcaaagtaccaaatataacctcataaaacttatcaaaattagacttcttaatgtacataatgggaatataacttataaaagtgggtataaattaaagagtagtaaaatgaaggtaaaaattaaaatatgagacaaaaagtgggtacaaagtgtaatttcctcaaaaaattgctctaatttaaatagagttatttgcgacaaaaccttcccaactattaatttacttacaaaaaactatccaacttcatattttagtgggaaaaccctctaaagtactgttccctttgcatttttaaggtgccgtctgtccaatctcattaagtcctaattttgcccacgtggcaatgacaggtcactaaaaaattatcctacgtagccatattttacaaaat

SEQ ID NO: 371660 - DNA, 590 bp, Cannabis indica
caacatatcaaccagaaattaccaaaaaaaaaaacacactaaatcaaattatgccattaaagatcaaagcttaggtttcaaagcataaacttgtgaaaatccaacataaaagaagtaaaaccagctaccagaaccttcaatcaacttaaattgaacaaaaaaatcgaaccccaagcaattctaaccctaacggccaccaattctaaaaatcactacttgaaaccaaattcaaagcttaaaaacacatataacaaagaactaaggattaccttaacctcaagaacacttgatactcagtttgattccagaatgtacgaggatttgaatgggtttcccctggttttgtggctggttcgaagagagagaaggagaagaggaaaagagttctatttcttgatttttcctttaatttcctcaaaatgaaaaaggatttcctaactaatccttcctgaaaaatagaaggccatgtgtcacactctaggacagccaccaaaatattcccttggcaaaagataaaatgctcttaatgtgaaattttagcctatttcaaacctaagggtaaaatggtcaaaaaccataaccccgcacaa

SEQ ID NO: 371661 - DNA, 859 bp, Cannabis indica
agaatgtattaggagacattattttaatatgggttttttttattattaagaatagatagtgaaattttcctagaaaaaaaaaaaaaaaagagtttttacaccacatagttaaatttctaaattttttacttttttattgtagggcggaatttttttcaaactactgtgtttttttttttcaaaaatactatataagtttggtactgtgtactgtattaagttttcacgattgttacatggttgttttttagttgttctactattattttaattgttttgttttattgttttatgaatattttataaaaaacagcattttttatataaaaaaaaaaataaactgtgtgacagtaaaattaataaatttttgttcaaaatccagtatttttataaaaattccaaaatattgtgtgttgagtgagtattattaagcttattttaccaaattttacaaaattcctatttttcactataatttttttattttattaatttatatttcatttttttagattattttttaataaatatattgtcacattactcaagatgtcttgggttagatctgacactttcttatcattattatgagaatcatatttgattgatatatattatgttacatatgtatgtatgtaataggttcctctaggtttatatgatgagaagggaatgtctacaaacaaaggaagcatttacatctgtgaaagtagcccaaaagggatttcagaagcctatttgaagcaatttaagaaggatttgtcattgttccttggatcaagatctgaagaagtgatccaaggtggaagaatggtgctaatatttttaggaagagaagaacatgatcatcatcttgatg

SEQ ID NO: 371662 - DNA, 509 bp, Cannabis indica
gtcttcctaattgttaatttttaggggagttttcaatattatacataaaattaattttatttataaaaatacctttaacaaaattatttgcataaataccgatatgacaccttaactcaaataccgaaatttaaaataattaccgaaaatagaaaaaattaaaaaaaaattacccttctagaaatttcaatgttttgcaagttttggaaaaaaaaagcaactttttagttgatattaatgtaaataatatatcaattagttactttttattaacaaaaattatttcaagataatttttttctcatacacattcgattgcttattttaaatctttgatcagtcaactttaaaattaatatatatatatatataataattttaataatgtaactaattctattatgtttaagatactatttggtaactttataaattttctatattaacatatcaaaaaaatttattaaataaatttgttaatcagtatactattactatatcgtaacttt

SEQ ID NO: 371663 - DNA, 572 bp, Cannabis indica
atttaaaatgtattttcttataacatttatttcaatctagttattttaaatatatatttatttaattaattataaaaaaaataagtaaagtgtgttgcctttaaatcattaagagccgtgttaagttttgatcgttgtctaacctgcctggcttagggattcgcaggctaagtcctattaaatggacgccccgcaaaatacaagaagtcagggttatatggttgacacttgaggcggtcagaggaatccccgaaatcctcgtggtcgtggccgtggccatggaagagctcagagtaagctcctcctgactaggaacaaagatttgcagaaatgcaagatataatccgccaacaagatgaggagattcagagattgaggcagcagggtcctcctaccgtgcctcctcaagtggttcaggccgtggtagttcctgcggtgccagcagaacaacctgttgttggcaaccgtatggagccattgtacgaaaggtttcggaagcaagcacctgcagtgtttctgggaggtcctgatgtaatgaaggctgagcaatggctcacagtgatcgagcgtat

SEQ ID NO: 371664 - DNA, 1008 bp, Cannabis indica
tttttttattttaaatttttgttgtcataatatttaaaatataatttatttttatttgatagaatatattttttaagaatatgaaattgaaagaaaaagttaaaaaaaaattagtacaagaaataaattttatataaattaaaaataatttaaaatagagtgtctttaaaattttttaaagtgttgaataaattttttctaaaaaattaccatagtatccttcctatcaaacatagtaggaaagataggagaggtgaagggagagaatataaggaggagatcgaatccattgtttaatgatagaaaggaaaaatggaggagagttaggatggagactttttcttccctcaaaatctcaaaaatctaatccctccacttttaaaaagatttcgaagaaagacaaatttaatatatcaaataccaaatatttatataaaaaatattgtggtaattttactaatttactcatcttagtctttccaacttactcttaaaatcggagagttacaatcatcttccttcatcttacactctgtctatcctaatctccctacttcttaccaaacataactaagccacctaggtagactacaagtaaatggttcatcttctaaatgtctgaataattattttatggctaattaagatttttgttcactgaactctgacatgtactaaatcatggtccttgaacttttaaggtcgttaaaaatacccctgaactattgagattgttggatttaatgacttttgtctaatttcattcaattttacgatttcagtgattgtttatgtactaaaccatgttctccagactttgatatctaccaaatcatgcccttcgaactttgacatgtactaaattatgtctcctgaactttcatccatgttagacttttttactaaaattagaaaaaattccttaaatccaacaatctcagttcagggggcattttcaataccttaaaagttcaggaggcatgatctggtacatgtcaaagttcaggg

SEQ ID NO: 371665 - DNA, 677 bp, Cannabis indica
ttcgtggtgtattgtgatgcatctagaggggttttggggtgtgtattgatgcaggctgatcgggttattacctatgcctcccataagttgaaagattatgaacagcggtacccgactcatgacctagaacttgccgcagtagtgtttgaatatgagggcagaggcgtgcattatctctacggggagggatgtaaaatttatactgaccataaaagcctcaaatatttctttactcaaaaagatttgaatatgagggcagaggcgttggttagagttgtttaaggattacaactgtgtgatcctttaccatcctaggaaatccaatgtagttgtcgatctcctgagcaggaagggtcccgggcaagtaatcagtatggttcagatttaacctcaattagcggaagacatgatcaaatcaagcatcgactttgttgtaggcaaacttcataacttgacgctgcaatctgatctcttagaacgaattaaagttgctcagttaactgatctagagttagtgaatatcaaagaagaggtttcagctggtcaagccaaagattttacagtgtcagatagtaggatgctgttgttcaagaccagagtttgggtttgtgttcctaatagtgcagaacatagaaatgaaattctggaagaggcttatgttggaaatattttaccag

SEQ ID NO: 371666 - DNA, 914 bp, Cannabis indica
tgtatatttgtttgtttgtgctataagatagtgggattgtgtttgagtcatggtggaggtggcagtaacagtgatggtggttgcggcgggtgggtggtgatagtttgaaggtggtttcggtggtggtgatatggtttggaaaagaatgaagaagaagaagtcagaaaaaaaaaagaaacaaaaagaatttttttatatatatttattgatttttttaaaattttaattaattgttttttgtctttaaaaaaaatatattttatttttaaataattattaacatgagccaataaaattgtgccacgtgtatattgtgtccacgtggacaatccaccatggcagttaacagtcaaatttggatggaagttgtaaagtgctaacggtatcgtaattttaggagttttatcgctcaaatttaggttttgggagttaattgcaagtaaaatgaaactattaaggattttgctgccatttacctatttttaatatgttatgtagtagaaaaaaatactacaccccctaacttacaaaaaagaagtacgcctccattaatttaaattatgagtccgtttctgaaataaataacaaaaatatattctcagtgttgcccctgattttgcccaatatacgtggaccaaccagacaaggacacgtggatcaagcaatttatgattcgaaatatttgctaagtctttacgctataaggcagcgtccgggacgtagctcccggagaaggcatatggaaccctatatgctcccggaagctcgagtaacgctaaggcacctccgcggggtgtcaggtttctcctgagcaatcaagtcgcatttaatgccgcatgggaggaaacgtgttgggactgctacacgcaataaagtctgacggcacaacctccaaccagcagctacaaagtaat

SEQ ID NO: 371667 - DNA, 537 bp, Cannabis indica
ttcgtacaagtcaaggataacttcgtcttttatcgtttttgggctgaaaaactctatttaatgaaagggggtcgcaaatgatagaggggagaccatatggaaccctgaaaagacaagaagaaggctcttggagcaagcatgggcaatccgcgacaatcctccatctaatttctttctcttctcttgatttcttatatttttatttgtgtttagtttaattatggatttgattatgagctaaattctctaattagggatttgatggatattgactgagattattctatgaattaatgctatttgattgttcttcctttctctattatggtgatttattcatatttgtgcttattacgtgtgtttgattggccaccttatgcatgatctatgatcttaatacaaaatctgaaaagtgagtaatgctctaaatgaatagacatatattttgatatgaaacgagagtattcacatagcttatatgacttttaattttttgctttgggcttgatgtggctgttagaagattgtggtggatag

SEQ ID NO: 371668 - DNA, 624 bp, Cannabis indica
gaaataaataccaaaaaagaaaacgaaaaaattcaagcaaatgaccgaaaactaaaattcatgattatatatatatatatacttgtatacacatattaaactatataaaaacatcataatgaattataatcaattatatagaatgaaatgaataaatgaatgcgtataatatataaacatatataagaaaataaatatatgtatatacgctgtctgaatgtgcatatatataaatgtatatataaacgtgaaacgtgaatataaaagtatatatttgattaaaattatatagatataaatctatatataatatatatatatacataagattgaaatatatatcaatgaaatatatatatatatataaataaattgactatgaatatatatatataattgggattatataatatgaaaaaatatatatataaaaatatatatatataatgaagaaccccgtatgtatatgtatgaaacttaaaaaaatatcaaggcagagatatataattcgctctgataccaactgttagacaatttatatgtataaactgaaacatatatgattagtataaaatgcggaattataaaacatatatgtactataactaaggatcgaaatacctc

SEQ ID NO: 371669 - DNA, 248 bp, Cannabis indica
gtttggtttgaaggaataaaagtataggaataggaatatccataagaattagaataggaatggaattgaataaaatttaaaatatatacaaaaattaattaaaaaattattaaattttttcaaattttgcattggaatgacttttcaatactttaaaatgcaaccaaataaaagaaatgaaatgaaaattgtttcattttcattctattctatttcattacatccaaccaaacaccacctcagttctt

SEQ ID NO: 371670 - DNA, 471 bp, Cannabis indica
tatgattgcagaatataatttttatatgccattgtatatacgtaaaaaaaaaaatcatttaatagtatattcgtttatgtttatggtataaggtatatcatttgtatgtgatatgatatatcgtgaaggataaaaagaaaaaaaactaactaaataataatttaagtttttagtatttttttaattttgtacggtatatctttattatgtgctacgatatattaataaataaatagagtggtatattatttttatttgctatagtatatcatgaaagaaagagaaaaaaaacttgtagaagtttattaaagtttttttttatatatttatttgactatagaattgttgtggtatattcattttactctaaggtataatatttatttgttatattatatatcgagaaggaaagaaataaaaataaaattaaaagaatacctatcagtaaaaaaaataaaaaaggacataata

SEQ ID NO: 371671 - DNA, 648 bp, Cannabis indica
tgtttaaacaacatacttgtgagtagatctaagatcctggtaaaatatttttgcaacaacgtggcccctgctcagttatgaatgatgttttttcttgatcatcgggatgcattaagatttcgttataaccagagaaggcatccatgaaactcaacaattcatgtccggctgttgcgtctaccatcatatcaatgtgaggaagtggaaatgaatccttcggacatgccttgttgagatcagtaaagtcgatacataccctccattttccattcttcttcttcacaactactacgtttgctaaccaatcaggatagtcaacctctccgactgatcccacgtcgattagtttttgtatctcttcatttatcaccttgttgcgatccggtgcaaatttacgtctttactgcctgaccggtgggtaatcagggtcaacctacaacttgtgaacaataatgttagaatcaatacctatcatgtcctcatgggaccatgcaaagcagtgatggcgtttaattaagaattcgatcagcctggctcgaaactcaggtgtaagctttgttccaatctggactttatggtctgggaactccttgctaatgcacactgttgggttttatgccctaaataatcaacgatgatgtgtactta

SEQ ID NO: 371672 - DNA, 544 bp, Cannabis indica
ctaaacaatgtgggattttttacaatgttagtagatttttttcattagacaaaatttgaagctctcacaaattggtaaaaatactataaaaaaatatgagatgtcacatcaccacttttaaactctcttttatataaatatattgattagatatattgtgttatatttttggtttgttttttttaaaatattttaatttgaaaattaaagacactatttgaattaaatatttaattttaaattacgtgacattaaataaaattattatataactaaaaatatataaatgataaaaatatataatattaaaataaaactaaaaatatatagctaattggataagactaatcttattaatcagtcaaaaaaaggggatattgccaactaaactacctgaactttacggtctgtaacatttaaccataaaaatcgaatttttggtggctaaactacctaaaccctggttccattttgctgcacacctccgtccaaaaatcaccgttaagtgccacggtggactatccatgtgtacacacttgtacac

SEQ ID NO: 371673 - DNA, 556 bp, Cannabis indica
ggtattatatgtgtatgttttcgatttgtgattgaatctttgtgaatcttttctcatttatatactcctgtagttgcatgtgagtctgaacatctctctttctcagttttctttttctcttttgcaggcatgttctaactctattttggtggatttgggttacaaaattctctcacaccttcaaacgtcaattttttgaattgtaaaacatatttacagtaactgattctcttgttttatttcaattattggtaaaaatttcaaattttaaggggttcatttgtatataataaaaatatggaaaactaaatgtatattacataattttctttgaatattagtataaaatatactaaataaaactatttcatatctatatgcttatttgttatactatataaaaattaattacaataaacttaaaaagtaactaaaaatataactttaaaataactaactagcgatttaaatatttaccaataagttatgtgtgtttttttaagtttattgtaacttattagtttattaaataaacttgaaagtaatataaatattt

SEQ ID NO: 371674 - DNA, 793 bp, Cannabis indica
aattatcagaataaaattaattaatttttttaattaattttagatattagtagattttgaactgaaaagggataaaatcgaatattttgcttaattggttacatttatttttaaaattttattattttatcttattttttaaatttaaggtctgatattttatattttagattatttaattaattttaaaaaatgaccttatttgaaatttaaaataagattattttaatctagaaattttaaaatgtaaccagatattttgctaactttcaaatttttataattttatttaaattaaattataaaattagataaatgaatttttttatcattttattttatgggatatttaactttatttttaaataacataaaatttaaaaaattgttagcatatttttgaatagatatttagatttgttgaaagcttaattttttaaatttataggtttaattttgaaatgaattatttaatttaatttattatttttgaaaataataatttattatttagattgttttaaaattgtttaattaatttaaattaaataaatcttatatccaactatcaaatttgttgcatgtgtgtgttttatatatattttttttaattttaaacttgtttttataaaacctattattatttgatccaaaattcctatggttaacttgttgacagatccaatgatctgattttaaccaatggttcaattctcaataggtcaaataaataatttgtaacaggtaaattttgcattcttctttcatctatgtataaacctagtaacatgat

SEQ ID NO: 371675 - DNA, 539 bp, Cannabis indica
aattaaacaaacaatgtccacataacaaattgtgaaataaaatattaatataattaaattgttattttaactaaccaattattttaaaaatttagggttgttaaaaacaaccttaaatatcttttcaaaattaaaaattcaactaattttaaaatatctaggtttatttgaattatttcatcaaattaaattaaatatctaataagataaataatttgaaaataaccaaatagatattttcaatatcattttctaattttataatttaataaaattaaaatagcaaaataaatctaggtgttaagtcttgtgttaaatctaggtgtctaaatggttgtattgggggaaaagggaagcttgatagttttattcttaatgtaattgctaactggccgtgaggggcagagggctgggaggttggtttgttgctttggggagtttggggtttgttgtttgctcttgcttgtttgaataaagatttcttttcttgttcaaaaaaaaaaaagtaaaataaacaaattttaaaatagatatggtta

SEQ ID NO: 371676 - DNA, 730 bp, Cannabis indica
ttttattttattttactttttataaaattcaatatttattgagggaatctccatttttttattattattattctaatattcaaattaaggcaatattttattgataataataaaagtgaagttcaactcaatttttagctaaactttcttaattatagcttcacttatatttaacattctaaactcaaaattttagcagtaaaaccgtttaaatttaaggtgttatccacttaactacaaccgtagagtatttatgtgtacactcttatatacgtgacacatttatattagtacacttaatattattatttcaaaattcattttaagattagataaaattataaaataaaaaaatattataattttaatataatatttataaaattataacttaggtagatctgaaaataaataaaatttattttctacttttagtattaatttttaataaataatacaaaaattacttaatttaagctagtttaaaattaattaaaattaatttttaactcaaatttaattttctaaaaatatatttaattaatttaaaaaaattcaatgtatttaaaattaaatatataaatttcaaaattttaataaaataaaataaagtatgagcattattttaatttatatcgatttaaaattaattaaaaaaaattaatttttaacataaatataattctcttatttaattaaatattataaaattatctaatattcaagtatc

SEQ ID NO: 371677 - DNA, 630 bp, Cannabis indica
tctgcttcctccatttttttctgtaaatcctcgtactgttccattgtaacagtcgatggggccgaagccttagacgtcgagatcgctccccgagtacttgcgttataacaggaaagtctcgagggtactgtgtaggatctacagcagtctcatcaggctgatcttcagtaggcgctggttgagttgcagctatttcaaccatttgctcctaaaacaaacaaataaataaaatggttaatacctaatacaaaataaattgaaataaataaatagaaatgaattaaaatgtaaacttacataagcttgttgcgcgtactcgttgcgccaattgttgcctttatggtgaaacttttgaaaaatttccaccgcagttggcggttctcctgtatcggggttagcctatttttaagaaaaaaaaaaattattattgttattttaccaaaaaaaaaaaataataaatcaatgataatataatatataaacttactccctcgacaacatgtgaaacaataggctttgatccccagcctccttgaagtttcaccttactctgactttctttatattttgctgctctcgcttgaaattaataatttttctaacaattaattatttattattgactatata

SEQ ID NO: 371678 - DNA, 809 bp, Cannabis indica
tactgggtatattggggagtatatcccttttctgtcgcttttcctctgtccgggtgctgcctttggaggaccttttactcctcgagccctcagaagaacctgctagactggctgtcggagcggagagcgagggggcttgtccatttatccctgagggatttctaaaatgggacgatgcgggggccagggcctggccttggctatatccgggagtggcagaaaactatatgccgctcatcggtggagctgctgctggcacagtgcctgagagctgggctccgggcacatatcctgctaccccggtgggataatatcctccataggccactatttgggcctcttcaaggttaatgtatttttggactctcttctggaagtcctgaaggtttgaagctccttcttgttgtagttcgttccagaatggagtccctgtacggatgcctgcttggagaagggcaagctgttgtccgtcatctactttcttggttttagaggcttcctcccggaacctctttatgaaattcttgagtgtctccgtaggcagctgcttgatgttagtcaaggcgctgacctccaggttgactttccttgcggcgacaaattgtctccgaaagttggtttgtaacttattccagcaacccacggatcctggttccaatttcttgaaccattcttccgcggacccgcttagagtaagcgggaagcacaaacacttagcgtcattgctgactctcatgactgtcatgactcggttgaaccgtgacaggtgatcacttggatcagagttcccggtataagctgccatttcg

SEQ ID NO: 371679 - DNA, 1047 bp, Cannabis indica
ttttttggccgttagaaattcccctcgaactattgagattgttaagtttaaggacttttgtctaatttcattcaattttactgttcagtgattgtttatgtactaaaccatgctccccagactttgatatctatcaaatcacgcccctcaaactttgatatgtactaaatcacgccccatgaactttcatccatgttacaatttttttactaaaattagataaaagtccttaaatttaacaatctcaatagttcgaggggaatttttaacggccaaaaaagttcaggggcacgatttagtacatgtcaaagttcggggggaaaaattactaattagcctaattttaatggaggtacttcatttgcattctttaattgtcaaggagtctagattttctttattagtaagtggacttttgattgattggtattaaaacactaatcctcaaatttgcatggtttctagaattcattatatataatataaaaaaaaaaattgccttttcttcacttttacgtgacagaatgaccttcttctgcctggacttcgtcctaacacagaatgtttcatttcacgctatgacatatatatacatattaaatattaataaaatacaaaagcatatttgattaaatttttaattaattaattattaatttaaataataataacaaaaattaaattaataaaatcaacaatattttttaaatatataaaatttaatctaactttaaatttatttataagaaaatatatctaattaattttatttagtaaaaaaaaacctaattttattaaacaataaaattaacaaataagtttggaaattttgaactaaataaatttattataaagtatgattaattaatttaaattaatgtataatttaaatttaaattgagatttatataaaaaataattattggtacttttaaataattatctaagctatattttaataaattagttaaatttagatatttaaaataatttttaaaaagaatatttaattaattgatttaattagttttaactgttaactttaac

SEQ ID NO: 371680 - DNA, 706 bp, Cannabis indica
aaaccatccttgccttttcttttccttttcaagtagtggagcacttcaaaagaaaccatgatattatcagttattagtctccccgggatgaacgcactttgagattctgagacaatttgatccatgtacggcttcatcctattagccattactttagtaatgatcttatatagaacattacataaagcaataggtctaagatcgaccatactttcaggaaatttctttttcggaatcaacacaacattagcatccccacaagctgaatcaagctctcctgtagttatgaatttctgaaccaccgccacaatatcaaactgaataatttcccaacatttttgataaaatgcaggagtcataccatcagggccaggactcttatccggatgcatactgaaaattgctttccttacctcctcggcatctattggttgatggaggtcttcattgatctgacttgagaccttcctttgaatacactgaatcaccatgtcactgcccaggtttgaagcactaaataaagatgagaagtaatccactactacatcctcaaggccattttcccaatccttccaattgccactcgaatccttgagtttcgaaatttggttaaagcttctacggttgctagccgctctatggaagtatttactattctgatcgccttccttcaaccaaaattgctttgccctctgcttccaaaaaa

SEQ ID NO: 371681 - DNA, 632 bp, Cannabis indica
tgtgcagggaaattttggaaatttattcatgagaattggcaaagcttgccaaaagtataaactcccaaatagaaaaggttcttggaatagaaaacaaagaaatttccaaattagttgaagatggaatgcaatcaataaatatgatcaactaccctccatgctctcaaccagagaaaattatagatgtgaaacctcactctgactctgtggtccttaccattctccttcaagccaaccaagtggaaggcctccaaattaagaaagagacaagtgggtccttttaaagcctctctcccaaatgctttcattgtcaatgtaaaaacatagtttaaaaaagggtaaatagcggtataagtgctcaaagttttaagtttgtaagtggcataatcccaatgtttatttttagtggcataagtacccaatgtttgtaaaactgtaaattttctctaatttcgtccgtacaaaccctgttattttcttaaataggtcacatataaggtctagattcttgatcattgcgtctagacagaaacatgtagtatcagttacttccaaatgttcctttaataaatttaaaacggagtctgtatgacaaaactgaagaaaaattacagttttacaaacactgggta

SEQ ID NO: 371682 - DNA, 562 bp, Cannabis indica
gctaccatttcaatagaggacacatgtcaagttaaggggaatatggatcgatgaaattacttttaagggaataactcattaattgcgtaagtaacagaatatacttgcaactcgttgattataaggtcttatgcagggtaaagatatacaaactgttacctagtgtatcaacgagaaaccatattgcatttgatgcataaggcaagacatcgacttggttacccctgggaagacaaaaagcgatgcatattgattgtgaaaacacttagcgtacaatatatacaaactaagtataacagtcgggtggactcaagacctcataagcgagtcgcctatcttgctataggaaggcacactcctttgactttaaccacttcagacgtctttcagtgagacttatagtcttgacgagtcaaaagctgacattcaaatgactgctgaggtattctttgtaataagaaatgtgattgtcaaaatgaagcgttaagccttcaaacaaagaagcaatgaagcgtacattgtcgacctcgaaaagataagagaaaaagctccagctcgctat

SEQ ID NO: 371683 - DNA, 574 bp, Cannabis indica
aaaatttttatttggaatttaaaatttaaagtgaaagacttaaatttataccaaatattcttgagttgttattctttcttggaccaccactactaatctaactctaagtctaagttgtctatagtaagcatatacaagtaggagatttttaagatcgatgatttatatcatttcgggatagaatatcgggaatatagtcatctgcgccattcaatttcatagaagaaagtagaatgacatcataactagatgatttataaaccattcatccaatgatatactatctaagcaaaaagctaagaggaaaaactataggataatttcgactaaaataagaatccaacgatgtcccggtaggcgagagtcaaagttgttcttattttataaacttcttcattgtttcatattgtaaatactagtctaagttatcatctttggataaacaattagatgttacatttacaaatacttattagtcgagatctagcactattatgtttgtttaacggatgacaatcctttgggatttgtcccattaaaacaacaagctaagttatatcaacaatgaagattc

SEQ ID NO: 371684 - DNA, 561 bp, Cannabis indica
atatctcaactactttttcaaatttaaatatttatttttgaattaattaattaatctaaaaatataaaaccaatagggacaccttacaatactggggcgtagacacagtgcatgtgtctaaattaagacaagagacgtgtcttttgttttaacaacttttatctttttcctatttaattaatttgaaaaataaattatttattacaaaataaataattaatattttgacaattcaaaataaatttttttgagcttatacaacttttatcccactccttgagagtgtttcaaggtggcgatctaaagaccatgggcctataattctaagtttcaataaactatattatttattgaatctaatcaaccaaatattcttgtttattaattctatgattgctccattataaatatagaattgaactcttaacaattatataattatatctactgagttttactgtagtgtccattaatgtaatcaatttcagtaattagctctcttagtgtcggtttgttattatttttggtcaaattaatattttacccttctaattaattttt

SEQ ID NO: 371685 - DNA, 542 bp, Cannabis indica
atatttactaagttttactgcagcgtccattgatataattacttccagtgatcaaccctccttgtgttatttttcaattagttttagttaaattactattttacccttctaaattacttatttatactttagtaccattaattcactagtggaagtataattcagatcccatttaaatttgcgggcaacttttcagctctagaattaacacaaaaaaggaaccaacattcgatccattaagaagtcagaattccataattgtagatcatgtttccaaccatccacattattagatcccaaaatagaagttgtaagaatcatcttctctaagaaactttaatgagtaaattaaataaactaataacatgaataagaattcatgattactcaggatttgatcatcattatgatatgaattaggttatagtaaacaataagtttgataaagacagctttattcatatcgatcattgtcatatataatctttattatatacaacaccttcactttgatgtcatactacatcagtaatctgaatcga

SEQ ID NO: 371686 - DNA, 693 bp, Cannabis indica
gtaatcaaataaggaatattaagagacaatcaagaaagaattatgaaagtgacctatatgttaatgataggggtgtatattaaaatccttatatctacatcaactcagaacttagttagagatggtggttactctgggtgaagggattattctagaaggatgtaaaacccatctataataatttagttccaccagtgaagctaaataacttagttattttgaaaagcactggaaagttattcaaactgaaaaaagttcttaactatttttatctctattccattttggatagaattagggacatgtcttctgtttattcaaatacacttaataagcaataaagaattcagtatccgtagaggagtaatgcatatagaaaaatgatattgtataatgttttatgaacacaaaagaagtaatagttgagaaagcagttgcttaccataggcttacagttcttgtaatttgggtttagtcaaatacactacacttgatctggatatcaagacaatggatttgttagaatgcacttcttgttttatgttagtgcaagtggatgtttttgggattttatgccctaaataaaacccatttcaatataatttgatttgttatcaatagaatattagaagtcatttatgtttacatgtagtcttcatgtttatgggttatcttatgttgggttttatgccc

SEQ ID NO: 371687 - DNA, 774 bp, Cannabis indica
agaaaggaatcaagggctagatatctgaacggaaggagtcattatattccgctgcacccaatgtaaggtttactaaactttatatgtgtttatttcatcgatttagaaagttcatatttagggtgttaataaacatacttgtgagtagatctaagatactggtaaaataatttccaacagtatctcacccgttgtcatcactgtatcacatcccttgtcattaccgtagttcacttgtagtcgtgactattgtatttcccaaatatatatcttaatcttaaattttatctcgaattttaaatattttttaatatttttaagatattagagtaaactcattagtttgttcttttattattaactaatatgttttgaaaaaatgattattattttttaaatatcttaattgaaaaaagaaaaaatataaataatgtgttattttagttatgagaaagaaaaatagttttaaataaattttagagtaccatgtaaccgctttatgtctctactatatatatagatatatagatatagatttatatatattgattgatattttatgtgtgtatataaacgaaatttacgattaattagatttaatttaagttttaatattttttttggaatttattttttatcttctaacttttttaaaaatattttatattttttttatagaaaattaaaataatagtataatatcaatttgtagaattatgttttttttatagacaaattatttaaataatagtaaaatattaatttgtaatttat

SEQ ID NO: 371688 - DNA, 601 bp, Cannabis indica
cacataggccagactgatggaaagagaggagttttaccattttcttcatcagtttttgtcgaaatattagtgatttttagaattttccctagttcctataggagattttctacaaaacatcctttcctgattttgttagaatatcttttttagtggctgtaaatagttttcattagctgtcttttgtatattgtattctataaagcctactgtaatctatgatatttttcaagaaaaggaattcatttttttcatcaaactttcagttttcatcttgcaatgctcaggaggaaaaagatggtttaggcgttaacaaatccaccgataacttaaaaattaagtgttgatcttcattgtggaacatagtttgatatgagcttcgattgtattatttatcaggattctagtgtaaatttctgtagctattgtctttacacatgctgatggttttagaactcatgtaggtttgctttgtaaaagttttgttgatgtgcaattaacacaactaatacttattttgtttcgggttaaaagtaatccacttatttaaaaaccacttcattgaataaatagcacttcgaattaacttagaagaaaaaaa

SEQ ID NO: 371689 - DNA, 442 bp, Cannabis indica
attcacttatttttctagttaaatttacttcaaaatttacatttacattatttattggaaatggtctaaagaataagtttagtattggagttctatacaccatatttttgtaaatatatattgtatctaatatctttgaacgtactaagtatcttaatgtttttttttttttttgagaatttcaatattctaatattaattttttttcacaaagtatattattagagaatctcacattgataatatgtaaaaattaaatatcatacataagatatatgggctactcctctcatatggaaccctatatatcttatcatacactcacctatttttacttcttcagtcatacactttcgcattctaatatatattaattttgtaacattacaaatgctaataaaaataaaaaaaaaaaaaaaaaaaaaaacaaaaacaaaaacaa

SEQ ID NO: 371690 - DNA, 696 bp, Cannabis indica
atactcaaggctaaatcaagcaacctactcggcccagctcagatcatgaacttagtcagttaaataattctgtttccacgtaggcgttcagcgttaacagcaaaaagttttcatcttaagaaactcaaaatttgaaagtcaaaatttatttcttctacaataggatccagccaatggaggccacaagccatacaaccaaaatacctttaatgcatatggctgagatttttctgacacaggacaaacaattgcctgacgtgggctaagccaaaatggccattttcctttgtagtgctccagcagtatagcaaacatccgctcaacagaacctaaaattgctctgtgtatcataactggtacttccctttttgcttcatcctctgcagagtaatagagctcaaaacgagcaggtagctggaaatcaagctgcaaccacacaaattatcaattatgattccatccacattacttgtcaaaacagggagtattatataaaaataataaaaaataaaaatacacaaacctgtaatagttgcacattggaatttcctgttcaaggcatcagatacactgatatctatctttggtccataaaatgctccatcaccttcatctatctgtgcaaagcattaaaaataatatgcattgagctccaaagagagagagagagagagagagagagagagagacgactac

SEQ ID NO: 371691 - DNA, 898 bp, Cannabis indica
cagttagtctcgtttctacggtttcagttaagcctttatcgcctttagtaggttatttaaaacagttataaaaagaaaagcctgttaggaagcatgttagtagcctgatagtagaataggtgcatgtttttactttccaaattaagcggcattttaagctctcgttgatcatgatctgatatgccaactcttggttacacagactgtttagactagatggacgccaggcgaaatacaaggagtcagggaaattcggtcgggtcaaatgaaggtcagggagctcagtttcccacaaatgttcggggccgaggtagaggcaaggctcgtgccggggtgacgctaacccgccacaagctgcccaagctgcccaagctactcaggaagcccagaattgggaaaataggtttgtagaaatgcaagccagaattgaggaacaagacagcgaaatccagcgactaagatagcagggtgctcctgcaggtcctgttccagaaactccagtggcacctgccgctgttgtccaggccgaacctatagttgcagtgaatcggatggaactgttgtatgaaaggttccgcaagcaggcacctccggttttttttgggaggtccggatgtcatgaaagtcgagcagtggctaacagtgattacgagaattttgaatttcatgggcgtcaccgggaatgatagagtggtttatgccgcttttcagtttcaggaagatgcattggtctggtgggacatgtgtccatgatacacgacatcacaacgatgacctgggaaaagttccaggaacttttcaatgccaaatactacaatgaggccttcagaagtgccaagaggaaagagttcacccacctgacccagaaagaaaatatgagcgttactgagtacacaac

SEQ ID NO: 371692 - DNA, 528 bp, Cannabis indica
cataaatagtaaattttaaagaaattttaaaatgaaggattaatatatttcaagtatggttctctaaattttttaataaaaatagtcttgttatgaaatattatctatggatgtcaaaatcaccaaattaattatcatcattaatgcttgatcgtatttccttttattatattgatttagttttccattcttttagtcatatttttgtataaatagggattcaccatattgaaataaataactgagaaattctcattcactttctctttatctcttcatcttcttattcttcttttcttcttatctattttatattattttataacacgttatcagcacgagtttctgcccaagctttaaggtgtatattttgttgaagttcttaagttgtttcaaagtcacgatacactaaatatatatatttatatatatatatacctatctgactgaaacaatttcaaaaacatttttttctttttctttttatctatatattatatatgtatgtatatatttttatatgtttat

SEQ ID NO: 371693 - DNA, 696 bp, Cannabis indica
aatttgttaatttctttaatatttatatattatttaattataagattagatattttaatattagctatattataaattaaaagataactttatcttttaatttaaaatattatattaaaataatcttaaaagataaattaaataattaataaatttgaaattaacctaaatatttttatagatattctaaccataatattttcaaattcaaaattttgttattttgttaaatatttaattgtttataaattataagttagaaaaatgatatttatgctattttatatcattttacttattagaaatttataaattgtattttaaatatttaaataacctagatatttttgtaaaaatttgaataatgcttaatttaagatattttgacatataatttggataattattatttgtttattattttattttgaaaataataattgtctaaccatatctattttaaaattggtttattttcttattttaattttattaaattataagactagaatatgatattgagaatatgtatttagttattttcaaattatttatcttattagatatttaatttaatgtgataaaataattcaaataaacctatatattaaattttgaaaagatatttaaggttgtttttaacaaccctaaattttcaaaatagttggttagattaaataatgatttaattatatt

SEQ ID NO: 371694 - DNA, 536 bp, Cannabis indica
agtgcgtaacaagagtaaccctaacaccagagaaggtaaatctagacctattacgtgaaaaaccccaagggaatacattcccagaaacttcaaacataaacccagaaaaacaaacagatagtcaagcatgccataaacacgaaaagtaaagtgagggatgcgagaaacttacaatgaagtgttataactgggggtctgttgttgatcaaacaaagaaatgaagactgacagtgacaagcgaagaatagcaaagaaattggtaaagtgtttgaagggtttttggtctgaggatttctttctctctggaaaactcaaagaaagttggcgaaaaatggaaagtaaccaaatgaaggaaaggtggtggcttttataggccaaagtacatgaggaacaggcgcgatcacctaccaatcgaacggctggggaggcgcacgattcgaattcccaagaatcaacggttggattggttcgtaattaaggcggtggaaacgtttgagtatccgtctcacaccattaatgcgccgtatcaatcaatg

SEQ ID NO: 371695 - DNA, 903 bp, Cannabis indica
aaccaccgtcgacctacattcggcccccagcaactcgcacccaccacagcccgaactcccagccgcctctgtcccccgtcagaaccccgacgacccgcaccccagtccgacgaactccccgccccacctccgtccttcatttctccagccgagtcgaccttcaaaaaaaaaaaaaaaccatctccgcccccttgctccgatttccccactgccgaactccaccccagaaaccccgaactccacctcagaaaccattatacctcagccattgcttcgattctcctgcaaccgagccaccatcggagtgtggatccccttttgcatttaaggtatctagtgattgtttcatggctaaggttgcattcttttgatgtttttatgagggtggtaaaatgatttaagtatgttgttgttgttgctatgtgggggttatgtgttattattgttgttcaaggactgccttttgagaattcaccgtgttccaaagattgaatattctagggctaattgtggtgaatgttgattttgaattctagtggtgactctgcaagtgggctggttgttaatgtcatttaaatgagttgatatgcttttgatcttgatgtggttttgttagataatgatgctctgttgagtgtgacttgtttagcagatattttcgagcttactattgtgagattgagccatggcaaccaccaaatcaaaatctcgtaagcgtaaagctccggccaacaccttgcccaaacctccaccacaacaaccaacccacccaaacccaccaacccttgccttgccttcctccaccacacactcaccaccccgtactcgtccccgtaaggcctcctcacctaaacccaaagctccacccgccaaaaccgctccctcaacctccaagggccaacc

SEQ ID NO: 371696 - DNA, 502 bp, Cannabis indica
ctccttcatggctgaaaatccagaaaaagttaactaccccacatgaggaaactaatcatcgttcttggaaagagcccatgggctccagaaggtctaccaacccgcaatccagatggaccacccgttccagtaggactcaacatgagggtggccccaggacacagaccacacgcaaccgaaggaccgacccaacgctggtcctagcacgcggacaacacgctcaaggagaactcagcttgggagtgggtagaacccgaggacgtggggtgaagagcccaatcgtggaggtgcctagtctatgggagaaggtaattatgaagtggaaaactgccgcttgagatgccgtctggaagaggcgcagtgtcggaacgctgaattagaatgtgatgcagcctcggccagggtggcacaggggacaaatactcaaaatcaacctgaacctggagtgagaagaccatgaggcaggcctcgtggctcataaaccaggagacatgaaaatgcc

SEQ ID NO: 371697 - DNA, 449 bp, Cannabis indica
aaactaaaagaatgaagatgaagagtgggacatggggggtgagattttaaatctatttaaataaaaaaaaaaaagtaaaaaaacaatgtcacttttgtgacagcccacatcccatcagtcctttaatcaaaaaataatataattattattaaatattaaaaataataaataataatttttaaatccattaaaaaaaaaaaaaaaaagaacttgtcacttttgtgacaacccacgtcccaatcagtcaaaaaataaaaaaaaataaacaaaaaaatgtgtacacaaaaggcacaaccccaagaaaacacctgtaagccacaaacccatcatacacaatttgaaccaagacagtatactgccgaaattaaaaaaaaaacagtaaaaaagttaatatctgcatgtcacaatataattgtaagaaaatgagaaaagttagtaatctaagtaaa

SEQ ID NO: 371698 - DNA, 530 bp, Cannabis indica
aggagggcttggattttttccggattggcttcaattcctcgagcattgacgatgaagcctagaaactttcccgagctgactccgaaggagcattttaggggatttagtttcatgttgtatttcttgaggactttgaaacatttgtctaggtcgtctatgtgccccccagcctttctggatttgacgagcatattatccacgtacacttccatatttctaccgatctgatctttaaacatcttgttgaccaatctttggtatgtagctccagcgtttttaagaccaaacgtcatgactttgtatcagtagagacccatatttgtccagaaacttgtatgttcttggtcttatggttgcatcttgctttgattgtagcctgaataagcatccacgaagcttaatatttcgtgcccggctgttgcatcgacgagctgatcgattcttggaagtgggaaacagtctttagggcacgctttgttgaggtctgtgaagtcaatacagactcgccatttcttgttcggcttaggcac

SEQ ID NO: 371699 - DNA, 696 bp, Cannabis indica
tctatttcaatctatccttgtgtaaccttgtccctgataaagtgatactttatctcaacgtgtttagttctgtcatggaacactgggttcctgcataggtagatactgctttgactttctaagtagattataggcaccttttcactagcttaagttcttccattagccctttcaaccagagggcttccttaattgcttctgtaatagctatatattcagattcactagtggataatgccactactagttgtaattgcactttccaactagtacaattacctttggttagaaagaaataagttgatgtagatcttctagtatctttgtcccctacataatctacatctataaacctttaaatattttgatgtgcctggtgtccttggtatatcaaacctatcttagatgtgccctttaggtatctcataacccacttcatggctttccaatgctcttttccagggctagacatgaacctacttagcacactgattacataagcaaggttaggtctaatactgaccattaaatacataatgtaccctactgcacttgagtagggtaaattagccatttcctcttgttttaacttggtcttagggcacatggatttagacatgtggtactggttggtaataggctgtgaaacagcctttgcatccttcatagaaaatttttctatgatcttagtgatgt

SEQ ID NO: 371700 - DNA, 514 bp, Cannabis indica
cacacggtttaggaaaaattcaaactgcaccgtaccgcaaaaaaattcaaaccatattttttgtaatgcggtgcagtgcgaacaatttgagcggtttgatgaacacccttacattaaaagaaactaaatatgtagttttaaaaaatagaggtaccaattgattattatcggaaatagagagtactaattaagtgtgtatacaaaatagataggtatttagtctaataatatttacactttcattttttttcttttgtcttagatgaattttccttttatgaacatgtaagcttatatatttactttttatgtatatacaatttattttcaatcatcataaaattattttagtattgctgctatgctttttgtagtgttatattttgaggtttttacaccctatactataattttgatttcttttacttatttattatggagggtgaaaatactgtgtaaattttatattttgtactgtgttaaatttttactattgttccatgattatttttta

SEQ ID NO: 371701 - DNA, 989 bp, Cannabis indica
gattctttcaacatccaaggcagaaaaatactgatgtagtacaacaacattccattcggcgttcctcagtaatcaagttagcaaagacaccattgaatggccctgtgtagttaaatggcaagaaggtttgatgaccgggattccatggatcaaaacctgaccttagtgtcctcccatcacctactttccagcgtaatccttgcgaaagtagctctcttccccaatgaattccttgccatgtcatagatggggagtgacccaaaaaggcttcaaggaaactatttttgggaaagtacttgctctttaagattcggctgagaagagattcaagtttttctagaattcgccatgcctgtttggtaagtaatgcttgattgaagtgcatgaaagaccgaaagcccatacccccttcaaatttcgatttacatagaagcttccatgaacgccagtgtatttttgagccattttcagttaacccccactagaaatttgctatcatggattcaacttggttacagaagtaggctggtagacggaaataactcatggcgtaagtagggatcgattgaaccacaacctttattttaaactcttatattatatcatacattttatttttaatattatatatttatatgttatttatttttataaatataaatatgagaaagaaaaaaaagagaaaatgaagaaaaaagaataataatattctataattagaactcgataattagttagcaatattctataaaatttattaaaataagtagaactcgataatgaattacatcaataattatattatataatagaatggtgctaggcaccatgagtgccttttaacatttctcttttatattttatctcacatttttatataacaacatacgttgggttcactatatttttatctacatcattaaaatagtatatttttaatacattaatattatataaattaataaaaaatattatattatacattatat

SEQ ID NO: 371702 - DNA, 419 bp, Cannabis indica
actgtaatatatattaacttatatggaatacttctgaatgggtactaaacaaatttaactgtaaatattaattttaaaaatattaaattattagatttttgtccaatagcgaataataaaagagaaattttaattttatgcataatttagctacttaattaaaaaaaactatcaaaaaatacttatttttacactatatcaaaaatatatttgatatagtgtaaaaagagatatctttttgatatttttttaattaaatagttaaattaagtataaaaatttaaatttctctttcattattcgtcattagatcaaaatttgatagtttaatattttttaaaagcaatatttatagttaaatttatttagtaaccattcataggtaatactcattgagaaatgttctatatatatatata

SEQ ID NO: 371703 - DNA, 654 bp, Cannabis indica
gcttcccttttataaaatgggttaaaaaagggaagctaaaggcacatattgtagtagtgtcaatattcattaaaaagaggaaagttttaatcaatattatactaccaaacgataatgaaaaagaaaaccacttaaataattagataagaagattgagcttaaatattacgaactattacctaatggaagataatttgttcaagcaaaactcaataataattttgcctagagtaaccgatcatttaaaatttaaaatttcaccagctttaaaaaaaatgagccttgaaatcaagaatgtgtgcacttaatattacagtaagggggcgtttggtacagggagttcaaaataatctgattaaggggaatattatgaaagagaatatgattatatgtaaacttattactgtgtttggtttatacatgggaatatttaactagattactgttaattagattatagtgtttgattgagtacatgaatcttatatattatttaaaaaaaaaagtgaaataaaataaaataataattgttatatctcttttaagttataattatacgtaaaataaaataattttttgttaattatatttattaattaataaatttatgtcattgtattaactaataacaatctttcacttatatttttatat

SEQ ID NO: 371704 - DNA, 741 bp, Cannabis indica
  modified_base (680)..(680): a, c, t, g, unknown or other
atatttatttttttaatagatttttcaatataccctcacttttcattaagtctagtatatattttacatcatataaaacaagtatataatacaattttatattattatgattggtcttctgttaaattttgtcacacgtagtaaataaaatgatgacataaatatttagttgttatataatattatgttaacgtcatgtgtataattaattttagaaaaagagtaatttaaattttattgatttaatttttacttaagtcttttaatcttaatttttaatttaataattttttaaaaatgcattatttttttttaaaataaaattatacatgtaacttttattggagggctagttgcaataagagtttttgtacgattttttattgtaatttagattacaacactagttgcaatagagatttctaagtagaatttacgtaaaaataacaaaaaaaaaaaaaaattattttaagtgtaaaaataaaaaaaaaaataaaaaaagtcccctaattaaacaacaatattattattatgtttttttaggtgtgataaaaattaacagagtgagcactcgattaaaagtcgtaaataactattttggattggtattggttttgttattgccactctctcgtatctgaagaggatgatggattttgagtattttgatctgcaaatcnctcagctgcttctctaactcattttacccaatcattaatcgacacgttgtggtggtcacac

SEQ ID NO: 371705 - DNA, 1066 bp, Cannabis indica
tccttgacagtgcttgtttggaaaatgatgaggcaattttattttggatcgtttgggccttttcaagcttacctttatctttattatccctagtttgcctatttgagcttagcctattcaattgtttttagccactgtatgagactaactttgaatccacttgcaattctctatccttgtcccttgaattataccataagcttagaaataagtttgggggagatgaattgtgtgtatgaaattattgtttaaagtgggtgattgggacaatgtgtgaattgtaaaagtatttttcaacatcactaatgttatttacgttctgaaaaaaaaatgatgattaaaaaaaaatagtaaaaaaaaaaagaaaagaaaaaaaaatgttgaataaataaagtgatgttggaactaagagttgtaaaattctcaatcattgaaatttttgggcacaatttgagatatgtaatttattgtgggtgcttgatggtttatagtgtgcttatggtataatatagcctaaataacttttcatctacctattacctaagccaatacattacaaccttgaaagtccttttgattccgaacaagatttgttgacattagtggagaaaggtaagtcatgcaagcatattgatcattagattgtggaaagttagaaagagtagaattgatatgatgtttttcaaatattgaagttaatttgcatctatacattatttttcaaagtaagcatccgaattaattttagagttttgagattgaaattctggtttaaataattgattgaagtttcacaggttgcagcaacagtttgattgtctaaaggcttagttaattatgtgttagtttgtatttttttttctttgtcttagtttttagtcttactcgagggcgagtaaggatttagtttgggggaatttgttaggctatttttagcctaagtttcgggtcacattttatagttgtttttcttctttattattatttttggaatagaattacgcttgttttctttgatttcaggtttctacacttggaatgtataaattggacaaatttcggaaaa

SEQ ID NO: 371706 - DNA, 514 bp, Cannabis indica
tttttttaaaaaaaaatggtaaatactattttagatcctatgttttgtaaaagttgtcaatttgactctccgttttgttaaatgacaaaatagaccttatattttttaaaatagtaaaaataggacactgaacttaatttttaacaatttatttttttaagactaatttgtggcataaatacctaagtttaactctcagttgcaaataaatactaagtttaatttttgacagtaataatacaaaagttataattttaaacttctgtaggtacgtacctggttaaatagaaattgccacgtggcaatccctgattagtccaagttattaaatttttattatataaaaaaattagttcaaatataccaataagaaaatgacacgtggatataatgacttaaatttaacggttaggtacctacatagttctagaaatataacttaggtattattatcgtaaaatattaaacttaagtatttgtttgcaactgagagttaaaattaggtatttatgcc

SEQ ID NO: 371707 - DNA, 755 bp, Cannabis indica
gatttgggcagatggaagtaggacattgtagctgtgggtaattggttatatcataccccctaaatgagcttagaatttgggggtttaaattctcggtcatttgctttacgtctgacttctgtctctttccaattttggaagaggagtgtcgggcatacccttgcctcgtatcttccgtccagggaggtcttctacgaagtgtgcggttaccttttagcttccatgaaaggaaactaggagttctgggtgagaactcgattgcatgttccaaaatcccttttcatggtgcaaaccccgtaagggagattttataaaactcatttcaatataaccagatttactaattaataaaagatcagaaatcgttttatgttgcatggttcacatgatttatttcatgattatacttaatgtataaattctattaagtccagaacatatatatttgttcatgattatagtgtcgtcaacacagtggaatataatcattattataagttcaaaagtttaattctcattatttgtcagtacactggatttagactgacatgataatcagcgataaggtatacttacaccttggataagtgttatgtcctttctagtgcattggcaaagtttaccagtatcagatgaatggagtatacattgtaagggaccgatattgatattggataagctatcataaacttaccgttatatctttctaagtcaatattaatgattgatcttaggtctatggatcttattcctga

SEQ ID NO: 371708 - DNA, 465 bp, Cannabis indica
aatcgaagaaaatcgaaaaaattgtgagttgtacggatcgtaatcagccgagaaaacttggcgctagggatccccagcatgatttttgcgcacgcagagagggatttcaaacatccgtaggcatgtcgctcggacagatccttgtccaaacacgctcctgaccgagggaaactcggtttcgcgcgcgtggggtgagcgtgatcactctatctttttcaaaacttcaaaaaatcataactaattcaaataaaatcaaaattaagttctgtaaaaaattgaattgcttaatttttttcaaactatccaacaaaaataattttagaaacgaaaatttaattatttttcataaaatttcacaagcataaatcaatcattatataacacacagatcaacatgaaaccatccaaatcacacacaaatcgttttaagtccaaatttcttgaaagtaaatcaattaccatggc

SEQ ID NO: 371709 - DNA, 651 bp, Cannabis indica
gatgttaatgaaacatacttggtagtaaatctagatcctcgtaaaatatttccaacagatatatattttgaacatcgttttagattgtctttttttttttctattagaagtatttttagagcttgatatttaatattcttttttagttgggaattgaaatattaaattgtgtttttctttatatttacttattttgttagaattatttttatatatagaaaaaaatttacgcccaccctccaattagggtcccgccactgatcgcactgctccctcattctaacttcggtcgctggttgttgtagtttgaattttgttcatcatttggaataggttagtgagttctaaaatgttagctttcttaaaaatatactgcacatatatatgtatttttatataaatgaatcagaattattgacgttgaagttttttctgatgttaatatatgatatccattatttaaggagttgggtcatctttctttctgaatccaacaacggcagtgaacatatatatatttctaaatcattgttgttatcttaatatatatatttatatataataatataataatatatatacttttaaaatctttacttaaaatatatataatataatgggtgactattgaatggttacatttttattgta

SEQ ID NO: 371710 - DNA, 484 bp, Cannabis indica
gacaatttttcagatttttataattaatatgtcaaagtttggcatgccataaatccgtggtgtttttgatggctgaatgacaagtgaacacaggagttagggtataacaattatcattggatcgaaatccttccaaaatacattgattatcatcattaagtacataacaatgatcactgtcaaatgagatagaatacccttggtcacaaatttgactaatgctaagtaaattagcccttagcccttcaactagcatcacatttttcaatctgggtaacccttcaaaattgagagttcccacaccaacgacttttccagttgagccattgccaaaagtgacttccccacactgcataggtcgaatgttaatcaaaaagtccttgtcacctgtcatatttctagagcaaccactatcaaaattccacacttgagatgcagcacttttatcagaaaaatcagctgacactttttcttaatccatttt

SEQ ID NO: 371711 - DNA, 576 bp, Cannabis indica
gtcggctatgtgagtaccataaaaataggtctcttaagcgacagtttatgaccaatggaaaaaatagccttaagcgacagttataaactgacaataaataaatgtgatagtcataaatcgacggcaaatattaaaaataaaaaaaaaaaacaaatatggtattctaaccagatctcaccactaccaaaatactcacaaattattttgaataatcaagaaaagagaataaaaaatcttaaaactaattaagcgatttaaaaaaattaattattttttattaaaaaatccatttagatataaaaaagtatattaaaaaatttaattttagtaaaactaaattttgtgttaacaagtactttgagtttatttttttctccaaaaatctaaatttatttaagtaaaaataatattttattagtttaatttctattttttaaaaaataattttacatttttattgatttttataagaaatgagtttgaaaatataaataaacttgattttttcttcacaaactgttagtttgtttaaattatttattaaatttttaataattttagtttaattttttaaga

SEQ ID NO: 371712 - DNA, 589 bp, Cannabis indica
cttgtctaattattatcatttaggattgtgacttatgaaaatttctcttatgctaataataaaaatgtacttctttaaccgcctccagaattcaactcccaacagcaacaagagaaaccatataaagtcaaaatatgaatatgtctaaaattcattatttagtcatattagttaaggattttaattttgatatcgatatagtttaaaacctttcttacaaagttgtctcaaggcccttgttatatttctccctataattactaacaatagagatcatatgtatattgagatattaacattgtccactctaaaacaaataatatcaatatttatatatatcatatatttataaaattaatcttactaacaccgttaaatttaaccaaatattcgtatattcttaaaatatttagttaaatcaacaaaaactactaaataatcacattatatatataaatatatttcaataataaatacttttaaaaattattaaaataatattatattattgtttaataaatattaaatgatatacttttcttattttatgataaaatagtaataaaaaaatatgaaaagatgaaattgt

SEQ ID NO: 371713 - DNA, 730 bp, Cannabis indica
ttaaaaaacactaaccaaacatgacttgtttttaaaaacttcaaaaaactattttttgttctcatttcttaaaacaattttttgaaaacaaaaaacaaaaaacaataccaaacatgctctaaataacttagtttaactttttaaattacattttttcccctcaatataagctaaataataatttaccataaagactttctaagatttagaaagaagtaaagaatttaagatatgttctcaaagaatttttttacatgtaggtcagagcattcacaatggattttttactttaatttttaaaatatatcattaaaatctaatttttttaaaagtacatcactcaaattctatttctttttataatattttatttatttcaaatatataatattaacatttatacatatctctattaaaaaataattattaaaactaaaacaattaataaaacatatttagaacaataaataatattttataaatatagaacatgaataataaattttaaagaaactttaaactgaaaaagaaatttagtttatatgatgtagtgcatttagtaaaagtactcacaagtacacaacaacttatctaagatagaaaaattttaaaaaatttaaacgaaatttgtactaaatgtctaagagcagatgttctaaaatttcttaatttcatttttaatatttatttaaaatttcatttattcaatgtttcactatttattaaaata

SEQ ID NO: 371714 - DNA, 456 bp, Cannabis indica
gggaatatggagtagtatgagcttcttcgagaatttcattactgagttccgcattattaggaacacaaaccctggtcttgaacaacaacattccactgtctgacactgtaaagtctctagcttgtctagctgatagctcttctctgatcttttctaactctggattagttaactgggcgactttaattcgttctaacagatcagattgcaacgtcaagttgtgaagttttcctacaacaaactcgatgctatatttgaccatgtcttctgctaactgaggtgaaatttgaaccatattagatatctgcccgggacctttcctgcttaggccatcagcaactacactggccttcccagcatggtaaaggatctcacagtcctaatccttaactaactccatgttgggtatattttaccaggatctagatttactaacaagtatgtttcattaacatc

SEQ ID NO: 371715 - DNA, 720 bp, Cannabis indica
ttgttgttgtgctttctccccccctctctctacgaactgtgtattctaaagaatctgatcaattattttggtaagaatctgcttttgtccgattcattgtttattgtcagcttgggtattggtttagtttattgtctactattcttcttgttttgcatttacagactgcattgtctaatcttaccgaggttgctggtattgatatttgaaaaacagggcaagaactatacaacaaaaaagtggaaagtatttcttttttctaaaatatcaaaattaaatttaaatataatgagtgattgttaattctatattattattattttttttttgaaaattaccaaatgctctataatattactgtctataatatatcacaatacctttaatataaatgatataaaatttacataattaaaaaattcatgaaaatcatatcagatctttatgaataaaaactattttcataaatataattatgcattagttaaggtgtcatttgataacgcttttgttttttaattttttaatcataaaatgaaagtaaaatttttattttcaaaatttttgtttttgaaaaacaaaagtatgtcatgtaactattttatttttcaattttaaaaatagaaaataaaagtgtgttctgtaaattttattttttattttttattttttattttttgattttatttaagtcgattctaggttcggagtcggatttgg

SEQ ID NO: 371716 - DNA, 505 bp, Cannabis indica
acaatgttacagatgaaacatggtccacgacctcagttgctacagaataaaacatggagctatagatcctgttggaaatattgtgaatattttaacaaaatatataagtgtcttagtgtgtgtgagttggaaagagtcccacatgggatatgaaccctcattgacaagggtataaagagtgcaactttggcatttgggtttgggccccaaggggtacccagttttgtgcgaatgggtgaggacacacacacttgacccaccacacgcgcgcgcgccgtccgtccgatccgagccgggttgggttggttggtgtggtgtgacacaatattattttttacagaaaaattatttaataaaataattattttttatttattaatttaattaagaaacgtgtttaattaaactgattacttagtcgtatcagttaacgggacacgttcaaaagaccaactcaccccacttcagaaaacgttattcttcccgttatgtttattcaatccat

SEQ ID NO: 371717 - DNA, 677 bp, Cannabis indica
gggagcgattggtgctaatgctccagttgcaccccctggtactccttggggcaaaggtcctactgcttgaaccgggttgagatgaggcaaccgattcttgatccattcgtaaagatgacccaatcgaatcaagttttcaatctcgtccttgaggtttttgcattcattggtgctgtgtccaatatcgttgtgatactcgcaccttttgttaggatccctctgggagctatccctgtacagaggaggcggtctccggtaatgcgtattttacctagtagcgaaatacacacgctcttgggagtttgttagctccgtgtactgggtgtactggggagtgtacccccttttctaccgcttgtcttccgttcggttgctgccttttgaggacctcttgctccgagagccttgagagggtcctgttaagcttgcggtcggagcggagtgagacgggacttgtgcgctcatcctagaaggattaccataatgagaagatacaggggccaatgcctgattctgatgataccctggggtagcggaaaattgtatgccgctcatcggtggagcagttgctggtaaagttcccgagagctgagctctgggtacatagcctactatcccggtagggtagtatcccccataggccactattcgggcctcttctaggttgatgtattttt

SEQ ID NO: 371718 - DNA, 805 bp, Cannabis indica
gtatgaggcggtgacgtgacgatctaaaaatctaaaaaaagaaaaagctaaaatatctatccataataacacatatcttttttatataaaacaaaattcttagtttaacgattattttttaaaataaaaaactaacgggagattaacgtctccgttaacttttaaatttctaatttatttttacctataatttccttttccaaatcatctgaaaatttattttccccagctgttacaaaaatcaaaatcaaaatgtgttcaagaaaagaaaaaaaaaattatcttctcatattattaaggcgcaattcgatttgagtttcaatcgttctctatcaactgttcaaaaatcaaatcaaatgtgttcgaaagaaagaaatttagatttgagtttcaatcgttccctattagttgttcaaaatcaaatacaaatgtgttcagaaagaaagaaacttagcttctcatattattcaggcccaattcgatttgaattgcaatcgttccctaaatctcaatttcagatgagcgatttgattttcaatcgttattttaccagtttctgacgctaaatacgccgaggagttatagttcgaagaagctctcgtctcttcggccgaagccagcagaaaccaaacgacgatcgtcactccgtcattttaatattttgctaatttaatatttttatgttgctagattgacattgaggctatttcatgttgaagcaaatgaagattaaaatccaccaatgagtattattagttttcttatctacaatttttagacacatgatatcttcaattatcaataa

SEQ ID NO: 371719 - DNA, 710 bp, Cannabis indica
gttatatttggctgaagtaagtaattaaaaatcattttatcattcattttacaacattggaaaaattaagaaaagaaaagcaaaatttcattttctctctagcattctctctttcggccccctttgagcagcaagggtttgattttttctttgtggattcaagtagattttgagggaaatctaagctctaggtatggctcttgcaccctctctttagtttcttgtaatttaaggaagaaaatggttgcatgcttggtgattttgatgattgtagttgttgtgtatgtttgttgttgttttctgaagtttagatatgtttaattgagtggattcaagttggttttgttgttagtttgttggttttaaccatgtgtaaagctttaaactcaaaactttgaattttaatggtaaaatggtgtttttgctgctgtgacatttgtttgtgtttgagttttgtttctggatgttattcatgttttttaggttgaattaagttggttgtagttgctggttgtggtgttagccaagctttgagctttgaagctcaaacttggagctcacatggtggattttgattttgtgtgtgtaaggttgttttgttgctttaaaattgttctttgggatatttagaacaggtctggagagtctcatgtggtttggggttgttttggtcgagatatgaaattttgacccattcctgcactgaaccg

SEQ ID NO: 371720 - DNA, 688 bp, Cannabis indica
tgctttgagtgggattcaggagaagattcagctatgtggtaccaagctcacagcgtggaatagtgattatttggggaaatttcactctcggttgaaacattggaagagtgaagcaagaaagtttaaagctgggcgtgatgatatgtctttgagacggtttaaagatgctgagaataatctcttcgaagtcctcaatcaaaaagaaattttctggcgtcaaagatccaaacagttgtggcttcaggagggtgatcagaatacgaaatattttcatgctactgctacctcgcgccgtcgctctaacttcattcataagcttcagagagatgatggttcttgggcagattgggacaatggtcttccagatgtaatagctgattatttcaagactctcttttctagtgggacgtgcaactctctgaatgttactactggaattagtcctacgatttctgaagatcataatactgctctgcttgcgccaattactgatgaagaagtcaaagatgctctctttcaaatgcaccctgacaagtccccaggtcctgatgggatgactcctgctttcttaccaaaagtgctggcgatattgtgggtaagggatgtaattaaacaaagtttgttctttctttttgttttggtcgtccttaccttcgagggagttgaatcatactaatattgtgcttat

SEQ ID NO: 371721 - DNA, 605 bp, Cannabis indica
agagagagagaacgtatacggcgtatacgaatttttcgtcttcaagtggactgcaaccttggtgaaattgggggtttcgttacacttatatacgacctaagaaagccttttgacgaggtataagggacagaggtcctcgtttcgagtttcgccattgttgaagcttcgaaggtgcggcttgaaacggacgcgaattcgaatatgtttaagcttgttcgagtgcatgggaccctaaggagtgtttttgatgtaagaaaacgaagctttaatgtccaaaacgaaggaccaatattttgactccattaaagacggtacaccgccaacgaaggagacgacaccgatctgccttcttggacctcttttcttgggttgatcttgatcattttgaggtcctgagcactgtggagagcttccccaatcgaaaggacgcttcaagagcaattgaagacaaagttacacttttccggcgacgaaaccgatgagaacgccgacgaccacgttctgagaatttttgaggtgtttttcttagatatttttgtagattttgattccttattttattctaaggtgcttggtgaagtttcataattttctgaatttatttg

SEQ ID NO: 371722 - DNA, 506 bp, Cannabis indica
tttgtaatttttaattaatctgccaaaccgataacttaaaattttaaactagtccggtctaattccaattcaactcatcctttaatgtcgtgacatttccgaccattttgtctgtttccacggcagccggaaccaaaaatattttattttgaaaatgatatatgttaggttatttttagtattaaatttaggttaattttagcacatttttctatttagtttaaatcatgttggagcatttttacgcttttatcttttaattttgcagatttaaaatagatgaagagttggaaaatatcagtagaaaaatgataaaatatcgcataaaaatatcccggtggaaaatatcaaattcagattcggaaaagataaaaaaaacatgtggaatttggagcagaggatcacacgggccgcgacatggtattagcatgccacgacccgcctacatggaagaaaacgaaggaacctcattttggccacacgggccgcggcatgggtttagcatg

SEQ ID NO: 371723 - DNA, 506 bp, Cannabis indica
tatgtcttatttatgaattttcactaagcaatggcttaatgtgaagaaaataggttttggggtcaatttattaattaagagactttgtatggtctaattaataaatattataaatggtaattttatttgataattaattataattattaaataaatagttttggcattgataggattaaattgaaaaatatggtattattgaaagaagagtaagtggttgaaataaagtggcaaaattttaactagtaaaggccatagtgtggccggccacttagtgtgaattttgtccattattttattcttttttaatccatatagtaaaatcctaaaccctagttaaaatactataaaaggaacatgatgttctcatctcatccaactaacctgtcaacctaccaaatctagtttctaactctgtctgacaactagtagatgagagcctccttttcttagtgatttcacaccttatcattgttctgttggattttgtaccctaaataaaatcc

SEQ ID NO: 371724 - DNA, 530 bp, Cannabis indica
tgaatgtagaatacgataatgatcattatttaaccatttgatagtataggtgagagtaatatgtaagattagactaaacaattggagctcgggacttaagagcttaagatcgtcttttggaaaaagtttaacgactcgggagaggtagggactcaacttgattattggacttgatttttatatgtgttgtataacattggacatattccaatttttatgatttacaaattgtttgaaaaattgaaaacttaatctgcatatttttttggactgttctggggcactgagtgccaaatatatttttgtacaaatatttatgcaggttatgatttttggatttattcaaaatacagctgttatgctgccgatttttttttagaaaataaaaaggaatatgttcttttgtcattcttattacttacctgctttagttatactgaggagagccatgttgatcatgttcagtgcatattgttgtttcatgacctagtctctgtgtcatcataggtagatcaggtgtgcactcacct

SEQ ID NO: 371725 - DNA, 1287 bp, Cannabis indica
catcttgtggttttgatggcactggttttggttttgggatgataggtgggtcgtagtgtttcccacttctcaaggtcactgcactggcattctccttaggatttttctcaggttgggatggtagttgattgaacaatttagattgcattcgattacaagattctgagagttgacccacttgattctctaaactttttaacgctgcttgagtttcttgtttgaattgttgagaatcaaccaacatggcattaataagatcttcagtggtaggcttgggaggtgctggtggagcaacttgtggtgcttgattctgtctggcaggtgtccactgttgataattaaaagcaggttttgcaggttgctggacattttgttgattgccatagcgaaaatttggatgatcacgccatccctcattatatgtgttcgaatatggattatactgctgccttggttgacctgggaaacctccaatagcattaacatcttttgttggcccttcatagagagtaggacaagtatcagtagtatgccccacaacttgacatattccacatggctttatctgttggcttaaaacaagttgttggaccacggaggtcaattgagctatttgttgactaagctggttctcaatgggtttgctcacttcattaacctgtcgtgatgttgagggagagtcccggcgagtgccaaactgttgtgaattggcagccatgtttgagataagatttctggcttctgttggggttttgtctaccaatgctcctccacttgctgcatctatcatacttctctcaaaaggtaagagaccttcataaaagtattgaattaagagttgttcactgatttggtggtgagggcaactagcacacaaccttttaaatctttcccaatattcataaagtgactctccagtaatttgctgaattccacagatttcttttcggatgcttccaactttagaggctgggaagtatcgctccaagaaaacagtcttcatgtcattccatgtttcaatagttcccggtggtagatagtacaaccactccttcgcagcatcttttaaagagaaagggaaggcccgcagcttgatttgttcttcagtaactgatgtaggtttcatactagagcagacaatatgaaactccttaaggtgcttgttggggtcttctccaggtaatccatgaaaagctggtagtaaatggatgaggccggatttcagttcaaaattgacatccaaaggtgcataatagatgcacaatggttgctggtccagatttggcg

SEQ ID NO: 371726 - DNA, 538 bp, Cannabis indica
atctaactatgaagtgtattaataaaactaagtatagaaaacaatgaatgttacatttggggtatctaaagttcatatatgcataggaataagctcatatcgtaagtatatgcatattaaacataatgctaaattcattataattacaaacaaattgaccattatcacaacaagaaataaaaagaagattgacactcactgctctgggtgcctccttgacaacaagtttccccttctgtttctctattgcttctgagcaagctatgatagcattggttagaaccaatatcccttgttcctgcccacatttgaaaatcacattcttagataaaataaatactaaaataaaaatctaatcataaaaaatattaattcctctagtgttctgaaatgtgagccaagaaaagaacaacatagaatattattacagaaattaggactaaaattgtaatatccgctaactccgaaagggtattttttgtaattttatttagctgagagtatttttttatttttacatatttatggatttaaatat

SEQ ID NO: 371727 - DNA, 846 bp, Cannabis indica
gatgttaatgaaacatacttgttagtaaatctagatcctgggaaaaatatatccaacaccatcaagtacagctggaaacttttgataatgtaatccaagagtcaatgttcttttgaggtatctcatgaccctctctatagcattccaatgctctgcactaggtctactagtaaacctgcatagtaatcccacgacataggcaatgtcgggtctagtacaatcagtggcataccgaagactgccaatgatgctcgcatattcagattgccttacaccatcaccagtgttcttaaataattttacactgggatcatatggtgtacaagcaggtttacagttaaagtaattatatttctttaagatcttctcaatgtagtgagattgatccaaagaaattcccttttcagtcctagtgatctgtataccaaggattacattcgcttcacctagatctttcatgtcaaaattttcacataacaaagatttcacattgttcacgactgaatattagatccaaaaattagcaagtcatccacatataaacaaataatggtacacacattattttcagatttatagtaaatgcatttgtcactttcatttactttaaagccatgtgagatgacaaattatcaaatttttcatgccattgcttaggtgcctgtttcaaaccatacaaagatttatctaatttacacactttatgttcttgaccaggaacaacaaaaccttcaggttggtccatgtaaatctcttcttctaattcaccattcaagaaagcagttttaacatccatttggtgcacaacaagattatgaatagcagcaagagcaaaaagcacacgaa

SEQ ID NO: 371728 - DNA, 586 bp, Cannabis indica
gtaatttatctcttgttataaactaataaatggagttttatttatacttatcgtttcatttatcctcgcagatatgacttttttgaagtctgcgcctgtccttaagatcaagccgaagggtggagcaacgttgacctcgcccgttgtccccaaaagaggaagagcgatgtgatggctacccttgccacagactcttccaagaagctccatccaactgttcgagctcgcgacttcttggccatgcaggagaagttcctagccgagatcccttctgaggagcttgttacgcgctctgtggagttggcctcgtagtcgatgactctgtttataaaagctgctgtcgcaggttcgaaggaagctgactcgctgaagaggcacaatgcccagcttcaggagaacatgaagaggctgaagcaagaggcggttaggaaggataaagagctcgaggtcaggaactcgcgggcgacgatcgaggagatgactcgcgatttggaggctgagaaagagaatgggaagaaacaatatgatcaggcagtgtctgattacatttacaccactcttccaaagttccagacttcgaattctc

SEQ ID NO: 371729 - DNA, 517 bp, Cannabis indica
taaaataaaatatttaaatagttttttttaaccccaaatatttgaattgttataacataatattttggataagttttagtctataatagactaagggccagtttggcacagctgtgctgtgggaaaaaggagctgtggctgtgctgcgagaaaaagtagctgtagctgtgctgtgagaaaaaactactgagtgtttggtaaatataatttcaaaacagctgtgagttgaaaaagttgtacataagtgtttggtaagctaaatgattaaatagttgttaaatatataattactaaaataggtatgaaatttgttatctaatttatttaaataattttatacacattaatatatttataaatattatttattatattataaattacaataatttttttcttataatattcaatttttttaaaatatatatatataataaaataataaattagacttttaataataataataataataataataataataagatgactgttgagtagtttttgatcagag

SEQ ID NO: 371730 - DNA, 553 bp, Cannabis indica
tttctgacttcttgagttctgacttttctctaaacatagtcattctttaatctgttgagtactcctggtcggcatatttgcttgtttatcattcgatatcctggccaacactcatctcgtgtgttgtcttttgtagatgaactcaggtgagtcttaggaactcggacatcggatcgaccaggatttgcttcaacttctgcacgaggatcaccctcgtctttgttctagtcctccttcttccagtgaaggacattcatctgaacttgtacccagccataggatgatggcttgtacaaagaaaactaagcgtctagctcacgctaccgatcctcaagtggctcggcttgccactctgcccagcgccgaacagggtccggtcatccagatagaggaggatcgtgacggggacgctgaagtccaggaggttgaagagctggacgatatgcgtcccagcagtccctcctaggcggagggagaggaagaggttgaacccccaaaattacggggggtacaatgaggcgagcagccattcgatgctgacggagacgtcctg

SEQ ID NO: 371731 - DNA, 692 bp, Cannabis indica
taaagtgccaaagggggagaatgtaaagtccttttttggcaagttagttgacaaaatatttttcttttatggtaagattgcactaatacccgatattcttaccttgtatattcaattttaggttctcttttccatgttaggaatgttgcacttttcagttgaactttcctttgtttggaaacttcttgtagaagaagcaattctgtgatggaaagttggtttttaaggaaactttgattattgtattttccttattgaattcgattgtatctttattcaatcaaaatatataatctgtttatggtaggaatcaagacttattagaagatcggacccgattatagtaagtttccattttctggtcagatttgttgcgtcaacttccgattctgatgctgtggatcatgtttatcttaggaaagttttgttcagctgtagattcaatcttgtagctatctctagcgtttctatgttctataaataggacctagagagcaaccattcgaattagctattccattattcatgttttgcatttttcttatttgtgaggagagtttctttgttatgtgagagcctagttgttcatctaggttctagtattttatatatcaattctaactctgtcctagaggttgttagaacgacttgagtaaacaagaagtggtcttcgggagaagacttgttgaagc

SEQ ID NO: 371732 - DNA, 593 bp, Cannabis indica
ttagcctaccatatctatccttagcactcaacaatatttattattacattaatattattctaaaattactctaagtatttaaggattatctaaatatatatataaaaatattcttataaaagtaggttaaagaaagcttaccttataccaaaaatttgacttccgataaagtcattccaatcaaatcctaacaactaaatttaagagaaacttaaatcaaataattttatcctaattctgctaaaatttcagcagcataagcgactataattgaatgttctcaaaaaattcaaacatattaataacaacaaaacacaattcaaaacaatataaaataatcacaacaacatttagcaatataaaaatttaccactcatccgaccgcagtacatgtattcacagaacctacttcactacagatgaatatttaaaatattcaaactcatctaacatgtatattattccacccatcgattcgaccccagtacaatatattagagaacctatttcactacgaatgaatatttaagatattcaaactctattaagcattcataattaattaataataaaagttaataaatgtatacctc

SEQ ID NO: 371733 - DNA, 512 bp, Cannabis indica
tataaatgttaaatattggtaaaaaaagtcacttagtgtaaaaattccaatatatttatcgttaaaattaaaatatctcataccaaacgtaaaaatgtaaaaaattaccaatcctaataaaacaatacttgatacatacagcccatagaatcttagtggctaaatatgaattcttttgtttcacattattacttttcccaactcctctcacatattcctaggacagaataataaaaacaataaaaatattaaaaggcaccagtgataccaagcactcttctacgtgtcaatatcgctattggtttaatttagtatcaagtcccatataatttaatataataacttttaggaaatatcactagttaatcgtaagacgacacgtcttaagtaggggtgggcatcatccaatccaatccaattgaaccgaaccgatccaatccaatccaattacaaaaagttggatatccaattacaattggattggattggatgctaaaagttggattctaatt

SEQ ID NO: 371734 - DNA, 762 bp, Cannabis indica
aacctactacacttattcaaataaggcaaatgggccttcacaattggagctgttcatgtgagggagggctaggttcagtatgtcgtacctgttgggctttgtgccctaaataaaactctattccaatgtaatcttttctattcaattatcaataaagaaacagatttaattttattacttgttaaatgtgttatttggtcatatgatcatttatttacttctttgatttataaatttatccaaatccttatcacacagatattcttgtttattgtgttgtcaacatagtgtaaagtaatcaagattgtgtgattaaatgcattgtcatgatttattagtacacaggatataactgatcggataatctacaacgtactttacttgcaccttgaataagtgctatgtcctttccagggcattggttaaagcaagcttgggttggatgtatggagtatgcatcacaagggagcgatattgaatttggattacatatgataaacttactataatatctattcaattaaatatcacctagttgatcctagatcaaacgatctcaatcctgagatggttagcttctagttcaattatattatttgtgttcttcaatctattcgttaaagtcgatcaatggatcttctcgtgacatatagattaaggacatggtagttcaattgagtgggactgctaatcatagatacagaatctatagcttctattcgggcatagaagtgaaaacaataatttccttcgagcttggct

SEQ ID NO: 371735 - DNA, 558 bp, Cannabis indica
cgaatatgattcaacgtagaaataaaaaaaaaattgtagaaaaataaaataagaacaccgggttttttttacgtgtttttgcaattaaaattctacatattaagatttttgagtatgttcttttttcagggcctctcgcgtaagactttttttttcgtcccctcttccttgagattgtctgccactatttataattgcatagtgacagttaattacaaggctgacaaaaatgtaattacagttatcatcccttaaatcgtgggatctgattacatattacaaaatgtaaacgcggtgcatgattttgaaagtcatacagctgtgattttcccgcttttactgggtcagaaatatcgtgtattaaacacgtctttaattcttgattctggagatgtctcgatagaaactttattgtagtgatcccaatggcgagctagaaccattcttctatccgagatcgacaacatacaacaatcacagatataaggaaatctactgacttgctagggttgtgagtctcgcttccgttagttggatgaaactataggaagttttctc

SEQ ID NO: 371736 - DNA, 535 bp, Cannabis indica
tggtcgtactttcattaagaacgtttctaaccatttggtgagcttggttgatgagctcaggacggcttaagcataaagacgatagagcattgctttcatatatgttatgcatatcttactgagtctgttgactcattagtttactaccttgtgtaggtaaagggaaagctaagctggaggaacagtgagttggagcttggcagtgattgtacatatggcggcagtgcagcctggagggtttcgatctttcaacatttttgagttgtattttgtagtttcctattgtaaaatatatatatatactaatgatagtttgcaactttgtatatagtaaaatgtaaattttcaactgtgttttgaaaaactcgggatcccgactataaagttttaatatctataatatattttagattacgtatttgaatttagcaagtattaaatacgggcgttacagaaaatgtacaaatcgacccattcggcctgtgtggctaagttgccataagttatttttggttgtatctgctgtgtattttga

SEQ ID NO: 371737 - DNA, 600 bp, Cannabis indica
agattatcccaaacggacacctgcgatcccatttgaaaatctcctctttttcgacgggtggatgcattcctttaatagggaaacaaactaccttgagagagacagcctatttattttcaatcgatcgcgggtgtcgatgagacggttgctctgtgaagttttaaaattaacctttcatgactttaaaatttacttgatacatagttgcctcctctttaaagaagccttaattactctttctgaatttgttgttagtttctattttaaacaagtaagttggtttttgttaccttaaaaatttactagatagacaattgcctcctctttaaaggaaacatacttactcttttggaatttgccgctggttcccatttaaaataattaagttggttattgttgccttaaaaatttacttgatcggcaattgcctcttctttaaaaataacataattacgatcatgtattgcaatttacatgtgacgccttaaaagtttacttgatagatggttgcctcttttttaaaggttacataattgtgattatggaattagttgccgtttgcctttttcaaataatcaaattggcttttgttgtctaaaa

SEQ ID NO: 371738 - DNA, 505 bp, Cannabis indica
ttgatggggctttatttgaacaagaggggcagtttggggtgggttgtgtagctcgagatcatcatggtactatgttagaagctttcaagaagggaaagatttgttgtgtcaaacctcaaattgttgagatcataggcattagagaagctttgagatggattgcaactcattcttgggacaatgtcgtgctggaaacggatagtttggtgtgtgtacaagctattcaaagcaatgttttatgtcttcacagtttggtcttctggttcaagatgttggaaatttgatttttactttaacttttattgatttgtgttttgtaaaacgatctgcaaataagttggctcattgcttgacaagagactcttctttctctacaggctgtgtgcttcagttagaggattgttcctctgaagtgcgttctattattttgaacaaatttattaattaataagtttatgatttttattcaaaaaaaattattttaatgttgatgaaactggtttct

SEQ ID NO: 371739 - DNA, 407 bp, Cannabis indica
tgttaattttgctcgagaaatatatagacagggaaatttgagtttgtgtgctttactacttatttcaaaaacaaatcatatgatgtccatgtataactagaatatattacctggcttcctgaggtttgtacccaacaacatgcattttatattgacactaataggttttatttattctgtaatacattaatggcatgtttactaataagtaatgggaatcaatagtaaggtaatcattcccttacatttgtttacttgcattattaaaattaggaaagggagaagttgattaaataagggagaaaagaaagagagaacttctcccaccaattttgtaaggaatgccattaaaggtaatggatttttattatttttattttatttttaatattaaatatataatgaca

SEQ ID NO: 371740 - DNA, 588 bp, Cannabis indica
gagactggtcttacgaggtaatccagcaatacttgagcaggatgtcacagtgcctgtgccctacattggcaagacctttcaaccagtgtctggcaagcccattcctccatcggtcattgccttttccacctctgatcctgctgctcctgctgtctcagaaattcctccagtgagcacatcaccactctctcgcttgccctctgctcattggcaagtcaagttactgtccgaagttcagaatttggctcatgcttacaacttagatcaacagcgtcagaaaaggtttgagcaaggagttgttacggtcctcacagctatgtctgaagttctaagatcaatggactctggtccactctctgaagcttctccagttcagtccagctcctctgatgatcctactgcaccactccagggggagcttggctctgatccattgccagccgatacagctgcaccaatccagggggagtcacaatctgctggtgctcctgctcagaaccctacaggctaatcatgctcaccgagggggagttgtttagtgtaattgttttgtttttcttttgggttttgcagccgtttgacacaatc

SEQ ID NO: 371741 - DNA, 561 bp, Cannabis indica
aatcaaatcctcgcatgagaaggttttgtccaattgagtgttgtcgactgagtcagtcccgctcccttcagcgtcctcttcctcatctgactcgcagtttggagcctcccagtcctcgcccatctcctcgacttcggcatcaggagcatgcctggagtgaacaagatgttcacgagcagacatcgtggactcgctatcgcggatctcgattgtccccagttcgttgagctcctgaaccattctttcgatgtccgcgaaagacaacgggcgaagctccgtagttctggttgggatgaaactatcctcctgatcttggtcgccttcgaaagcattgcctccagagccaagcatctggctgtccgacaagtcgctcatctgaaagatagaagatcttttcagtgtggtgaatgtgcgaaaataatacaagtgacctcactcgcataataagttcaagttctccttgggagttcctagtgacctaagtggcatgcattttcgagcatgaccctggagttactgggaaaacaccgacccgttttgagaaatctaaccaatcacaac

SEQ ID NO: 371742 - DNA, 608 bp, Cannabis indica
ctgatattcttgtttattgtattattaaatcagtggaaagtgatcatgattgtgtgattacgtgtattcctataatttatcagtacacagggtttaactgataggataatctatagcttagtttacttgcaccttggataagtgctatgtcctttccagggcattggttaaagtaagctttggttggatgtatggagtatgcatcaaaagggatcgatattgaacttagatcagatatgataaacttattgtaatatctattaaattcaatatcacccaattgattttagatcaaatggtctcaatcctgagatggttaggttctagttcagctgtattattttttttcttcaatctatttgttaaagtcgaccaatggatctcctcgtgacatatagattaaggacaatatagttcaattgagtgggagcgctaatcatacatatggaatctatagcttctatctagacatagaagtaaaacaataatttccttcgagcttggcttaatagagataaatgatagagcgcacccataaaataaatcatagatacgaaatctataacttcttcttcttatttttttttctaattcgaaatccttagtgt

SEQ ID NO: 371743 - DNA, 526 bp, Cannabis indica
acttttgtttctttattgatgttgaataaaacggattacattgaaatggagttttatttagggcataaaacccaacaatcaacactgtggaatataatcatgattatatgttcaaaagtttaagtcttgatttgttagtacactagatttagactgacatgataatcagtgatacttacaccttggataagtgttatgtcctttccaaggcattggcaaagtataccagtatggatctatggagtatacattggattggaccttactaggatctagatttactaacaagtatgttattaacatcctaaacatgaacttctaaaatgatatgaaataaacacatataaagtatcatgaaccttacagtggttgcagcaaaatgtagtgtctccttccactcagatctctaacccttgtatcctttctgtagcagggtatcaccaagatctgagagagagaggtttcagttttggtataggaaaggaggctcaaaattttactgaaggaatgagatgcatcctctttt

SEQ ID NO: 371744 - DNA, 628 bp, Cannabis indica
aaacttacacactatttttaaaaaaaattccgcccacaataaaaaaaaataaaaatttagaaatttcaatatgtaatgtaaaaagctctatcagtttccttggtttgggccatattttcacattttttattatttctttctcaactttgtttattttaattttcttgattttcacattatcaaagtataatttctcataaacaaataatcataaagtaattaaaatgaaatattttcagttatccattcaaaaaatatatatattcaattataaaatataaagaatcttacaattatatagatagaatgtaaaataattataaaaatacctacaactaacttacactacaaaaaatcttacttttagtcacaacaaaatttgtgactcaaaataaaaaaattgtgactacttataaattatcattcttatggtgtgactaaaaagtctatgattaaaagtattagtcacaaaaattacaatttattgtggctaaaatgtgtttttagttgtgactaaaactaaattagtgacaacgtgtagctaaatacaatgttttagtcacagtaacttttgttgtgactaaaaattacatttagccacaaaaaattatattgtaactaaaaaatt

SEQ ID NO: 371745 - DNA, 705 bp, Cannabis indica
aaatgctatattttctgaatttttcctgtacacccgttgcaacaaattattatttcataaatatatatttttttcttaaaaatgaacacagagtaatgatgttgaacttaataactaacaatatatacatatatattttatttttaattgtatcactttttaataacgtagaaaaaaactaacataaaatttagtatacgtgcctcgcacgtaactttttgctagtagaatcaatatgtacgtatattttttattatatattttatttttggagttaacctcaaacgttaatgttccgttagttttattaaaagaaaaggaaatgttaaaaaaaataccgttaaactaaaaattttatgacatagccacattttatataaaatagatattttgttaaacattttgccaacaaaactgttcattaagttgctcgtggctcttatttttatttcgattgaagttttagtttggctcttatttttatttcgattgaagttttagtttggagaaatactattgttgaatttttatggattgtaatagttgatgtttattggttaatgaattacctatctttaaagggatattttcaaaaatatgggaaaaataagccatcttatgataaatatggcaagaaaactaaatgccacaaaatatggcattaactaaccaagcaaactataaatatggttttttctaaaaaaa

SEQ ID NO: 371746 - DNA, 810 bp, Cannabis indica
tctcactcaattgcactaccatggtcccaagatgtaagtatgggaccgatctattggccaactttaatgaacaactctaagaacataaataatatagttgagatcgaacctaactatatcaggattaagatctatacacttagatcaactaggtgatattgacttagatagatattacgataagtttatgatatcttatctaatgtcaatattggtctagtctgatgcatactctatacattcgatactagcatactatgccaataccctagaaaggacataacacttatccaagatgtaagtgtactttatcactgattatcatgttagaataaatctagtggaccgacaaattatgggacaaaacttttgtacatataatcatgattatattctactgtgttgacaacactataatcatgcataactatatgttctaggcttaatagaatttatacattaaacttataattatgaaataaatcatgtgaaccatacaacataaaataatttatgatcttttattaattagtaaatctaattatattaaaataggttttatttagggcataaaatcctaacaaactcccacttgcactaatataaaactaaaagtgcatttcaaatcatctcaacaccttgatgtccacatcaagtgtagtatgtagtattatctttgtaataggatctgataggttgtatttactacaaacttctccaaccattacattttcttagtcacaaaatccttgatattgtgaaattcctctttatatgtttactcatattaggatacgtggtattctttac

SEQ ID NO: 371747 - DNA, 690 bp, Cannabis indica
tacacgagggatgtgggatagggttatgactgggtgtatgggcgcctagttattatccagtttaagtttatgttatgattatgttattcttacttagtctgtcgactcacaattgtataggtaagggtaaagctaaggctgggcagcagtgggtgcgagcagaagaagattgtacgtatcggggcagttagacttggagcattcaatcttcaggtagcatgctttattttgatagtcgataggtgacaacttttatagttatatatgttataaaatagttgtaatttttaaatgatgggatcctgaattatgtaaatatttaaagtttaaagttaattataaaaagttttaattaagcacgatttttgatgaactcattagttagcaacgaattgtacaattagtattaaattacgataacacgcctaatctagtggggtgttactagggatgcacatgaggcggggaattagcggggagtgctctccccgtccccatccctgttaaggattttaatccccatccccgcttattccccatcggggacgggacggggaatcccctattggggcgaggaagtcccctattgtaaaataaagtctatttaaaatttaaatgtataaattatttaattacataaaagataaaatattacatggtatttactattcaatattgtaattattatac

SEQ ID NO: 371748 - DNA, 544 bp, Cannabis indica
aactaggtggaatttgtggtataattctcgcaaatgaaaaggtctccgcacttgtcgtttcttagagttgttcactcatagttaccggtcccgaaaaaagtattgaggaatggttgtcaagttcggaagggagttcccaaatgtctatcttatcctctctgggttcagcctttaggataactagcccttccttggaaaggagttccagctggctagttatccctcctggaatgataagatccggatagtcgactacagtagactttatcctatccagaagtatcttttgcgagagtccgtggtccttgagtctggaagctcttatgtgttctcagaggccctgttacttaagatgacgtggagatttcgctcaaagatgaggtaattaagttagttatttctaactaactattagcctcatttcttgcagccaccgactttaggatctaatcctaaacctataaataccgcattcgcttatcattttaggtacgactaagaattgagagtttgagagagaaaagatcgagaggtagagagagag

SEQ ID NO: 371749 - DNA, 427 bp, Cannabis indica
tggtactagaacgagttgcatcttttcgtcatacttacccgatttgtatgcccctgattctatagtaacttctttgggtggggctcttggtatgttcgcaaatctttggcacgaatcacattttaggacgtactctacattatctttcttcattgttggccaaaaatatccttgtctcagtattttctttgtgagacttggacctccgatgtgatttcctgtaaaggatattatccattattacatatcgatgcgtctgatactgtaacctcttggatacagccctttcttgaggcaactctcctttgattatgtatttgatgatggaatccatccagcctggtcctggctcatttgtagctaccttcaacgggtaccacatcgagtttctctatttcgctattcgaggctaatttggctaaacaat

SEQ ID NO: 371750 - DNA, 576 bp, Cannabis indica
taattaatgaaattaggtcttgctccatacaaacatatcataaaaaataaaataaaaaaatcataataaatttaataaaatcataataaatttcctagcttatgtattgtatctattttctattttatattttttaaaaaaaatatcacacaaattatatgagaaaaaaaatcacaaaaattatgatcattaaaattaagtactctcatctcaattatatctttataaataaataagaaagagatctgatcatatattgacggatattgatcaataatattattctacaaatttaatatattaattaaaaaagaaaaattaaatctaattaataaccaattctttagcttggtgacatttatatattcaatatctcatttaaaaatattaatggtagaaataatttcattatcttttaattttgaattaaatattatgttaattttttttgtcataattgtacctccttctatggaattttgggttttatttgccttataacgtaattattataattaatatatttgttatagtgagatttctctcacctaaaaactcgagaccagactcctcttt

SEQ ID NO: 371751 - DNA, 546 bp, Cannabis indica
tggtctattttggaataaagtttatgacttaagggcatgattgttatgattttaatatgtggataccaattagacaatttctaatttgatgaggggccaaattggaaatagtcaaaaaggattaatttaaacaggtattggtccctattttttgcatcgcttcatattgtattcttgaatccccatcatcaagagagcaaaagtttacagagaaaggttttgatgcaaattggaagatcataccaattaaaggtcattacaaaatcgattctatggactccggtacgcttccgctattctttaatcttattgtttgattctcttgaattaattagggctaaattaagttttacagtattcttaacatttttttctaaatgtggggttttaactttttttcctaaagcaaaaataataaaaatatgggtaaatatcattttacaccctgtattttgtaaaagttatacattgcactatttgttttgttaaagggataattagataaggcactatattttgtaaaaaaatatatttttatgtttaaag

SEQ ID NO: 371752 - DNA, 357 bp, Cannabis indica
aacatacttgtgagtagatctaagatcctggtaaaataaattccaacatcggcgtgccgtcgacttccaaacttgccctttctcctactctaacacaccctacaaccttctcttccagccggggctccccgcctccacccaatcttccccgcgcgcgtcggctgaatgggacgagatccccgccttccggattataaaggatgttccgttctaggagtcggctgaaaattatttcaaaactctcctggattctatcagaaaacctgacgatgatttctacatctcccaagggcgtgattctgttggaatttattttaccaggatcttagatctattcacaagtatgttgtttaaaca

SEQ ID NO: 371753 - DNA, 754 bp, Cannabis indica
ttaaacaacatacttgtgagtagatctaagatcctggtaaaataaattccaacatatagctgcctataaatatggcactataccctctatgcaaagggttcaaaaaattcataacctgaaaaggtatttgtttgagctgtaaaaagttccattacaaaaagtttatcaaattaccttatagattaaggttcattcacgcttaaaccacataaaaattgtgtcttatatattctcttttagtcatttttctttagtttaatctcttttaatatttggttttcgaaaatcttagtaaacaaaacctaagagaagtattaaatttttgtaaatgtaaaattttaggtcattaaaacttttatattttaggaaggacgatcaagtaatatcataaatttaggggatagatattctaattattcaatattaatttatgatgtcaaaaataaaatttaaaactcaattgtacgcttatagcaagaaattgacattcgtcaagaaactgttataatcataaataatatatattttttagggattttttcatttttacactttaaaacagtttttttttgcatttttacgaaattctacataaaaactcctattgcaactagcgctgcaacctaaattgcaacaaaaaatcgtataaaaacccatattgcaactagcgctgcaaccactttagaaacccaaaccgtaaatttgaaaaaaaaaattaaaaaataaatatatatatatagggtaattcccacaa

SEQ ID NO: 371754 - DNA, 734 bp, Cannabis indica
agaatattagaaacatgttatgggcatatttgatgaaggttagattatcttagaataatctcttctcctaacgaagtgtttctctaaaagtgataattaaatttaccattggttaggtactttaataagtgtggtatgagagaaatattagacacatgttcaccggagtaacacggtgagaaaagaatacgatggaccgaaaagacccaaggaacttataaaatcatagagtggattcgagttgtatgctcgcttcattgaatacatagaagagctacgctgatttaaagcgtaggaatatcaagttctaaataggagattttgtgtttctccgagtattgcctatgaaagggatatgtagagagggaagttaaatcctaaatttattaggctttttgatattggagtaagtaggctaagggtgcatttgtttttattaagatccagaccactaaatctgaatacacatatgaataataagatatcatatctgaatatgaatagtaaaatatatagactgtttgttttttccacatctgaatgtatttttcggagtttttaattatataatgttaataaatttattatattatatctaattttaaaaaaagtattcaaatattcaaatacaaaacataattaattttaagaaatttaaagtatcaattatttcctcttctttgcatttagctttaatgaaagttcatttctcaaattgttcatgaactgtgcat

SEQ ID NO: 371755 - DNA, 702 bp, Cannabis indica
aattgacctaatcggacaattacccaaaggcaaaggtggagtacagtacacggtggttgcagttgattatttcactaaatggacagaagccgagccattggcaaccatcacatccaagaaagtgcaagacttcgcggtgaaaaatataatttgtcggtttggactaccatacaagatagtctcggacaatggaaaacaatttgacagtcaatccttcactgatttctgtgcaaaccatgggatcataaaaagtttctccgcagtggcacatccttaagtaaacggtcaagtcgaagcagtcaacaagacactcaaagatactctaaagaaacgacttgaagatgctaaaggaaactggccagaagaactccctgaagtatttttggttgtaccgcacaactgagaaaacagcgaccggacaaactccatttgccatggcatatggttatgaagctatgctgcccgtaaaagttgaacctccatcccacaaaagattgacatatgaccaagaggttaatcatacactcctcgcagaatcacttgatgaaatcgaagagaagcgaaccgcagcaaacatgaaatttgtagcccatgaacaaaaggtagctcggtactttaacaagcaagtgaaagcacgaaaattctttgtgggagatatggtcctcagaagggtattcttgaacaccaaagatagcacggcag

SEQ ID NO: 371756 - DNA, 509 bp, Cannabis indica
ggctaatttgcaatttcccccctgaactatgacacttgctaaatcgtgccccctgaactatttttgacgttaaaaattcccctcaaactattgacaatgcttaattttaggtattctgtagtgttccgttcattttagtaacagagtgatgacgtggctgccattaggcagtccacgtcattttacacatgtaaaaatatatatattttttaatctaattagggtaaaattgaaaccacaccattctcttgctccatctcacagccacacccgataccccaccagccaccccacgataccccaccagccacgccccacacgaacccctcacccaaccatgcgaacccagccacccccacccaccactggtctggaaccgacggagacgcacggtcaccactctgaccagacgcagcagccccaccatcgacaacccactagccacgaactcgcgtctccatcttttttgggtcttctccttctacgcagttgctggaattcgaaaatca

SEQ ID NO: 371757 - DNA, 482 bp, Cannabis indica
ctgaagttcttgggagccttcctgtacagatcgcgactggcgattgttatgtacgactgctaaacttcgcgaacataaactgatccctgagaacgcgagtctttggagagagccggtgtataaggaaccttctgaaaagcaacaagagcgaattgataaacatctttccaagcaagctcctcgaccaacatcaggtattttatcgcatacgcaaatttagggtgttagaattttatccttattattataacccttattttttcccttttgtaatttgcagagatgactttcctaaattctgctcctatgctcaaccgcaaactgaaacccgggacagcagcgacctctcctattacctcccagaagaggaaaagcgatgtggttgttactcctgtcgcagactcctccaagaggcctgctaagggtattcaagagaaagggaagaaggttgtgatcgacccagcggctcgagctcgtcatgt

SEQ ID NO: 371758 - DNA, 551 bp, Cannabis indica
ttccatctcaaataatgtagttggttaaggaaaaactgcaactatcctaagtttttttttcggtttgtttttttctttcattttttgggttttttttttgtcaaagtttacaatgtgttttgctattgcgattcaatttgttggttgtgttttgttattgtgattcgatttgctactatgattagtcttgtctttgtgatataattttgaatattttctttgtgacatgattttgagtgttttagtcttatctgtgtgatgtagctttgttttgtttcgtttcgttgttaatttttcgatagctctgcatcaaatcgttgttattggttgggaataacaagttctatgcaactgaaggagttattagtagtgcagttacatatcttgcacaatagttgagtgttgaatctacgtggttaaatgaacttgttgcaatagtttctactgttgtgttttttgagcggtagataaaactaaatataggtatttttaaggttgactatgacactgtaattttttttcatttgatttcatttttagttttttttttt

SEQ ID NO: 371759 - DNA, 532 bp, Cannabis indica
cctcttcatgagactttggagggatatttcctttgtattccagccgagccaatgcaacacctgtgacagagaagcagtagcaaaaaaacagccaaagaaaagatgttcaattgtttctgtggctgaattgcataatatgcaattatcagattcaatcactccatgtttgtgtaatctgtctttggttttgagtctattcatcatagctaaccaaagaacaaagctatgctttggtgtatttagtctagaccacacttcattacaccatgataccttttcgaactcttgagcaaaccatgtttgacccttcccaatttgatattcatgtgctgaaaaatcactctgttgcacataaaatctgattttgtctttaagctccaccattttcctccaataccaacttgcattcaaaggagctttgtaatcccacccgaatcttgtttgatatacacactatgaatccatttcacccacaagttatcttctttttctctattgcccacacatgcttcaccataggtgctgcattcca

SEQ ID NO: 371760 - DNA, 703 bp, Cannabis indica
ccaaatgttaccaaactttccagagtacctatccaatgtattcacaacataatccaaccagatttcacagaaaacacaccaaatcaatttatgccattaaagctcaaagctttgaactcaatgttcaaagttgcacaaaacctaaactaatcaacaaaactagcagctaggacctaaaatcaactcaaataacctctaaaattcgaaccttaagcatttcaaaacccaacagccactaaacctagaaatttcataatgaaactaaattacaacttcaagaacttaaagggaaaagaaactagggttaccttgtcttgatttctcttgaatcccttgctgaaaatataaacatttagcaacaaatcccccttaatcttgcttgttcgaaaagagagagaagagaagaaagagtttcttcaatttttgatattttctttaatttcccaaaatgagataaatgagcttgacaaagtttaattctttcctgaaataaaatgctaggtgtcacattcttagggcagccacctatcctttaccaaaggaaatgactaaaatgccctcccacttaaaacttaggtgctccaccaaactaggggtaaaatggtcaaatcccataaccccgctcaaacccgataatttattttctctaaaatatttcccactaagaaataaggttctaaacttacccatgtgatcaatctag

SEQ ID NO: 371761 - DNA, 657 bp, Cannabis indica
gattttgtgaagtttacttaggggaaagatgtcagtggcccaatacacaatggagtttgatcggctgtctacgtttgctggtgatctggtgcccagagatttcaccaagaaacagaagtatgtgagaggactgaaagccacaatcagtcgggacttgaagattaccacttcacatgacactttgtacaagaaagtggtagagctagccttgattgctgaggaggctgagcaacatgttgcgaaagagcagactgtaaaggatgccgtcatggcatcgaatcctcctgctagtggtaatgtcagtaaggggaccgacaatggcaaccctgatcacaaacggaaggctgaggcttccaaagtatcagggggtaacagaaagtttcggggaatttgaggtggccgtcaaagtcacggatcctctttcagatcatatttagaatattcaaaatgcaagaacgccattagggtgaatgacgggccaaggctgcatactatatttgatatggattatatgaatcgggtgttcaaggattacctggatagatgtgtgatcgtgtttatcgatgacatcttggtgtatgctgaatcataagaagagtatgagttgcatcttatagcagttttacaacggttacgagatcataagctatatgctaa

SEQ ID NO: 371762 - DNA, 528 bp, Cannabis indica
atattataagaatacaacttaaaataagtgcaacaaaaatatttacttttgcatgtcttaagcatttttgataggttaataaaatttttaatgtactataacattatgtgatgtactacaatacactaaaccacgttctacgtatgccagattttgtactatgaaattatttcacaaagtccgccaaaaattaagtttgagaagacaattttaccctttaatttgacaaaagaggaccatcaattgttgtacttatgtccttgctcctgtcaactttaccaaaaaattataccttaaataaataaattattattataaaaatataaataaaataaaaaaaaaatttaattattagtcggtcttataaacatagaacaaccggttactaacttaatataatattaataaagtacataagtactattgctacagtaccgcgggaccaatccgtgattcacaaaaaaaggacacaaaatcgactgcctatgtatatatatttggaatacttcttaatgggtataacccatt

SEQ ID NO: 371763 - DNA, 524 bp, Cannabis indica
aaattaagcatttttcgtttttcgaaacttaatttcgataaaaacgaagaagttatgaaggtttgaagttttgggtgcatatggtgtcgtcgctcgacaccacacgcacacaggcgctcggacaaggtgtatccgcctgtgtctgaagcgtgcgtgtctgaaggcatgtcgtgtctgaagcccacgaggaccctgcacgtttccttccaggaggctgcaactgccgagaaacctcggctgggctccctccttccgcgcgcgcatgaccctatctgctgtcttcgaggctgcacttgcagcctactggcagtaacaaccctaaaatccgattttgtgggattttttccaaaaattcaatttttccaattttcaaaccccaaatttaaaataaaatattattttaaggctaattagtaatttttcccccgaactttgacatgtgctaaatcgtgccccctgaacttttgtggccgttagaaattccctccgaactattgagattgttaaatttaaggacttttgtc

SEQ ID NO: 371764 - DNA, 942 bp, Cannabis indica
agccatttcgtctaggcctcccaagcctcccggagctcgcgtttggccttggcacagcctcgccctccgccctcagtgcttctcggtgcttggcctccagcctatccctccgaaggacctcctctcggatcatcgcctctgcttgggcttccctctgcttagcctcttcctcgaacttggccttagcaagggcctctcgccgcgcagcctcctcttggaacgcccgcctttcagcagacaggtcctgcaggatcttcacgacttcgtctatgcccccgaattcggacaagacgaagccgtgattaactatgttcttggaaaggcggccggcctccgcagcaagctgaaaaaggaagcaagagtgagtaaaggccttaagaaaaataacgagaaaagaagtaagttacgggatacttaccacggtcaaggagtggctgagatcctgaacttgaaagacagagttcaaggatgcacaagaagcgaaccgcttaggcgcgcaccgggttagctgggagacgtactcgccggtcatctctgcggcaaaaggagccaaggtaggctcgaggaaacgattgaaccagtccgtcagggggtccaggtttagatcccacgggttctggtagttctgatcgttaagggaattttgcatctcctctcgcaaaatcctcctcaaggcctccacctcagcatgcccccgggagtactcgtccatggcataattgtacttagctatccgaagctcctgcctcgcctcatctccgggaattggagtcagcacaatgttaggaggcactgtaaattccgccacctcgggagggatcccagaatcacggctcggggtcggagtgtccattctctgcgaccgtttaggtgtttcatcagccaccatctttcctttgcgcttgcggaccagagcaacctcttgctcttcttcactttctt

SEQ ID NO: 371765 - DNA, 990 bp, Cannabis indica
gtttcgtaggctgttcagactagatggacgccaggcggaacacaaggagtcaggaaaactcaataggatcaaatcagggtcaaggagctcagtttcccccgcatgctaggggccgtggtggaggtcccaggggcagggcccgtggtggggttgatgctaacctgccacaggctgcccaagccgatcaggaagcccagaattgggaaactaggtttgctgaaatgcaagtcagaatagaggaggaagatcaggagattcagagattgaggcagcaggggtctcctgcaatgccggtgccagaagttcctgtggcacccgccctgttgctcaggccgagatagtggtagcggcaaacaaaatggaacccttgtatgaaaggtttcggaagcaagcgcctctagtttttctgggaggtccggacgtcatgaaagtcgaacagtggctaacggtgatcaccaagatactgaattttatgggtgtcaccgggaatgacagggtggtgtgtgccaccttccagttccaagaagtcgctctagtctggtgggacatggtgtctcagattcatgatgtcaccaccatgacctgggaaaggttcaaggaactcttcaacgcgaactattataatgaggccgttagaagtgccaagataaaagagttcgcacacctgacccagcaggaaaacatgagcgtgactgagtataccacccagttcgatcggttggcgaggttggcctcaggtattgtgccaaccgatttcagtaagaaggaaaaatatctggatggattaaatgtgaagatcaagcatgaccttatgatcaccaccgacgacaagaccacctatgctgagatggtggagaaggcactgcgagctgagggcgcagtttgatgtatgtcagagtcagctaggactccagtgagtggcggggctccttcccctcctgcatctgggtttagcaggggaggtaggggttcgaccatggaccagaagag

SEQ ID NO: 371766 - DNA, 828 bp, Cannabis indica
taatttataaataattaaatatttaacaaaataacaaatttttgaatttgaaaacattatggtaagtatatctataaaaatatctatgttaatttcaaatttattaattatttaatttgtcatataagataattttaatataatattttaaataaaaagacaaagttatcttttaatttaaaatatgttaaatatcaaaatatctaatcttataattaaataataaataaatattaaagaagttaacaaatttttaaatctgaccataataggaaatatttcaaaatggaaatatttaaaattggaaaaattccaaattgaaaatattttaaaattggaaatatttcaatttagaaatatttaaaattggaaaaaatgaattttgggaaacaatcccatgaaaaattggatttttggggaaaaaacccaaaaatcgcaattttggtttggctgcccagtaggctgcatctccagcccaggaggggcttctagcagcccatacacgcgcagatcgaaggtgtttccagccctatctaccgagaaacctcgacgggctgcaggattttagcgggcggatgtgggcggacagtaggggtgacacgggcgtgtcacgcgcgcgtgaatgggttggtgaccgagggtatggtgcgcatgagcaccaccctcgacaccattgtttcttgatttttcaaaattcataactttttcatttttcatcggaatcgagttccgtaaaaatgaaaattgcttaattttttacaaggaatccaaataaaatattttaaaaatagaaaaaatattttttacggaaaaaggtactgtacaaca

SEQ ID NO: 371767 - DNA, 514 bp, Cannabis indica
gctaaaacacgatctatctttgaacaaattatttcatttccttgccttttattgttccacatataatagcttcctctatacttgatatcttctagttcacaataccccacacaatcaataaaatcggtggttgcattgtattttacccttttcccaactctttcatctttggacaaaatttcgttgaaatcacccaataccatccaaggatcttaagttctcaactggtttaggtctgtccacagcaacttcctcccttctacttcactaaaagcataaacaaatgtaactagagaaccaaacttaccatctaaagtagccacttgtagatggataagctagggctggtacattaattgagaatgttcaccaagaagctgaacgagttccatgccacaatgattcgacctccttcatgccacgctatgttcgaagtaaaacacaaccctttaaacatgttaacatataaggccccaagcttcggggccttaactctcgtctcgaggagaccaac

SEQ ID NO: 371768 - DNA, 508 bp, Cannabis indica
tgtatgttgctcattacaattgcctgaattgaattatttaaaatctggagagttgaaacttaaagttggtaatggaaaaatggtatcggttagagctagaggaaaagctaaactcaagtttcagaacagaactttggatttagacaatgtcttgttatttcaaatttcagtagaaacttgatttctgtgtcatgtttacagttgcaacaatacaaattgaatttttcgagttctagtgctatcatttcttgaaatggcattcaaatttgtgttgcatctgtggaacaggggctttatgttcttagaccagatgaaccatttgcgcttaataacgaactgtttaacgtagctaaacgtagaaaccacaaaaagtaaaagatcgataatgaagacgaaacatatctatggcacttagtcttggtcatataggctatgatagactccacaggttaaccaaaggtggtccattaaaaaatgtcaccttaggtgaattacaagtttgtgaatc

SEQ ID NO: 371769 - DNA, 797 bp, Cannabis indica
tgagggggatgctgaagtccaggaggttgaagagctggacgaggcacgtccgggcagccctcccggttctaagggagaggaggagattgaatcccctaaatatggggagtacaatgaagctgggcaaccagttgatgatgacggggacgtcctggttgcaggcgtcgactacgtcaccgaggagcttggtgaggcggttcttcataggaggcagggtgccttcggcgccaaatgggtgagtcctccgtccaagatttcagaggcacgcctccgcactctcgaccacgacgaatacctgggcgagctggactgcttcattcccgcccacaacaatcgcgcttcaaaccctagtaaggggatgtgcgcctggtcgggggctcacggtcagcaaggggcgttgatgcccttgcacaaatacttccgggatgtggcggacttcttcggcctctgcccagcccaaatcactcccaagggcattaagtatctatctgccctcttcgtcctcgatgcttcccaggaatggggtgttccttctcctcacgaggtcgcttggttctttgacctgaagtctaccctcaagcaaggcaggtcgtggtatttttacttctctcagccaggcttcaagtggttgagcgggacggacaaaaaggccatcagcaaaaaagggcattttgttgatgagtacttcatggtgaaggatccgaacatcactcggactcagtttcagtagattctgacatatcaccgtcctcccctcactcttacccttacgggatagggctcagaagcttgcccgg

SEQ ID NO: 371770 - DNA, 515 bp, Cannabis indica
attctttatattatcaataacagaaaaatagctagtacaacacatttggatctataaaaatcgaagggactaaatttgtactcccagacctgcaatttaacaaacatggaaaatataaatataaatggaaaataaacaagtatacaaactataataaaactataaaaaaaattgaaaacaaactgacaaccataaacaactcttcgaacataaactacaaagatcttaatcaaattgttacctaaaaatgaacagcaaacaactatacctaataatattttgaaaagaaaagatacataaaaggattaaactattaaaaaactatgaaaaaactaaagcacactgagaagagacattaaaatgaaactgaagttcaaaaatatttgaaaaactggaaaacacaaacagaacaaaaaagacaacaaaatgaaacaaaagtaagaataaacaaactaaaatgccaaacccacaaaagaacaaataaaattgatcaagaaaaattaaagccctaaaaa

SEQ ID NO: 371771 - DNA, 741 bp, Cannabis indica
gttggggttgcgagttcttcgtccgactgtgtgggttttttgggtttggtgtgggtttggtgttcagctgagagagacgaagagagaggaagagagaggctgattaacaatgagaggggtagtttaggaaaattggtaaagtggtcatatattaccaattttaataactttgcatttaggggaccaatttatgggtttattaagcatggaaattcaaatttcccttccactcaaacttatcggcacacctgagcacggaaatgaggtaagatagcataaagtatatacatgtgaatgtatgcttgttattaattgattacactactaacacaaatgaaaatatagttttaagggtgttggtacaatgtagagttttagagtagtttatgtgttaccaacacgagtatagaattggtactctagtgcatgtggtacaacactcggtaactccagggagtataaattggccctaccaacacgagtatgaagtaggtactctagtgcaaatggtacaatggtcggccctacgaacacgagtatagagtcgttgctctagtgtatatggtatagcggtcgtacttccattaagaatgttcttaaccatttgctaagatcagttgttgggctcaggacgacttaaagcataaagttgggatagctttgcttataaatgttatgcatatcttattgagtctgtcgactcatcagtttgctaccctgtgtatgttgggttttatgccc

SEQ ID NO: 371772 - DNA, 534 bp, Cannabis indica
cgcgagagtcctattgaatttttatgtatcaagattcgacttctaagaaggtaggtggaagttgcgtataattaaagcttagacaaagcttgaatagataaaaagagaaagcaccacgaggagtaagacagacttcaagtagtcctttcattcttggaaagtagggttgaagaagtgccacaccccagtgatctttcttacacaaaaaaccacatacaccaaagagtccttttgattttttatgtagcaagctttggcttccaggaaggacggctaaagttgcgtaaaaattcatggtcaaacaacgtatgaaaagatcaaaggagaatgcatcatgaggagtaaggtagagttcaaggagtcctttcattctagcaaaggagggttgaagatgtgccatacctgaagtgatctttcttgcacgaaaaaccacgtgcacgcgagagtcctgttgcatttttaggtagaacccttcgccttccaggaaagaaggctgaagttgcataaaaattaaagcttagacttcgcttgaaa

SEQ ID NO: 371773 - DNA, 609 bp, Cannabis indica
agttttgtgcaaatagttgcatattagttttatcatagttgcaaaaaagatttgattcaaacagaattgatgaaaaacacagggttcacaattggtaacaactgacttgaaataacgaaaagatcaggagctcccaatcaatccaaatcaggtataaacaatacagataaggtatattcagttgcatagtcattttttttatgatttcaaattataatcaagctacaatcatgttaattggagttaagttccaagtttttcaagttgatttatagttgcatcatcatttcataatagttttactcaatattgcagaaatttattttgacagagagaaaagagaaaacacttggacaaatggttagtttgtctaataaatttaaaacgtttcgtactagttgtatatcagttttttcatagtttcatgacattattaaaacaaaaaaaatgacgaaaacagggttcagaattagaaatacaagacttgaacaaaagaaagaaaatagaagtaagcttctttctatttaataaatattaatttatttttttgttataaaaatcagtatcaaaaatgttcggaaacattactaacattagcaataacagaat

SEQ ID NO: 371774 - DNA, 680 bp, Cannabis indica
agttagtatacatacttaatttgaatatttagttactcttatttgataataaattataaaagaaactagaatgttattttttattttgaatatattatttgatgatggtaaaaaattatgggttttacataataaaatgaccattttgaaaattaaattgagaaataatgccaattttgaacttaaagaattaaaagtgtagttaatattctttaattttaaaattgtaatgaaaaaggataaaaataaatatgaaaaaattctttgagtttaaaaattagttattattcttacaaaaaaaaaaattaaatgtgagcagaaaaatatatacttttttttagaaaacatgagtagtttttttttttaaaaaaaagttattatagtattactttttataccaaagccaaaataaataattatggttgtataactcttcttttaaaaaaaaaaccgtagagaataaaaagtactagaagaagaaaaaaaaataaagaagtgtctaattttcacacaatggaaaaagaaaaaaaaaactaaaaaaaggctaacaagttcaagctaacaaaaaaaagttggaatgtggatatatattattttatattaagtataaaagtatacgtaatatttatattaaaatttgtaacgctatcattgtaaataattttagtattgagtatata

SEQ ID NO: 371775 - DNA, 1356 bp, Cannabis indica
gaatatattaattacttaaaaagtttattataataaaataatattttaaaataattatgtaatattgtagtatataaataataaagatttaacatgaaaaaaattataaattaaaagtgctttgacaaataaatatacaaaaatataattaagtagagtaatataaaaaatcataaataataaatataaaaaatttgaaataataaatttttaaaaataaaataaattagttataaattttttaaataaaaaaatgtaatatatataaagtaatacttacttagaagtataaatatgaaaaattaatttaattaattaatagtaaaataatttttaaattattaaataagtattattaaatataataatttattttttttaaaaaaaatcctgaaaatttaatatgtcataaatttgaaaatttatgtcataaatatgtcataaatttgaaaatttaatgggaggatctccacaacagcctatgtatggtcagattttcagtgcgcagagccagcaacaacagcaacaacctattttggttcgcccgcatcctcgacagtttatggagatcttacctacaccgcagactggacaaccttattatcctgccccgccagctcaatcccgtgataatcttgatggttcaagacttagctcgaatgcagatgaatttttagaatatactgatttgaacaatgatagttaggtgtttttaattatgtcaatttttatgttttaaacttcatctaattttatttaagataataaagtttattttgtaatggacaaattaatattaatgcttaatttcttaatattaatgttttatatttaattaataatatatttatgaaataattattatatataattataattaatttaattataaaatatattaattattatatatattaatttaattataattaattttattatatatattatatttaagataatatattgttttttttaatttataaatattaataccggcggaaattgattgtggtccgccggtattaatgcatctgcgtggaaaagtgcagatattaataccggcggaccccaccgctattaatctgccggtattaatattattaccggcggaataccattttcgtcgctaatagtaacttatagcgaccaattaataccggcggataattaccggcggaatccgccggtaataattaatgccggcggtctcctctattattaccggcgggtggctccgccggtaataccaatatttgttgtagtggtatctatagactgtaagtatacttatttatttataggctaattaagatttttttccctcgaactttgacatgtaccaaatcatgcacc

SEQ ID NO: 371776 - DNA, 680 bp, Cannabis indica
tcgcatttttcaccataaaggtaatgttgccatatctttagagcaaaaaccacagcaacaagctctaggtcatgagttgagtagcgctgctcataatcctttagtggacgagaggcataggctataactttgtcagcttgcatcagaacacatcccagaccctgtcttgttgcatcacagtaaacaacgaacttttcttgatctaatggcaaagctaacaccggagccgatattaaacgctgcttcaattcctaaaaacttgcttcacatttatctgaccacagaaatcgctgattttgcttacttaactcggttagtggcgtagagattttagaaaatcccttgacaaaacgtcgataataccctgctaaaccgagaaaactttgaatttctatcactgactttagccttggccagttcttcactgactcaatcttacttggatcaacaataatgccattctttttgaaaataagccccagaaaagatacctatgacaaccagaattcacactttttgaactttgcatacaacttgtgatcccttagtcgctgcaatacaattcaaagatgaggcccgtgctcctcttccgattgagagtatacaaggatgtcgtcgataaacactatgatgcagttattgaggaagtccttgaatactctattcatgagatccataaa

SEQ ID NO: 371777 - DNA, 568 bp, Cannabis indica
attgagttgttgcctcaaaaattgccccatcaatgttgatcttcaacttcccagcaggcggcttcacccaacaaacactgctaccaacaacagtagcctcaaacaacagcggttcaaacctgttctcttgagccaacaaccaactagaatgacacggccttgccactcgaaccacatccgtagtctgagaagaacgaccctgccaaagaagcacatttcgagctttgcaaataccccatgctaccatcaagagctcatccaccaaagccactctaccccctgccagaaacgccttaaaccaatcggcgaaggtagtttctgcagaataatgcaaccccacacccgacctatgccaacatgattgcgcaaaatgacaaccaaccaaaacatgagtaatggtttcttcatcagaattacaaaacacacagcgaggatcaacaggaacatgttttgtgcgcaattgggtacgagttggaagacaccccgagatagctttccaagcaaagtgaagaaccttgggggggactttaactttccaaagaaccttccacaagtcagactccaattg

SEQ ID NO: 371778 - DNA, 608 bp, Cannabis indica
tgcacccgtcttttgagattgagtagtaatatattggtcaagcaccattctagccgatcggaccacattcatagcagaacaagtttttttattccatagcagctcattacgaacagaccacagcctccaactgattaacgctgcttctttgacaatacactactacaatttggacttttagtgacattatttagtgactcgcacttttgtgcgtgtcactaaagaattaggattgatttttagtgacacgcacaattagactctaaactttcagtattagtctcttataatgtgtgtcactaaaaatatgaggtgtcactaaagagtaatacccataatttttaactttttttttaaaaaaattaaaattatacgtagacatttagcgtcaggtataatttgaaccaaattagttcgcttctatttatactcgaagctaaaagacacttatttaaaaaaaaaaaaccccaaatcaaaataagatttttcatttcgatcgatctccatttcgaatcagaacctctcttttctctctctctctctaccctaacccaactcccattgacgccgaccgcaccacctcattctaccccaatcccaactctctc

SEQ ID NO: 371779 - DNA, 579 bp, Cannabis indica
gtaactgtccgattagatcaattccccagatggcaaaggcccacggactttgcatctgtgtcagcttgttgggcggagctcttggtatctttgaaactctctggcatttgtccacttcttgacataggctctcaaatcttcaataatcgttggccagaagaagccttgccttagtatattctttgataagctctgtccggctgtatgatttccacaaaattcgtcatgaacttcacatataagtcgtgcagcttcatctggtgtgacacatctgagtaatggaatctagaatcctcttctgtacatgatcccttctactatgatgtaccgtgttgcctttcttctcattttccgagcttcatttcagtcatctgggagttccccagagttgagataggctgttattggcgtcatccagtttggagatgtgtcgatcatttcgatttcttccgtgccagtgatgctaggctcttcaaggaactggatagggaccatgtttgccttgtcacttatattgctgctcgctaatcgtgctaacgcatctgccgttgtattttcttctcttggaatttttctgat

SEQ ID NO: 371780 - DNA, 644 bp, Cannabis indica
tatgaagaaaagggaaaagaggaccatgtctgtctactaaaaaggtcactctatggtttaaaacagtctcccagacaatggtacaaaagatttgatgactatgtaatcaaatcgggtttcaaaagaagtgcttttgacagctgtgtgtatgtcaagaatgagaagcaccctgtatttctacttctctatgttgatgacatgctcattgctagcaaaagcatgagtgaaatagacaaagttaagaaggtgttgcacaaggagtttgagatgaaagaccttggcccagcaaggagaattctgggcattgaaattgaaagaaacagggaaagaagaaccctgaaattgtctcaaagcagctacactgctaaaattctagagaaatttgggtttactgatgtgaaaccagttggcacacccttgtcccaacagttcagactctcttgctcacaatcaccaaccacagatgatgaaaacacttacatggaaactattccatacaccagtgtcgtgggcagcatcatgtacatcatggtctgcaccagaccagatatttgtcatggggttagtgttgtaagcagatttatgagcaaacctgggaaggagcattggaatgctgtaaaatggatcatgagatacttgaaagg

SEQ ID NO: 371781 - DNA, 519 bp, Cannabis indica
acacaataatttaacgaacctgaggcctaataatgaaatagtactattgctttatacctttttttttcacataactattattattatttgggtaacaaaccaatctgcccattcgtcttgatggtagaaaatctaattctattgaattcaatataagctttggcagcttaatccattgtcgtgtgagtggattgcaaataacaaaactaggtggtaacgcaaaaccacataagagaaacaataaatcatctaaagatgcatacaaagttatttcgttccatggtaagaaattgagataataattgaaatgccactttaaaatgagattgaagaaactcgatctgcaaaacttagcatggagaattcgagattcgggtgttaagagattgtggaatggtgcttcgtaaaaccttctatgtttataattgttcccaaagagtaatgtggttgaacaaaacaatttagattgttgataatggagttgttttgcttgaagatgcaatttggagttgaggagat

SEQ ID NO: 371782 - DNA, 529 bp, Cannabis indica
attttataacccgaactttatgtcgggttggaaaatatatagtataaaccgactaaaccgaccgatgtacagccctaggtcctatggcgtcggttatataaaacaaccgacgtcataggacccctatggcgtcggttatttcataataactgacgccataggggtcttatggcgtcagttgtttttaaccctttagcgtcactcaaaacagcgtcggtagcgaattttgccaataccgatgctgaaagcccttaaaaactgcctctaaagcccaattttgtagtagtgaattgaatatttaaaaataatatcaaatccgatgtgatcacaattggatatccaatatttagcggtcgattataattggattagtcgatttttcattgtatttgatcgatttatgaacccctatattaattagtaaaatatatatatgtttttttaattgggctattttgaaatagtttatagggtaaataccattttggaccctctgttttacaaagtttaccaattggaccctgtgttt

SEQ ID NO: 371783 - DNA, 526 bp, Cannabis indica
agcttcaacgcccactctactcttgtacagaataagctccttttcgaaccgatcaatttcacttcctccatattagtcgtctaaaatctacaaaaaaatacacatatatgtgttaattttgtttttattttttcatatttgctatagatatacaacatacatacatgatcgaccttaagctaaggtaaattaggtccacacttagggcccacctaacctgaaagccctaaaaagtatattatttaaaaatacatatttaaaaaaaaaaatctaaaagcctaatatattttagagtcggtcttatattatgtactttacacaaaaataatataatttttttttctttgggaaaaaccttaaaattgaagagaaagcaatagtacctaggaaagaatgaagaatataattagtaggtgaatatgattcaattggtaggatggattaggtacatttatagtgatcattctgtcttcttttttttcctactcaaatattattttatatataaaacgaatataacaattga

SEQ ID NO: 371784 - DNA, 628 bp, Cannabis indica
catgaccaaagcttagttaggaaagagtttcaacctaggcagcaagtgttactattcaattcaaggttgaagttgtttcctggtaagctgaagtcaaggtggtcaggaccatttaacgtggtcaaggtgtttccctatggagttgtggagttaaaaggtgaaggtccagcaacctgcaaagttaatggacagcgtttgaagctctacttgggaggtcaatttgaccaagccaagtccgacattattctggcgcctctctaaacaacaactcagcgtccggctatatgacgataaagacagcgctcttgggaggctacccaagtgttttctttcatttttcagacttttagtttatgttttagtatttttagtattttaaatttttagctgagtacaagacattatttttttccagttgaatcgtgaaaaacgtgaaaaaaaatataaaaaataaaaaaataattattttcgggaccccgagcccagtggtcgcgaccaccaggttcctgggtcgcgaccctttttggtagtcgcgaccctggtcgcgacctgggattttacagaaccgcatagaattgtaccccccagtagtcacttctgcaaaaaatgtcaccatatcggttggtgt

SEQ ID NO: 371785 - DNA, 499 bp, Cannabis indica
tatattactaaaataatatatttactaaaatttaatatgaaattaaaaataaaatatacaaacacatttataaatttaatttatattttataaacaatacatatacatgtatttattaaacatttgattagtattattaatgtttataatgttattattaatatactatgtttatcatgataataaatataatttatttattaaaatatcataataatttttaaaatagaacatttaagtttatttatttatttatttaaataaacactttaaatgacacttatgtttattagttattgaaaaatgtgttaaagaaataaacgaaattgtaattaaatgtagccttatgtataaatattatgtttatattagggtaaatagcggcataaatacctaatgtttccgattgtatacacctaaatacctaatgtttatttttggtggcaaaaatacctaatgttacaattctcttacaccgttactaccactttcgttaact

SEQ ID NO: 371786 - DNA, 588 bp, Cannabis indica
gtctgttccaggcctcgttgccaaaatcccgttcaagatctggatcactgtcctgggtctcggtctggttctggttcaggtcccaggtcccatttctgagtttggctttgggatcgagactggggtgcagttctaggtcccaaccctagttctgtgtccctagttttgctccatgttttggtctgagttcatgtttgggttcgggtctcgagtccgggtttgcgttgggatccaggttcggctcccaattcgggtctagttcttatttggagtccggatcctggtccggttactgttctggatctatgtccaatttcagttatgattccaagatcaattcctagttcaagtccccgtcaacctccggttttggttcaaattttgggtcacaagttacgggttcgggtccactttttggtttgggactgggttcaggttcgggtgtgggttcgggtccttgttagggtttggatcaagggcttggtccaaaatctcgggtcgcagtttggttccatttctggtgccgggtcatgagctgggtcctaggttcaagttcgggtttgggtcgggtactaggtcccggtccta

SEQ ID NO: 371787 - DNA, 459 bp, Cannabis indica
gaatgcatgggaggagaccaaaaataaagcaagaaaagacttaaaaagatatatgtatatgagttgtcactaataaaactatacttcttgataaagatttagtacaattaatgaatgttggagaagataaaaccaaaatacatgtgaaataaaagaataaacctattagaaagaaatagataagaaaaaagtaaataattttctaaagatcatttcttttgtttaaaaaagaaaagtgtaataactataagaatatttttattttaagaaatatatttctatttaaggaaataaaataaataattgattttgtgataaatgaatattttatattcattgaatctggacaaaatcatttacgtaatattctatatatggtcagatttaaatattcattacctgatttaatttcctgaattaattgtcaaaatattctgacaattaatgtggcgcagatac

SEQ ID NO: 371788 - DNA, 600 bp, Cannabis indica
gagagagaaatgtaatgagagagtgagagagattaccatgtgcaacgtgggttgggaatcggtatgaacgatggggctctggcactacaaaaaatcttacttttagtcacaacaaaacttatgactaaaagtgaaaaagttgtgactaattataaattattattcttatgttgtgactaaaaattcgtggctaattgtattagtcacaaataaaattataatttgttgtgactaaatgtgattttagtcaaaatatttgttgtgatcaaaactaaattagtgacaacttgtatgtaaatactatatttttgtcacaagtaattttttattgtgactaaaagtcacattaaagtcacaaaaaatatatgttgtgtctaaaaagttctcactaaagatagttttttttaaagtgtggtttgagttgtggtgctccggcatggttgagatgtgaacaactccgtgcaacgaactcgtgctttgaggtggtgctccgacgcgattgaggtgcgagtagcttcgtgccctggcatgctgctagctcgagcatgtttaaggtgctccagtgaagagagagagagagagagggtggcggctcagaga

SEQ ID NO: 371789 - DNA, 592 bp, Cannabis indica
ctctaaatcaagctgctcagcaacctttgaggtacatatttcttgtgcagaattcaacacattggttatagtacgtggtcaagcatgtaggattaggtgggtgaggtcgagtgcatttgcttttaaagtcatttgtagtctcattgtgtttgagctttgagactgtcatatctatggttgttacaaattcacacaagcaataattcttctctaaattttttttagagcggagctgatcgattcgcaacgttgtgtagttctcattcctgcaaccaatgaaccccttaaataagtttctgcccaccgttttcttgtatcaaatgttgtttgtcaccattcattatctgttagttgtagcctttcgatgacatctaatcatttagcttcaaattcgtaatccccgtagaagttgtacatcagatctataaatgttttaaagaagatcggatctttaacctttttggaagcatttgtattgagatgccaagagcatagacggtgtgtaatatctggcatgtgttccacatggcctgtttcatggcaatatcttggtcagtaactacaacatttggcttcttatctccatggcatt

SEQ ID NO: 371790 - DNA, 683 bp, Cannabis indica
catagtgagtaagacggtggtaaccaaacgtgaaggagagaatgagatccaggttcagatcttgataatgctttgccacagaaaggaatcaagggctagagatcttgtacggaatgagtcattatattccgatgcaataaatgtaaggttttcttaaacccttatgtatttatttttattgttttagagaattcatatttaggatatttaatgaacatacttgttagtgaatctagaacctggtaaaatattcccgatagttttctctttcacgcagcgaggttgaggcctcgtcatgaatgcgtgcacccacatggtttctcgtcaatacataagttagcagttcatacatttctatctcccagaaggctattaagccagctaagttataaacatactctgcgaattatatttccgacgagttgttccatgctaagtatacttttagtttgcttgtttgagttcttcgtctttcccagctcgacacgtgtcttcctctgatgtgtttaccgaatttcaggtataacaaccatctcccactaacaatcaatactggttgagtacttggataagaaatccattccgagtataatatcaaaatctgctaaacccatttctattaagtcagcactcaactctctatcctcaattctgatcggcatagacctaatccaccttttgga

SEQ ID NO: 371791 - DNA, 873 bp, Cannabis indica
ttagaatccaacttttagcatccaatccaatccaatgtaattggatatccaactttagtaattggattgaattggattggttcggttctattgaattagattgaatgatgcccacccctaactattattaaccatctatatatatattgtgataattaatattcttctttttattatatgcattgatggagaaattaagaaagctcacaatagaaaatattattagatttcatgtaaatcatcccaattattttattatgcaataattcatatgagaaagtgttgatcgagacacctacctatatacgtactaataacaataaattaattaatatcacgtttcttaattttaaagttcaattataacactaataaataccttttccataggttagcttttgactttaacctgcctcaatttaatttaaaatatgtaaattatataatagataaatgtattagtagtactagtatcaccaaaagtgttatttatttattaataaagttaattagtatatggtcttttatggaaagatagcaaatatatagacataaaactttactaaattagagagaaggatagaggaaagatttgttgaattaaaaaatattagattagaaaaataatcatgttgatattaggattaatgtcttaatatactataaaaattaaaaaagttgtaagctaattataaattattattcctacgtcgtgactaaaaggtctatgctaaaaatattaattaaaaaaatcacaatttattgtgactaaatgtgtatttagtcgtacttgttgtgattaaaactaaatgtttagtcaaaagtaatttttttagttgttgactaaaagtcacatttagtcacaattttttt

SEQ ID NO: 371792 - DNA, 863 bp, Cannabis indica
aaacctaaaccctactgtggaatgctatagatagatagtgaaggcttcaggaaatttagacttttacttctggtttccttcagagaaaaacttgagccttctctttctaaaacctagcagccaccctcatactcttcttcttccttgaataatttcgaacctcttagtgatagagtagtgcccacacagagcaagtgatacctcaataatagtgaggaagatcgtgaagaaagatattcaacaagaaggagtttcaacactaaagaaaggagagaaagagatccaggttcagatcttgataatactctgcgacagaaaggatacaagggttagagatctgaacagaaggagacataatattctgctgcacccaatgtaaggtttatcatactttatatgtgtttattttataatcattttagaagttcatatttaggatgttaatcaacatacttgtgagtagatctaagatcctggtaaaataatttccaacagtcttcgcagtcaatgtacatatcgaaccagtcttcaggtctttaaatctcagtcgctctgattacacgttgtaatgccctgtcccatagcaatgcaacgtttatgcttttacaaattagttttaacctaacttattaacttaagaatagtgcggtgggatttaaaacttttaattaaagataaaacacaactttataaactataactatgtcaagtacagggagtctcctgtataaaatttttactactcgtttttaaaaatttagtattactaacataggttacaattcaaaaataacaaatcaaaaggtaggagtcctgtcctattggtacccggggtcgactgcagttgatatgtacactgctgg

SEQ ID NO: 371793 - DNA, 595 bp, Cannabis indica
ttccacgaccaacagattgttgtccgagaaactgatcttgatagcatcttcatcactaaatgttatagtgggctcctctggcagtggtattttcggtttcctttctttgacgtcgaaaattacttcttcttgctcatgctgtattgtttaggcatacctttctcgggcttttcctgaatctccaactatgtgcggacctccaataattacttgcagatgtccatctactggtggtggtagtaaatcttggttgttatcggccctttaatttttatcggctttgacatacttctctacctgtggattattttttcttattacaaattcaatttcccacttcagattgttgcattcattggtgtcatggccataatccccatgaaaattgcataacttggtcatgtctctcttgcttacaacttttttcatgggtgcgggcttcttgtacggggctaatgaatgagtagccatatacacgatttctatatcttctgtcatgacagaaaatacagtaaacttggtaggattctccctgggggcttgttcgattttaccagtcaaacttttcctttttcccatttccttgcctatgttg

SEQ ID NO: 371794 - DNA, 533 bp, Cannabis indica
aattaaatttaagtttgttaaaattgtattttttttgtttttaatagaaaagttttttctaaacattctaaattctgttaattattttattaattaaataataattatgatataaattatgttaatttaatatttacataaatttattttaaaattttactttcttttataaataattacatatttttaaaaataattaaaaaataacaaaaaaatattaaaatattcaaattataattttatattatcaagaactcctattttaaaaattatattaattttataattacatataaatttattaaaaacttttacttgctaattaaaaataattatactaaatattcatgtaattttttttatttataataagagttaattgcagtaaaacctccaatagctttattttgcttgcatttaacccccaaaactcaaatttgggcggtaaaactcccaatattcgtattctgttagcaatttaacatttctatccattttaagtgttaagtgtcatgttggactggacacagtgt

SEQ ID NO: 371795 - DNA, 502 bp, Cannabis indica
attcgggtctaggtctgatttggagtccgggtcctagtccagttacggttctggatctagttccaatttcagttatgattccatgttcaagtcctagttccagtcccggtcaacttccggtttttgttccaattttgggtcacatggtatgggttagtgtccacttttgggtttgggactaggttcaggtccgtgtgtgggttcgggtccttgtcaaggttcgggtctagggctaggtcccaatccaaacaccgactacgggttttgtccaagccctgggtccagatccggatccctatctagggtcccagttggttccatttctggtggcgggtcacgagcttggtcgtacgttcaagttcgggtcagggtcgggtactaggtcccggttctagttcttttttgcaggtctaggttcgggttcgagtcctagtctcgatttgggtttaggtctctgttttggttttgatctaggttcgtgtttgggtttaggtccttgtcc

SEQ ID NO: 371796 - DNA, 724 bp, Cannabis indica
ggccttcactcacctttgcttccttttccagattactgcagaggccggccgcctttccaaaaccataattaatcatggcttcgcttgtccaaattttgggacattgacgaggtcgtgaagatcctgcaggacctgtctgctgaaaggcgggcgctacaggaggaggctaaacggaaggaggctctcgctaaggcaaagtttgaggaagaggccaagcaaagggaagcgcaagcggaggcgatgatccgagaggagatccttcagagggataggttggaggcaaagcaccgggaagcgttgacggcggagggcgaagctactgccaaggcaaaacgcgagcttcgagaggccaggcaggccttggacgaaatggccgccaaggtgaggtccttagaggaattgcaccaagatggatttggagtcaagggctaacttagccgtggagacgaaggagctcaaggactttaaagatcaagccttaaagaaggctaagaaagacgagctcctctcccctgtttcctgccgccgttgcattaaacgctttgatgacggcgtctatatggcctggtcgaccaatggcgagagtattttgctattttgcttttgtttaagacaatctttatttcaatagctgttttattttctaagggtccccgggccctttatatatatatatatatatttttttttacctgcccttcgggccaggatttttatatatata

SEQ ID NO: 371797 - DNA, 894 bp, Cannabis indica
ccttggagacctgattggaggccaaaaatgtcacaacagttttacttaaaaatattgatcagattatgaggataagttgattttagaaatatcggggtattttagggtactcgaagttggccaaataccctaaaaataaagatttcttaatggctaagaaataataagataactattaataataaaatttttattaatattattattaatatattattattatattaatattaatattatattattattattatttttaaaatatatatatattaagttttaagttaacagtagaaacgaaggaacgaacgaacgaaccctcgttctctttctaaaataaaattttctctccctatatccatttttcttgattttcaatccaaaacttagcgatctaagctctggtagtagcaggatagcaaatccttgaagaggaaactcttaaggtatggtttaaatttgttctaagtttaaaaacaattagtttagtataggggttatgtgaattagaatacttatggagattctgaatttgtacaattgttctttggtacctatgggactagtatcaatgtttacttgttgaatttgaggtgattttaagttagaaattgagttttgaactttttaaagcttagtccgaacgtcaatgccgtttttgaattaagggctcgatttttatttttgttatgtaagaatggtaatatttaaggtatatatgcgccctgtgaagtttggagttattcggataagttttagtagtgtttcggtaagtgatctatatgtcagatattaaggaactgtgtatcagttgtctttgtatctcaccatctaatttcgaaattctataagatggtgcttactttgggggtggaggaattattgtataataat

SEQ ID NO: 371798 - DNA, 884 bp, Cannabis indica
gcccaaccccattgtactccccatagttagggggttcaatctcttcctctccctcagcagcgggagggctgcccagacgcgcctcgtccagctcctcaacctcctggacttcggcgtccccctcacggtcctcctccattgggaccgccaaatcctgttcggcgtcgggcagagtggcaagccgagccacctgggggtcagaagcgtcagccagacgcgtagttttcttagtacgagccatcatcctatggctgggtacggaatcagaagaatatccttctcttgaaggaggattagcacgaagacgagggtggacttcgtgcagaagttgaagcagctcctggtcgatttgatgctcgggctcccaagactcacctgggttcatctacaaaagacaacacgcaagatgagtgttggacggagtatcaagcgaaaaaacaagcaaatatgccgaccaggagtacccaacagattaaagaacgatcatgttcagagaaaagtctaaactcaagaagtcagaaagtttttcttgagttagggcaaaaaagttcatgaagcttgaaaaaagcagaatggaaaacagacgcaatgcagttctaaaacaagccttacggctgaaagctaacacaaggacatggaaaagaagagtcgcagaagtttcaaaccctaggatttcctacagtgttctttctacaacaaagttacattcaaagcacaagcatgcaaaggaaaaacataaagggaatcagaaacttacttaaagattcaagtgtccgggttcaagcaagccagaaatcgtctctaaactccaagtatttataggcaaaagggtaactgtacgtaaaggaaccttagacgcctcgacttcccgccttgaaagcaaa

SEQ ID NO: 371799 - DNA, 531 bp, Cannabis indica
gtgatctccgttctcccggttgagtcccaagatcctcctcattttcatgagggatttctcgttcatccttttccggttgtctcccatctagctgttcgtcctgattttaaaagggtgtctcattttccctgggttgttcttccaaagccttttcttgtctcctggttcgtgatccacgaggtttgccccgtggtcttctcactctaggtttaggttgattttgagcattcgtcccctatgccgctcttgccgaggctgcctcacgttctaactcagcgttttgacactacactacttccaaatagcgtctcaggcgatggctttctgtttcataagttctttctcccacagatttggcacctccacaattgtgctcttcatcccttgatctaaggttctgaccattcccacgctgagttctcctcgagcgcgttgtccatgtactaggaccaacgtcaggtcgagttttttgggtaacgcgtggtctgcgcactagggccatcttctagagcccatgggctctttcctaga

SEQ ID NO: 371800 - DNA, 616 bp, Cannabis indica
agcttgaggcctcatacttagttcatctaattgtaacaaaataattaagtatcatttaaaaataattaattatttaaaattttattaaaaaagagaattttaatttgtgtagaaagaagtttaatttttatgaaaaaataaattttattgtaaatattataattaaatgacttaattattaaaataattagagtaaggatttaaatataaataaaaaaaattatttataaatattaattgctaaaagaggttttgttaaagatttaattaattattttaagaaaatagttaattataattaattattttaagaaaataattaattaattctaaaaaatgaatgtttacctattagtaacctgctattacaggtcaaagaaaaatgttacaataaaaatataaccattgaatagtcactcataacataatttatctaaataaattatacatgacattacttaatataacaattaaaaaattgaagtacttcacctaaaagaaaaattaagcatatacgtgcaacattaatcttgtaacgtatacttaattaacctaaatttaatcattaaaaaagtagtattcaatacattattgaaaaattgtaaaaaaaaaaatt

SEQ ID NO: 371801 - DNA, 781 bp, Cannabis indica
caatgcactctgtaccataactgcacaagtgttggtagtgcaactaaaccataagcatgcatatacacataacatatacatacactcagttattgatatcacacattatatacagttcttaccttctttccagattcaagtgtgctggccgacctgaacggaaagtctcgtgctagatggatgccataattacataatgaagcaggtaaatcacatgatcaaaaaccctaatccgggaaacctaaacccaacacactaggttccgttatactctctatggattacactaaccaaggaaatagggaaacaactaactacggcactagaatgcacgagaattgagaaaatggagcattcgagaaccctgccaaaactggctaactgattttacaggtacgtgtaaaattgatcacccagtttgcaacagttcacccaaaatatctcatttcttgctcaaaactccaccaaacgtaaccaaaccttccagagtacctaattagggtatacacaacatattccagccaataaatcatagaaaaacccactgaatcaaaatatgccatttaagatcaaagtttaggttttcaaacccaaacctgcataaattcatcacaacccaaccaaactagctgctagaagcgaaaaccaactcaaaataaacttagaattcgaattacaacctaacctaactctaacagcccctaaaactcaaagtcaactcttgaaaccaactaaaaacttgagaaaaacataactagagagcaactagggttaccttgat

SEQ ID NO: 371802 - DNA, 663 bp, Cannabis indica
tgtctttatgtgaatttaattagatagatataattagttttattaaggttttggctaaaaaggatttaataaaaccatttctttattttatttccttcattttccaaggataagaaaaaaaaaaaaagaagaaaactctctctttctctctctcaaaaattcctagggctgctagggttggaatttcttcagtttccctctgaatctcaactggttgtttgtgaatccaagccaaggtaagcttctagtaactcctcctttagtttcttgaagtgtaagataatggtttgtgcttgattttggggtttttgatgttgtagctgctgttagagtttgttgtaattttcagaggttataatatgtttagaaatgttattttgagcatgaattaagggatgtatgtacgtttaatcaagctttgagttttagaactcaaacttggagctttaatggtgattttggattctgagctttaattgttgttttgttgcttggaaatagtttattagggtataataaaaaagtctactaaaatatagatttgtatggtaagaaaacattactattttttttaaaataacatttgatatgaaaaaaaaaacaatacaatcattagaaaaagaatctaaaacatgtaattgttataaatattaataattatgt

SEQ ID NO: 371803 - DNA, 919 bp, Cannabis indica
gaatactcgcatttgtctttccacgtaaatttcttcttgttgctaataatattatataatttggtattgcgaaattcactcgacaacaaatagagagtagataaatacatgttaaaaaaaaaaccagcgtgtatacaaaaagagagaaaaaaaaacataaaaaataaagtattaagcactacgtatatatctattcaaaattcttttaaaacgtatattccacaattaaacataagagtgttaattatgatgttccaaaatttcgtttccaagcgtaattttctcaaaattatgcgcataatatacataatgaacttaaataaaaataaatcattcatttcgtactatattatataataaaattatactgtgtgatataaatattgatgtacagtttaatacattttagtttaaataattaaattcaaattttagttttatagttaattaaggatatctaatattttagttaaactaattaaaataaaatatcaccaaagtgatctcttttgtgtaatttaattcaattaaaatattaaaataattgtatatatagaattcatgtatttattaacagacccaaaggtaagttaatatttgactgagtttcatatatatctgtggtgataaatgtgtgacaattataaagtattttgtgtgatcaatatattagtctaaagattgcatattgtttgacataatttattgttaatgtttgatcactacaacaagagtaccgcttacaattaacattactgtccaaggacttaatattaatgctgtgtttgatatcttgagatgagattaattattatttgaatttattgttttatttagattctaatatgagcatgctatttatataattgtattgttcttttcagcttgaaattccgtattttaatattcccagtttgat

SEQ ID NO: 371804 - DNA, 541 bp, Cannabis indica
taggtagaaaaaaataaactcaaaaaaatagccgaaaaaaaattaatggtaaaaatatggaaatcaaaacttttaataggacttactaaaaaaatccaaatttctaaagaaaaaactagaatttcgatcccccatctctctcgcattttctctctcggaatcgcacgatcatctccagtcacaaaactgcaattcgatctcaaacgcaaacatttcacacaacaaatcaatctcacaatccaaaattttgctcggttgacaacatagctccagcatcaatcgtcatctctgattgtcttctccagctctggtaagttcttcaattgcttctgaacctcttccttagttgtgtgaacctgaaaatcaacgctcgtaaaaacgcttactagaaaatgaaaaatcaaaccaaattatacatagcaataaatcttcgacaacaattctcagtataaacaaaacatgtatataaactcaataatcaaaattatatatggcgataattatatatgaacatattatataagaatatatatattatctg

SEQ ID NO: 371805 - DNA, 530 bp, Cannabis indica
ttattttaaattgatcacttgttgaatataatttttttaccacactactagacttattgactatgtggatttaatacattggtatttgtagttatgaatgtcttttgttgatttaaaaataatataattgtcatagttcaatatcaaatgttaaattggaccggtatgttgagtgctatcaaaaaattatcatttttaaagtggccacaaagaaaatttctaacacgaacagatacagagaatgtaaacagttttgtcataacacctttagattggattattattaaattttattttgaccaaaaatcagttcagggtcttatttgtactattttggaaaatacagggttcattttatcatttaacaaaatagagggttcaattggtaacttttacaaaacacagggtccaaaatgatatttaccttttttatttgggataattgcggcaaaagtctccaaaaacttagagttgaagaagattaatccccaacctaaaaaattggcggtaatagtccccaaggtcacatt

SEQ ID NO: 371806 - DNA, 599 bp, Cannabis indica
taaaagtaaagtagccccctaaataaagtatatttataagttaggagaatttacaaatttatatacattatagtacttaattacatgatatgtgcaaaaaaaaatatttacaatttactatacattttactaacaatgagaaacatattcttaatttttatgtacaaattatatattgtaaacataaataataaacatacatgctttatttaaaaatttatatttaaattttaataaacacattatattaacatatcatcacatacttggtcaaaaaaaatatatcatcacaaacattaattatcatagcaaatatattagattaataattaataaacattattatctataataatgtaaacatagtattaatttatacataaggccacaattaattacaatttcgtttatttttttttgtaaaacacttttttctaataactaataaacataagtgttatttaaagtgtttatttaaataaataaacttaaaagttactatttttaaaattattatgatatttaataaacaaattatattatcatcataataaacatactagattaataataacattataaacattaataatactaat

SEQ ID NO: 371807 - DNA, 571 bp, Cannabis indica
aggttaattaaattagtttaacctaataaaattgattagcaacataattaatttcaaagtaaaggaattacttttcattcgtaaattttgaaattaatttaagaaaaacacacttagtttaatgaaattatttctagataaaatatatgtatttttcttgtatttaattaaatatagaattataactaactagattctttctgaagcttattttaattatttcattaaatattcctatttaagttataaattagttatttctaactaattttatttatcaacttaaatttgaatatcttttgaatttcaaaattaagttgagtctaggaattggttattgaagattcttaagatatttttttaagttgatattttttttttaatatagatcaacttaaaatggaatattttttcaaattaggtggttacaacttaattttgatatttaattaaattttatttgaaaaatatttaagttggatattttagattttttctataacaacttaaattagatattttttcaaattttagaaaaacacttagttaattgaaatatattctagatagt

SEQ ID NO: 371808 - DNA, 491 bp, Cannabis indica
ataaaatagattacattgaaatggagttttatttagggcataaaacctaacatccacgtgctcgatccaactcgagatcgttgtccctctaactggccaggccttggaacatattttttagttcgtctagttgtgcttgcatggctggactaacttgttcggcctcttggccgatctgagtcacatatatatttttgagcgcgattttgaacgcgggttccgggttgcacgattggcatatcaagttgatcatccactcctctcctcctgttcagatcatttctgagatcatgagtcgtccctaacctatcaaatacggaaacgcttggctgtctcagtgactagttggtttggccaatttgctgaccgacaccatttacttggttggagttattgggtatgacttctcctgatgaattactagacaaggtctgcccgcctaccacttggcccacaggtggaacctacgaccggggatttgacagctgttt

SEQ ID NO: 371809 - DNA, 515 bp, Cannabis indica
ccaactcatatacaaaatggtcaaaacatctacaaaaaaaacatggataaaaaagagtaatttgcgacataaatatctaaatttaacttccagttgcaaataaatacctacgttttatttttggcgctaataatacctaagtaatattttgggaactctgtaggtactcgaccattaaatattaagtcattatccacgtgtcattttcttcttggtatatttaatttaatttttttaaaaaacaaaatttaataacttagaccaattagaaatggtcacgtggtaatttacttaacacttaacagttaggtacttataaatatttcaaacttatagcttaggtattatatcgccaaaaaacacacttgcaattttattttccactcattaataattgtagctagaaatgtatagtatattcaagttatttaatcctataataatcaatacaatcaataatataatcatcctgtaagtggtaaaattatcttacatcaagtacaatgacttaagtt

SEQ ID NO: 371810 - DNA, 557 bp, Cannabis indica
acaacaattaaatttccaagaagttatttgaaaatgggtaaatttgtgcaaccatttattggtgataagttgaaaaatatctcttttttgtatccattaataaaaaatacgctcatattatttttttattaaaatatacttacttttctaagtggattgtctaatatactctcactctctgcttaagtctagcatataatttacataaactaaggggtctaatagtgatatcatccataaaagtgagcatatctaaaaaaaaatatgaaaatgaaggtaaaaattagaacaaattaagtaaaatggatatacaatgtaattttctctatttattgttactaatatatatactttcttatgtaatctaatgcttattgtttctgatacaaaacaattacaaattaaatatacacttttgaaaaaaaaactaaaaaagccttaaaaaaccataaaacattataaaaactaccaataacttggagagtaacaaaactattaactttgggcattttacaattttgtatacattattttaattaattacaaaatatgtgcaa

SEQ ID NO: 371811 - DNA, 515 bp, Cannabis indica
ccttttgtctcaagagcagtagttctgtgtgactacattcatcgtaggcattgtactcgtcaaagtttttttcgtattcatcgtcgttggtctcttcttgctcctcagagcccacgttgattcttgaggccactttctcatcttcagggtcttgggcgtcctgaggaggaaggggctgacgtgtgttgcgagtttccaccattgtttctttagcttacaagaccgttgcctacttacagatgcttccttcagctctcaatgaaagcaccaaaatgttgtccgagatttttagcaaccaatttaataaatgataatttagatcctgtatttttcaaatggtccaaaatactaaaatagtaacttgaactcaatttttatcagaatgaaacttaataataacctgacctgaaggtgttacgatcaaacttgttgcagtttttgcatttgtctgtgctagaaataattttaggattgttatgttaacaaaaataattaatgaaaattgagctcagact

SEQ ID NO: 371812 - DNA, 544 bp, Cannabis indica
tcaagatatttttctttcttactgaaatcggttggcataaatcccgaggccaacctcgccaaccgatcaaactgcgtagtgtattccgtcacactcataaaattaaatatcttcgtaatcactgccagccactactcggctttcatgacatctggacctcccaaaaaattggaggtgcttgcttccggaacttttcatacaagggtcccattcagttgccgctaccattatctcggcctgagcagcaggggcgggtgccactggaacttctggcaccggcactgcaggagcaacctgctgcctcaatctcaaaatcttattatcttgcttctctattctggcttgcatctcagcaaacctaacttcccaattctgggcttcctaattgacttgggcagcctgtggcgagttctcatcaccccgaccacgagccccccccctgggacctctacctcggcccataacacttgggggaaactgagctcctcgaccttgatccgacccgacagagatgccttgactcctaatatttcgtctggcgtcc

SEQ ID NO: 371813 - DNA, 479 bp, Cannabis indica
agttctgtagcttatagcatctgcgtcgaatatgacccctcctatgatagaagtgacacacttggatgatctctccatctaagatatattctctggagaaattcttcttccttctaacttcatcttggtaggtccaaatggatcatggaattttccagtggggtctgaggactcagatgtcaagggaagtgatgatttcttgttagtctttttgtccagttatctccttgcttatacaacatcttgtatccgatagaggttcgatcaccataaggtttttgaagttgaaaattttgattgatggcggccgttcctggagggataaactctaaagcatgtttagctcttatgagttcagctgaaagcttttagatctcattgtccttctcatcaaaaagtttgttaagattcttaatggtgtcctccagcttgactttttcagactctatttgctccttggcactattcagacctctaat

SEQ ID NO: 371814 - DNA, 480 bp, Cannabis indica
ctggccttagagccaggttaattatttactttcatgcaatatagatttgaaatgatgaatattgtttgttggttgatttggatgtgttcatgttggtttatgtgttatttgatgattcaatgtgttttacaaaaattttccataaaaataattttatttttgttctgaaactattttatttggattccttgtaaaaaattaagcaattttagtttttatggaactcgattctgataaaaattgagaaagttatgattgtttaaaaaatcggatgccatgggtgtcgaagtatggtggtcgcacgcacgaggtacttcgaagaaggagggagacgtgcgcggattcagacatgcattgtttgaaatcctcggtcaggtgccttcagacaccacaccatgcgcccaggacccctgcaccccgcctatgtcacatgctgcaagcgctgagattgctcggcggatgaggctgcaattcccagtc

SEQ ID NO: 371815 - DNA, 534 bp, Cannabis indica
agataatataataaaatatcttgaattttaaatttagatatttcattattatattctaagtcttataatttaataaatttaaatattacataaataaactaattgaaaaataagatattttatatggttagaatattttaaaaaataataaaataataagtttgaaaaatttatggtttgaaaccctaaaatatctattcaaactaaactttcaaatcttcatgttatttttgccaaaatataattttaataataaaaaaaaagtctaataagataaaatgttaaacctaacatattcctaatcttataattttaattaataaaatatatttcaaaaaataacaaatttgaaaaaaatatgatgtggttagcaaactttgaaatttgaacaacattattttaaaagataatattttaatatcaaagtaagatcattcaaattttaataaaaaataatatctgatcttacaattaaaagaaataaaataatctaaaatttcaaaagtaaccataaggctcctttgtgagaaatca

SEQ ID NO: 371816 - DNA, 376 bp, Cannabis indica
atagtttaatatttttaaaattaatatttatagttaaatttgtttagtaaccattcatgggtaatgcccattaagaagtgtatcaaaatatataattaaatattattataatatgtataaagttttaattgtatacaagtcgtccttttatatcttaatgactacatgatttaaaatcaatggtaaaaaatatttttctatcggtagaaaacttagggtaaaaaccattttggacccatgtgttgtgttgtgcaaaagttacagattggaccctctgttttgttaaataacaaactagaccctgtattttctaaaatggtaaaaataggatcatgagcttaatttttaacaactttttttttaatataaccaactt

SEQ ID NO: 371817 - DNA, 585 bp, Cannabis indica
gtcaaaacaactacaataaaatctaccagaatagaaacactcgggtttttttcaaaacttaaaatacattacattttttgagagaaaaatgaaattttttattaataggcaacacacaattgcccataatatatcatccaaaggatagaatcagctagatatgcaaactatgttgtttacaaaaatttgaatgaaaatcctaataacacattcaactaaaataccaatgaatcaccaacattaaaacatataaaaaaaacgtaaagagtattgaatctcatctcaacataaatggggctatcaaaggttcagttgttccacagagggattttaggcaaggtgaccctttatcaccttacttattcttgatttgctcggaaggtctttcatctttgttgaagaatgaggaaagattgggtcatctcaagggattatcaattgctcggcgtgctcctgcagtgtctcattttctatttgcggatgatatttttacatcaaaaatataaaatgataactttattacctaaataccactacacggtaaactaaacatttatacccttcatctttattttatttctattt

SEQ ID NO: 371818 - DNA, 512 bp, Cannabis indica
ttatggcccgtccccaagcccttaatatttttttaggacctgcttttgggtcaggacatcttttatatttacatttaaatatatattttcacttagatatatattctgcttgattttgcttttacttttggcctgttttacatttgtccgtgtggtatgccttagtacccccctgagtggcatgaaaacatttttttaaggcactcagctttattcaaaatttagaggttgcatatacttttcggtacaaattctcttaacaaagcctaagtttacattttttgactattggtaatacttccggagatgatcagcgttccaggcccttggcacaatggttccatccattctttttagcttgtaggtcccagagccaatctcatcctcgatttcatatggtccttcccaattttgcccaagtacccccactccgggttcttgagtgactggaaagacccttcttaagaccatatcaccaatagtaaattttctacttttaaccttagagttaa

SEQ ID NO: 371819 - DNA, 461 bp, Cannabis indica
ggaaacattgaagagaaaaagtagttttcaaacactaacaatcattttaatcgaaatagtgaaaatctctacatttctgatagtggtacccctttagtgaaatgtggcccggaccaatctcggaatattttttccccactagtcactatgatttcatactactaagacgtgaatatgaagattattttcgcgttaaatttgcttaatataactacttaattaaaaaaattgaaaacgttctacttttcaggataaattttaacaagtttttcttactcttacactcgatactattctcttaaaatctcaccctacacatctcaaaaaatagtaaaatttcacaaggacgaagccaagaacattgtgcatcacttttttattgaaaacattgagagaaaaagtagttctcaagtactaataattactttaatcgaaatagtgaaaatctcacatttctgata

SEQ ID NO: 371820 - DNA, 271 bp, Cannabis indica
gtttacatttagatctgaaaatgtgtttttttctgtgaaaaattgagactttattatctgaaaatgtaagatgtgttcttgatttagtgttattatttgttgatcttttaaatccttttagtaaactaaggattaatttagtgtggttgttatgaagttacattggtgaattcaaggattccattgttgtagctgagatttaagctcattctttgtttggtaatcaaatttagtttgcccagatctaaaatgcttgctactctctctctct

SEQ ID NO: 371821 - DNA, 446 bp, Cannabis indica
cctcgccgaagaggaagggcggacctcatttcgtcaattatactgaactcgcagtaccccgagaccatatctatgcaatcgaagagagaaatggagtcttcaagaagccgccccccatcaggggaaatcgcgacagaagagaccccaaaaaattatgtaagtaccacaaagacattggtcatactaccttagaatgttgggtcttgcaggatgaaatcgaggagctaattcggagaggaaagttcgacaagtataagaagagcgaggaaagtcatccccgagcagatgacaaaggagaaaaccaaaatgcgagcggttccagaacacctcgcaacatcttaactatcattggaggaccccatatcgcaggagactcccgcaagtcacaagagcggtatgccagagaagccaaggaaaagccgttaaccaatgtgaacaatcttagt

SEQ ID NO: 371822 - DNA, 771 bp, Cannabis indica
atgtaagcccaaataaaagtctaacactttatacatgtttatttcattattttaagaaatttatgtttaggatgttagattataaaatataatcaaacatacatattagtaatctagatcctggtaaaacaagttccaacagattatgcatgactggaccgatatgtaaaaaacatctttcattagcctgcatttatgactcacatatcaccctaataaaataattaataaagcactcataaattagggttgttcataaaatatccgatccaatctaatctgaacgatccaatccaatccaatctgtaaaatgcagatatttgcacttctacggattggattggattgaaaaatctaaaatccgtacttgtgcagattgaatgttgtttgacctcaaaaaataatcgatccaatctaatctgcacttaattatttatatatttaaataaatatatatataatatataatatattatatcaatttttagtaatattaaaaaaacaaaattctaaattctaatttctaaacctaatcatttttcttctcttacactacacactacaactgagaagactgtgcaagtatcaaaatagaatggaaactccatctccaattaaagttgtgttaccactataattttacacttggtatacttttttgccaattttttacatttttgtctttattcggttatttaaacttttttaaaaaaataatttttcaatattatattttaaaaaatttgataattacaaaaatacctatgcatg

SEQ ID NO: 371823 - DNA, 541 bp, Cannabis indica
gtctagacttttcacacacaaagagtaattaatagtcttcaaattgaatgtttttttttacctaaatatttttcactacttttattattgttgttgcttttgtgatgcttgtttattctttcacattttccttatctttcaatctggattcctcttcaatttggatatatttttggatctcttcctaaagcccttctaagttaatggtaactttgccacaattacaccaacttgaaatgctttaaaaagctaagaatctttaacttgttcacaatgatttgtaacttatggatttgaagaagaagatttttataaaatcactaaaataaaattcaaaataataagaaattaaaaaatttcttgtactttcccctcgtcttgtattttgcttccaaattaagcatcccaaatctccttcgcgaatttggtatcaatgtagatatcatttaacctatcggacaatatgtggacattgttccatgtagataaatggtagagaattgagtcatatataagaacatgagctactccactcattgcc

SEQ ID NO: 371824 - DNA, 1027 bp, Cannabis indica
gttgatgctcaatggagttactacaagcagcttctaggagtatcttgtgcgtgcaaatcgttggactaattccttttatgtctgccatagtccacccaattgctcttttatgtttcttcaacacttctagcaacaaaccttcagtttcagcttccaaccatgctgaaataattactggcagcgtttcattctcccccaaataggcatattttaggtgacttggcaagggctttagctctagtttaggtggttcttggatagaaggttttggaggcttgaaattgctttccttcaactctaaagactcaaaagctctcttgaatttagggaaaggttgcattggctcaacccaagcaacttgggtttcttcatcttcactcaaggcttcaagatcttcaagagaacttatcaccctttcatccttccacacttccttgtgaaaactttcagccacaatggaatcaattacactcaaacgcgaacattcttcaatttcatccgggaatctcatagcattgaacacattgaaagtgactttttgatcattcaccctcatagtgagttccccattttgtacatcaatcaaagttcttccggtggcgaggaatggccttcccaaaataatagggacttctctatcggcctcatagtcaaggataatgaaatccgccggaaaaataaacttatccacttgcaccaacacatcttcaatcttcccttccggatgcgccatggaacgatccgctaattgcaaagtgacggtggttggccttgcttctccaattcccaacttcctaaaaatggacataggcatgagattaatgctagctcccaagtcacaaagagctcttccaacctctcgacccccaatagaaattggaattgtaaagctgcccggatctttcaatttgggtgggattttacttttcaacatagcactacaaccctccgtcaaagcaaccgtttcaaactcgccaagcctccttttctttgtcaaaatatccttcaaaaacttcacataggttgg

SEQ ID NO: 371825 - DNA, 524 bp, Cannabis indica
ggggctcctacccctcctgcatcaggttttagcaggggaggtagtggttcggccatggaccaaaagaggagaacatccactgcattcgggggctcgagtcagaaaaagaggttccgagggaacccaagtagaggtagccatctgggtggggttgagacccggttctcttatcctgagtgccccagttgcaaaaggcaccatcagggtgagtgaaaaggtcagggatgcttttagtgtgccatgctcggacactacaagagggattgtccccagctccgatatgaggcaccaagggctctggggagacccactccagctcgagtgttcgccatcacgcaggctgatgcagatgccagcccctcagttgtaataggtcagctttcagttaataactcgtattactcagtgctgtttgattctggggccacacattcttatgtggcagctagaatctttaataagttgggtagaccgtatgatagttatgaatcaaggtttggaaccctattacctggcggagagtt

SEQ ID NO: 371826 - DNA, 537 bp, Cannabis indica
agacaaaagaatataacaaaatctttgtgtccaacacaagtgttataaaatgggctgtcctatgttcatcttttccatcttccttcctatctcaagtaaaaaaacgtaatcactcagccttccttaccaacattaatgaacaatgaggtattagtggaagttgctggatgtgatttctgtgaaaattcttcgtcccaagccattttcctctcttctgcttcctggagggtggctgtaatgactagagctgcagtagccttctcagatcgtgaggcagtttttaaagatgttggagcagaaagaccgaaggacctgggctcatgatgacaaagaaacccacataccagctttggttgatcaaccattgtaacttcttttatatgagacagaagcctggacttccattaacaacaccagaatgtactttataattgatacattgaataaataatcaaacacataaggttttcagattattttccaaggtctttcccactttttgtctgacagagatagcattgcttatagggctccata

SEQ ID NO: 371827 - DNA, 493 bp, Cannabis indica
caacttttgtttttacggaactcaattccgataaaaaatgagagagttatggtgttttgaaaatcggggtccattgagtacacaaagtgagttctcgcacgcaccagatgcactcggacaaggtgataggcgcgcagatgctcagacaatccgtgtctgaagacacgatcaccacgcacgccaacaccctgccagcagggtcatccgcgcgcggacatgcttccagctccccttccccgcgcgcgtgatacgctgcgtgaggcctgtctcttggccagggtgcgtcttccaccaaaaaatccgatttttgtgagatttttcccaaattttgaatttttgcaattttcaaaataaaatattgtattttgagatcgaacatgtataatactcttgagatcgaacctaaatatatcaggattaagatcatttgatctaggataaacaggtgatattgaattgaatagatattgcggtaaattttaacatatctaat

SEQ ID NO: 371828 - DNA, 620 bp, Cannabis indica
tccttttttgtatttttttgtttttttccctataaaaaattacatttaattaattttattaatgataaaataattaataaatttgttataagtataattaatgaaaggatattggtagtaaaattatttgaattttatattttttgacacttaattacaaaaattaaaattttagtggtaaaatattatgttatgtaagacatgtacacatggcaattttttttgggtaaaagttactattggattttgttgatataaacctctacttggacagaaatgtaattacaagtaaaaactctaagttggccttcgatctttgaaattcttaataaaaattagttagaatggatttggttaattccacacttaactaacttctgtatctacctaactaacagatacagaagaaaaccaagaagccctaagtgctatatatacctgcatcaaaacccagatctagtaagtgctatatatacttgcatcaaaacccgttcttcaagatccagggtttgaacacttgaagaagagagggataaaacacagtatatgtactatacttgtaacttggaatctccatctttgtatatctgaaccatctttgatagtggaatcgagctctc

SEQ ID NO: 371829 - DNA, 671 bp, Cannabis indica
aattagtaattatgattaatttaattttagaaatgaatttaacctattggtaagttgctattacaggtaaaaaaaatgtaaccatcatggttacaataaaaatgtaaccattgagtagtcaccaaaatatatatattgttatgaaatattatttatggatgtccaaatcaccaaattaattatcaccattaatgtttggttgtatttttctttattacattgatttagtttcacattcttaattaacacactaggactcaataaatatatacgagcgttatgaaaaaataatgacagaaggaaagagattgtaaataaaaacaaacttaattaacactactacaaaagtcagaattcgcgacggtcttaaaaacgttttttttaaagaccgtcgctaaaaaaataagtaattattaaaattgtcggaaaaaaattagtatttccgaaggtttataacaacaaatctggaataggtggcgattttaattgaaattcgtgaatttattgggcccttatacccaacgatttaaaaccgtcgggtatagtataggcgacggttttaaaccgtcgggtataagggcccattcaaaaattgtcacccacttctcgccatatttcccatgtgcccacctacctcttttctatttcccacatgtccacctatttcttct

SEQ ID NO: 371830 - DNA, 658 bp, Cannabis indica
ttgattaggcgatgcaatatattagtgccaaattgaggcacatgctcgtctggttaggcgatgcgatacattggtgccaagttgtgacacatgctcatctgattaggtgatgtagtgacattatgtgtgataccagattatgatacggtcgagtttgcctgattaggcaatatgatatatgattacttttatttcatgcacatggctggttatattatctactattgaatgttattgtttaatcattttataatagtaaaatggataataagttatttcatgtattttcttttattacttttcttgttgagtcattgtgactcacagatgctctgtggtgcaggtaaagacaaagaaaagttagagcagccataatgtgacaatcttctctaacaatgtacatattgatcctaccgatctgtgtgccgagttgccaagagttgttttgggctatatttactatgtattttaattttgtattttgacttgtcgtagtatataatttttttgtaaaatattaataacagggatttccaaaacacaattttagtgtcgttatgatgtccgttttttttatatttattttaataaagttttgtaataatatcacaatttaatatataattattttattagtactaaaactagttttataaaa

SEQ ID NO: 371831 - DNA, 190 bp, Cannabis indica
gcaatatcctaaaccaacaaaaacaaattcaacaaaccttctaatttccacaaatactaactaaatacaaatacttaaaagataaagttactgcttagtcttgtaaagcaaatatgtgaacctcataaaaagacaaatgttgtacccccaacaaaaaaaaaaaaaaaaaaaaaacaaaaaaaaaacttac

SEQ ID NO: 371832 - DNA, 864 bp, Cannabis indica
atatagacaaaattattataaataagaatgaatgccatataaaaattgtaaaattgtgatttctatttttatcatataaaataaccaattatttacacaaatattgtaattataaaaaacttatttaaaaaaatatccagaagttaaaataataacaatataattttagtaaggcaataaattaacaaaataatttcttccgtataatcaaaattattttttttaataaaaattcagttatacaaatatcaaaactcatataaattttacgtgtttcttataaaaacttgatcattagcccattactaaaactaatttgttattatgtatttaattagattttcatgtgataaaagtcaaattgtttaggtagtttgtgtaatatcctcacttttctaatttattgtttttaaatgataattatatttagagattattagtattatttttacaattcatatttttgagattatttatatttacttgaaatatttattttgtttttatacttttggtagtactttatatttgtttttgcactattttttatggttttggatgctttttatggcttttgtgctatttttatagcttgtccctaattgtttaaggtagatttgtagtacgatcaatatgggtaagagaaaggtttcatatttggtatccatagcttctgcaaacgacttttgagatttgacagataagtgtttcaagtcttgatattattatatgaattgttttacaatctttattcacattacatttttttcattaaattgtgtggtaatagagttttattattattttgtagatcgattttgtggagggcctactgttacagaggctttgatgataagcttttaa

SEQ ID NO: 371833 - DNA, 857 bp, Cannabis indica
aaaaatagtatatatagtaatttccctaaaaaaattaaatttttttctaaataccgaaacaaataaaaatctactaaaaaaatcacccataaacggtctactacataaatttctaaaaatatatatttttatattatatatacaatactttagagtgttgagttaatttgtccctcacgagtggcccaccaccagtcacaaaaaagaccaaaccaaaacttctttgattttccatagaaaggtaattcggaacactccatgcccattcctcatcataaccatccatgcctatatatgtggtagttatgctttgcaatatgagggatgttagtttgaactagaattgtaagttggtgtgtgtcgagttgatctgatttgtattttgaaaaggtttgcaaaaatataagttgtatcgtgccggactataacaaaatataaattgttatgttaataatttggtatagtaagctcaacatgattaatagattcaatatttttgtaccgcgttcaaatttgtatcatattttactcaagccaacctgttttacttaattagatcaccaactcactttcttatacggattcaatgttagcttcatattttcatgtttttattataattaatgggctaattattaaactatatatatattttaaatattttttttaacaataactatacataattatgtaaaaaaaaaattacaaaaattacataatatactaaaaatttgaaaaaaaaattaacaagaatacgttaataagaaaaaataattcattttcactttgaacttttttatttataaaaaaatcttttcagtaaaaataataaactatttttctggttgttttatagt

SEQ ID NO: 371834 - DNA, 499 bp, Cannabis indica
atgctcttttggcgtaggcttggaaaattccttggcttcatagtcaacaccaggggaataaaagcaaatccagacaagaaccaagtcttttcggacatgaagtcgcccacaactgtcaaggaagtacaaagcctaacgggacgcattgctgcactaagcagatttgtaagtctacagacaaatgcgtacccttcttcaacattcttagaggcaacaaaaaatttgagtggacagagaaatgtgaaaacgcattccaagagctgaagaagcaattggcccaaccaccagtgttgtctaaacccctagacatagaagacctaggcatgtacctaggtgtcacacgcggtatactacatcagcaaatggctagtaaatgcagaaagtcgatacccactcatggagaagctaatctatgttggaaatattttaccaggatctagatttactaccatgtatgtttcattaacatcataatatgaattctaaaacaatgaaatta

SEQ ID NO: 371835 - DNA, 571 bp, Cannabis indica
tcaaatcaaaatgcatccaccggtccaagaacatacaagttttcgaacagatatgtgtctatattgctataaggtcatgccatttggtctcaaaaacgctggagccacctaccaaagattggtaaacaagatgttcaaaaaccagatcggacgaaacatggaagtatatgtgtatgacatgattttcaaatctaggaaggctgggggggcacatagatggcctggacgaatgcttcaaagtcctctgaaagtacaacatgaaactaaatcccttaaaattctcatttggagtcaactcgagaaagtttttgggctttattgtcaatgccagaggaattgaagcaaatccagagaagcttcaaggccttttggatatgaaatccctgacaagaaccaaggaagtcaaaaacgcggtgtaaaaccaacaatggagatcgaatatcttaataataataaatctcattctttaaaatgtattttctttattattctaataaatatattcattaaatattgaatttagaattaaaattctaaataagattttaatttaatatttataaaattatac

SEQ ID NO: 371836 - DNA, 765 bp, Cannabis indica
gaattgcatgttcaacaggcatgggcgaggtcgtgagtttcttcttcctctttagtggagtcacctattcttcctcagcttcatcttcaggattcaaaggctcctgagcatattgtttgatcctggcacctcctttcaacttagcctcgcgcttgagttgaatgagctcatcctccttatgagctcgtttaggccggcaagcaccagatttcctcttcttccccgtcatggacttaggagtaaagtccttaagataaagcccatacctcacaagattatcatcggaggtcaactacataatattccagtcttctcccggaaatcgagcaagtttttgagctctatccctaagagcaagagtgaggggaggatggtgatatgtcggaatctactgaaaccgagtccgggtaattctcggatccttcactatgaagtattcgtcagcaaaacgccctattttgctgagggccttgtcatccgtgtcggtcaaccacttgaagcctggctgagagaaatagaagtagcccgacctgccttgtttgggggtggacttcaaattgaagaatcaagcaacctcgtgaggagatggaataccccatccttgggaagcgtagaggacgaagagggcagacaaatacttaatgcccttaggagtgatttgggccgggcagagaccgaagaagtcagctacattcttgaagtacttatgcaagggcatcaacgctccttgctgaccatgggccaccgaccaggtgcacatcccct

SEQ ID NO: 371837 - DNA, 640 bp, Cannabis indica
aataactgcctcattaaaaatctcgccgagaaaacccagtcagacaaaactcagtccaggaaaaaagagtgcagtatgaaattactccccctcattttgacattcatggagatcctttaatcaacacattctaatcttgtgaaccatcttctcaaaagttgatattggtaatgactttgtgaataagtctacaagattatcacttgatcgaattttttgagcactgatatcaccatctcttgaaaaatgtgtgtaaagaagaattttggtgaaatgtgtttagttctatctcctttaatgtacactcttttaagttgagcgatgcaagcagcattatcttcacagagaattattggtacttctttattagatgttaatccacatgttccttgaatatgttgtgtcattgatcttaaccaaatacattcttaacttgcctcatgaattacaagtatctcatgaggaagtagccgccagagttttctttgttgaccgccaagatataacagtgtcatcgcaagtgaacaaatagccagtttgagatctgactttatgtggatcagataaatatcttgcatctccgtagccaataaattgtgacccataattattagaatagaacaatcctttatcaatagta

SEQ ID NO: 371838 - DNA, 875 bp, Cannabis indica
ttttcctcaattcttgtacatactttcttcaaacacccgaggaccttaaccaaaagaatcaagcgtaaaatagccctaaaactagaaacaaagagtgaaaactaaccgaaaatatgacccgaaacttagactaattttagcctaacaattacaggcccctaaatcacatcgatcaaagcataggtaagtgacacgctatatcactttctggggacttaaacttgaaactagaagtttccctatcgataaacaacatggaaatacccgaaatatcgtaaaaatgggaaaaactagggttcccaaaactgcccgaccggtagaccggttccccaaccgaaattctagttcagaggggtttcctggggaccaatcggaattctggttcctacaggtccccctgaaccggtcgaccggttcagtgaaggaaacgtacaaaaaaaatcatatctcactcaaaacaacccgaaatcaaaccaaaccttccaaacctattctaaatatcccaaagaacataaacaaggcgacaaaacacctcaacatgcacggaatcaatactcgccattaaagaccaaagtttgagttctaaaactcaaactttgtctaacaactaaatcaagctaccaactagcttcaaatcagctcaacaaacataactttaactctagaacacttctccaaaaacaaaacacaactacagcagccctaatacaaaattcatgcaaaatcataacttaaaattcaagaaaaccaaagaggaagttgctagacactttaccttagcttggacactctacaaactcgtagaaaatcacaagaattacagagaaaagctagaaccctagctggttccaagaggttcgaaagagagagagaga

SEQ ID NO: 371839 - DNA, 636 bp, Cannabis indica
ttccttctcattttttgagcttcatttcaattatctaggagttccccagtgtttaagtatgtcgctattggcgtcatccagtttggggaagtgtcaatcatttcgatcgcttctgtgccagtgatgctaggttcttcgacgaactggataggaaccaaattctctttatcacttacatactactcgcagccgagctaatatgtcagcagtcgtgttttcttcccttgaaatttgtctgagagcgtagcttttgaactgtgcgagcagatcgtgtattttgctcaaatatgctatcatcttttctccactacacatttcaatatattcggctttcatctcccgggccagtattagaccagcgatcaaagctttatattcggcctcgttattggatggtttaaatcaaactttacgggagcgtgcaattattgcccccgaggttttacaagggcgattcctacaccggatagttgatctatagctgacccgcccacatatagtttccaagtcatcttgtcttcactgttacttggctgaggtatttgtactggctcggggttgtcttccgatatgctttcttccttgcctgtgtattctactacaaagtctgctaaggcctggcctttgattgttgtt

SEQ ID NO: 371840 - DNA, 520 bp, Cannabis indica
tgtgagtagatctaagatactggaaaaataatttccaacattttatgggtttataaaatagtttcgcaattagttaacccctttcacattcaattgcaggagtagaagtgaaaagtaataatataatcgaattttactataatttttgagaaattagttagaataaattttgtgagtatttataaggtgatattaatgagatataattaatggttttctaatcagaatattctgttaaataatataatattctgttaaaatttaacgggaaagaaaaataaaaacgttaaaccaagaattgacgttagataaccacttttaatatataaagatatattctttttttttttttttaacttaaaccaatattaggatttttccaatactagtgaggctataaaatgttgacattataataatttacttcatagtaatttaaggtgacaaaagtttttaatgttccaactgttggaaatattttactaggatctagatttactaccaagtatgtttgattaac

SEQ ID NO: 371841 - DNA, 568 bp, Cannabis indica
aacataggtaagattaaaaatataatatgagcataatgggatgaaagggatgaaagggaaacaaagaaaaaagagagagattgaaaactctaaaatgagatgaaagggaactggacctaatatcaactaagaagaaaattaaaatggcagagtaatagggcactcattacatgcagaagataaaaagacaagccttatgtttttaaaaaaaatcacaaataaacggttcactaaaactgctttaaaattccaattttaccctttataaatgggttgaatgcacaaacttataatatgggctttgaatattatttttacaaaaaggtggcaaaggaaataccatatattacttcaaatttaaataaatgccatataagggtggtaaaattaaaaagccatatttatcaaattttttggtagaatcccatatttggtgtaatttttactagttaaaaggaccatttctctacaagttttgaaatgaagatatttactaacatagtcctatgatttagggctatttgctataatttttttaaatgaggacatatactaatatagtcctatg

SEQ ID NO: 371842 - DNA, 536 bp, Cannabis indica
ggtatgggatgaaaagagatgtggtagactacgtgtccaagtgcttaacctgccagcaaatcaaagttgaacatcaaaggccggcagggttactgcaacctttagcccttcttgaatggaagtggaaggacattgcgatggattttgtaactggtttgcaagaaccacaggaatgtatgattctgtatgggtcatagtagacagatttacaaaattagctcactttttatattctggagattttattaaactctaggggtattatttgatttatatgtgatttatattatttttacaattttttctcggcgacaacggaaaattcgatggataactaatttaatcacatgggcaagtccagaatcttaattcttagtgggaaatatattggagaaaatagaatattggggttttgcggggttatggtttttgaccattttacccctaggttggaaataagctagaattaatcattaagggcattttagtcttttgccaaggtaagtggtttggtggcttcctaggaacttgacacc

SEQ ID NO: 371843 - DNA, 632 bp, Cannabis indica
aaaaaatggtctcgctattacaaaaattttaaaccaaataaaagcatgactctctaatggcccaacgtcgctttccacagctaccgatcacaagcgcaggtaaacgagaaattacttaaatagcataataaacatatatcaacttaaataaatctccacaatatacatattatacataatatttaaatctcataaataaaccctaattatttaacccaaattgtttaatcataagcggtctttacaattatcccctagttaaaagaatttcgtcctcgaaatctaacctgaacaactctggatgttgagtcctcatgtcagactccaattcccaggtggcttcttccactttactatttctccagagtactttaaccaatgttatggttttgcttcgaagggccttctcttttttatccaaaatttgtactggctgttcatcatatgacaggtccgattgcaattccaacgtctcaaaactcaggatatgcattggatccaacacgtacttcctcaacatcgaaacatggaatacattatgcacagctgacaacgatgaaggtaaagctaaccggtaagcaacttgtccaaccttctcaagtatttcgaaaggtcctataaatctaggactt

SEQ ID NO: 371844 - DNA, 645 bp, Cannabis indica
aaatagggaacttcccaaggcggggatgaagatgtggatccccgacttggggaaccaaataccaatgttggtcttgtggaagaactagaagaaatcaaaatcgacccaactgtttcgaccaggaaactcaaaattggaaaaggtttgctactcgaagtaaaatcagcgttgataaaatttctaagagcaaacttggacatttttgcatggtcacatgaggacatggtcggaatcgatccttctataatttcacacgtcctaaatattgatcttaatttctgacctgttcgacaaaaaagaagattgttggacaatgaacgagccgtagcgctaaaagaagaggtggaaaagctgcgcaacaacaatttcataattgaagctttctacccggcctgggtggcaaatcccgtactagtgccccagccgaacaaaaagtggcaagtgtgtattgagttcaccgatctcattaaggcgtgcccaaaagactgctttccacttccaagaatagatcaacttgtggacgcaacagcagggcacagaatattaagtttcatggacgcttattccgggtacaatcaaatcaagatgcatccatcttaccaagacatacaagttttcgaacagatatgggtctgtactgttata

SEQ ID NO: 371845 - DNA, 518 bp, Cannabis indica
atgtcaattttaataaacgggagatacatttgtttcttacaaaagtatcaaatatagcattgagtagatgctcttactatattctcttttctaaatcctatattgaatatgttatattaaaagtggttggtggacaaccaatatttccactagtttagacaacataccataattcacttttgtattcttctttagttaaataaatcgtgcgatttagtatatcaatattattaaaacagacgacccagcctgcttcgtctatacacgagcataaataaatttataataaataatgtttcggatacatttaaattatagatattatacatactttttacatgtataattaattttaactatataattaaaagggatgtatacttataaataattaatatttaatatacattattttatgtaattaatgtgtataatttaagtgtgtattagtattattaaaatatatatatatatattagattaatttttttagtaaccgataaaggttaagataacaa

SEQ ID NO: 371846 - DNA, 595 bp, Cannabis indica
tatgtttatcattattttatgtgttttaatatttattattaatataaaatttatggtatattaatctctgtaaagtgataataccacataaacacttagaatttaaattcaatatttatgaattattgccaattcttaagcaattattaagattttatttaataaaatatcttatgatctgatagggtagaaagaagttattaatatatgcagttaaataatcttttatattgaactctatattatatttaaaacaccacagaatctctataatacataggagtggaagaagttattgatatatgtagttcaaacaacttttcattaaattctagaccatattcataacactacagaatttttatatcacacatattttgactagacatggatataatataaatgaactagcaaactagtagaacttattcctgatcttgtataagtgttccaatatgtatgttactatcgtaatagtaaatagataacagtgaagtccatggacatagaatcacagtaccttatctttgtgggaggatttttccagcccattattatttggatgatactagtgattaacctactatgatatgtt

SEQ ID NO: 371847 - DNA, 504 bp, Cannabis indica
tataatttttttaaaaaaattatggggatcaatttcaaaaaatattgaggcataaatatgaaaagaatcggttccataacaaataaataaacataaagaataacacacaataactcaaatataatatattttagtaaaagaaaactcaagtataatataaagaaaccggttatatttaggaaaatttacaacccatactatttattcctattttattttaattttattgttgtaataaaaatattacatttttactgtatttttctatactgtatatgtatactattttttattttttattttttatttttacttttttagttttgtacaactttcctatccacattatatatataaatatatatatatatataaactaacaaaagtaaaaaaaacgtagtggtagtggcagatttttttttttaattaaaatgatattatattttaaatgatataaaattgtgatgtgatttatgttgtaacttttagtgacatatttttttt

SEQ ID NO: 371848 - DNA, 766 bp, Cannabis indica
ccaccctttgaatgagggcccggttccttttaattattagaagcatgtgaaggaataccgtcaccgcttcttcttctcctccaggttccaggccgtggatcatccggagcttctcacggagtgagttaggatccccccttatatgcggaccgaacctactcaactttttctccaacgggccaagatcttcgccacgtatgacaagaaggcccttgatgtcggggagttggtcacaatggagcactgtcagaaggccaagctgatcctagggcatcagtcggtggatgactccaacctttccaaagtcgtctgcgcgaatgtgagggctccgggcgcagagaagatattccgggacgacatcatcgccacggcggaagataagtaccagaagtacctcttcaagagggaataggaggtggcttatattaaggcccaggcgaccgccggaagggcccttcgtattggggcgccggtggagcaaaggacccccagaccaaagcctgtggtcccagtaccgaatacgggggctcttgatgccagcactttgggttctggtaagtcccctttaacgatacattatgttccttccgtctgtgagtatgctagccttaggcctatagggttcgatgaacatctccataggctagtaatacgaagagcgtatggtgaatggtctagtcagaaaggggacggcccgctgtctagacttgtttaggatgccttccactcggtgggggaatcacgccaaggagtattatttctccca

SEQ ID NO: 371849 - DNA, 454 bp, Cannabis indica
aaaataacaagtaaaagcaaatatgtttgtaaaaataccaaaaactaaacatatttattattttccaaggtttctaacataataaaatatagtatcccggtaggcgagagtcaaagataacattagtcgaatagagtagtcagttcatctaaaatggacactattttagcaaccttttattcaatcaaaatgagaatccaacattgtcccggtaggcgagagtcaaggttattctcattttatgagcttccaccattgtttcatattctgtaaatttatttctaagtagtcaccgtaggggagagtctaatagaaataaaaacttacaaaatacttatcatatgagatcttacggtgttaaatgctttcaacgaataatcatccataaaggaaacgaagtctagcgtctccaagttatattgaaaacaattaaccattgtaagaccaacaatgg

SEQ ID NO: 371850 - DNA, 781 bp, Cannabis indica
cacctaacgaaatataaggagttagggtaatagggtcgagactggaggcggtaagggaaatcaaattcccagaatccccgtggatgcggcagatgctgtggaaggtttcagggtggtcgacatgaaaacccacctcaaagctcctctggactaaaagcaaagatacacaaaaatgcaagaccgtattcgacaacacgatgaagaaattctgaggttgaggcagcagggtcctcctacagcgcctccaccacaagttcaggctactttaattcctacggtggcggcagaataacctgttgctggcaaccgtatggaaccactgtacgagaggtttcgcgagcaggcacctctagtttttctaggaggtctggatgtaatgaaggttgagcagtggctcacagtgatatagggaattctgaatttcatgggagtcgttggaaataatagggtgacctatgctacttttcagttccaagaagacgcgctcatgtggtgggaattagtgtccctcacttgagatgtcactattatgatctgggaagagtttcgagatttattcaatgcaaagtattacaacgaggcagtccgcagtgctaagcaaaaagaatttaccgagctggtgaagagtgagggtatgtgagtaatagaatacacaacaaaatttgattgtctggccaagttggcttcgggtattgtgcctacgaacttcagtaagaaggagaaatatctggcaggtctaaatgaaaaaattaaacacgacttggtgattactacgaatgaa

SEQ ID NO: 371851 - DNA, 603 bp, Cannabis indica
ttcggaccacagtcgaagatgagatgttggagcacatcaggccggcgaagacaccgaaggaagcatgggatacttttgcatcgctgttcaccaagaagaatgatacaagattgcagcttctggagaatgagcttctctcaatcaggcagcgcgacatgacgatcaaccaatacttcaccaaggtaaaatctctttgtcgcgaaatctctgcattagactctggtgctggcatgtcagatgctagaattagaagaattattattcatggattaaggcaagaatttagaacttttattgctgcaatacaaggttggccaagccaaccttctcttgttgagttagaaaacttgctagctgaccaagaagcgttagctaagcaaacgtctggagtctcattaaagagtgacgaagaagcactctttagtagagataagaaaggacgaccccgaccaaatactagtagaaatactagaaaacatgatgacaaggatagtcatcatgggagctcagaataaagacaaacggggtggtcaatccaagaacaacaataaatttgatggaaaatgctacaactgtggaaagtatggccacatggctaaaagt

SEQ ID NO: 371852 - DNA, 877 bp, Cannabis indica
agtttcaatggttatattaaatatgtaaccataatggttacatttacttttagtcgttggatcattattagacggttgtgattaatttaaaaatttattaaaaataactaataaattacttataacttgatactaacctgatttgatatatatttctttaaaataaaaaaattataatattaatttctaaaaaagttttattaaatattttaatgaaaaaattaatttatttaagtctaaaaatagaaattttacctatcagtgacctattacagcaggttagaaaaaaaaaaaagtaaccatgatggttacatttttattgtaaccattgaatactcacccgtatagtgtttacactctaaacaaaaatacatttagtaataacataaattttttgtaattaaatataacttttagttacgataaaaaattacttaaaattaaaatatcatatttaaatataattatcactaatttagttttagtcacaataagtattgtgactaaaaatatatttagtcacagacattttagtcacaatataagaatgatgatttataattagtaacaattttttacttttagtcacaaattttgattttgttgtgactaagagtaaaaaaaaaattgtagtactagcatcttctaaggtagaatctcgctattgatgcaattaattattgagtctcacgtaatttaatataataacatttaaaggaatatccctaaccaatcgacaatacttctaaaaaatgtttaagtactactattatccaacaacaataccctatctaataatactgatataataacttaggtgtcgtttggtaatacttttgttttctaattttataattacaaaatgaaagtaaaattt

SEQ ID NO: 371853 - DNA, 642 bp, Cannabis indica
aaaagaaaccctcaaacagaaaccctcaaacaccatagatttcttacttatcttccttcgccgctgccaatcaactctttaccgtcgatcaacaacaacgcccagttctcaagctttatgtaagttcttcgcatcttgtactttagtttactgtttgtgtacatcgcatgctttactgttcatctgctttttctgggtttgatgtttgagtttctgggaatttctgttttgagcttttgtgtaacgcgttatattcctccttcgtggtgttcgagttacttcttttcttcgtatttttagtcgaggacccatctttttctcacgtaatgacattcaagggtttagagtagactttgtcttctcgatttttatcccttttcttttacttattcgtaatgtcgccatctgtgggattcttgcacccgactcttgtcaaggaaaacattctggggctttctttttgacaagtgtccggagggggcctctttccagcggttaggggacccccattcccttttctgaattagggtttggtttggggcctgactgctggattttttcaatctttttcagaaccaaaatgtctgcatccggttccaaatcttcaaagaaaggggggaagcgtctggccaccctggaaga

SEQ ID NO: 371854 - DNA, 541 bp, Cannabis indica
aaagtcttgaactttcttggatgaaatggttgcgagtggttcgactcccgtccacttagtgaaataatcaaccgctaccactgcgtattgcactcatcctttgcgggatcaaccacgcccctacgagtctgtaccaccatcgtacttgtgattaaatttagaatgaagagcgattcttgattctgctctcaatgaaatcaccaaaatattgacctcgctttaagccaacgacaatgagtctattttagtaagcgacaagtggtttataacggttgaaatataataaagcaatataaagacacatgaattttataaaggttcagccccgagcagttcggtaatagcctaatccttgttatttgcattaactcaagaacatggaaaaatgttccttttcttatagctcttacagcagtatctctaaaatatgaattcttagacagtatctctcaactaaaaatgtttcgaccctttgcccagtgaatatgtatcactatttatagagctatgagcttggagaggaagtatttcccttctcgtt

SEQ ID NO: 371855 - DNA, 616 bp, Cannabis indica
attaagagactttattaagtctaattaataaatatattaaatgacaattttattttataattaattttaattataaataaatagtttttggcatttaagtggttgaattggaaaatatgatatttgtgaaagaataggataaatagttgaaaaatagcaaaattgcaaatggtgggcccacattctatggtcggccactattgcatgattttaccatttatttatcaagtttttaatgccaaataatttaaacctaaacctagaaggattcctataaatagatagtgatggactcaaaactgatagttgatgatagcctaagtcacactagccttcagtcaaaacttgagtcttcaatcactacaacaaaagggactttttatcccactttttacatttgaaaaaataaaaagtggaataaaaaattttgatcccacttttacatttggaactttaattaaataaaagataggagcaagggccttgtttggcaatcgcacaaaaaaaggtgttggaaaagaaatttttatgcatttgtcaaacgcaactcagcgtgtaaagaacatttaggtttagggtttcatttatatgttgtctcttccgccgctctctctct

SEQ ID NO: 371856 - DNA, 669 bp, Cannabis indica
aaccgcttcgtcgaccctgctcttgctccctttgcctctgaactgacgagccagtttgtttcccatatgacctaactctcggccaaaagatacgcagcctgcgcctccacgaacgctatttatcaggttcaggatatcagcactaccatgatcgcggtgagtttttgttattcgtttttccctttttgcctgtgctttatcctatggcatttgatctctcatacttaacttgctttcttttccagatcgctgcagagactggtcgcctctcaaagaccctgatagatcatgggtacgtcatgtccgaatttgggggcatggacgaggccataaagagtctcagagacttggcggccgagaggaaagcattttgggaggaggcccagcagagcgaggcacatgtggaggagaggcaccgggaggagctgaaggttcagggcaaggctgtggctaaggccaagcgcgagctgagagaagccaaggaggctgtggaggagctgactgccaggctaaagtcaatggaggagctgcatcagcagacttgtagtcgacgttcaatttaaccatagaggtgaatgagctcagggacttcaaagatcacgccttgaagaaggctaaaagagatgaactcctagcccctgttgtctgcaagcattgcaccaagcgctt

SEQ ID NO: 371857 - DNA, 917 bp, Cannabis indica
caaaatacaagatcaagaataagttctaataaatttgctaagtagttcattatactatattcatgtctaatcaaaatatgtgtgtcatagagatactgtggtgcattgagtacaatctagagttcaagttataaggaattcgaactacatatgtcaatagcatcatccacccctaagtgttatagagatcttgtggagttatgaatataatctagagttcaatagatataaaagatcgttgaactgcatacattacttattaactttttccacccctatcagatcaaaagatctttttattaaacaaaatcttaatacttgtttaagaattaacaattattcataaacattgaatttaaattctaagtgtttatgtggtattatctctttgcagagaacaacataccaagattttgcatcaataataaaatacaaacacatacaaaacatgataaacatataaatataactggtattggcatacaaggtaaagaaaacacgaagctcaattcataacaaaatatcttaaagagtttttttttttaataatctcaaaattatcataatgaattgtctgcataaatatgagatagggaataaaatcccaaaccaataattgaaactaaattgtttataaattaaaataattaattcaaaaaataaagaaaatcacaagcttcatcttcacttggacaatctccacccttctgtccaaccatccgactcaactcgctaggatagcaatccaagtttaagcagccggagctaaaataagaagaaaacaaacagggttaatagatccagaattaataacccaaagggataataattctctaaaacacatgagtatatagcataattagaaatacctcgtttctttgcaaaaaacttaggacattggggtttccagtggccct

SEQ ID NO: 371858 - DNA, 518 bp, Cannabis indica
aagtaattttcattaatgatttaattaaaataaatagactaaaatatattatttttaattagaaaattagtaattagtttatgaattatctagatagatattttctagatagactttttggtatttttctagatatatttaattaaattagaaaattaatatttaagttgattttattcaagacacttaaatatttgatatttttcttaagagatttaattaaataggaaaattatatttatgttgaaaattaatttatttaattttacaccaacataaattagaataatttttccagttacattttttttattttattttatatgaatttcaaaaatgtaatttcttaatacattggatttcaaaattcagttatatatatatttataaaaaattaaaattgagatgaaaattaattaattaattttggacaaacttaaattaagaaattttcataatatttattggaaaattaatactaatgatttcctaaagtataattttataaatattaaatt

SEQ ID NO: 371859 - DNA, 664 bp, Cannabis indica
tttcgatttaaatgattgttagttctgaaaactactttatctctcaatgtgtccaatataaaagtgatgcacaacggtcttggttttatcccagtgaaatttcacaatttttttagatgtgtagggtgagattttaacagaacactaacgagtgtaagagtaaggacaaaacttgttaaaatttaccctgaaaagaagaatcctttcaatttttgaatgaggtggtcattttaataataatttaacgcgaaactaatcttcatattcatgtcttagcaatacgaattcattgagactagtggcaaaaaaatattccaagatgggtccgagctacatttcacaaaggagtatcactatcagatatgtgagattttcactactttcgattaaaatcgattcgttacgtgtttggaaattacttttctctcaacgtgtcaaatagaaaagtgatgcacaacggtcttggcttcgtccccatgaaatttcacgatttttcaagatgtgtagtctgagattttaacagaacactaacgagtgtaagagtaaggaaaaagcttgtcaaaatttaccctgaaaagaagaatactttgaatttttaaattagggggccattttaataaaattttatgcaaaaccaatctttataatcacgtcttaatagtac

SEQ ID NO: 371860 - DNA, 924 bp, Cannabis indica
gttaaaaagttaaagtttctttttggtttttttttttttttgtttttttttttttttttttttgttttttttttttttttttttttttttttttaaaagttagtatgttgcattttctctattaatcatcagttattgttaaaatgtgcagcggattttctcagagattgaggaagcttataatattattttaagattttatctgtaaacttatgactgtgtttggttaatatttgataagattattattaattaaattattagtatttagttttgcacatgaatcttatatactaatttagaaaagtgaaataaaataaaataataaatattattatatctcttttgagttaattataaatgaaataaattattatttatatacatcatttctctcatttttctcttcttttaccttttattttccatttctttttcaggttttttttttttaaaaaaaaaaatagtgatctccatagctgaacacttccctctccacgatcccaactccattttccctcttctttttgttctttaaatattttttcaactcccattaaccgaatcccataactgttttccctctttttatttttctcttaatccatgtataaatatagctataacttgttcttcatcaacttctttccctgttcaataaaaaagttttaaaatgggattgaaatctttagttaatagaaacaagagtaaacggcctattgttgaggaggatgactctgatttcgcttctccattgtcgaaacgtggacgagcttctccaaagaagaaatcaaaggtggttgcccatgaaaaaatacctcaagatgatgctaaaaaaatgatcaagatggagttggtcttcggtataaggtttgattttagtttctttttggtttcgcccctatttgaaatttgtttgtattt

SEQ ID NO: 371861 - DNA, 534 bp, Cannabis indica
tgtagtcaggtcttgggcttcgggtacaaggttgtgtcccgtgtctcgagtatggggtcgagttttgcgtctcggtcccggttctggggcctagtttctggtctaagtcccccatctaggtccagatcattagtccaagtttggttccaagtttgagtttggggcctaggtcccccatgtaggtccggatcctaggtcacggtctatgtccaagtttaagttcgggtttggatcccgagtttgggtccgagtcgaggtcctagtattggttaaggttttagtgtgggtccgggtcccggtctgagtcctagtcccttttcaatatcgggtctagatcctgatctgggtactaatcaaagtctaggtcccagacaaggttctggtctgggtttaagtcctcagtctaggtctaggttcgggtctgtatctgggtctgggtttggggcgtgggatccaatctcggtatgggtatgattctatacccgtatccaggttagggtttaggatttagggttttgggtttagtatttaggg

SEQ ID NO: 371862 - DNA, 581 bp, Cannabis indica
aatatttaatattacatttaaatatatttaagttgaaaattagttatttataactaattttggatcaatttgaatttgaatatttttgaaattcataattaagttgagatattctagaaaattagttattgaaatatgttatccacatttttgcactctcacgtcgcatcacgcgatggtgacacatgaaatcaactctatgtacctgctcgcaagaactatgccaaacaggacaccatttacatttgctcagatgaagttttctaagccgggcagtgagcaacccgcgcaacacgccaacacttagcatatttagcttttgcattgtgagtcaccaaagaaatccctataactttgggatcagatcacagagatctggcaagctgtctaaatcccacgattagtgtattctgtatttactatgcaatctttctacttatatcaattgtaacaagaagagaaagacttcctcccaagcttatagccctataaatagtgattcacattcactagggaaaggtcaaaaaacatttgtctaagattctatattcagagatactattgtaagagctctaagaaaa

SEQ ID NO: 371863 - DNA, 418 bp, Cannabis indica
ggcttcaagaaatttacacttttacttctgatttcctccagagaaaaacctgagccttctctctctatacctagccgccaccttcttctctctcttcttcattctaaatttcgaacctctttgtcatacttgtgagtagatgtaagatcctggtaaaataatttccatcaaccgagtatgagcagtctccatgccggccacaaagtagtactcattaataaagtgcccaatttttctaacctccgtatccacggtacccgtcagccacttgttgtatggctgagagaagttcaagtaccccgacctgctctgcttgggggtagactttaaataaaagggccagttgattttgtgcggagacggcacaccccgcccttgaatggaatagaggacgaatagggtgttggaaattatttta

SEQ ID NO: 371864 - DNA, 325 bp, Cannabis indica
aattctaatttgtgtaaaaagaagtctaatttttgtaaaaaaaaataaagtttcattgtaaatattataattatatgacttaactgttaaagtaattatagttgggatttatataaaaaattatttataattattaattactaaaagaggtctttttaaatattcaattaattattttaagaaaataataaattataattaattgattctataaaaggaagttttacctattggtaatatgctattataggtaaaagaaaaatataaccatgatgattacaataaaaatgttactatgaagtagttacccatatatatatatata

SEQ ID NO: 371865 - DNA, 681 bp, Cannabis indica
gctataacatcttcaaacaacgctcctaactcaataaaatactgaaatttcacctgaaaaaaacatcaaaaaacaacataaaactttaattagaaaactattcaaactgaagagaaacaaccaacactaatcaactagatctccctaaaaaatactagaactagccaaagggattaccctttggctagtaacaactaaattatagcattctacttcataatcttcatagaatccctattccttacttttacccttttaaaatcaaacataaataaaattttccttttaatacccattattccttaaatattcaaaatattatatactaattattttattttatctcttaaaaatattacttatttatagactaaaacatgtcaaaatccttaataagtcaaattatttattattttatttatagcataaaacatggtatctatagtctttattcaacctaaattaaaccaaaattgtattaatatccttaaacttaaaattgcactttaaacacatattgattttattcaacttttattgaattgaaaaatacttaaaaatcaaattcagtataaacaaattataccttatttattatgtagaaaaacagtttgtaaactttccttaaaaaccgtatcctttttattaccataaacacctttaggataatactatcctatt

SEQ ID NO: 371866 - DNA, 296 bp, Cannabis indica
aaaggaatagataccagaacacaaagaaggcaaaagtatcaaaccacaaaatgccaagaactgccgaaaactgatgcaaggaggacgagaaaggggcaggagtgtgacgggcgtcgaccgccaccggagaagacgccggacgcgccctcacgcgccggcgcatgggatgtcgggcagcggcaaacggcggcgcgtgggccccacgcgcggtgaatctggacgccggatttttgggtttcgcagtccggtggctgggcagtcctcctatgtgggcggtgagaaaaaattttcactcc

SEQ ID NO: 371867 - DNA, 757 bp, Cannabis indica
tatattataaatttaatttaaccggctatataattggcttgtttggcataactttgaaagatcttttgaagtctctacatttagatatgtttggataaaatatgagaagagttttttagagaaacaatgactcaccagtttttttagaaaggactttaaaaaaaacacaggaagttatttttttagtttaatgaatcttttataatacataatttaccttttttaaaaaaaaaaaaaaaaatcacattcttgattgttatattacagcagattatttcatattcttctcataatgaaaacctaatagtcttcaaccaaaaaaatacagcagccatttttattgaagaaagaaaaaatagtattattgctttgtaaaacaattggagttagtattctttaatttttctattctcattgtaatctattaaatatatttcatataaaaagaacatcactatatatattttttttagaacaaaagaacatcagtatatgaaggttagtattctcgataatgccgaatatgatattgtctcttttttaaaaagaaataaaaaaaataagagtctctccatatataatggattgtatttatcatccattcaattactaagaatattgttagtatcatatagataagaacatataattaattttttaattttttattctttttctttcttggtattaagttagaatctattttttttaaagtcaatataatctcattgtttgttaattaatgtaacaaacaaag

SEQ ID NO: 371868 - DNA, 583 bp, Cannabis indica
catgtcatcttctaagatgaacgtcttaaaagatcactttgatgtaaaatttgtcacttttaattcaattgccaagtgggtttttatctgtttcttcagagagtaatgtttagatttaaattggtcttattagagatttaccagatagaatatgatttgagtgtgttttagtatagtttgaaattttaaagattggagactttgtgttcataaggaatgtagaacttattaaaatttagttctttgagtatcaataattgtaaagtgaagaacttaattatacacattcaatagtaaatattgaaatttagatctttgagtgtatataattgtaaagtgaagaacttgattataaacaattttctctgcaatttagaatttgattaagaacatttattgatgagtaccagttaaatgctaatctacactaagattttcaagtggattgttgatagggatatgaatgagaactgaaatttgtatgcctttataaattgtaagctctttagattttatttatgtctatatttcctgagaataattcgtagagaaccaatattttatttattttttgtatgttagt

SEQ ID NO: 371869 - DNA, 614 bp, Cannabis indica
atttttacaattcaaaacagttttttttacatttttacgaaattctacatagatcccctattgcaactagcgctgcaacctaaattgcaacaaaaaatcgtacagaaatccctattgcaactagcgctgcaaccactttagaaactcaaaccttaaatttaaaaaaaaaagttaaaaaatagtatatgggacaatttccctttattaaatttatattttttgaattaagtatcaaaatattctcacaattaattatggtaggaaaatctcacctatataaatataggattttggtaccgagctcactactcattttatgaaaatagtaaatatatcaaaagagagtacagagagcttagaagtttaattatcaacactgatcagtttccttttcttttgtagatccaaactaatgtatgattgaagctcaaaaaatcaaagaccgaagatatttcaatcctataggttatatcgtttcgatcgattaattttgcattttcatacataattatatatacttctgttgaatgtagtggtattttagaaaaatgatcaatagaattaggaatgtcaatctgggccattttcgcgggccgggccgggcccccggcccg

SEQ ID NO: 371870 - DNA, 637 bp, Cannabis indica
aagtttggggtgtgataactctatgaaaatagagttatttagctctttttgtgtattaatttagcttttctcaagcatttttttttagtttattttagtagtctttttatttaatttgcataaatattaatttcagtatttttagattaattttaattaattttgtaatattttatcaatttaatttagtttctcattttataagtgttaatctcaatgtttgtgtatttttgttaaaaaggtcaattgtaaaatttggatttagtaagtgtcaaaatggtcaaaatagagaacaatttgaattatgtagttgatgtagttgattaatttaccaaagtccaattaaggtctaaatatcttttttttttaaaaagtccattatatttattaatgggtttttatgtttttagcatgatgttgggcaagaaaaaaaaagcccaaagaaagattgggccaaaagaaaaccaagtggatgaccattttggaaatagttgaaatgaaaaaaatcatatttatgattaagagaggcggctcccaaaatcagcaagaaaaaaaaaaggaaaatgaagaaaaaaaaaagaaaaaaaaaaagagagaaagagttttatttagggttttaatttaacatttttatttt

SEQ ID NO: 371871 - DNA, 932 bp, Cannabis indica
aagtggaagttgaaaattcgtggatgaaccaaaaagaagagggaaaaacgtgataaattgtgagtggttaatggaggttacttgatttcaaaatgaacttagagaacagaaatgaagaatagaaaatgaaatcaaaacaaaatgaaaaaagagagggaagagagtatgatttgattgatgatgcatggggatagaacacgtgtatgcatggtatgatgagtaagtggtaaatgtgtaataaaaataagtttgtaagtataaatgtagtaatagccgtgtgagggtaataatgtaataaagagagtaaaaaggatttttcatgtaaaaatttctaaaaatattactcctgttaacaagccaataaattcaccattattattaaatatacttaaatgaaataagactatataataaatgattatttaaacctaatagaatagtcataaataattttaaatttatcaaatatatcataacatataacattagtattatgacatgcatcatatcaagttacattttattttaacaaaaacaatgtacaaacaaatcacgttttaaatttttaataattttattactaacaaatttcattactaattaattatttttcaaatttaaaaaattatacacctaaatcagatttattagactgagaaaagaaaattttatactgttaaaaacataccttttacaaatataaatttgttaatactactgatccaataagatgcaaaatatcccaaaaagagctcgtttggtacgccgtattgtaatctattgtattgtattgtgttggattgtgctgtattgtattgtattgtattagtattatttaatacaatacaatgtttgatattgacttgtattaattgattgtataaagttataatatatttttaatacactcgatcccaacaccaactacgggt

SEQ ID NO: 371872 - DNA, 552 bp, Cannabis indica
ctggaaatttcagaaccccatctggaattccggatgcacaaccggaattccggttcctcgaagaaaactttcaaaaattcatactttgctcaaatcaattccaaaccataccaaaacttccagacctgttctaaataccctaaagaacaagtctaaagcaacaaaaccatccagaaacctcagataccaaaaatgccatgtgagctccaagctttgagtttaaaactcaaacttggctaaagctcacctacaagcatctaaacttgatttaaactacataaacatgcatttagaaactgcagaaaacatacacaaactcatgcaacaatcacagcaaccaatttctcaactttcactttgaaaactataattttgagctaaaaattccacaactctaaacaacctaactatcatgcatcacaagcagcttaattatcctcaattaatcatgctttaacttcagaaacaacatcaaaaacacagcagcaagaacaactcaaacaagcatgcaaacatcatcttttcatcaaaaattaaagaaactaaaagaag

SEQ ID NO: 371873 - DNA, 500 bp, Cannabis indica
tctagcttctttacctacttacagttctaataatcttagactcaattctgtccttcatgttcctgcaataacaaagaacttggttagtgtatctcaactaaccaatgacaattgtgtgtttcttgaattccacaaaacatgttgctttgtcaaggacaaagaaacagggaaggtactgctcaaggggacccttaaagatggcttatatgtgctagaacaattctctcaagaatcgaaaaaggcaagggtgcagcagtgtgagtccagtggttatagtcctactgctttaagttgtagtagtcatttttcattacacaatgtaataaatgaccatctttgtaatactactcatatcaataaagagaatgttgttcctataaatgtctgtaaccctactgttctgcaaaccaataccaagaatcatgttaatatttggcatactaagttggaccacccttcacgtactgtcctagccaaaatattaccacatgttccccaca

SEQ ID NO: 371874 - DNA, 1123 bp, Cannabis indica
taaaataatttgaaaataaattaaataatatctacaacatcatatgagttacattaaaaaaaaataaagtaacattaaggtatcttaaacaataaaataacataacatagtctaaaaatataaaaaaagaaacaaaaaagtttctcttaatattagtggtccttttatgtttctcacatattaaaataattattttattatttatatatgtgtacgattctaaaataatttttttaataaaaaagtaaccaattgatatcttattcaaatcaaaagcaactaaatggttgcttttttcaaaactcccaaaaagcgaaaatttttggaaacgagatttttccagttttttctattttcggtaattgttttgaattttggtatgtaagctgacgtggcataacggtatttgtgcaaataattttcttaaaggtatttttataaataaaatcaattttaagtataatattgaaaaatcccctaatataaaatatatgaaatattcatttttttgaggaaataatcactaaaaaaatttaaattcaacattattacaatttaaaataaataaatttattattttttggaacaatataattaagttgactttagaaagttttcttattattaattaattatcataataagaatggaattgtgctaggttaattacataattgtacatgaattattgagaaggatgttagagcactctcttatcttttttactccacctctaaaatacattattaaaattttaatttctctattttatatcaaacttttacattataagtacaacatacattaatttttttaaaatacattattaaaacttcacgtttttcaaattttaatatatttattcctttaaaatatataatattaatatatacatatatctatatataaatataaaggaatgcacaagacatgtgaggtggcattctaagaattcatttctctatgttttctttttttgttatttttttgtatttcttaagaaactttgttaattttaactcaataataaaaagttctttagaaaaaagcaaaaaatcccacatcgtttagaaaatattaagaatgttgtattataggctatatgaatgtgtagtaatttttg

SEQ ID NO: 371875 - DNA, 522 bp, Cannabis indica
aaaatattcccaacagatatatagtattagtacgtatataaaataattaaaacctataattattgataaaaatacatctttttttagaattttttattttatactattaattttagttaaatatgtataatattattacctatataaaataattaaaaattataataatttattttattatttttaaaataaaattacttttcataataattattttttaataacaaaattttatagaaattataggttgcattatttttacttcagtccaaatctcacacactattgtaaaatctatcagtctatgtatttttgtaaatcaatatctaatttctgtatatttagggtaaataccattttggaccctgtattttgtaaaagttaccaattaaaccttctgttttgtgaaatgataaaatagactctatattttccaaaatggtaaaattaggaccatgagcttaatttttgaaaatttagtatttaatataacgaactttaaggcaatttctaacacgaaca

SEQ ID NO: 371876 - DNA, 583 bp, Cannabis indica
accaggtgtcggtaatcctagtcacaataccgggatttacacaaataggattaatccctaaatttacttccgcaaaaatataaaattggcattcaaatcatagataatcacatagagctcaaaaagagctttccaacagtataaagaacgtctcaaatggagtcccgagtcaaaagttatggctttaataaaaactaaaaaaaaattaataatctgccattatcatggccgcgacaagacctatgatagtcgcgaccactgggtttaaaaacccaaaaaactcagttttttgcttcgaaaataagtaccaaaactcacccaaaacatacatatctcccagaatcacgaaatagagctgctagcatataatagagggtcaaaaacacataatcatgcatcaaattccaacataaaacctccaaaatcagatcgcataaaacaatacaaatcttgcttcaacttaacaaaattccaagttcaagaacatgaactcaaacccaacacatccctattaaattccagcagcataacactaattaaatatgaaattccaacctagaaaacatcataaaatctctgccca

SEQ ID NO: 371877 - DNA, 642 bp, Cannabis indica
ttgatcactcttctaatatcgatttcgtggtaaaattggaaaaggaatcggttctgctctagtatcttcacgtacatgccttttccgggtttccaaagatcggccattatgttttggaagacaaggaagtccgaaactttgcctgtcaatagccttcctatcaaacaccagcggtcgtccaaatcgggttctgtttcatcaccgtcttcttcgtcgaaaatggcctctgtatcttcttcttcgtccagacacatatcagcccatttcttagataaatccccatcgtttctgctactggaagccatgacgtaaccaacaacactaagacacaatcacactcacgcaaaagtgaacagcaaaagacaaacacactcactcaaatctgaacagcaaaagacaaacatacacgttcaatagagaacgacatacacacgttcaatagagaacgactttttacaagtcaagagttatttcgtgattttaaaaaattgaaccctcacatattttaaaaaattgaaccctcacaatatggggtgctatacaaattgatttaatttggtttatttgagttaattggacggtttaaataatttgtaaatcacccaatatattcattgggtggtttggattttcattgtatta

SEQ ID NO: 371878 - DNA, 553 bp, Cannabis indica
aattgtgcatggaattccgaagagaaggtcttccatgaactaaactttccaggagccaacttgaaataccattgctatgcggcctccgacagagtggcggggaagattctgcaacatacgtctcctcgtaccccttgtaaatccatttgcatctcaaagtacttgaaatgggagagaggatcttctctcccagtgtacttcttctacgttggcatcttgaacttgtgaggtagtggcaggagatggaactccggtgagaagggagttccgcatgcacggtctaactcaagatcgttattaggctgcccggccatgccatgaaaaatattcttcagttcgtcgagcgaggcctatacggctgggctgacttgattacgtcagcgtctttctgagcggggatttgagtatggtctccggactgcacgttcgttgtctgggaagcattcaccgttgggtcatcctcggtttctccaaggggaatgacgctcggcgcttgttggcctacagtctgataggctcttcgtatcagcacagtggcttgccaactacaatt

SEQ ID NO: 371879 - DNA, 1072 bp, Cannabis indica
acacctaaaattgacataaactatcctaaaaataaagttgaaaaagctttaaagtaatttttatttttttactttctttagttttaattttaatttaaaaaattatatattttttattattattattattcaagtaattcttagtatatttttaattttttttgtcttaaattctacttaaaatgagattacgtaatgaaattcttagtttaactttgaattaaataaaaaaaatatatatatacatatagatataatacattatttaattaaaaaatttaacatacatataatgcattaaatatcaccaaattaaaaagaaaattaatttaagataattgaattagtgtctactaaggccatgccaccaatagctggtaagtttaccttatgggatgagggttgtagactttcttttgcttgagccaaatttaaaaaattgtagtttactcggaaataccaatctatcctggataattttagacaatattcaacataaaattcagtacgcatcccctaaaagaagatgagttggcgttgcccaaaatgtatatattagaaacacagtaacttaagaagtcgctaagacacctaaaggggtttcctgaggtaatgatcattatttttatggatagtcacctaccgtccttagggcaaaaccaacttgtcttgtcaggtttaaggagaatcaatataatttttatatatgaaattgtgtcaatctcatcgctcatagatttgacagttgatataactgtagcatcccgtaggatcagttggttcttttgagtttgatcttcccttgttgtgactctttcctttgtggtgatctctgctgtgacttttacttttgtagtgtccatgttttctttgattgggtctccctctactgaagtttacttctccaaaagaacctccatgcttctcattctttgatctccaagtcttttgacttcaaggctgaaattacttcttctaaagtaatttctgtcctaccatatttaatggcattcttcacttctttgtaggattcgggtaatgagtttaagatgatgatggcttggttctcatc

SEQ ID NO: 371880 - DNA, 460 bp, Cannabis indica
ctgcggcacgtaattcctcctaatcatgatatagagtattactgtgaccctggatgagtccgagcgcagcgcggagatttcgcaattcggttgcgtcttcgatggtcgtttgggcattgatgcttggtggaatagtcgtgtgatgaacgccctggctgtgtgcggaaccgttattccaagtctcttgcacaccaggcgcagttttagtatcaggagttgtcccacaattcaccacgcttctagcctgtccaagattgacagtgggtagaacccttgaactccctgggtcctccaatttcgaatccagcgtctgtgagcttccttggttagacaggcctctacgagtttgtaccatcgtgtcgaatattgaaaagagcgatctgtgattctcctctcaatgaaagcaccaaaatgttgacttcgcttttagccaacgacaatgagcctttttgataagtga

SEQ ID NO: 371881 - DNA, 541 bp, Cannabis indica
attttggcagttgtgcggtttcgaggtacatctgaattaaatgaccatcttttcaacttcctcttcgaagcacatccattggatcaaaggttttttgaaatcattatcatgagtataaaataaggaaaaggaaccacctttgcaccatttcagaaagtttgagaaatacccttaaacttcttcattaaggatcaccattaaacccgtttgaagatttgcatgccatccatgtctttgacctttttcctgggaatttcctcccacttcattttttcaaggcaatccttgcttcgttcgaagatttgcagatggatttcccaggcgttgccccaagccctaacttcaaacggtaagttaatttcttcttcctcatgtttattacatagtgtggatcagttgcttgatttgtttgtattgttatcatctcatctggttttgatagttttttagggttaaaactattcatactagggttcaggcaatatgtaggttgttttaagatctccaactcattacgatctagtttgataaaattctctcc

SEQ ID NO: 371882 - DNA, 525 bp, Cannabis indica
aaactagaccaattaaatgatcaaatcaaactaaatcaatccataatcagcagacctatgactctaaattctagggtcggaaaaatataaatttttacaaacataaaacataagaaatataagatacttaaatacttcataattatttttataaattgacccaatatgcaaaaaaaaaaaaaaattatcaaaatacacaattgttttaccttttatagctaagaaagatactataaatgctccgttcaatttttcataccctcaaatcgtttaaatatgctttcatcatcaacaatttccttttgtacacatagcagcataaatagttaatattttagattttatatatttatatactttatttttatttttggaggaaaaataactaatgttacagttttcttacatatgttaccatcacttctattaactcataaatatgaacacatggaaggtccagatacattacatttatttatttttattttaaaacttaatattattaatattaaaaactaaatgcta

SEQ ID NO: 371883 - DNA, 511 bp, Cannabis indica
gtgaagtgcaccttagaatctcgtgagactctggttgttggcgggactcccacccttcctacgttaggctttagtatgggaggtagtggctcgaccactgatcagaaaagaaaggcacctactgcatccaatggctcaggtcagaacaagaggttctgagggaaccagggtcgaggcaatcggcagggtaattttgagacccaatacacttacacagagtgccccagttgtaaaaggtaccatctgggggagtgtaaagggcgggggtgttttcagtgcagtatgtcagggcattataaaagggattgtccctaactcaagactgaagcacaaaagactacagcgaaacccactcaagcaagggtgttcgcgataactcaggctaatgcaaaagccagcctttcagtagtaacaggtcagctctcggtcaacaattcttatttctctgtgctgtttgactctggggccactcattcctatgtggcagtcagaatttttagtgaattggata

SEQ ID NO: 371884 - DNA, 513 bp, Cannabis indica
gaaaaaggagataacaactgaaaaagagaggaaaagagagcagtaagtttccaatgaggcgattttctgtaagttaatagcctccaccagaattttggagtctgagagaatggtgaagttgtcccagccgatcgacgatgcccattgaagcccaaaaatgacagcttctagttcagcttccaagctagaatcacaagtgcccgacgcatatccatatcacaagctagaatcacacataaatctatccaatctaataacaaccaatcgatttataattacaattgacaaccaattattagatatccaattgtgacagtattggattggatgttatttttgaatatccaattagatcagatcgaatgttagatgaagtatccaatacatccaatatctaatcaaactaataaggattttcatttagtttagatgagtaatcaaattttatattgttatacgtaatatatatatatatgtatacacaaaaattaacattaaaattttactattttt

SEQ ID NO: 371885 - DNA, 731 bp, Cannabis indica
gccgaggctatgatgtccacccgaagcgctttatcctcagcgggagtatgaatatttgggcagagaaccttcgaaagattgaagtcatccactgactggctcctggagataagcttggccatccggcagttctctgtcgtgaccaagtctctcacgttaagacctttcttgtcataagtggagaaagtcttggcatgttggaggaacagctgggtaggagcagtgcggaaaaagaggaggaatcctaacccactccgtaagaagctccgggcggtccacggcttggaaaccggaagagaagaaaaagcgacggcggtattcctttacattcttttgataattaaaagggaccgggccctcattagaaggatgggcccagagggtgaaaaacccgtctttaaatttgtccccttcttggggacagatataagttcataaaaaatacaaaatttcagccgggctaggtgaagcccagcctctggcaacataaaaaataaataaagcctgagagcaggcgataagcttgcgggaatagttggtaaggcgcaaggccgacaaagacaaggaagttaataaagtaatcttgaagagggagcatggccccggacatgagatgggtctggctctaggctccaaacccccagtagttatgattggacgtctcctcgtcccgaggcaggcggtgaaagatcccagacgcggatggcttgataccagccacggtcacaatc

SEQ ID NO: 371886 - DNA, 601 bp, Cannabis indica
tagattataaaagattaaaattagatataatattatactattaaatgagtggatcgaagtgtgtgaacccttcagtttataataatagaaagtttaaaacaagttcttcatcaatgatagatagacggccaatatctaatcctgttgtatctctatttaatctaataatttataacactcaagcttgttcttgtaaatatattccaattagataaatttctataagaagatgactaatatcttttcataattaaatatgtatagtctaatggtatatatattgtacctagcgatatctatgtatgatataatacatacctaatatttattttgaaagatatgctatgatatttctatttgaatttcgaagtatagctccaatactaatagttcttgagtttttatcaatggttgcatcaacattcaatttaaatttcccttttgaaggagcaaccaaactgctagtagaattacattgttaagcaaaaaatttcacatttaaaatattaaaataaatgcaaaacacaatttcacctatgctggatttatagcataagagtttattaattcaagttcgacccatccaagattataagaataa

SEQ ID NO: 371887 - DNA, 873 bp, Cannabis indica
tatgtgtttatttcataatcgttttagaagttcatatttagggtgttaatcaacatacttgtgagtagatctaagatcctggtaaaataatttccaacaacaaggactattgagatagattaacatgtccaaagctagcaggttcaaaagaggtgtttttgctgctgaaattggagctctagtttaccacatttggaaagcaagaaatctcaaattgtggcaagcaaacacaatcgatccagatcaggttattcaataagtcaaatggcaagtcaaaactaggatcacttgtgtgatgcctaagcaagtttcaaacacctatcaagaatggtttagtaatttgtaattaaattacagtatggaagaatgatttaggagttgtaattagcttatagatttgaaaatgtacagaaatatttaggtcttaatgaccgtaagttgtattggatgcttgtttgattaatgaaactcctgattcatccaaatatatatatatagatatattatattaaaaaataatataccttataacaaaaaatacatataccatccaccaaaatatatatactaacaataataataataataataataataataataataataataataataataataataataataataatatattacttatatatacatactatactaactaaattatgtgtgacagttaaaatatataagactcttctattgtggggatttaaaaaaataccagggatttaaaaataaatgagtcttattgctttttgtggatataaatgggggttcatggacactaaaaaatatggtgaattgtagaagattagaattgacttttgacataggtcccactcatttaatgttatgtttgattga

SEQ ID NO: 371888 - DNA, 562 bp, Cannabis indica
agacattcatagagaaagggcatagaaaaaacagatgctcacaagtttctgcactccctaaacagagcaaacatgagggatcagttgcaatttgaaatctgagcaaacagtctttggttttcaatctatttttgatagcaagccaaaacacaaaactgtgtttgggagtatttagccgattccagacttccttgctccagttgaccctatttaccgtaggacacagccacttatagccatctgctactttatatttcgtttgagtgaatgtgatagggtcaactaagttcagcaacgtaccttttagagctacgatcttcctccaataccagctgcctgtttggggtatctcatagctccaccaatccttgcctttgatgtatacactatgtatacactatttttccatttttacgttcattttggtctgtttagtattaaagtggactgtaagggttcgtttggtatgtcgtattacaccgtattgtattgtactatagtattatattgaattgtattttatgcaatatttttaagtaaaactatatgtagtattaacttt

SEQ ID NO: 371889 - DNA, 1000 bp, Cannabis indica
aaaaaaaaaaaaaatattaggctaagtaaaacgtaacatacttcattgaaagaaaaatgtaggacgtaacatacaagttagtttagttgcaatttagcttaagatacatttaagttatttttttaaaaaatttttatgtagcaacacttttgctactttaatttttacaagttagtttaaattcattattaataatgcacatcttttgaatgtcaataaaataccaattggttactttttataaaataatctactttaaaataaaaatatctcacatgtatatcttttaatttttaaattggttacctttaaaattatatgtttatttgtgtattatattatgttatttaagatacttttaagttactttatttttcttttttatgtaacaacatttatgttaccttaattttatttaagaaactagtgcacatataagttttataaattagtttaaattcattacaaataatgcatatttttaagacttttttaattaattttagttttagattaagtttagggaaattacctcatatactatttttaactttttttttttttaaatttacggtttgggtttctaaagttgtttctccggtggtttctatgtggattgttatacggattttggttgcgatttaggttgctctgttagttgcaataggagtttctacgtagaattctgtaaaaatacaaaaaaaaagaaaaaaaaactgttttaaaatgtaaaaaataaaaaaatcccttaattttatttatctaatataaattttagttacatttcaattagctaagttataattattcttattatttattatattttatgttacattttttagtaacatttatgctatttttaaacatatttaataaagtaaaataaacgaataagttacaataaataagtgcttgctagttaaatatatattatattatagtatttattttagtaattagttatttcaaaattatattttagtattgggcattttac

SEQ ID NO: 371890 - DNA, 389 bp, Cannabis indica
agaaaattttcaaaggaaaactctctctcttttcctctctctattcggcccttggagcagcaagaaaaagagaattttctcttgggattttactgatttttcagcaagttagtgtgttcattgaagaggtatttattgtctagcttttcttcctttgttttcttgaaaaaaaattatgaaaaatatgagttatgcatggatgattttaatgttgttgctgctgctagttgttgttgttatttctatgtttaaaatgttgatttaaatatgattagttaggttgaaatgcatgctagttgttcttgattttaatgttgtgtgaattgttactgtagttgttgcatgagttaggttttagtttctgcagtttttatatgcttgaatatgag

SEQ ID NO: 371891 - DNA, 563 bp, Cannabis indica
accaaaaaataatttacaaaaactaaaaataaaacaatgtacattatgaaaatgaatagaaactatatttataccttaaaggatgttgagattcaatgttttctcaacaaatgatggtggccggagttatacccagtactatttttgtatgggttcggatgacacttaaatagggaaaaaaattaaaactttttgggtgtataggattaagtatcgaaaatagaagatttaacaacaaaaatgggctcaaatggttgagaaatgggtgggggaggcggtggtcgatgagggtttggggctctggtttttgggtttggctgggttgctgctgtgttcaagtgaggaagaaggtgatgaatgagacgcatatagggtttcttatataaccctatggagtcggttcttatgtaagaaccgacggcatagggtacacgtgtcaaataatcgtgtaccctatgtcgtcggttcttatataggaaccgacgccataggatttatccttaaaatccagtgtgctttattttccaaccgcctctaaatggtataatgcaattttataccta

SEQ ID NO: 371892 - DNA, 599 bp, Cannabis indica
ttaatttaataaataataagaaaccgctgattaattattagataccacaatatagtgttggacacaccttaaggtgtcaaatagcaatgttacttaaaaatgagaagctaaaagtgttacaatctacttgcacgctacgcatgttgaccttctctaacagtttcatgacatagtcttgttcagtgtaggctcggctcaagggtgggacagtaggggcccacgcccaaaagcctttcagtgaaacccaaaaaagattttaacaaaaaagtcctaaatttttttttttaaaataccatatttatatttaactattattattgaaaaaatataattattttctaaaaaaatatttaatttattttttaaaatattgcatttaatatttaattaagataaaagtccagttatgtctttaaaataatttattttaaatttttactactctatataaaaaaaatataaaagaaaatagaataattacataagacactattttttgtaaaatatttacatttttacgttcaaagaatatttttttacatttttacggttttccaaaaaataacacgaaaacaacataaaatcaacaagaaaacaac

SEQ ID NO: 371893 - DNA, 867 bp, Cannabis indica
agaagaagtgtgaaaagaaaaagatgggtctttttcttctactaaacgtgtacccaaatactctcaatagaagacgaaaactttcccatcaataccaagcaagcactataattattactagttatgaacaaattttataggttgtacgtacattttttcttcttttcattaaaatagttttatgttttttaacctgaattatatgaggttatataaaatatatatatatatatatatatggatattattcccactgagcttgaggggtctgataaacccaactcttcttttgttcatagtaaacccttgtgattaattaatttttggattaacttaatgtaaaatttacggcattttatttgtacactacaagaaatatcacttttgccggcacattttttgtgctaacaaaagttggtattgcgctggtaaaataggatttacttgtgatgtgttggcaaaagagggttggcaaatcaatgttggtattagaacttttgccagcataaaatgaaaagcgctagcaaaaataacttttcccagcgcgtaagtgcgctggtaaaagttaaattttagccactgcaaatgtatgctggtaaaactttgacatctttgccagtggagtttgcaaaatgagctggtaaaaattacttttactaacttttaccaacgcagtagcgaattgtgctagtaaaagtgacatttcttatagtggtaattatttgtcccgaatttttattttcatttttatgattttttagtgaaagtttggaaaatgagaattttaatttgcactctcataaaattatagtgtacctcaaatattaaaaaaataattttaaaatttctcttaataatatttttttt

SEQ ID NO: 371894 - DNA, 768 bp, Cannabis indica
aactgtttctacctcgcaggtttctgtctctacagcaaagcactccgctgttacagaaaagaagcagcacgataagtttgacaatttcaaagggattggaagactctatttgccatttttgtggaataaaaggtcacattcgacctaagtgcataaccatgcaaaacatgtttaaatccaattatcttgaaaataaacatgttttacaaaaacaaaaatgggtattgcttctaacatgtggtattttgatagtggttgttctagacacatgacaggtgaaaaagaatttcttgtgaacataagaccaatgcactgtggagaagttacatttggtaacggtcttactggtaaagtcataggaatgggaactctcaagttcgaagggcttcctaaactaaagaatgtcatgttggttgaaggactaaaagctaatctacttagcattagtcagatttgtgatcagggttatactgtgagctttgatagcaatcattgctatgtatataatattcttgatgaaattgtgttacaagggctgcgatctagtgataattgttatactctcactacgcatgccacttgtcattctgtcattgaaaatgttactgacctatggcatgaaaaacttggtcacattcattttaaaaatctgaaaaaattatctgtttcagggattgttcgaggattacctaaattaggtaaagagtcattgggaaaatgtggaccatgccagttaggtaagcaactgaaaatttctcacaagagtgt

SEQ ID NO: 371895 - DNA, 611 bp, Cannabis indica
tttccagcggttaggggacccccattccctttttcgaacattagagtttggtttggggcctaactgctggattttctcaattttttcagaaccaacatgtctgctttcgcgtctggttctaagtcttccaagaagggagaggttcaactagccaccctggaggaggtcatgcagggtcccgtggcccaggagaactataagtcccgtgccaacggatgggaggcggctgagctccactccacactcacttgtgcccaccaacttgaaaaaatcgtggtggtggcaggcatcaaaccctcagcctccgggaccttccaccggttgcctcgggacgaggagacacccaaccacaactatgggggcttcggagcttggagccagatccatttaatgtccggggctatgctccctcttcaggactactttgtaaattctcttgtctttgttagccttgcgccgtaccaactaatccctcaagcttaccgcctactttcaggcttatttattttgtatgccgtccggagctggggttcgcccagtccagctgaaattttgtatttttacgaacttgtttctatctccaagaagggggggcaaatttaaagacggtt

SEQ ID NO: 371896 - DNA, 513 bp, Cannabis indica
cattttttcgtcatacttacctaacttgtatgctctggagttgagaacttcgaccacttgatatggtccttcccagttaggtccaagtacacatgtcgtattgtctttggtgtttaggaatacccttctaaggaccatatcttccatgaagaattttcgagctttcacttgtttgttgaaataccgagcaactttttgttgatgggccatcaactttaagtttgcagttgctcatttttcttcgatttcatcaagtgattctgcagggagtatgtgattggtacctttatcgtacgtcaatcttctgtgggaaggtggcttgagttcgacaggcagcatagcttcgtaaccgttcgccattgcgaatggtgtctgtccagttgccattttttccgttgtacggtattaccatagaacttcaggaagctcttctggccagtgatgctaggttcttcgtgttggaatttattttaccaggatcttagatctactcacaagtatgttgtttaaaca

SEQ ID NO: 371897 - DNA, 621 bp, Cannabis indica
atggaagtgggacaagattacaacggactttgttactggattgcctttgacacctttgaagcatgacgttgtttgggtgattgatgatcgtttgactaagtccgctcattttatgtacacaatatagctcgactacatggagtgccttcaagcattgtttctgatcgagatcctcgatttacatcaaggttttggaaggccttgcaacaagccttagggactgaacttcacttgagtactgcccatcatcgacagacagatggacagtttgagaggaccatacagactttgaaagacatgcttcgctcttgtgttttggattttggaggtaattggggagaacacttgtcactagtggaattcacatacaacaatagctaccaagcccgtataggtatggctccttatgaggccttatatgggagaccatgaagatcaccattgtgttggacagaaccagatgagcatgtcactattggacccaaaattatcactagtaccactgaaaagattaaagaaatccaagaaagacttaaggttgttcaaagtcgtcagaaaagctatgccgatctccatcgacgggaacttgagtttgatgttggtgattatgtcttcttgaaa

SEQ ID NO: 371898 - DNA, 523 bp, Cannabis indica
tgatgtaatacatcaatcaatcacgtgtacaaaaaaggttgaattgtgtgtgcaatgtggtaaaaatagtaataaaatataaaagatgagtaaaaaagttggtttagccgtgtataggtatttgtgtaataaatttatcatttttagattttttggtgtaaaaatttcttttatttattatagtaacttgccaatgtcatatttatatatactagtggaagaagatgggcagccattttgaaaataataatagtaaaaataaaatttataattaatttgtaacttaaaataatggctattttattttattttacatcttttcattattaattcaaaataaatatagaactattattaaatagtttttatgaatttgttaaatttgattttaacaaatgataaaatatagtattacattatcttaaatatcttaaaactaactaattattcaaaaaaataaaaaaattgttaaacttattaataattattaattcaaacactacattattcacaattttttttg

SEQ ID NO: 371899 - DNA, 847 bp, Cannabis indica
gatccatatacatcggtcggccatgtgactacatacgaattaagtgtgcatgcttttcggatggataaacaatttatttggctagagactgcctattttgttattatttagaatgtataatcatttaacctatacgatatttattgaattatcaataatattgatcattgcttgaaattataagaatacgaaaaaattacattgattcacttctttttgagaatgcatgcaccgtaaaagcacttaactcctcatcttgctcttaagggacatggagatgtaaaaaagagagttttatcaacttattatatatatatatatatatacatacatatactgttcatatatatacatatttgttttcggttctgtatatatatatatttatattcataccatttatattatatatacattttaatcagtatatacatatatatatatcttttattgttcatatatacatatatattatatactcatacattcatactcgtacgtgtatatatattttatatgtatatatgttttatatatattgtatattatatatatgttttgtcacataataataatcataatattcattttttattatgtgatatatacatgcatatatatatatatacatgcgtatatataatcacgatcggtccatggttttgttttttccttttttcatttttcggtgtttatttcgaattctatatacattactatattcgtatagtattatagatcgatctaagcattgaaaatccattgaaaaacttaaagatggaaaaaattttcagttaaaactttttcggacccgattagtttcgtgatattaaagtatatatttttt

SEQ ID NO: 371900 - DNA, 561 bp, Cannabis indica
tgatgagatagagtgatcgtgctgataacgtgttataaatttagacagatatgagtaataatacttgtattcttttctgctcttcgcttttgttcatctttcttcaccaaacttacacatatataggagaatacatgcatgtatttgtatataatcattatattttactgctacaagttgaatagtattcttatattattgtagttttatcatgtagagtatactacatatctatcatatgtagtcattcataacaattcagactttttaaaataatttttgtttttatcttttaccaataatacttgatatatagaaagaatatttttttatattgatagtaaatacacgtcggaccttttatacgatacgagtgtaaggggcacaaatatgattcggtacaaaaaaaaaatataagctaagcacgataaatcaaaaattcctataattcaataataatgtatatgtattattctaattatttttttatataattatagttaaagtattaatgaaaaattatataaaaaaatattgaaactatatgtataaaatacatat

SEQ ID NO: 371901 - DNA, 1075 bp, Cannabis indica
aaccatgcaacataaaatgttattctgatttttactaactagtaaatctgattatattgaaatgagttttatttagggcacaaaacccaacattcatatggtaaatactagtctaagttgtcatctttagggatgagtcaactagattttgcattacaaatacttatatgtcaagatctaacactaatatgttgtttatgataatctttaggggattgtcccattaaaaacaacaagtcaagttagaccaacaatgaagatttgaaatttatactacatgattaataatagaaaacaacataggttcaatataaattcatacatatttcagaaattattaagcatttagcaagttacaaaaacatgtgaaaatacaaaacaatcatatcttaaataatttccaaggtttccaacaaatcaatatcagtgtcccatttaggcaagagtcaaagatatcattcattgaatagaattgtcagctcatctaaaatggacactattttagcaaccttttattcgatcaaaatgagaatttgatgttgtcccatttaggcaagggttaaggtcattctatttcatgagcttctaccattgtttcgtactttgtaagccctactcttagcaactactattggggtggtcgtttcaaagaatcaaaaatttacaaaaatagttatcttttgagattctacgacgttaaattgctaatgaatgaatatctattagggatgaatctcattaaaataagaactatgtagaacctacaatggagatagaatatccttaaactaaagctcattattttaaagaattatattttcatctggtacttattttaatctatttattttaatattcatatatttatttaattcaaattactaatttagattaatctaaatctaaattttaatttaatatttataaaattatatacttaggttgttatcgagttttttgcaccttgatgtggcaatagaactgaatgacgcgtcccatgttccttgttgacatagcttttagccaacgacaacgagtcaaatttagtaagcgataagtgatttatagcaatcga

SEQ ID NO: 371902 - DNA, 373 bp, Cannabis indica
taaaatatttccaacaaaaataattagggaaattgatggaaaagggttacatcagacatagtacttctccatgggaagctccaatcttgtttgccaagaaagctgatggaactttgcaactttgtgttgactatagaaagttgaatcagatgacaattaaaaacaaatatcctctatcgaggattgatgaattatttgatcaacttggtggttcaaagttcttttcaaagattgacttgatgtcaagctaccatcaattgaggattagggaagaagatatccctaaaacttctttcaggacacgttatggaaactttgagattttggtgatgccatttggcttaacgaatgcacctgctgcatttatggatct

SEQ ID NO: 371903 - DNA, 575 bp, Cannabis indica
ttgccaactttgctcaaatttcccagagagaaaaattctcaaacccagaaaaacacctttaaacactttgcagttttcaccagttcttcttcgtttgttactgttactccttcttgtcttcgttcgattcacagcagcacccccagtctcaacactttattgtaagttctttgcaccctttgcttcattattaatatgcatggcatgctgttacttatctgtttgctcttttctgggtttgtattcgaagtttctgggaatgcaaatgtttagacccttcacataatcggtttgagattactgctctggtgataggatcacgcgtttgttgttattttttgtagaagaccatacgttcttcgtataatggtcgcttagggcatagaaaagacggtttccttccaattttccgcccccttttttttagtgcgcaatgccgtcttctgtgaatttattgcactcgactcttgtccagggaatcctcctagggtttcttgtatgacaggtgtctgaagggggcctcttttccagcggttaggggacccccattccctttttcttagtttagggtttgg

SEQ ID NO: 371904 - DNA, 1290 bp, Cannabis indica
cctggagggagacgctagagcttccgctacttcctcgtccttaacgacgtccatcatctgccgagacatgatgcacagagcaaaaacagcatggtaagcaaaaacaacaaaaattcaaagtatgaaagtcaagaagctgaaaaaaaagtaaagcgcagagtgactgcccgcccagaaagtcagaattccatcatcacctgacatcgactttatctcagccataacggccttcccttttccaacataaggatgggatggccgaacaggtgaaatgggctcccttatgcgaatggcatgttcaacgggcttgggcgtggtcgggagtttcttcttcctcctcaaaggattcacctgctcagcctcagcttcatcttcaggattcataggctcctgagcatactgctttgcctgagcacctcccttcaacttagcctctcgcttaagttgaatgagctcatcctccttatgagatcattcaggccaagcagcagcagatttccctttcttccccgtcacggacttagaagaaaagtcctctggataaagcccgtactgcaccaaatttgcatcagaggtcaactggatgatatccctgtcttccgccggcaaccgggcaagtttttgagccctatccctaagggtaagggtgaggggaggacggtgatatgtcggaatctgctgaaaccgagtccgggtgatgttcggatccttcaccatgaagtactcatcaacaaaacgccctattttgctgatggccttgtggttcgtcccgctcaaccacttgaagcctggctgagagaagtaaaaataccctgacctgccttgcttgggggtagacttcaggtcgaagaaccaagcgacctcgtggggagaaggagcgccccatccctgggaagcgtagaggacgaagagagcggacaaatacttaatgcccttgggagtaatctgggccgggcagaggccgaagaagtccgccacatcacggaagtacttatgcaagggaatcagcgccctttgctggccgtgagcccccccgaccaggcacacatccccttatcagggtttgaggcgcgattttcgtgggcggggatgtagcaatccagctcgcccaggtatccatcctggtcaggagtgcagaggcgtgcctctgaaatcttggacggaggactcacccatctggcgcccaacgcaccctgcctcctatgaggaaccgcctcagcaaactcctcagtgatgtaatcaacacccgcaaccaggatgtccccgtcagcatcaactggttgcccagcc

SEQ ID NO: 371905 - DNA, 546 bp, Cannabis indica
attcaaagcctactaatatctaaaactaattttaattaattaaaaattaattttattgtgatcattagatttttaattgaaaatttagattctacacaaaattttaccaaaatttgaattttgtttcaatgaaaaatgatttttaaatcaaaagttatgatgaaaataaaattgatgcaaaggggtaagcatgcgcgcgcggatgatggaggctcggcgaggaaataggctgcatgcagccttagatggtcgaggatgctcggcttgagcagcccttcagacagggctatgtccgagagttctcgatcagctcgtctctgaagaggcataatgtccgagcgatacctgatacccgcgcgcgcacacgtgtgcgtccgatttcagatattttcatccaaattcaaaaaatcataactaattcataaaaaatccaaattgggttctacaaaagcctaaattcattaattttttgtgtaatttccagtaaaaatatttctagaacgaaaaaaaaaatattttacaacatacattgcgatttccatacaa

SEQ ID NO: 371906 - DNA, 353 bp, Cannabis indica
attaaaattgaattagcaacataattagaaaaacacttagttaatgagatatattctagatagttatttcttgtaactaattatattttctaatatttaattaaataggaaaatatatttaagttaaaaattaattaattttaattaattttggatcaacttaaattagaatatttttcctagtattaaattagaattaataattaagttgactttattcaagatacttaattatttgactcttttatttaatgcatgtaattaaattgaaaatcaaatatttaagttgattttattctagacacttaaatattagttaattttcataatatttaattagataaaaaaattat

SEQ ID NO: 371907 - DNA, 644 bp, Cannabis indica
attaatcacgatttccataaaccttgttgattagcaacgagctgcacattatgtttaaaaattacgtcatacgcctatactagttagggtgttacaaaatcaagtttcgagacttgccttagtgtaacaacctatctaaagtctctaagtctaccagagacactgaatgttaaagttgcaggaaagatacttatttagtctaaggaaagttctatacattttgggcattataccatcatttattaactactagtgttacttcctgactaacgcagaagtacttgccaaaaagtaaagaatccagtctccctagaggagtagaaatatagagaagaatttcacaatatcaagaattttgtcattaaggaaatgtaatggtgcaaaagaggttgtattgaatacaacctgttagatcctatttggagagaatactacatactacacttgatttggatatcaaggtgtagaaattatttgaaatgcactttttattttatattattgcaagtgggagtttgttgggttttgtgccctaaataaaacccatttcaatgtaatcagatttactaattaataaagatcaaaaatcccattttttgttggatggttcacatgatttatttcatgattatgtttaatgtata

SEQ ID NO: 371908 - DNA, 499 bp, Cannabis indica
cattacccaaaatcaccacaaagattatctctacaagatggattaagatcatcactatctatgaattaaggtacgcttccgccatttgaattcttctctttgaatcaacaaaggtattctttagatctatagttatacacttataattatatgtaatatgtttatctatagaattgaattttgttgttgcatattttatgagtgatatagaaactaacacattcatcatcacaattgatgtaaagtttaacatggtcatttatttttattgaattgatgaacggttaaaataagaattacgaacaacataatgagtaatattattagtagaacgtttaacaaattataaatacactaaatttaaaaagcaagtaagagtttaatagcttgtttggttgtattttcagttttaagtttttagaattgtgtttttaaaaatgaaaatagaaaataattttttgtcaattttaaaatttaatggtgtttggcacaagttttt

SEQ ID NO: 371909 - DNA, 645 bp, Cannabis indica
aattgtataattaaataatatttgactatttagttttatttgataaaactatattaattatttaaatataatattactcttaaataatattaaagagagaaatatattattttaatgaaaataatatttattttaattcttatggaataagatattaattagaattaataaattattatttattgacataataaataaataattatatctatcgtaaaattgagaaataaattttggactttaaaatatggcacacacgtgtagacctagcccacacgtgtatggagacatataaaggcccacgttaattttgtttgattattttattgtaaaaataattcaaataaaattaattaattatctttaattattgaattaaatatattattgtatagtctatttaatcaaaaagataaaaataaaataaaaggatttaactaatttctgttaatcagttatatgatatttatacttaaatttgaataaaattagatattatattttatttccaaagaattaataaaaaggtttgtttataacattatatatatgatatatttcagtataaactaacaacccaagtagagaaaaaacaagtgatcaagtttgagagaaaataatgattgatttttctctctctctctc

SEQ ID NO: 371910 - DNA, 733 bp, Cannabis indica
agttcctttcgggtagttcctccgatgtgaggtcctcctaagatcatggctactcttccgttgggtcttggcggcaggccaggaatttgctgggcttctccgggggagcaactggggccaatgctcctgctacaccccctggtgctccttggggcaaaggtcatgttgcctgaaccggattgaggtgaggcaacggattcttgatccattcgtaaagatgtcccaaccggatgaagttttcgatctcgtccttgaggtttttgcattcattggtgctatgcccaatgttgttgtgatactcgcatcttttattgggatccctccgggagctatccctgtacagaggaggtggtctccggtagtgcgtgtttttcctagtagcaaaatacacacgctcttgggagtctgttagctccgtaaactgggtatattgaagagtgtacccccttttctcccgcttatcctctgtccggttactgccttttgaggacctcttgctccgagagccttgagagggacctgctaagcttgcagtcggagcggagtgagacaaggctggtccgcttatcccagacgggttcctaaaatgagaagaagcaggggaaaaggtgtgaccctgactatatccaggggtagcggaaaattgtaggccgcacatcggtggaacagctgttggtaaggttcctgggagctgagctccgggtacatatcccgctatcccagtagggtagta

SEQ ID NO: 371911 - DNA, 1400 bp, Cannabis indica
aaactttgcattgggacatgagctagacatacaaaagacatatttgagacattagaatcagattcgtaaaactttcattttttttacagccgaagcacctagtgctcgagtgcccactgcccaggttgaaaattttccaatctggaccacttgcaagaattaggaaaaaaacctgactcatgagtcttctctttttcataacaaaacggggaaacaagtactttttgggaagaaatagaccaacttgagggccaaaacaagagaccaaagcccaagttaacacctggagctggcctagggcctaggatgacattttgtcaaccttggacgattttgaggagtttttctcaaaattattttgggcatatctttgttttcatcaaagattaagattcaactattttcagggagaaattgaaacttccaggaggccttaaactggacccagtgccttccaatcttattttcgaaaaagtgtcctagtttttttttcatcatcagaaataacaaagatataagaaaaaacttgagagaaacaaaataattgcaagggcttcaaaattgagcccaatgcctatgttgacaatcaagctagtgcgctggtatctatcactcaaatgtaaattttgctccgagaattctctctaaaatggtaaaatattaggtaggacacctcgtgaagtcaagaaccttggaagtgtcaaaatgacatctcggacgctccaaaataagcacccaacactcaagttaacaaatggcctagtgcattaggttttgcttatccgattcgtattttgtctcgaccgttcaacgagttttttataatgactgagagccatgaagttagaagattcaaattcacaaattaagatttttacttttctggctaagtgatttactcagaaatcaaaagtttcgagtctcacgtttccccaaaataacaacatctccgagaattagtgaccaactttactagaacatagaaacagtctaagtgatgtccaaatatcacttaggcatcaaaaactacatcattgacacattttcctactctcccaacatccaggttgacaatacatgtcaacctaggcactggatgttaacatgggcgctcagatgtcaacctgggcgcccaaatgtcaacctaggtgttgggtcgagaacaaccttcaggaaaatggccataactcactgaataattgtccaattgacgcgatacaacttgcattttgaagttatttcaatgatatatcaagtcgtttctcacactttaatcacatttctaaagttattgacacaaagtttcaccttcaagagagttacaaatttaagctacagttttccccaaggttggtcctgcggacgcgacttaagctccaaaaattgacgaccgacctctg

SEQ ID NO: 371912 - DNA, 550 bp, Cannabis indica
tcgaacttagaatcgcaaatggaattacaaccgaaataggactacgaacaggactaggacctaaacagattcccgaacctagatcaaaacccaaacagcgacctgaacccgaactgagattaggacttgaacccgaacctagatcgggacccaaacccacacaataaccgggacctgaacccagaatcaggatagggacctgggaaacagaactaggaccgggacctagttcgggtccagggcttggaaaaaacctgtagttactgtttagatatgggccccagcactggacccgaacctaaactcagacacaaacatggaaccagactagggacacggaaccacggtcggaacctagaactgcagcccagtctcgatcccgaactcaaactcagaaatgggatctgggacctgaaccagaactagaccgagacccgtgacaatgatccagatcttaactcgggattcgggtaacggggtctggaacagaccagtagtcggtgtctagatctaggactcagacttggaccagaacccagacgaagaacca

SEQ ID NO: 371913 - DNA, 649 bp, Cannabis indica
cacatgctaaacccccaatcctatcaaaacccgctctcggagaggacttgttcctatacttggttgtctccgagaattcggttagtgcgaccttagtacaggaagaggaaaaaattcagcatcttgtgtaatatgtcagcaagcgcatgataggggtagagacacgatacccggtgatcgagaaactagttttttgcctcctaatggcctcgagaaagctgagaccttacttccaagctcacccaatcaaagtattaaccaaccacccgctccgacaagtcctacaaaaaccagaagcgtctaggagacttgtcaaatgggccatggagctaagccaatttgatctacactacatttctcgcacctccataaaagggtcggggctagcagacttcaacacagagtgccatgaagcagaggctaacgctaacatacctacaccacaagtccaggcatggaaagtattcgtagatggcgcctccaacaagaatgggtccggagcagggttttgcaatgatatccccaaacggactttgactccaggcagccttacggtttcaattcacagcttcaaacaatgaggctgaatacgaagcccttgttgggttttatgccctaaataaaactctttacaatctgattagttatc

SEQ ID NO: 371914 - DNA, 590 bp, Cannabis indica
ctggtacgtttcccttaggcttgccggtatgccgcttgcacaggatgtggcctagatcctccaagagacgttgtggtgcgccttggccatgagtctcaacacgagatgacacgggtagtcattcgtgggctagcttgcatgcatgcatgggacggatgcaccatgctggaaagggacagaggtctagtgtatgcaactagcttggtggctggtctcgagggcctgctaacatgcgtggaggcgtggagctttgaggattggtccatggacgtatgggagaccttgggcaacgagggagactgtccagatagtatcgaatgaggcatgatagaagcgttggcacattggctaggtgttggcattttgccacacatgctaccttggtcacgagtgacaaggtgagcgtcggtgttgggatttgcttatcatagtgagaacctatggacagtgcgagtatcttgactagagagcctcgatgcatggatgcactcatggatgcttgcgagcatgactcgacgggagttgttcgagagacgaaagtgtgcacgaggcacgcagtcgtgcgaaaaatgagcccattgttactcgga

SEQ ID NO: 371915 - DNA, 518 bp, Cannabis indica
gtaacatgatagggcccatccaaatcatttaacctgtgtgagcctatatgtttgttattgggcttagatgcatataggaagtcaatttaagttgggaaacttacaaaaatactgtttttttatcaaatattttcataaataccgggacacaacaaactttacatttttactgtccaagcccatttttatttcttttatactgcccaggcccaatatatttacttttatactgtaaacagtaacaaaacacaaacaacacctctccttcgtggttggggacgaacaaatcaacaccagaattatagaaacaccaggaaaaaaccataaaatctggcaaagagaaaaaattactaaatcaacaacaaattactgttttgtagtgttattttactgttgttttaatatggaaaaaaataccacgtaaatgaaatattatgaaaaatgacaggacatggaatctatactagttctcataaagagcaatggacaatgggaaaaagaacataattatttcaaga

SEQ ID NO: 371916 - DNA, 533 bp, Cannabis indica
ctacagaaaggaatcaagggcgagagatatgaatggaaggagtcataatattccgctgcacacaatgtaaggttttcttaaactcttacgtgtttatttcattgttttagaattcatattaggatgttattcaaacttattttgtagtaaatctagatcctagtaaaatatttctaacaaagagatcattatggtgttaaatgcttcaacgaataaccatccattagggggacgatgtctagcatctcgatgttatattgaaaacatattaaccatgtaggaccaataatgaagatcgaatatcctaataactaaagctcattattttaaagagttgtattttctttgatacttattttaatctatttattttaatatatatatatttaattaaaatttataaaattatgcttagatagatatgaaaataaaatgaattatttccatcttagtaataatttcaataaatatttagaaaattattcaatttaagttgtttcaaaattaatttaaattaatttacaactcaaatt

SEQ ID NO: 371917 - DNA, 974 bp, Cannabis indica
tccaaaaccaatcaggggaggtgcaacaaatctcaaccgtgtgtcgaaactgttacttcccaatggtcactggaacgtaaacaagctgaaagaaagctttgatcatgcaactgttgaagccatcttaaaagggggccacccctctggccttggtaccgacagatggatatggactcaaaatagtaatggagtgttttcttgtaagtcggcttatcttgttcaagccatggatagagctccccagtgcgtcgtggccccgaatctctggaacaagctctggaatagccaaatcctggaaagacataaggtcctgtggtggtgtattctgtctaatgcgcttcctacaagagctgtgatcaataaaagattccacattgaggatactagttgccctctttgtggatctagggaagaaactatggaacaccttttcctttcttgtgatgtggcctttcacctctggcgttcttctccttggggtttttatcccatttgcgatacgggaatccgggtttgggattaggttaagttcatctggggcctaaacagtagaggagttctagtgaaggatgcattcttgtatgcctccataatcgtggatacaatctggagggtgcggagtgaaaaagttcacaataattgccttgttgatgtgaaaaaatgtgttgatgatatatactttgtctatgctgatttgcatgattctttgttatctagtcctacttctcatctagaggaagtttggtcccctcccccgcgggattggattaagctgaattgtgatgtgaaagtggggtttgacaatatgtgtgttgcagttgtcgccaggaaccatctctgagtagtggttaaagttcagacggcgcgggtggatttctctgacgctctttgtggtgaagctgaggcatgctgccttgcgatttcgactgccttagagatgggctacaagtttattatagttgagaatgactcga

SEQ ID NO: 371918 - DNA, 568 bp, Cannabis indica
ggtacagtgattctatgtccagagactttagtggcatctattactattggaacatatacatgatcaagaataagttctattagtttactagtttgtataatatgcatattatatatatgtctaatcaaaatatatgtgttataaagattctgtgatgttttgaatataatctagagttcatagtaaaagatctttgaactgcatatattaataacttctctactcctatcagatcataagatctttattaaatcaaatcttaataattgtgtaagaaatataataaatgtaaaccacataaagacttgataaagtgacaaatataactttggtattgacatacaagttataaaatataaagctcaatttcattaaaaaaaaaaagcaactcataatgaaatgcttttaaagagaaaaatttaaattaatactctcaaaatatcacatgaattatctgcaataataatatgaaattagaaatataatttccaaactagattgttcaaaaaataaaataattaattcaaaataataaaatttgaagcttcatcttcaagcttggacaatc

SEQ ID NO: 371919 - DNA, 748 bp, Cannabis indica
agatcagcgacttttaaatcctccttcagaaaggggcctcttggccggtgtaagaacctttcatatgggctatccaagggtcatgccaaaccttagtatccttaccatccattattcgcctacaggcccccttgcgaataattgctcttgctttagtcacattcttccaaaaccacgagtccgaggctttcggcttacagtccaaaaagtgtcggcctttaagatatttagcttccaaaatccgacaacataaggattggtttcctgtcagaaggttccacccccatttagccaggaaagcctggttcatttcttttgatttccggaaccccagcccccctaaagacttggggaggcacagtttgtcccatgctttcaggtacagcccatgattacccttctcagagccccaccagaagtcacgaaccaaaccgtcaatcttcgtagctagacggttggaaagcttagtagtttgcatagcatacataggaagagaaaggcctaccgatttgataagtgtcgctcttcccgcttttgaaagagtcttagctttccaaccatgtaattttgaagtcaggttatccagaatgaagttaaaatcagcatccttttgtctcgatctgaaaagagggaggcctaaatacctgacatttccttccggagatccaatacccagcatagccttgataccttgtttcatgctgttgggggtattcttactaaagaaaatggaagtcttcattttatt

SEQ ID NO: 371920 - DNA, 560 bp, Cannabis indica
tgtaaaactacctcaattccttcacactcaagctccaagccttcaaacacaacttcccaacaatcaagcttgattcaagcaagctcccaagcaattattttttctcaattttgaactaggtttagcaagagagaaagagatagggttcggtaaggggaggcaataccaaaaatctttttttaaaaaaaatcaacctttatcaaaataacataaaggtcaaaatgaccattttgcccctagggctaattcacacataaccacacatacaagggtatttatgtcattcacacacaaatttaaacccaattaatttttcagattattcaccaataattaaaatgccaataattcaatcccaattgcatttcgagcccgaacccaattcggcccgaaatacctggttgtgactataccgtgctaatctgtcagaaaatacctgaaaaagacaacacagtcatattatataataacatagtcccataagcacattaataaattaatttcattattttacctttctcgggtcaaaattactaaaatgtccctggctcaccaacggg

SEQ ID NO: 371921 - DNA, 535 bp, Cannabis indica
ataacatacacggtagtaaatctagatcctggtaaaacatattccaacactaactagtgatgaaacatatgctagacaccaaaattcctcaaatgaacatatgctggtggtttattatgcagcaagtgatagggtgttaagtgctgtaacaagggtgtaggtgttcgattgattaactaaacagcagtgtgtataagataaggccaataggccaaggctatagaggattaaaaagccaaggcacgagccacatttacgatgtgttggtgttttctctcaacaactgaattttgttgaggtctttcaacacatgaattatactcttgaatacctttttgaacataaaaggatttgatattaagttcctttgcattatcataccttacagctttaatatttttagagaattgagtgaagacaaggttatagaattatgaaattaaatgttgcacatcagatttggattgcaacatgtaaatgttagaaatattttaccagaatctagatttactaacaagtatgtttcattaacatc

SEQ ID NO: 371922 - DNA, 528 bp, Cannabis indica
gcaggttcatgtctagtcctgaaaagagcattggaaagccatgaaatagcttatgagatacttaaaaggtacatctaagttgggattggtctaccaggggcaacaaacacatcagaacattgaagggttcacagatgaagattatgcgggggacagggacactagaaaatctacttcgacctactttttcttaacaggaggaaattgtactagttggaaagtacaattacaaccagtagtggcgttgtccactactgaatctgaatatatagctactacagaagctattaaagaggctctatggttaaaaggacttatggaagagctaaagttaatggaaaaggtgcatataatctactccgatagtcaaagcagcatctatttgtgcaaaaacccaatttttcataacaggacaaaacacattgagataaaatatcactttatcaaggataaagtttcacaaggacagatcgagataaacaaagtgcctactgaagtgaatccaacagacatgggcacaaaggttgt

SEQ ID NO: 371923 - DNA, 460 bp, Cannabis indica
gggtggcgtggctggtggcgtgggtgaggtggtcgttcactggtggtggtgtggaatggaggctgggttttggtgttgtggccgtgtatgcgtgtgagttttttttagggttctggtagtgagaaggaaatgaatgaatgtaatgtaattgtaaaatgtaaatttttatttatttaattattaatttaatatatatagatataaaaatagtaataaaaaaataaaaaaatatataatatatttataaacgggttggcgtgcgggttcgcgggttcaaccccaaacctggtacctctaaaatctcaaccatccaacccacccgaagggtaccgggttgaacccacccgcccgaaactttttaaatttttttttgcgggttcaccaattcgggttcggcgggttgctcgggttcgggtcaaaccctctcaaaatgttcagccctatgttccaccatatagac

SEQ ID NO: 371924 - DNA, 587 bp, Cannabis indica
aaaatagttctaatctattagtaaattaaaaatattaaattattaaattcaaagctgagaaagaatgagataatcaattaattgaaataattaacataacgaaaattaaattaagtattcatcaaaatataataaaatttattaattaattaaaaaataataagaaaaacaataatatatatatactagcaccattataacttcaaatttaaaagagtatcaatataaaatattgacaaaaaaattgcatgtactcatgttataactctcctgcaaatgatatgcaaactttataaaaattataatttacaagaatacataattaatcgtaatttttgtttaaatgatgaaaaaaataaacaattaaaaatatatttattctcccataaagaacaaattgctaaattaatagagtaataaaacaatttaattagaatggcaccaatgtagttaagttataatgttaagactaattattaggtataaataagtattattttaaaaaatgacacaatataaaaagagtgcaaaagagagtgtaaaataaaatataattagcacttctcatatatatgtgtgtatatata

SEQ ID NO: 371925 - DNA, 586 bp, Cannabis indica
attttcttcttgggtctacttcctccactgtttttgtacttcacaggaaccaacatataagctgaattgcgagaattgttaaagcccaacaccatgaatctcctctgcatgtttggttttgccaaatatttcttcactgggaactaaaatcaaacacttggggtgcaatttaatcaaccataataagtaaacacatctataatatatccgtagcaataaaccacattaaaatcaatgcaaacaagaatagataactaaaatataatcagtaaatgaatctcctcacctctgtgacaaagaattggtttttatttctcactttcaatcaatgttccaggaatataaagagaagtcaagaaaggcacaaatgtataaataatattaaataaattaatgaaacttgtttttgtttgggtctccataagggcccaattctacttggacagcccaattaaactagagagtgagtgaggcctgtttggtttcatgggtcaaagagttatattatggggagaagttgaaaatagccatttttttatacattaattaaatttacttctaaataaaatttaattcaaatatatct

SEQ ID NO: 371926 - DNA, 729 bp, Cannabis indica
tcctcgaagcaaccttcttatggtatttttatacactaaacgttaatagttgatagtgaaacatcaagtaccattaataatacaataccaaaaccctaacaaccttttcaaccaatatcacacatattttatcaaaatttactatcttcaaaattatagttacaccatacgtactatgtaaaaaagaaaaagaaaattattaagcgcaccatctccaaccacaaatatagtcttgcaccaacatcaaatataatatattttgttttcattttaatcacaacactaaaaattatatcaaaaataataattttttattaaaatatatttaacagaaaataaaccaatttctaagttttttatacacatatataaaaatataatatgaaaaaaatgcagtatagttttttttttctttcaatttttataattttatttacaaaaaatatgatcttttgatgtatttatatgttgtactcttgttagtttattttttatttttattatctgtatgttatttttatgtagtttctttttgttttcgtgttgtttttataaaatacagtaaaaatgtaattaaaaatttttaaacgtcaaaatatataaaaaaaataaaaaaattaatagtaattatctcttaactaatgttaatatataacttcttatatattttaggggaaattaccccactatactaacttttaactttttttttactttaatttactagtt

SEQ ID NO: 371927 - DNA, 511 bp, Cannabis indica
ctagagacagccacaaaaatgataaaactttcttaaaaaaaaaatctgatttgtagcatcagaattgggttttgcagtaacagatcagaaccagaaaagaaactttccaaactaaatcaagatcacaaatttggacttcaaacataccaaataaagtttatttgattagttctaataattaaaggctaaaactgaaaccatccattaaaaaaaaggaaagtcaagtttcccaaagttagacaactttccataagagaattctttctcttaaaagaaatttcctaaaccaaagagagaaccaaaccaaaacctagtcgaacactctagatttttacaaatgaaacactcttctcacaaagaaagatataaaaatatgagaatagaagagataaaatcgtttggctgctctctaggtcctatttatagaacatagcaaccctagagacagccacaaaaatgattttccagctgtacaaaactttcttaaaaaaattcctaatttgtagcatca

SEQ ID NO: 371928 - DNA, 368 bp, Cannabis indica
tatcatttttatgggggtgcaaatagaactccttataatattttcatttaaaatgttacccattttttgttagtgggttgccccaaaatacccctcacccctccactttaagttttagcacattaattttttatttaacttaaggggtataatggggacatcatctataaaaatgggtatatcttaaaaaatatgaaaataacggtaaaaaattaaaacatgtgaagtaaagtgggtatacaatgtaatttcctaaaaaaataacatttttgaatttaataaagggaaattttattcaccccaaaagtttttaaagatacatcattttaataatttttattttatataaaatttatatctttaattat

SEQ ID NO: 371929 - DNA, 589 bp, Cannabis indica
tcaagacccaatccagtagccacatccgagagttcgaccccagaggagggactcactctagtcgatcgcctttgatgaatcctaggataagactgcccctttttcctccctctcttcttcttctccgaactagcgttcccaggggttaaagtctgttttccttcagtaaacaccatagatcccccgtccaaggaagaggaagaagtcaaagattccacttgggccgagaaaagaacaggtgtcacactcccacaagccttcctctttttattattactacacggcccaacatcaataccagcaggtgaaatcaaagtctcaggttttccattagattgggccagcccagtggaaatggaagagcccagtaaaagctcagccaatttctctaccttatctgagttgggcctaggaaggataacatgctcaggatgttgatgaggtgtcctggacttgcaaatagctgcatggggcaaatcaaccatttgggccgcagttgggcccacattgggcattaaagaaaggataacatattcatcatcagggtttttttccaattgagtaataggatggttagagactacctcaa

SEQ ID NO: 371930 - DNA, 698 bp, Cannabis indica
gacttcacacattaggtacttacacaaattttgaaaaatataatataggtattattaccgttaaaaattaaacttaaatatttatgtcacaaattactctctacagatgaataacaaatttcaattataatattataattagctattaatgattgacttcagtacatatttttaattatatgtattgccattaattattttataaatatttattttatcagcaactatataaattatattttaatttttgtattaatttaatttacagtttaaaatactattaattggagcagttgggagaaatggaagcataataataggaatgagaatgagaattgaaataggaatggaatgaaataaaatttgaaatgcataaaaaattaatataaaaaatcattaaattttttctcatattacattggaattattttttcttccattcaaaatagaatagtcactctaccaaaatggtggaaagtgtattccattagaatgacattaatactttaacatgcaaccaaacaaaagaatcaatatgaaaattgttttttttctatttcattttattttattacctccaaccaaacaccacctaatattgtagtagatatagtattatccttttattaattgaccttattttaatcttcaggtaaatatagtaggaaatactggattctcaaatgagacaatgaaat

SEQ ID NO: 371931 - DNA, 830 bp, Cannabis indica
acccattaaaaatacacccatatatatacatttatatgtttcgtttctttgaagaaagctaattgtttcaagttacaacactaacatacattatgtggttacaaattacaatgtgatttcatttctaagattttcatgattattattattttgatttctacaatttatttgttgcttttttgtcaagcaaggtcaaggtggccttacacgtgtcgaaacgtctaatgtgttagtgttcgtatttatgtatacgtgtcatatttagactataacagcttttctttacgctacaatattacacctctctttttttcacaatatattcttatctctcacgaatattgttgctttatttattttttatattttagtctcaaaatgttctcactttcatcaacatataataggacaaatattattttaaattatggattgaattttttattttattaaataataaaataaatattatatttttaaaatagtgtaaatgagattttaaattagttttttgttataataaaaattaatatataataacttaatttagaaatgttataactaaattttaatcaaattaattatatttttttttgtatttattcatgttaaaaattattatcttaattatattaaaaaattatcaaaaattaaattaagagtagttctatttatatcattttattttatcgtttatagatgtttcattcaataatttttgcaaaacacagtttaaaatggtatttataaaatggttaattatgatttttgcctcctgaactttgacatgtactaaatattgccccctgaacttttaagatcgttaaaaa

SEQ ID NO: 371932 - DNA, 540 bp, Cannabis indica
ttgtacattacaaacttaataaaattataaaaggtttaacacacgtgcaaagcacgtgttaaccaactagtatagatatatacatgtattttccaatgtaatatgcattttactttttctaactatatatatcttttccgaaatagtacttaatattgcttttatttaagtttatgtatatggagaagaatatatttaaagcacacatatattctcttttgctacgtaggttccttttttttttttttttttaaacttaaaatttgaagtaaaaaaaataatgaatgtagaagaagattttcatccgggtggtaaagagtggtaagagattataacacgtctacaaggacttgaagatgattcagagagggaaactattaatgatggtgttgatcatgataaggaagtgatagaagatctttatccaaatgttaaagagtggaaagacataatggcacatttagatatctcaaaagaaccatgtgaaatcaaatgaaaaaataaaattaattaatataatatgatagaatttaatataaa

SEQ ID NO: 371933 - DNA, 719 bp, Cannabis indica
tttaggaggattagtattctatgttgatagtaattaggaaaacttgagataaatatgtatttatatagagatcataatattatttgtaaactaaatggtcgcaacttttgacatttttgtatttaagaaaatacaatcaaaagtcacttatataccaattataatatactaataatagtgtaagttataaaaagtaatataataatagaaagtacataatagtgtaagttataaaaattaaaagacacattaatcatttgataatatataaaaaattataaataaatgagaaaaatcaagaaattgagaaatcaaagaagagggtgaaaaactcatacaaattgccacctaaactccttagtgctttcctttatatatatattgattcttactcaaaatttatttattaaataaaaccttcacctgtacaatattttatagatgtgactcagggacaatggatctatattttgaagctctaataaatacttaattattatcgatctcatcaattgaataatctgatttattaattccattataactccactataaatatagaattacaatctttgacattgttgaattatatttacagaattcttacttatagtccattgatataatcaatataagcagtttgccctccaattattagttcataactagagttagtcaaaatactattttacccttctaattatctcttgattccttat

SEQ ID NO: 371934 - DNA, 854 bp, Cannabis indica
ataaaatatatttaaaaaattattctaatttaagttgccctgaaataaaatttccaacttaaatataattttctatctaattaaatttcctgaaaaaatatctaatatttaagtgtcatgaataaaatcaacttaaattttaactttctatttaattaaatgttaaaactagaaataaataattaagtgtcttgaattaaataaacttaattataattctaatttgatatttaagaaaaatattcgaatttaagttgatctaaaattagttttcaacttaaatatatttttctaattaattaaatattagaaaatataattttgttactagaaataactatctagaatatattttattaaactacgtctattttcctaaattaattttaaaataatctaatgaaaattaaattttatttattttaaaattaattatgttggtaatcaattttaaataggttaaactaatacaattatttaaataatgtaaatgaactttcatagttaggatggttcatgtgagtgagcgcttggttcagtatgtcgtacccactactatggccccttaactctcacataaggctaaaaaaagaggaatttaatctttaattaaataattgtaattaattgaaccaacccaatactaattgggccaaaataaaactatcaaggtgatatttttattttagcaaaccttgtctatttaaatcttaaatggacttcctatctgcatctaagcataataacaaacatataagctcacacaggacaaatgatttggatggccctattatgttactaggtttatgtaatacccgaaattaagaaaaggattagcaaaaccctaattagta

SEQ ID NO: 371935 - DNA, 319 bp, Cannabis indica
tttgtttttcatttttcattttctcattttctccttccattttccgttttcgtttctgctagggcaaaacactcatcttcattttccattttctttttcattttccattttctttttccattttccattttcgtttcagctgaggtaaaactcatattgtacattttcttcactttttttttgaagggaatgtggtgttagtccatttcgtgtacttaatagtctcattttgtctcaggtgtcgacggtgaggtcttcaaggtagttaccatttctgtgttgaggtatctctctctctctctctctctctctctctctc

SEQ ID NO: 371936 - DNA, 602 bp, Cannabis indica
ataaataataataataaataaaaaaagtatataaataaataaatgtatttataccgagcttagaaagagagaaagagacggacaggaggtggtggtggtccgatgtatgcgacgatgagtagagggagatcgacgggaggagggttgggtggagatcgatggatgagagagacaagaagaaagggagatcgagagagggaggaaggtggcgagagaggagggcaatggtgtggaggcgtgggtggggtttttgggagttaagattttcgttttagggtgtgggaaatggagaagaaatatgtgagaagatataggtgggcatgtgggaaatagaaaaaaagcaggtgggcacatgggaaatgtggcaagaagtaggtgatgattatttaattggacccttataggcgacgattttaaacggtcgcctatagtatgggcgacggttttaaacggtcgcctataagggtccattaaaaaatcgcattgtattaaaaaaagtcacctattttgtttactacgattttaaaccatcgacaatactaaatttttcctgacggttttaaatagttacttaatttttttagcgacggtcctcgaaaaaa

SEQ ID NO: 371937 - DNA, 452 bp, Cannabis indica
tgattaattggttaacatcccccctcaaacgaaaaggagtgtcacccatcttgagtttggaccgaagatagagatatcgatctgtggacagggactttgttaaggcatctgcaacttggtctatagatggaacataccgaatggatatttgtttagagaggatgagatctctaacaaaatgtaaatctatctcaatgtcctttgaccgtgcatggaacactagatttgcagcaatagcagctgcactttgattgtcaacccataatattggacattgagtagaagtaacatgtaactcagaaaggagtgaaactaaccatttgatttcagcagcggcattagctaaagccctgaactcactctcactactggagcgagcaaccacctgttgtttcttaacggaccatgacacaagattacccccaaaaaacatcacataaccccctgtactt

SEQ ID NO: 371938 - DNA, 941 bp, Cannabis indica
tacgatttttcataaaaacaacacgaaaacaacaaaaaaactacataaaagtaacatgaaaataacatcaaaaaaaaaaaaaaaaataacatacaaataacaaaaaatcaacaagagtacaacataaaaagatcgtatcttctgtaaataaaatcaaaaaatcgtaaaattgtttaaaatttcgtaaaaccgtatttttataatttttttattatttttgtatatttgtgaaataatccctataatttttaaaaagcccatagttatttttttttagaaaattattgctttttattggtaaaatttttaaattttacttttaaagttatatatatatttgcggtgttctataaagttgcaagaatacaataaaaaaaccacataaaagtaacatgaaaacaacaacataaataatatacaaacaacaaaaaatcaacaacaaaatacaagagtacaatataaaaatacattaaagaccgtattttataaaaataaaattttaaaaaccgtaaacaaatgtttaaaattccatacaactatatttttgtaattgttttattgtttttgtattttcttttaaattatcctttttttctgacaaagttgaacttgatagttatgttttttttataagaaactagagatgcacacaggacagagaattggcagggagtgctcccctgtccccatcatcgttaaggattttaatccctatccctacttattctccatcggggatggggcggggaatcccctaatgagggcgaggacgggataggaaatcccctaataaaaaaaataaattttttaataaaaattcaaatatataaaaatattaaactacataaaaattaaaatattacacattaattattattcaataaactaattattatccaaaataaaacttaaaattcataaaaaaaatatactaatatact

SEQ ID NO: 371939 - DNA, 521 bp, Cannabis indica
gtatttttataatatgcagtgcggtgcgatttaaaccgcatattaacaatataaaactgcaaactgcactgcaatgcacagtttaggaaaaattcaaaccgcgatcgcaccgcaaaaattttaaactgcaaatttttttgcaatgcggtgcgatttgagcagtttgatgaacacttctaagaatcatattattttatttacataaataggaaaggtaattagaatgctttaattttgacgaaattgccattattagaatatgtaattattttctgtttatagatttttaaagggaatattttctttttatttttaattaataaaattaaaattaaaataaactaagttaggaaagggaaaggtattgtgacagtcagtagtcccgtgatctgtaaggggaaataccgagtaaattttacaatcccacattgcctggggaaggtcaagtgagatgattctgaggttgtgtaggtatggaactacacagttgaagagggcttaaatggattgattggtagtac

SEQ ID NO: 371940 - DNA, 510 bp, Cannabis indica
tcacatcaaaacctagtttatccaattttagcattcccagttcccacttttcagattttgaattgggatcatagaatatgtagaaggtgatcaatcttaaacatgtaattaaacacaaatatggataaattcacaatgaagaaaggagaaatagcaataatcattaactaaaagtaatttcaatcaacattcatcatctccctaaataggagtttagttggtaaaatccataataacatccataatcaaaactaaaacagaaattaacatagaaattaagagtttaagaaagaactagttggtgattgcattctggattgccaccattgattcctctgcctccttctttcacttttgggcccaatttctcctcccttctaaaataggagccccttaaatagaaattagggttgctacctttgaaaaagtcaaaactgggcaaaaatctcgtatttcgcccctggtcgcgaccacataaagcctagtcgcaaccataggcaaaatacgaaa

SEQ ID NO: 371941 - DNA, 1451 bp, Cannabis indica
ccagaaaaaatccaagctctcctgagcatgcctttccccaagaagcacaaagatgtctagagtttaaccagaaaggttgctaccctgagccgttttatctctcggtccacggacaaatgcattcccttcttcaacatcttgaagaaatgtcaaaaatttgaatggtccgacgagtgcaaggaggcattcaaaaaactgaaagagcacatggctaagccaccaatcctatcgaagcccgttctcggagaagacttgttcctttacttggctgtctccgagaatgcggttagcgcggccttagtacgggaagaggagaaaactcagcatcccgtgtactatgtcagcaagtgcatgataggagcagagacgcgatacccggtgatcgaaaaactagttttttgcctcctgacggcctcgagaaagttgagaccgtacttccaagctcacccgatcaaggtactaaccaaccacccactccggcaagtcctacaaaagccaggggcatccggaaggctcctcaaatgggcaatggagttaagccaatttgatctacactacattccaagcatttccataaaagggcaggcattagcagacttcatcacagagtgcaatgaagctgacgctaccgcaaacatacccacaccaccagacccggtgtggaaggtattcatagatggcgcctccaacgagaacggatccggagcaggggttgcaatgatatccccgaacggacttcgactccaagcagccctacggtttgaattctcagcttccaacaatgaggccgaatacgaagccctgatagcagggctgagattagcaaaaaccgtgggggctaaaagagtagaagtctacagcgattcgcaactggtagtaaaccaggtgtcgggagaatatcagacgcgcggaagaaaaattggccgcatatgtggcgatagtccgggaactgctccacgagttcacggactataaagtagaaagaatccccagggaaaagaatgctcacgcggactgtctggctaagttagcttcagacagcgaaattgagaaactgggggtggtacctgtggaacgcttggcagagccaagcatcaaagtaaaaaatgccataacaacagttgagcaagagcccagctggatggttcccatcatcgaatacataacaaaaggtgagttgccccaagagaaggcactatccagaaggatacaatatcaagcgcaccgttatgtgatgatggacaaaattctctatcgaagaggactcagcatgccttatttaaggtgtgtatcggaccctgaagctaagcaaattatgctagaggtccatgaagggttctgtggagatcatacaggaggcccaagtctctcaaagaaaatactgagacaagggtacttctggccaacaatgaaaaaagattgcatagactacgtccagaaatgtgattcat

SEQ ID NO: 371942 - DNA, 1527 bp, Cannabis indica
aactgtattttttgcggtgtggtgcggtgcgggcggtttgagcggtttgggcggtttgatgaacacccctaatttttatgagttaataatggaagtggtagtaacggtgtaagagaattgtaacattaggtatttttgccaccaaaaataaacattaggtatttcagtgtataaaatcaaaaacattaggtatttatgccgcaatttaccctttttatttttaatgccaatatacataatctcggattgcggggctcgtttggtacgctgtataagggtcgtattttataaaataataaataacattatgtttggattaagtaatatattgtattaattattacgaccaaattttttaatacaatgtatgttgtattatttaatacataataaatggtccatattagcttgtattataatatttacaaaggatttagggtcaacaccaatctccgacctggacccggacccggacctggacccaaaaaacaatgttgaccccaattgttattgggagctactaatatagaaaacaatgtgtccaatgaattaaattattagtttatttttttggatattcatgtacgttacgattatttaacatatcctaaaaaattttaagaaattcagaataatttacaatatagaaaacaatgttcaaatagtctattttacaagcgtataaataaaatagtcacgcgtgcaacatattacttgaacgcaattgtcggtgtgtaaactttttcaaatttcttaaaattttgcaggatgtcttaaataagtataatttgcatgaccatgagaaaaaatttgactaaaaattattttggatacttaaatagattaagataacagataaagatgtatcggtgtatcccttttaaaggggtgtattatatctataactacaataaaaaccataaaactttagtcctccaataataatttactaaaaaaccctcttgattagtatactatgtttctctcatcatatataatgttgacttctatatgtacattacacaaacattatacacaataatcttattataaaaaacatatactatgtaattgtttattagtcaaaattaatctttttttaagcaaaaaataaataaaatagctaaaaaatcttaaaaagattttattctctaaaaaataaaagattaagatttttcatatcttataatatggtcaccgattctgtacttaaattctctctaaatctaactctaaaaaaaatacaaaatcactatataattacttttccactataatatagtaaataaataaaattatttattaattaaggaagaaatttaatattatattctctatttaagatatatagttaaagcttattacttttttttttgtaaaatgaaatgtctacttcattgaactttagcattcatcatacaaaagaattttaagatcattagggacaacaccctcatgaatgctacgatcagagaagaaccgagcacgcctagcaacaaagtcggcgacccgattagctgatcgtct

SEQ ID NO: 371943 - DNA, 745 bp, Cannabis indica
gccgaggctgaggctgaggctgagcaggtgactcctttgaagaggaagaagaaactcccggccacgcccaggcttgttgaacatgcacttcgcataagggagcccatttcacctgttcggccatctcatccctatgctggaaaagggaaggctgttatgtctgagatatcaggtgatgatggacttctgactttctgggcgggcagtcactctgcgttttacttcttttcagcttcttgaatttcatgctttgtatttttgctggtttgtgctaaccatactgtttttgttcagtgcagacatgtctcggcagatgattgacgctctgaggaagaggatgggaaaaaattctagcgcctcccctccgaccaagaagtctaagggcggataggggtcttcagagaagaggccttttggagaggttattaacctttccgaggagctgactgctgcgaatccttccacttccaaatgtgccaagtctaaggagtctgggccaccaacaactgggtccgaactcgtcaggaggatccctgagcgggtgcaggcaccgactccacccgtgcccgtgctgcctgaggccaagaatggcaaggaggtgatggctcataacatgaaccgactggttcctgaggtcggtgagcaactggctggtgctgacgacttatctctggatgtgttggtgggcggagtcttgaaggagctcaccagggttagccttttttgatacttcccttttaacttt

SEQ ID NO: 371944 - DNA, 507 bp, Cannabis indica
ttttgacattttgagaagtttgaaaatgtaggttcatagggaatacacatagggctgtatttttctgtttagaactgagtaattttagaagaaaaatagacctgaaatttgtataaccgtgaactttaggaagaacactttgaatattcgcaccttccttacttgtttaattctggaatactcgcgggtattcggatgaacacttcgaatactcgcatatctgtctcctttagattttcctagacactttatcatttttacccgttgtttagaacttacggttttattttgttgtgggaatactggttaagtctttcaaatggtgggtgtgtcaccgtattctaatgttcatgcgtgcgatcgcatgttccttgaagtactgtgatacacccagccatttgcgacatacgccagtgttctcagttcccataaaaccgtattcttcgactagtagatttgctcaaaactgtgggtgtttcccaataacttcagggtcatgctcaaaaa

SEQ ID NO: 371945 - DNA, 423 bp, Cannabis indica
tttgagtttccatttttggcaaacatccggtgggggcctctttctagcggttaggggacccccattcccttttttaacatcaggggtttggtttggggtctaactgctggattctttctttttttcagaacaaaaatatctacccctgcgtcaggatccaagtcttctaagaagggggcggctgctttggccaccctggaggaggtcatgaagggactggttgcccatgagaactacacttgtccttctaatggctgggaagcagatgaactctgctccaccctaatttacgctcatcagttggagaagatcgtgactgtagctggcattaagccatccgcgtctggggtctttcatcgcttatctcgggatgaagagacgcccaatcacaactacagggattttggagcctggagccagacc

SEQ ID NO: 371946 - DNA, 543 bp, Cannabis indica
caataataattatatttaaaaatatatcataaagagagttctgggttctgagttctaatctccaaagctcatactttagatttagttgggagagagagaccaagatcatagtgagtgtgtgtggagggatgtaaaaggagtatcactcttgaagtgattttcctcaatgtgagacatatttctttgtaattacatactgtgttgagttataatctttggctcattatattgtatactactgactattcctattaaataaagatccaccattcatccattactgagcatacatacttgtgttggatttctttcccgagccagtcttcagcaatttcatatcgttccttgcttcctctttgcacacgaacacttgtgctctttcgttaaattcattaatgtttcttactggacgaccttgtaaggcatcccacaactcgcccctagttgttgagagatcggttctgatcccttaaagagcggtaagctgaatactatcattccaatttctaacttttgcagctgctatgctgaagcgactcagat

SEQ ID NO: 371947 - DNA, 844 bp, Cannabis indica
aatagtgttctttctgctgtactggaagagtacgaatttttatgttagggccttgacccatgtcttattataggtagtagtgatgagataacaagccttaaacaacgagatttgaggtaaggatattagatagttttgtatatatttatctgcataaatttaaactctttatgtattggaatataatttatgatttgttattatgaatatgtatatggtacttagaatgtgcggtatggacacaatatgagtttgtgaactgttatgtagataatggttgttttgacttgtatatattgtatgttgtattcatatattgtacgctgtatgttgtaagttgtatgctaacgtctcaggtaatgtgagggaccatggtggggtatgatacagggtaaggccgtcgaatgtagagataccctaccctgcatttttctgagtcgtgtatgaaattgttatggtgggctatgatatgggataaggccgttgaatgtagatataccttactctacatttgtctgattcgtgtatgtcattgttatggtaaggtatgatacatgtagagataccttattccatagcaatggtaggactaaatgtgtccaggttattgtagggctaagttaggcccaggttgtatatgtagtggctacgatacgtcacattatggtaaaaacatgatttgattgaaataattattatatgttattgctatgattgtgctatgaatatggtgtgagggttgtgatctttacatatatgtaatggtttcatttagcataaatatatggtatatgatataactttccatatctagagttatttaaattacagttatgagctaagg

SEQ ID NO: 371948 - DNA, 618 bp, Cannabis indica
agtataccttatcgctgattatcatgccagcctaaatccagtgaactgacaaatcataagaattgaacttttgaacatataatcatgattattctactatgctgacgatactataatcatgaacaaatatatacatatttatatatgttctagacttaatagaatttatatattaaacataatcatgaaataaattatgtgaaccatgcaacataaaagtgatttctgatcttatattaattagtgaatctgattatattgaaatgagttttatttagggcacgaaacccaacatatgcccctattcataggaatataggttttttgttattttgttgagatcagtttaatatgtaaatgttcatgaaacgtggacaattctcacgttttatttaattccatatgggataatatttcataactgcttaacttgaactgccttttcttcttattcttttcgttggttgctatatgtaatccaaggttgcagtagatgattacatttaatctacttgaacgaataaatatcttctttttgactatgtattccgaggctgacatatgtctcgtcaatatcagttcaatagcttttatacttatttcgcttaagactataaa

SEQ ID NO: 371949 - DNA, 509 bp, Cannabis indica
aaaataatttttagaaacttgccataaaaaagttattagattattaccttattaattatttttagttcccatcaatgggtattacccattaaaaagtgttccatatatatatttatatatattttaaaaaaatagcaaaataactaaatataataaagaagttaatgaattaaaaatatacttatttcaaatctatttttttaaaaaaaattatataataataaaattatattatataaattttctagcatattaatttattgtattacaacaaataaatacaatttatcatcaaatatatacactatacatccaatagtattttatataaggatattggcggctaaaccatctgaactttacgttttgtaacacttaacaacaaaaaccaaatttttggtggcaaaacctactgaactcccattctgttttgctctgtacccctccgttcaaaaatcacagttaagtgctacagtgtattgtccacgtgtacacacttgtacacgtgg

SEQ ID NO: 371950 - DNA, 805 bp, Cannabis indica
agggttctggtttggcgattcttgttcatgttctaactttgggtccaatatctaggtctgggttcgggtttggttcttcgtcttggttctggtcctagtttgagtctcagatctagacaccgactactggtctattccaggccccgttaccccaatcccgagtcaagatctggatcactgtcacaggtctcggtctggttctggtttaggtcccaggtcccatttcttagtttgggattgggaacgagacttgcgtacggctctaggtcccgacattggttctgtgttcctagcctggttccatgtttgggtctgagttcaggttcgggatcgggtccctaatccaggtttgggtcggaatccttgtccagctcccaattcaggtctaggttgttttggagtcagggccctcgtctggttacggttcttgatgtacgtccaattttagttatgattccaagtccaagtcctagttccaatcctgttcaacttcctgttttggttctaattatgggtcacaaggtacgggtttgggtccacttttgggtttgggacacggctcaggtccgggtgtgggttcgggtccttgtcagtgttcgggtcgagggctgggtcccagatctagacatcgactatgggttttgtccatgccctgggtccagatcctaatcgcaatctcaagtccgagtcatgttccatttctagtgtcgggtcacgagctgtgtcctaggttcaggttcgggtccttgtcgggtactaagtctaggtcctagttctgtttcctaggtccatatcctgattctgg

SEQ ID NO: 371951 - DNA, 630 bp, Cannabis indica
ttcacaaaggcactaccaagaggaaagttcgagctattgcgagacatgatcggagttaccgaaatgtgtaccaaggaggagtgatgaaaagtgctacacatttctacacttttctagaaaattctagtattaactacacaaaactaagaaaattagagaaaactagaattacctagaaactatatttgtaagctaagaaacttagaaaattctagaatatcttagaaagttaaattgtaattaaataagaaaaatctagaaagttgtagtatcatccttagctccctataaataccaagcttgggttgaggagctagtgtaacaaaacaaccaacaccaaaaaaccaaagttccaaactatcaataaaactttactactttctcaaacaaccctctcttctaagccaaactcatttcttatactaaatcaacaactactcatcaacatcactacttcactacattaccacaacaaaccattaaccacatatccacctattccaaatctaaaccaatatacaaatttattatcaaaccatcatatatatactaggttgatgttacgtgcaatgaacatataattaattaggtgatgttaagtgcaatatattatgttaatttttttaattt

SEQ ID NO: 371952 - DNA, 912 bp, Cannabis indica
aacaaaaatatcttatttccctttttaaaataccatgattatagtaatcttattctaaataaggtcaaattacttaaaaggaatattttattaaaaaaatttaatttctgaccttaaatttaaaaataagataaaataatcaaattttaaagaaaataagaaaagaggtaagcaaaatttgattttaacctattttcaaattcaaattacactaatatctaaaattaattttgaaaaatcaaattaacttatttctgataattagatttgaaatatgaaaaataaaatcaaaatacaaaactacacaaaaaatcggaagttaattccatgaaatagcatgaaaaattgaagaaaacgaaaaaataaggcaggtggtgcggacagtatgcaaaacacactgtccgcgcgcgcaggagtggggaattgccgagtaaactcggcgcaagggtccccttgcatgatttccgcgcgcgtacaacggtgctcaccacctcgattttttccgattttcaaaaaattcataactaattcaaattaaatcaaaatcgagttctgtaaaaaaataaattgcttagaattttccaaactatccaaaaataaaaataattccagagacagaaaaaaaaaactatttttccaagaattcacaaacatcaatatgacacaccatgaaaccatccaaatcacaaacaaatcgttttaagtccaaatttcttgcaagcaaatcaattaccatggctctggtgccagttgttggaattaattttaccagaatcttagatctactcacaagtatgttgttttcttttaacaacctaaatatgaacttctgaaacgataaataaaaatacataaaagttaagaaaccttacagtgatggcagcgaaattatatgtctccttccactcagat

SEQ ID NO: 371953 - DNA, 627 bp, Cannabis indica
gcttgggggtagacttcaggtcgaagaaccaagcgacctcgtggggagaaggagcatcccatccctgagaagcgtagagcatgaagagagcggacaaatacttaactcccttcgggagaatcgcggtcgggcagagaccgaagagagcggcaaatacttatgcaagggcatcagcgccccttgctggccgtgagcccccgaccaggcgcagatccccttatcagggtttgtggcacgattgttgtgggcgggaatgtagcagtccagctcgcccaggtatccgtcctggtcgagagtgcggagacgtgccttcaaaatcttggacggaggacttacccacctcgtgcccaaggtaccctgcctcctgtgaggaaccacctcagcaaactcctcacagacgtagtgaacgccctcaaccaggacatccccgtcagcatcgactagtttcccggcctcattgtactccccaaaattttggggtccaatctcttcctctctctcagcagggggaggactgcccggacacgcaccgtccagctccacaaccacctggacctcagcgtccccctcacggtcctcctccattgggacccccaaatcctgttcggcgtcgggcagagtggcgag

SEQ ID NO: 371954 - DNA, 513 bp, Cannabis indica
attctcatagttcattattagaatgttatttatgcatttatttttgtctagatttttgaattggggtagactaacgccacgtttagtgctacatcaacaaatttgtttaaagaatttaagcaaaaatgcaactatatgcagatattttacaacgattttttatttgcaatgattttttatagttcaaagaaaatttttacaacaatgaaaaaatccaagaggcaaaaactctacatgggtcatagttcgggaggataaattcttagtgtgaatttcgctcttaggttatgtccaagcaaggaaagatattgtttgttaattagttaaactagctgtcatatttgggtttgagtattgtgctaggtataaataacttttctttgattttgttatgactaacactttacattgcagattatatcgtgttttttctcattctctttgttttctttgtgtatcaatcttcttgcaagaactccattgatgatgatttgaagttccaaagcaagatca

SEQ ID NO: 371955 - DNA, 1135 bp, Cannabis indica
gtagtacaattgagtgggagcgctaatcatagatatggaatctatagcttctatctggacatagaagtgaaacgatgatttccttcgagcttggctaaacagagataaatggttgagtactcatttcagtgattatattagttcactgaaatatcatttataggtggctaagtgttttaaggataaaatacattgaagggtgtaacggtaaattaatccctatgcaatgtagatcatctatagaggatcattgattattgggattataacaatggataattaatagcgtatctatatcgtggaacatatagagcgttctatgtaactgagagtgcaattccaagttctatggtggatgcaatgaggaattaataagttagtggatttacttggtaaattctagatctgcttattggaagctcggttatataggcccatggtccccatactagttgagacaaactgcttgtaagactcagttaattgattttagttaatcaattataattctaaaattagactatgtctagtttatgaatttttcactaagatatggcttgattgtgaagaaatagtgttttagggtttatttgttaattaagagactttatggagtctaattaataaatattataaatgacaattttatttgatagttattttaattattaaataaatagttttggcatttatagggttgaaagtgcaaaaagtggtatttgtgaaaaatagataaaatagttgagaaaaatgacaaaacccaaactaagtgtagggcccattatgtggccggccactaggtgggtattttactctatttttatcaattttttattcctaataattcaaccctaaccctattggaaaatagtataaaaggaaggctatggtctcattatccaactaatgcctccaaagctaaaaacctagcttttctctctaggttgatgagacctcttccttcttcttcctcttcaattttcgaaatactatagcctctcttcacaaacaatttcaagccttagtgattgagtgcatgcccacacatatcaagtaagtcctcaatcatagtgtgtaagactgtgaagaatccaaacacaaagaaggagattcgggctcagatctggtgatactc

SEQ ID NO: 371956 - DNA, 519 bp, Cannabis indica
aagaaggtgaagcttgctagagccgtcggaggtttagatctgcttcgaagggatttcgaatcttgctggtgaagggattcatctagcttactcaaggggatcttgagtgttggaatcgagggattcaagtttagatctataatcgtctaaggggaggcaaagtggtccttagtttgaggggaggattgttgggtgtacatccaaagtcccacattggctagaaatgggaaggatcttgggtatataaggatgaacactatctccattggaatgaggccttttgggaaggtgcccaaaaataaatccgtgagggcttggcccaaagcagacaatatcattccaatggagaaatagatggtgtccgacggtccttacaaagacaaccaagagtcaccgtcatgtgacaaaacaactaacgtgtccctcatgaatagttttgctatttgacaaacagttgttgtaaagcccgcttagttaatttggaaattatcagttggttatgtttaattatgaaattat

SEQ ID NO: 371957 - DNA, 569 bp, Cannabis indica
tctttattacaatatatttagcatggcatagcatttacacatgtataattactaggttaataaccctaggccattaaactgctcactttagggtaataaccctaatctcggtttctaatttataaccaatataatattcaatataaacaccaccgtgcatatctctacctgcaactactgtcttacctgttgtcccacaaaagaagagattccaaatccccgggtactcctgacgaggtgctagtaaacctagtcacaataccgtgatttacacaaaacggggttaacccccaattccacattcataaaatataatcatggcatttaaaatatagataattacatagagcttggaactagctttccaatgatataaagaactcccaaaacggagtctcgagtcaaaagttattgccaaaacaaaattcagccttttccccaatacagctaactcgaattccggatggaacaaccctgaaccaacagggattccggttgtctgggcagcaacaacacgaaaaatttcaatctttaagcccccataacctactcaaatcttccccaaacac

SEQ ID NO: 371958 - DNA, 561 bp, Cannabis indica
gaatacttcccagactgcaaatgatcagccgcccaatcccctgtcacgagttccactcgtgggcctagcggtaggcgggcagactatgtctagtaattcatcaggagaactcagacctgatggttccaactagatcaatggtgccattccacacgtcaaccaagcaaatcaatcactgaggcagccaagtgcttctatattcgaaaggtttggggcgacccatgacctaaggaatgatctgaatagaaggaggggagtagacgatcagaatgtcacgacgatcatgcagcccaaaacccgtactcaaattcccgctcaaaaagatgctgagcaggttagcccagccatacaggcacagctagacaaactaaaaaatatggttcacggcttggctgggcaaagaaacaatgatcttgagctggaccgagcacgtgaaactcctttctcacctgagattaatctcgtggcattggcccacaagtttaaaatgccaacatggaagatgtacataaggagagaagattccctttcccgtctcaagtacttcgaaatgcaaatgga

SEQ ID NO: 371959 - DNA, 1373 bp, Cannabis indica
ttaaaatgtaccaatttgaacctaaatcagctgggtttcgaagcagatgcaatgtttgcctcaggcttgcctatacaattaggagcagtattagaaataggagctttgtttcctcctctctacggtcctccaataaaatttttaaatgtctgaaggttgttaattgactcatggaagtcaaaagtcaacttgttcatgacataatttgatgtgaagggcaaaaaagctagagttaaactatttaagatcaaactcacttgagtttcttgatctataatagctccatgattctcagcttcctagaagtaacttgctatctagagcaggtgatcacgcatgttctaatgaggcttcatccgtgcattgataaaattcatggtcgcctcaaaacgagcttgatttgatgccatcccaaacagttcagttaattggttcataatatctacaactatgagagtgttagaaaaccttatcttcaaggtgtcgaccatgctagacagcataaagtaccgagctttattgttagcattctaccaacgctaaaacttctccttaatttccttggtcgcattctcacctggctgcttaggagcatcttcagttaacacaaacaaggcattttcacctatgagaacaatgttaatgttctctttcaatttgacaaagttagtgtaatatcccgataagtctaatggtaaataattagggtttatatttatattatgaattaatcaggtaataagtgggattatgatcctactaatttatttcagcataaaatttaaattttgctataagtgagtaaataatcgtaatttgttaattacggagatttatatagcatgtgtgaatgtaatatgagctatatgtggaataaaaatatttcaggttcggcgaccccggagactcaataagtggatatataagcgtaatttgttaattacggggatttatttgaaatacgtggatataatatgagttatttgtgaaataaaaatattttcaagtttggcgaccctggagacccgattggaggccaaaaatgtcacaacagttttagttagaaatattgatgagattattgggataagttgattttagaaatatcggggtattttagggtactcgaagttgaccaaataccctaaaaatagagatttcttagtggctaagaaataataagataattattaataataaagtttttattaatattattatattattattattattaatatattattatattattattattatattattataatattatttatatatattaacatatctgtaacagaacgaacgaacaaacgaacgaacgaacgaaattctcgttctctcccttcgacaaaaccttctccttg

SEQ ID NO: 371960 - DNA, 392 bp, Cannabis indica
ccattccgattccttcaatttccagatccgccccagcaagttcttcaagaattctctgctgtgatccactttcgaacatagccttccccgaagattgtatttggcaatcatggtggataggctatgatccacctcccaatcttcttcatccgagacatgaagtttattagtttttgctaacagttcctccattgtgatgacgagtacacaccagtccgatcaccggaatcccttcgtctccgagggaaaagaaaggcaggggttcaaacccagagccctagcagagagcgcgcgaaaaataagtaatttaaatgttattaagataaaaaaaaataatataaaagtatttagataccatttcattaataaaaaagtaataataataaataaat

SEQ ID NO: 371961 - DNA, 630 bp, Cannabis indica
aacccataatataaatataaaccttaattatttaccattacacttatcaggatattacaatcattccctctttatagaaatttcgttctcgaaatttatttaaactctcaaattattatttctatcttgctgtttttctatagcactttctcaactagtggaattgtctcatttcatagtacttcctttttctagtccaaaacctggacaatatatttttcctatataataaatttgtctgacatttaacatcgtcacaactcagaatatgggtccagtttgatacatattttctcagcatggagacatgaaacacattatatacttcagacaacgtaggagttaatgctagctaatagactacctaccctacttaatccagtgaacatgtatctaatatttctctcgtaccacacttattaaagtacctaaccagtggcacatttaattattacttttaaataaaaacctcataagggaagagattattctaagataatctaacctttatcaaatatgctcatgacatattcttaatattccattgatcttctaaagttacccacctttcaagaataaaacatcatactatttttgctttaatctccatggttctcaataactttcttt

SEQ ID NO: 371962 - DNA, 614 bp, Cannabis indica
acggtatatggatggattgtttttatataacgttgtttttgtaatattaatgtatataatgtatatatataaaaatttccctataataattataggctaattaaattttttgtcccaaaacttttaaggtcgttaaaaatgttcctgaactattgagattgttggattttaagattttttttttcaattttagtaaaaaaatttaacatggatgaaagtttaaggaccataatttagtacgtgttaaagttcgagggacataatttgatagatatcaaaatctgggtagcatgatttagtacataaacaatcactgaaataataaaattaaatgaaattagacaaaagttcttaaatccaacaatctcaatagttcaataggcatttttaacgacattaaaaattcagggatataatttgatacatatcaaagttcaggggcaaaaatcttaattagccataattatatgtaatttactcgagacgagagagtgttatgaccaacatgcttacatgatcgagcagttaattttaaaatattgagattgaaagttcgtgtgtaagggccttattcattccttcagttatgctactactagagagagagagagaga

SEQ ID NO: 371963 - DNA, 526 bp, Cannabis indica
ctttaatataaaattgctaagtacgtgtgtgattttgattcaaatcacttatgtagatagacatgtagtaaaggtactatatataattagattatgcatgactgaaccgatatgtaataaacatctttcattaacgtgtcatttaccatgaaagagttattcatatcacaataatgatcattagtagattaacttgaattctaagtatacatgaactcgtatttatgttcattgagttattcgattcactcattaaagtttcttagagaagatgattcttgcaacttctattttgggagcttaaacaatatgagtggctaggaacatgttatacaatagtggaatccaagctttcttaacgaattgaatattagttcccttatagtgttaactttgggagtgttatcagttggatttaaatctataataagttatagattaggaataaatagataattagaaggataaaatgatattttgaccaactctaattatgaactaataattggagggcgaactacttata

SEQ ID NO: 371964 - DNA, 323 bp, Cannabis indica
atacaatacgacacttatatggtttaccaaacgagctcataatgtattaatttatatttaattatgtttaattttataattattatcaaaattttaggcttaggactttggaggcccaagccttcttagtacaggactgaccctaattttaagaatgatattgatatgtgcacataaaatatactataacactataatactctataggggtgtgtaaaaattgatccaatctaatgataaccggctgatctaattataatcgactgctaaacattagatatccaattgtgatcggatcaaattgaatattatttttaaatatc

SEQ ID NO: 371965 - DNA, 809 bp, Cannabis indica
ctaacaacactataatcatgaacaaatacatatattctggacctaatagaatttataatcatgaaataaatcatgtgaaccatacaacgaaaaatgatttctgatctttattaattagatctgactatattgaaatgggttttatttagggcacaaaacccaacaggaagctcataaaataagataaccttaactctcgcctaccgggacaacgttgaattcttattttgattgaataaaaggttgctaaaatggtgtccattttagatgagctgactactctattcaactaatgttatctttgactctcgcctaccgggacactgtatttcattatgttggaaaccttggaaaataataaatatgtttagttttggtatttttgcaaacatatttgctttacttgttattttaaaaaaacttgtgtatgaatttagtgaaccaataatttagttctgtttattgatatttgtagtgtcaaaatgtacaacccacaccccaatcctcatctagaatatgcctttaggaatgaactccaaagtgtgaagatgatcctggtcaaagtatcacttcacacttgctcatgattaacatgaaattccagaaagcagttatgctgggaattgttttatctggagagcaaagatttcattttgttctcaacagcctatcacctgagtttaaccaattcattgtgaacaattggaacacgtccgacaaagacaagctacacggtgaattgcgtgcttatgaacagacattgacacttgcatggagatccttctccagtaatgcagataagggcaaaa

SEQ ID NO: 371966 - DNA, 215 bp, Cannabis indica
ttttgtattccacatggaggaggtggtcctattggtgtgaagaaacacttaggcaccatattttccttctcatccagtggtaattataacatttttccattgagaatattttgttttctcctggtcacatttttaacgagcttagtttttataataaaggtacttaccggtggcattccatttaaaatattcagttttacctctcagaaccattt

SEQ ID NO: 371967 - DNA, 513 bp, Cannabis indica
ttttttttttcttaaacttcaaatctaaatcttgggggttgtttttttttttagttttttaagaattaaactaatttgggttttgttgtgtttacctctattttttgggggacaatcttctgtaaatcttgttctttgattatccttcgatttaacaaaaactcttcgccagatttaatgattttttcttggttatctccgactccggcccgtccccaaacacgaagcagtccctttttttgtgttttttactgttcacaatataaaagttaagttattgggcttggggagtataaaagaaaagaaaacggacttggacagtaaaaaagttgtatttgccgtgttgcggtatatttgtaaagttttggtcaaaaaacagtatatatgtaaatttccctttatttaatggttaaattcttctcctttgggcattgtgtgagagttagggggccaatagtagtgggtaagacatactgaacccagccctccctcacatgaaccaccccaattgtg

SEQ ID NO: 371968 - DNA, 1057 bp, Cannabis indica
atttcaaaatattctaatttaagttgatccaaaatcaatttgaaaaattaattttcaacttaaaaatattttctacgaaaactcctataattaagtatctagaataatctaattagttataacttctttatttaattaaatacaaaaaaatacatatagtttatcttgaatatatttcattaaactaagtgtatttttcttaaattaatttcaaaataatctaatggaaaaaaatttcatattttttaaaattaattatgttgctaataaattttattaggttaaactagtgatattaacctattataattattcaatcaaggcaaatggaccttcacaatttgggttattcatgtgagggagggcttggatcagtatgtggtacccactactatggccccctaactctcacacaaggtccaaaaggataggaatttaaccttaattaaacaactgtaattcattgaataagcccaatactaattggacctaaataaaaactatcaaatgtgacattttaattttagcaacctagtccattttaattatcaaaattaaatgggctcccaatattcatctagacccaaggcaagcatataggcacaagcacacacttctttggatggatcctatcatgttactagttttataaacagatgaaagaagattacaaaatttacatgttacaaattatttatttgacctattgataattgaactatgggtcaaaatcagatcattacatctgtcaataagttaaccacatcaatttagatcaaacaataataggttttataaaacaagtttgaataataaacaatatataaaacacacacatgcaacaaattagatagttggatataggatttatttaatttaaagtaattaattaaattaaattaatttcaaaaaatctaaataattaaaatattattttcaaaattgttaacgcagattttcgttaaccaaatatgagcctaacagtgataatctcacatagaaaaataaaaacagtaaaggaaaaagtatagacacaaaggattttttacgtggtttt

SEQ ID NO: 371969 - DNA, 865 bp, Cannabis indica
cgccaatttcatcgctcagagtagcttgaattgcttcaattcccaatttctcacccttcttcttggtagtcttgatagcagatctaggtttcccatggttttttgaccttgtttttagccatgacaccagcttctcagctgcaagagcaagaaccctagatagtacactattaacataatatatacataaataaatcatttcatacacatttataaatttatttgcacttcattattattttattttcttacatgtctcactatacaaaaaaaaagcaactctacttatctttttacatacacataacactagcaaaactcatatagtatctctttacatacacaataaaaaataataagaaaatataaaaaaactaatacactgaatgaaaatgacaactcaaggatttcttgttttactacaaaaaattgctaattagtgataactttttagtcacaatataaattttttgtgattacttgagacttttagtgacaacaaaaagttacttgtgactaaaatatagtatttagttacaagttgtaactaatttagttttagtcacaacaaatattgtgactaaaaacacatttattatagttaaatccccatgtcgcgataataatggagctacgtctactttgagtgtttatttatcacgagataataattacagaaaaatactaagtgtttaagctcaggttcctagagagagaaactaaaagcgagatattaagtgtttaagctctggattctagagagagaaactagagagagagagctctgaccttgtgggtagttttttgaatgtgaaaaataattaagagagctctccttttatatgtgaaggaggcccacgaaaat

SEQ ID NO: 371970 - DNA, 660 bp, Cannabis indica
gtaagaaagagaagtacttggccggtttaaatgtgaagatcaggtatgatctggtgatcaccactaatgaagcaacatcctatgctgaaatggttgagaaagccctgcgggctgagggtgctgtgaaattccttcaggagccccgagtgactccgagtgttggtgggacccccacccttcctactgttatttatggtagggatggtagtgattccaccactgatcagaaaaggaaagttaccccagcatctggtggctcgggcaaagtgagcggttctgtgggaaccagggtagaggtggacaccagggttactcttaccctgagtgcccacgttgcaagaaacattatccggaagagtgtaaccggaagacatgctctctgtgtggcatggtggggcattttaagaaagattgccctcaggcaaaaaggaagaactgaaagcagaggtaaaacctgttcctgctcgggtgtttgccatcagccaagttgatgctacagccagtccttctgtcgtgacagatcagctttccgtcaacaactccttatttactgtattatttgattcgggagctacacgctcatatgtggctacacgaatgattgatcttttgggtaggccttgtgatattttagtaagagggtttggaaccctaatgcct

SEQ ID NO: 371971 - DNA, 602 bp, Cannabis indica
ctatcgttgccagtgatgcccataaaattcaagattctagtgatcacagttagcaactgctcgactttcatgacatcaggacctcccagaaaaactagaggtgcttgcttacggaacctttcatacagagtttccatccggttcactgcagctacaggttctatctgcacagcaggggcaggagctactggtatttctggagcaaggattgcaggagcaccctactatctcaaccgccaaatatcttcatcttgttcattaattctggcttgcaattatgcaaacctgttttcccaatcatgggcagcttgggcagcctatggcgggttagcatcaccccggccacgtgccctacctttgggacctctacctcggccacggatattaaggggaatctgagcttcctgaccaccattggatccaaccgaattgcctgggctcctggtgttttgcctggcgtccatactaattagaacagcctgcgtaactaagagctagtctggtcagatcgtgatcaagtaacaacttactaattgccgcttatttggaaattaaaaacatgcgcctattctactatcaggctactaacatgcttcctaaca

SEQ ID NO: 371972 - DNA, 508 bp, Cannabis indica
tacaaatcaatacaaaaattgatatagcataaaaaaaatcaattgtgaatattaatatgtgtaaataaaacacaaaattattgctaacaaaagtaacttaaaaaaatgatatagatagatcgtgaaaaacgattttcctatacatagaaaactgaaaaaagaaaagaaaaaaattgatagcaagaagagaggatgacaaaaaaataattaggtatgttgttattagaacataattaagtgattcataaatatgagagaagaggggatgatatatattcgtatatgattatttgagttacagttaggttgagatatttttgtttttttaatttatagattaatgctttaataaaatattaaaattgagagaattaaggagagaaaagaagaatagtttttagactgccacatcaccacctcatattttttttggatatatattgatgattgatgattgattgattttattatatataaataatattttattattttattaaatataaat

SEQ ID NO: 371973 - DNA, 633 bp, Cannabis indica
aaaactattgcaacccgtgtatagagctgtgggtttaaaaaatatgttgcttcattgaaatacttattttccctcctttataaatgtactatataagtaggaccactaatttttatttgtcagttgtcttctttaattttcaagtggtgtggaggagagctttgtgtggtgaaaagctaagaagtctctcttattggtaagtatttctagtttttccttcactatttagaatattattttattcttggtgttcttgatatttttggtgttcatggaataatgtattattcataatcttagatgtgtagtgtttgtatgctttgattcgaatttgtaacaaatagtagaatttttgtgttttgaacttatccatggcttgcatagtatgaccatagaatttttgtatagaagtaacaagaattttttgataagcatagtgggtgtggtatgaccgtaggattttgtatgagcttgatgcataatacgtccactaaaattttaatgcaagcatgatgcgtagcatggatgtaatatttttatatgatgcgtagtatgatcgttggatatcatagcatatatattttgagttttcatagatcattaaattttatctagtgtttgtgaccatactct

SEQ ID NO: 371974 - DNA, 642 bp, Cannabis indica
tttgggttcaggtccgaatgtctatctaggtctagatcaggcttcgggtgtgggttcgcctcctgggtctttgtctaggttcggtccgagtcccaagttccaataccgatttgagtttggattcaattttgggtctacgtccttggttctgatcatggtctgggttcgagtttgggtctgggtcctggtctagctttgggtctgattctaggtgtgggtttgactttgggtccgagtctgtgtctgaatttgtctctaggtgtgtaccccaatctaggtctaggttcggttcaggtccatgttcaggtctcgactgcgggtccaagtttgggtgtgggtcaggatctcggtccagatctaggtccaccatttcgatcccaatcttggtaattgtccgtgtccaggtttttatccggatccgtatctaggtccaagtctgtgtttgggatcggttcccacatttaggttcaggttcgagtctcagttccggtctaggtacacgaccgtgttcgggcccgtgttccagtctcagtttgggtctgaggctaggtctgtgtttggttctaggtgtgggtccgggtcctggtcacgttcctagtcttgttccagggtcctggttcagcgtattcttgttctaggttc

SEQ ID NO: 371975 - DNA, 400 bp, Cannabis indica
ctttacaattggatcatatggtgtgaaagcaggtttacagtcaaagtaattatatttcttgaaaatcttctcaatgtaatgagattgatccaaagaatttcccttttcagacctagtcatcttaataccaagaattacatcagcttctccgaggtccttcatatcaaagttagcacacaataatgatttcacagcattaacagcatggatatttgaaccaaatataagcaaatcatccacatataggcaaataattgtgcaaatgtcattatgagatttatagtaaatacatttgtcactttcattcactttgaaaccatctgagataactaaattgtcaaacttctcatgccattacttaggtgcctgcttaagactatacaaagatttatctaacttg

SEQ ID NO: 371976 - DNA, 697 bp, Cannabis indica
acatctgatcttcgagtaagtctctggtttcttttatgcttatttttgcatgtttatatgtcaactgcatcctctactttgttgtagaaaaatgttttggaaccctaggcccagaaacctttgcgattctcctttatcatgtcttcgagagtttttacaatcataacatttgtttccgaactgcgtaacgtctgtcttccatcttgcttactctaagcttcatgaacttttttgccctaactcgagaaaattttgacttcttgagttctgacttttcttcaaacataatcttctttaatctgttgagtactcctagttggcatatttgcttaggacaacgacatcagatcgactaggacatgcttcaacttctgcacgaggatgaacctcgtctttgttctagtcttccttcctctagcgaagaacattcttcaaaccctgtacccagccatgaaatgatggctcgtacaaagaaaactgcgcgtctagctgacgcgtctgacccccaagtggctcgacacgccactctgcccagcaccgaataggatccaaccgtctagatggaggaggatcatgaaagggacgctaaggtctaggagattgaggggcaagacgatgtacgtcctaacagttcctccgaggaggaggaagaggcagaggttgcacccccgaaactatcgggagtacaacgaggctg

SEQ ID NO: 371977 - DNA, 636 bp, Cannabis indica
aactactgaatgacataaaatgcatcactgaattcaataaataacagcataataattatttaaatcgctataaataatttcataattaatcaagattaactgctaatttccaaattaactaagcgggctttacactaaacaactcaaaaatggaaagaactagggttcccaatttttgcccaaccggtagaccggttctacaaccagaattccggttctgggaggaacccagaactccaaccggaattccggttcctacaggccatcctgaaccggaattcaagttcagtgcaggaatttttgaaaattccataactcgaccaaatcaactccaaactaattcaaactttccagacctgctctaaataccccaaataacagttcaaaagcaataaaacaacccagtaagcacagatacaaaaattgccattaatgctccatgctttgagttcaaaactcaagcttggttaaacaccactaacatgcgtcaaaaccagcttgaatctactcaaatatgcataaataagcctcagaaaataacagcaatcaactataacaagcacagcaacagatttatcatttctccagaaaaaaaaaatcctaagttttgagttaaacttccaaacttgaataaaa

SEQ ID NO: 371978 - DNA, 606 bp, Cannabis indica
tgaatgattgtttatggatttttttattcatcagtttcttttttctttcttttcaattaatgattatgttccattttaagttctggaaatgccgtggttgttaagttactttttgtgtgtgaggatgccaacacggtcagagaaaaaagagtgctataaataatgacgggtatatatattatatattttcgttcaatttaaaaaaaaaataaaaaatccatacaaaacttctgttagacaattttcatttcacaaaaatataaaataaaactgtgaaattagtaatccacacaaataaatcagccatgatatattaatgattgaaattaattaacttaaattacacatacattgctagtcatacaaacaattaataattaaaacagcattcatttcgcaaaaataaaaaataaaactgtgaaattataatctacaaataaatcggccatgatatattaatgatttaaattaattaacttaaattattactacatacattgctatatagtcatacaaagagaatggggcgttaacactttctataagtgacgcctcattatagtgaagatatttcttaagttatattaaacttgatatttttttacc

SEQ ID NO: 371979 - DNA, 536 bp, Cannabis indica
taggtcccgaccctggttctgtgtctctagtatggttccatgtttgagtctgagttcaggttcgggttcgggtcctgagtccaggtttgggtttggaaccgggtccggctcctaattcgggtctaggtcttatttggagttcgggtcctggtccggttatggttcttgatctaggtccaatttcagttatgattcctagtctaagtcctagttccagtccggtcaacttcaggttttggttccaatttttgttcacaggttacgggttcaggtctgggtgtgggttcgggacttggttcaggtctgggtgtgggttcgggacctcgtcagggttcgtgtacagggcagggtcccaaatccagacacagactacgggttttatccaagccgtgggtcaaaatctggataccaatctcaggtcccagtctggttccatttctggtttcaactcacgttctgggtcctatgttcaagttcgagtctgggtcgggtactaggacccggtcctagttatgtttcccaagtccctatcctta

SEQ ID NO: 371980 - DNA, 818 bp, Cannabis indica
aaagaacatgaataatactcctgagttgagcctaagcatatcaggatttgaattcttttaatcttaagatcaactactgttattgatttgaaaagatatatataacggtaagtttgtaatatcttgacttagttgcaatatcggtccagtccaacttatactccatacattcgaaactagtatcactactacaaaaatcataatttgcgtcggtcaacacgacggtcaacatcgaggactgacgcaaaaaataagggctgagttattgcgtcagtttttaatagatgcaaacaattagtagtttgcgtcgattgtatatccgacgctaaaatataaactgatggcaaatgtgaatttttttaaaaaaaatatttgttttattcgtctgttaataactgacgcattaaagttgagcatcttttattaattgacacaaacttgctaaatatttacaaaatccctaattctattcaaactttcattttacaaaaacacatctcgctgctctattctctctctctctctctctctctctctctctctctctctccgccctaaccccaaaccccatgaatggcgatcaatgctcgccccaaaccccgctgctcgccccgatccctcttctctaagttctggtcaacgacgcaacactccaccccaatcccagctctcctcccgctcccgttctcttctctgttcgggccaagcttggcccctaacattgtcgtttctgctcaggccatgctcgcacaaaataaccctatatattcaggtatatttatttatttttaaaaattaaaaattctggttgaaaatat

SEQ ID NO: 371981 - DNA, 1080 bp, Cannabis indica
ggtggtggtggagttcatggtgtgcattttggttagggttttttttaattttaaagaatttttttttatttttatttttaaataattatttattataattttaatattagttacgcggaccaataaaattgtgccacgtgtacattgtgtacacacagacattccaccataacagttaacaactaaaaatggatggaaatattaaactgctaacaaaacacgagtttagggagttttaccaccaaaattgtagaattggcagttagttgcaaaaaacctggtcacttaaggaggttatgccgcaaattactttatttaaaattaattatgatgtagtttttaagagttaatttgcgtcgttagattaaatcaaagactataaattactatccttattaataggtattttactcaatctctattgtaatagctcccattttatgtatattgtatctatgttaaaaaatattattttaatagtgcaaaaaaatgaaaaagtaatattaatttaatgatgtagagaaaaatataaagaaattgatgtatgttgtaatgtaaaattatgttgtgaaatagagaaaataaaattttgatgatgtattttaaatgataagtgtagctgttggagtgctcttaggcactaatagtatctagtaccatttagagttatcaccctgtaaatagttagtgatataatacttattaaattaattatgtgggaatagatatttagttacgctattactttacgtgggagaattgctatattattgatgtccaataataaatctctttatgtggtgctacctttgtgtttttagatttgttttttcttttttcttagctatcttagagcatctccaatagtagtatttttaaggatgttaaaaatttgctcattatctaaaaatataatattttattttatttttcttccacattattttttgcactcttacttttaaaaatactttaatgtatagcactctttaaaaatgctataattatgatctcgcacattattatttaatatagggtgattctataatgcacccccttaaaagggatgtactggtgcac

SEQ ID NO: 371982 - DNA, 654 bp, Cannabis indica
caccacggctcctctcttctcgaaaatccataaatcccttatcagtatatggacattaatctcttgaacacagatttaggttcagcctctatggaaaataaaattaagcacataacaacgtactaagaactatgagataaaaaaaataagtgttaccaaacgtaacctaaatttttcttttaaaatctcgatagttgattttctcctttgttaatagtatatatttaaaagttgaaactatttgatttaattaggaatttttacttatttggcaccctctcttttatctaaatataggtttagtactttgtattttcaataatgcttattagtactttatagttttaatgtttggattatattttaccaagacatagatttactaacaagtatgtttattaacatcctaaatatgaatttccaaaacaatagaattttaaacacatataaagtttgagtaaccttacattgattgcagcggaatataatgactgctcccactcacatctctaatccttgttcctttctgtcgcagagtattaccaagatctgagcctgattctccttcaggtgtttggaatctttacagtcttacatactatgattgagtactagatttgttatgggtgggcatgcactcaatcactaatgctc

SEQ ID NO: 371983 - DNA, 596 bp, Cannabis indica
ccataagggtgaggtggtttgaagcgaagcacagtggacaaggtaatactgcgttgtggcactacttttgtattataagagtactgtggtactccatgtgcctcacagagatcggttataattccagcaagcctaagtccaccaccacaagagccctcaaccatcatatcaaatgtcactctaacgatgtcccccacattcaagttgtaacctttcataattccatagacaaacttaatcctgtcaatctgagcatcagaataatgtttgttcgggaccaaccttgcactaattaagtacagccatgccttggctaccgggttgagttcacaccgatacaattgacacggttctccatcaaattcatgaaacctaaggcctggataccctagggtttcagcgatgtcctcataattcaaactctttgcccgaagttgctgcttcaatggctgctcttctaaagtgaaggttggtagatcatacagagcatgaattgcggctgtggaagcacgcactttaacccccctaaccctcactttgtcatcctctcttctggccagttggctaggaatttctaaagctaaggtttggttgct

SEQ ID NO: 371984 - DNA, 673 bp, Cannabis indica
gtaaataaatacctaaatttaatgtaagaaatttaactttgatacataaaaattaacctctataattccaacttcaaaatcacacttaaacaaataaaagttaaatcaaaacaaaaaaatcaagaacaaaaaatcagcaaacacattgaaccagaaaaatataacacagatgaatctaaatggctgtcagacacaataacagaagacatttatactggttccgatcctaaattcaatgtgaacttattcatactcgcgtttgaaagtattgccaccaatctttattgataatgagaataagagatatcaatctcaggagttacaaggaaataatcacagtaagtcatccatggtgtaatcccttaacaatcattagctcactaacccgagccaacataatcaacaatgttactcaatacaatttcccaatccaagcactctctctcttagatatctctttccatttctcactctaacttctctctctactgtattgtgtctctcttttattcttcttgttattctctcgtgaaatgagatgaatagtccactttatataggtcaagggacccaatatcattgttgtcatatttgatagttaagttagttaaagactaactaactaaccgaatgcaagttgtgggtttaaggaataataccacaaatttcacct

SEQ ID NO: 371985 - DNA, 681 bp, Cannabis indica
tagacgattcaagatgttccggaaagataaaagagagatctagaacttttatgttttgactttttccaaaatccaatcagaagacagtcgaattcaggcttgaagtttcagctttattttcttgcacagttttctctattttaaatatcatgatatttttatctttttcccatctttttctctgatatttttctaatcttcttctattttaaatctgcaaaaataaaagataacaagcgtaaaaatgctccaaacacgattaaaactcaattaaaaatatactaaacttaatctaaaattaatactaaaaataacctaacactcgttgtcagctccggccagctgctcattcacctcatgaaccaaccaattcatgtagtgtgagcatctccttgcctcttttagtgtttgggtgcagtgattgaggtggagtaggagcctggatttccttcgactgttcgatcctgtccaaacttcctccttgagagactttggacttagcaacttcttgggcagaagggtccacaacggttagctcctcggaaagatcgataatagcttcggccggtgccttctctctggatggggtcgtctcaccgcccctagacttcttggcaggaggagatgagattgagcttcctgccactctcttcttcaaagcttcaagcatcttctgagaca

SEQ ID NO: 371986 - DNA, 479 bp, Cannabis indica
ggtactttgcttcagatccgggtgtgggtttgggtccttgtaagtgttctggtctagggcggggtcccaaatccagacactgactacgggttttgtctaagccctgggtctagatccggatcccaatctcgggtcggagtcttgagatgggtcctaggttcaagttcaggtatgggtcgggtactaggtcccgatcctagttctatttccctggtctctatcctgattatgggtccaagtcccgattatggtatgggtttgggtcccgagtgtgggtccaagtttgggtcttggtcaagatctcggtccagatctaagtccagcatttcgatcccagtttgggtcttggtccgagtccaggttcgtatccggatccctaactaggtccaactctgtgttttaaattgggtccaagattcaggtccaggttcgtgtctcagttccagtctaggtacacgaccgtgtccgggcccgagttc

SEQ ID NO: 371987 - DNA, 265 bp, Cannabis indica
atagtgtattggtatattttagcatacttatgaaaaatgcttcctctaatgatattgtaaaaattgtgctaaatttagcacatgctaaaagttagtttaaatttggtacaatatatagcatcgtgtaactttaagtctacaataaatgttactttttcatttactataataccactacactaattattgtgttttattgacttttactaaactttatattatttatttaccatattaccattataaataataaaacaataaaaaa

SEQ ID NO: 371988 - DNA, 924 bp, Cannabis indica
gtttgggatcgggtcccagatttagggttcgggtctcagttctgttttgggtacacgaccgtgtccagacccgagttcaagtctcagtttgggtccgagggtaggtctttgttcggttcttggtcttggtccttgtcctggtcacagtcctagtcttgttctggggtctttaatcagcgactcttgttcaggttctaattttgggtcccaggtctaggttagggttcgggtttggttcttcgtctgggttctggcccttgtctgagtcccaaatctagacaccgactactggtctgttcaaggccccgttaaccgaatctcgagtcatgatctggatcactgtcacgggtctgggtatggttctggttcaggtcccaggtcccatttctgagtttgggttcggaatcgagactctggtttgggtctaggacccaaccctggttctgtgtccctagtctagttgcatgtttaagtctgagttcaggttcgggttcgggtcccgagtcctggtttgggttggaatccgggtctggatctgaattcgggtctaagtctgattttgagtccgggtcctggtccggttctgatctggatcttggccaaatttcaattatgagtccaagtctaagtcctagttctagtcccggtcaacttccagttttggttccaattttgggtcacagggtacgggttcaaatacacttttgggtttgggattgggttcaggtctgggtgtgggttcggttccttgtcacggttcgtgtgcagggctgggtcacaagtccagacaccgactacgggtttggtacaagccctgggtccagattcggttcccaatctcgggtccaaaactggttcaaattctggtgccgtgtcaggagttgggtcctaggttcaaattcgggtcttggtctgttactaggt

SEQ ID NO: 371989 - DNA, 621 bp, Cannabis indica
aatagcagttttactaaggtaatttatagtcttcttagatatataaacttcaattacatgcaaattttctactcttgtaataaattaaacatgtaaccgacattaaatgcagagaccctataagctatctaaaccatacaagtactctcgtcctatatcgaaatttagttctatttcactatagcataattgacacttacttctcagatctcgcatcaaaatcataaacagttaattgtgttcatgcaattaaaagtaattaagtacgaatgaaatagaatacatagaaattgagggaaaataaaatcatattagaaccataaaacaatgtcaaaaaatgtccatctagaccctaattaagtgtttagctactcatgtttattatagcaaaatcacgcatattgacttaagaaaatagagaagaagagaatgttgaaaaccctctgacgaatgcctccagtattgaattcggtctctgaaattcgtactcttttttctgcataaagtttccttctaaattgcttcttgaaaattattgaagtccacttcttttatagccgaaaaatgataaaaaaataaaaaaacgctgaaaaaacctattctacttaggattagaagggg

SEQ ID NO: 371990 - DNA, 901 bp, Cannabis indica
atttctcacccactagaaatgagcgagaatacgatcaagttgttcacaaagagtaatagggacttgagcagttgacatgaagtaattgggaatgctatggaggacaagctcgattaaagtagttctccctgcttatggcagtgggaacccactcgaataattttccttccatagtttgcgatgagcgacctgtgacattctcttatggcagtggtcacctaaggcgactcctaggcactacaacaaaagggactttttatcccacgttttacgcttgaaaaataaaaagtgggataaaaattttgatcccacttatacatttggagccttaaataaatgtttggaataagggccttgtttggaaaacagacaaaaaataatgttggaaaggctatttttatgcattttctaaacacaatttaatattttaagtgggactttttatcccaaattttacataagaacagggataaaaagtctccatatatctgggtcttttaattgttgggtcgactacacatataaaatgaacaattgacttttagggtttcattttattagggttattgtcattgcctcttacccaatctctctctctctctaagcgactgtccacataaagatcaaataggttctaccatggcgtatctctcaacttcagtccttccctactcttctattttcatgcatcatctcaggccaatggtctaattcttgtgaaggacgagtcaacggagttagatccaagctccatgccctctaaaacttctaggtaccatttgtcttcttttttttattattattgagagatttgtgctccacatcctctaatctcgttctactttctttttttcctaaaatgttgatcaactctctctctctctccttctctctttcctca

SEQ ID NO: 371991 - DNA, 708 bp, Cannabis indica
aacaggatgagcttgaaagtaaggtctcagctttcttgttgctagaatgaggcagtaggcgagcttttctatcaacggatatcggccttcggcctcgacgagtcttttactgatgtaatagactggatgctgcacgccgtcttcttctctgatcagtacggcactcacggcatgctccgttactgctaggtatatccccagttcctcaccgtccagaggtttagaaaggacgggaggttttgcgagctgtgcctttagatcttgaaaagctctttcacattcttctgtccattcgaactttttgtttcctcgcaggatgttgaagaatgggacacatttatccgttgattttgacacgaatatgctaagtgcggcgattcgaccagttaggctttgcacctctttggtttttgttggcgagttcatatccaggagggcttggactttttttcggattggcttcaattcctcaagcattgacaatgaagcctagaaacttttccgagctgacttcgaaggagcatttcaagggatttagtttcattttgtatttcctgagggctttgaaacattcatccatgtcgtctatgtgccccccagcctttctggatttgacgagcatatcgtccacctacacttccatatttctcttaatctggtctttaaacatcttgttgaccaatctttggtatgtagctccagcatttt

SEQ ID NO: 371992 - DNA, 641 bp, Cannabis indica
tattctcattttttttctcactcataaaaatatttttcaatcattttgagaattataagtaaaaaaaaattgatgcagttttattaatttgtttttttttttctatagattttgatcatgtttgatcaatttttaatatggtgatgacattaatttttaattatagtgataattacaagtaaaatataatattacatcagattttgaatggatttgcgactatatgtgagacatagtgatagataataattttgaatatagtatcgaccataagtgagataagttgatgataacaactttaaatataatggtgattacaaataagatacagtcatgacaataactttaaacgtttttctctttaaatttacatagctaaattataatttttgaattaattatattgtgacttttttagtcatactccataaattatggtatatagtatttaagatatttttaagaaaccacatcaaagaatcgtgattttttttgttagccaactataaagttttttaatttatatatttaagggataattttacaaatgcacaaaaacaacaaaaatacggtttcacggaattttaaatatttttacgatttttttgattttatttacataaaatacggtcttttatgtt

SEQ ID NO: 371993 - DNA, 916 bp, Cannabis indica
tgatctaatttgatcttttagcttaacatgaaataaaacaaattgcagaaataagaaattgtactttaaattgtggtcatccgacctgagtactttttcatttttgtcgaaacctttgagcgtagttcgcccagcaggccattcacttaaaagtagatgttctttcagtacttagtatggtcgtccgacctggtactttattggtagtattttcttaaatgttccccattccaataccatggtactagaataggttgcattttttcatcatacttacctaatttgtatgctccggattcgagaacttcaaccacttgatatggtccttcccagttaggtccgagtacacctgtcgtactgtctttggtgtttagaaatacccttcttaggaccatatctcgcatgaagaatttctgagccttcacttttttattgaaataccgagctactttttgttgatgggctatcaactttaagtttgctgtggttcgcttctcttcgatttcataaagtgattcggccaggattacgtgattgatatcttatttttacttcaatctcctgtgggatggtggctcaagttctacaggcagcatagcttcatatccatatgccatagcaaatggagtctgtccgattaccgttttctcagttattcgatatgaccatagaacttcaggaagttcttccggccaatttcctttggcatcttcgagtcttttctttagtgtgtccttcaaggtcttgttgactgcttcaacttgaccattctcttgagaatgcgccactgcagagaaacttttgatgataccatgggtcccaaaatagtcagtgaaggattggctgtcgaactgcttgccattatctgaaactattttgtatggcaatctgaactggcagagtatgttcttcacaa

SEQ ID NO: 371994 - DNA, 748 bp, Cannabis indica
tacacttatttttcttactcaattgtagctaatacatggacatgtggtctgtttttttgttttattcaaaagtttaaaatgtttttccttataccgataatcgtttggtcacaaaattgcaatttaagggctcgtttggaatgccgtattaggtcgtattgtattgtattgtattatattgaattgtattttatacaatatttttatgtaaaactatacgtggtattaacttttatggacacctaaatatataatattttagtataaattaaagtttaatatagtattatataaaaatatgatatataatccaattcaatataatacaatacaatacaatacgacctaatacggcgttccaaacgagccctaagtgagttttttaatacgtgagaatcatatattttttcatcatttactgaaaaaatgagcagaattaatataaaaaaataactttttagtttctttttttatatgaataactaataaataatttggttttaaaccgaaacaaaaatcagtatatatcataggttactaaaaaaaatactttattatttgatatttaaaagataacgaattgtattctacaaaagtttattttatagaataattttaataaatactacaaaaaattttacttttagtcacaacaaaacttgtgactaaaagtaaaaaaaattgtgtctaattataaattattattcttatgttgtggctaaaagatccatgactaaaggtattagtc

SEQ ID NO: 371995 - DNA, 696 bp, Cannabis indica
gttggtgatgtctcggtggcgacccacctgtcccacgttgagtcctaatatttccctcgttctcacgagggatttcttgttccttggttcccggtggccttctgttctcatttcagtgagaaggctccaattggtcatttggttgttcattctcagggggaccctcagtttccctaggttgttcttcctgagcattttgaggattctgctgaaatgtctcctacctcctagttcgtgaaccgcgaggtctacctcgtggtctcctcactccaggatcatgttagttttgtgtgttgttctcttgtgccgctctggccgcagctgcctcccgttccaactcagcattttgtcagtttgcctcctctaagcggtgcctgaggcggcaattttccaactcgacaattggcacgtatcttgtgggatcataggcaccatcattatcatatttcataggttgagcaccaacattggtctcattccctgcttctgggttctggccattttcatcctgagtccaccttgaacgtgtggaccgtgtattttggccaccttcaggttgggtccttctggaacgagtggtccatgttgatcgtgaattaggaggccttcatgagcccatcgactcttttctaggatggtgggtagtctcttcaggatgagtctcaacattttctccgttatcagccatggagaaag

SEQ ID NO: 371996 - DNA, 734 bp, Cannabis indica
acaccgagttccatgttaccgagcaccggaaatgcaaaattatgaaaatcactaaatgacataaaatgtatttcagaattcaataataacagtataaataattatttaaatatctataaataatcttcataattaaacatgattaactgctaatttccaaattaaactaagcggtctttacacaaactgtattaattatgctatatatgtgaatttttgcgttttctgtgcttgtgttcggtaacggtggaaagcgacgtgggccattagagagtcacgttttgtatgatttagaatgtcaatagcgggatactacccttgctacaattaaagagttttcaatcagaaataggaggtccaattcaagggataatgcttagccttcttctttatggttttctttagctcaagattggtcaactgcatgattttagtgatttgaggttctgtagtgtgcagctagtttgggtttgaattctggggttatgtaacgccctaatgctaaggcacgctacagtgttttttcaattatagtgcaatctttgctaatcaaagaattttcttgaaaaacgtgtcaaattaaaacttttgcattaaatattaaactttataatacattaaaatatttacaagtgccgggatcctgtttctaaacctttttaaaattaatatttcaaaatacacaaattacaggtcgcagagcgactatcaaaatacaactcccagatgtcccg

SEQ ID NO: 371997 - DNA, 428 bp, Cannabis indica
acttgccaggtttttgttcaccttctgctcgctgaatagcctcttcaagtttgataaaaccttctacacggtcaaggaaatcactcatcgagtcgactggtccattcttccatatgttctaccaaagctcactaaggagttcaatgccccctaatatcgctaacaactttctgtcctcggttacccgtgaaaccttagtcgcccatgtcattaatctgctgatgtaggctcggagaagctctcctggtcttttccttacttcgactagatctcctaggtgcaaaagaagttagcgagaggaggaaaattgtgcatggaactttgaggagaaagtcttccatgagttgaactgtaataccctggaattaagaatggattagcaaaaccctaactagataattatgtataattaaggaattatattatta

SEQ ID NO: 371998 - DNA, 458 bp, Cannabis indica
ggagcagcttgggaagaaagggagtgtttgtagttcgtaaaataaacaaattgacaacgattattatacctgaagaaagagactcaaagggatggaagagttttgttaactgtttgtttggattagtggattaaaaaatacaatgcaaaaatcaggttaaaaaaggaaggaggattcacaaacttgggcaaacttggtgaaaaaatcattgaaaccacaaaaggaaaaaaagaaatgtcagtaagtagcttagacagtgatgatatggaagagttgggaggggttgaagagaaagaagtgaatgaagaaatggaaatattctatgtgaaataaaagttttgtggcatatgaggataacatcatggtgaatcgagggatgaattgtggcatgaagaaagaggaaaagaatgttagtgaggtagaacagcaacatagactgcctatagagatagatagaa

SEQ ID NO: 371999 - DNA, 802 bp, Cannabis indica
gtgtttttcagttgttctactgttgttttgagttgttctgctttgcgttttactagtgttttgtaaaaacacagtatttttgaaaagatttccgcgtgacagtatttttgtaaaaattaacccaaattttaatatttttgtaagtttaccaaataaaaatattaaaagttacaggaattttgcaaacccacatttattataatttaatttgttttagcaattacttgtataggctttattaattaattaattaaccgacccctgcaccgttggcagaggaaaacaaaagatctgtttttcttgaagttgtgccatgattcagtcatcaccattcaccatcactgtttttagttaaatgtggtggttttccgctcatctacttcacccaactctccttataatctctttacttcttcatcttcctcgcccctgttcctcttgctaactccgtctcctcttccttcttcaaatctcaaccccactctaccccatctaacaatcattcgttttccttctccttgctcaatatttatcacagacagccttattcagatccaaaacacgtaaaaaaactggagcttggctttgttgaaaatctaaaggctcagcctttatgggttttgctgctttttttctgttggttctctctcggttctgaaattcttaatcgcttttatcaaatgggttttacgtcaaatttctcagacctgccaagaatttgaaaaagtatggttcttgggcagtcgtactggacccactgacggtattgggaaaggtttttgcttttcaattggctcgtaaa

SEQ ID NO: 372000 - DNA, 526 bp, Cannabis indica
aataaaatataaaaattttatttttaacaagtaaattattcataaattttaaaaaatttatagttgctcttaaataattacaacttacatgatttttatttataaataaattaagcgaaacgaaaagaaacttaaaaaaactcccttttgaaagatatactataaaattatcttacataatggggtgtgcagaaagtcatccgatccaatagaattggatatctaatcataattagattagatcaaatgtaaattttaaaaattcaattggatcgaatcggtttttgaatgagacatttgatccaatggataaccgaattgaaccagttcaattattatcttggatagtcatctaattatatttttttttaaaatagaattataattttatgtatttagtatattttattttaaaagttatatcaattgatttaatatatatttaacacatgagattaaagaaaaaaaacttcaagatttaaaatattaattctcatattcctaaacgctaataaaattattaatg

SEQ ID NO: 372001 - DNA, 1003 bp, Cannabis indica
ttttatggcttcttaattatactgtatgtgctaaaatataactttttcttttaatgagtgtttttataagaaaatggtaatctagaagagaagaagagaagaaagaaaaaaaaaaatcgatgtacaacagcaaaaactcaatcgttatttttttttaaaattaaacggatttattttatttattttattatatataaataaaaagtgatccatgaatttttcataaactattttatttttaatataaataaaaagtcacctatgaatttctcataaactaagaattcagttatataggcacactttatatagaatagatatagatggctaaaaaagctgcatatatatagatgaagtttgaatgtggctatatcaaataaataaatacaatagttgtaattacttttagttattaaattattattagattgttaatgttaatttaatttaattaataaattacttgcaatttaatattaataaattttatttatttttctaaaataaaaaaacaataaatatttataaatattaatttttaaaaatgttttattaattattttaattaaataatttaatctttttaagtataattaatttaaatttaaacatagaaatttaacatgtcaatcacatgtaatagcataattataaaaaaaattgtatggttacatattattataaccattgaatactcacacaatattatacatatgagaaatttacacgatacaccttgtagtctttaattttgtccaaaatacgtggaccaacgcgactgcgacacgtggatttgaggagtaaggttttgagataattcggctaagtctttttaatcaagaggatcagcaagaaacatacctcctggagaaggtatgagggatccacatacccccggagggcaaagctatagcaaagcacctccgggagggtatcaaaccccatctgaacagtcacctcgcatttaatgccgcatgaggagaaggcatattggaactgccat

SEQ ID NO: 372002 - DNA, 534 bp, Cannabis indica
attcaattgcgtagtgttcaatcgccatagcttatcgtgctatttcgagagagaagatcaaagagaatgtcggagagaaaatctgagagagagttcgatttctgttatgttttattttggaaaatatgggttttttaagttaagcctatttatatagtttttggtttcctatatatttttacaattaattgttttttttttttttcatatcttcttgattttattttttttttttttgtccataaaaagtaaatagcaccaaaagtttccatatttatgaaaaatcctcttttcttttagtaatgatctcagttctcttttagctaatttttttagtttattgtcaaatatttctcagcgtccttgactcatgtacgtcaattagccactaaaattgcttacgaattagctgtgtacgcatttagagtaagtgatgaactaatttggatcaaaattttaccatttttttatttatgatgtattatacactgatttttttttttttaaatgaaaggttgttcattgtaaaaaaat

SEQ ID NO: 372003 - DNA, 676 bp, Cannabis indica
aataacgttaaaaaaattgttaaaccaaaaagtgtcattaaatagtcacttttaatatataaagatatgttcttataacatttatgtaattaatatttagtcattatattattttataattgaattataacatcttgatttatcttttgtaataaaatctctaacattttatttttttcaaatagcttgataaaattaagtatttggtgattaaaaatagggtaaacatcattttagacctagtacattacaaaaattacccaaaaattaccgattagatacttttgttttgttaaacgacaaaatggaccctcctatatttttcacaatagtataaataggatcttgaactcaatttttgacaatttttttaatataaccaactgtaaataatttttaacgcgaacaaatgcataaaatgtaaccaatttttagccataatatatctaaattgaattattattaaattttattttgacaaaaaatcaattcaaaatcctatttgtactattttagaaaatacaagaaccattttatcgtttaacaaaacaaatagtccaattaataatttttgcaaaacacaagattcaaaataatatttattcttaaaaataatgaataataattgcaataagaattttgttttattttttatttattttattattttttcttt

SEQ ID NO: 372004 - DNA, 656 bp, Cannabis indica
acgcgaggaggccttcaagaacgcctgggatgtgagcatcggaccccctgacggattggttcaatcgctcgtcggtccggctctcgctcccttacgttctgagttaccagccagttcgtctcccacctgacctaactcctggccaaaagaatacgcagcctgtgcttccacgaactctatttaccaggttcaggatatcagcactgccatggctgcggtaagtttttgtgattcattcctctctttttgcttgtattttgtcttaaggacatttaggtctcattcttgtttccttttttcagattaccgtagagaccggccccctctcaaagaccctaatagaccatgggtatgtcatgtctgaatttgggggcatggacgaggccatgaagagtctgcgagacttgtcggctgagaggaaagcattccgggaggaggctcagcaaagggaagctcaagcggaggcgaggcaccaggaggggctaaaggtttagggcgaggctatggccaaggccaagcgcgagttgcgggaagccaaggaagctatggatgagctgattgccaagctgaaatctatggaggagctgcaccaagcggacttgcagtcgacggccaacctgaccgtggtggtgaaggagctgagggactttaaagat

SEQ ID NO: 372005 - DNA, 505 bp, Cannabis indica
aaaaaaaatatgttatgactaaaaaattatcaccaaaggtaacattttttttagtgaaatactttttttattcttctgtacttgattttgtactacaaaccaatattaatatcatgcaattttcttaaataatttttattaattaaaagggtccacatttaagtttttgcttagggttccacaattattaagggcgacccttaaactatatgcactgtaaattaggctgagctagatttatttgtaataaatattacaaatggaatactttttaatgggtattacttattgatagttactaaataaatttaactataaatattaattttaaaaatattaaattattagattttgatctaatatcgaataataaaagagaaattttaatatctatacttagttttgaccaaaaaaaaaaaaatttcttaattttttttcacccgatggaacaaccccaacccatataatgtaaaaatagagattaaactaattagatagaaaaatt

SEQ ID NO: 372006 - DNA, 605 bp, Cannabis indica
agatatgaagaaaacaagtttgagccacaggggtatgcactgcatacccctgcgcacggggaaagcagggatttggacgaggcagaggctacaagcagcctcatttgcccaagggagctcgacgcttgcagcctgttcagacagggcctgtccgagatgttggaatatattttaccctaaatatgaactttctgaaacgataaaataaacacatataaagttaagaaaactttacattgatgcagcggaattaatgtaaagaccgcttagtttaatttggaaattagtagttaatcatgtttaattatggaaaattatttatagatatttaaataattatttatgctgttatttttgaattcagaatgcatttttatgtcatatagtgataatttcataattttgcattttcggtgtccgacaacatggaactcggtgtatggctcactagaatcacaaattagtatttcagtatagtgggacggtttatttagacattgggaatgtcgggattagtcgagaatttagagttttcccaaaatacccctaagtaccctttattgccttttagtgtggaagggtaaaatggtctttttgcccatttg

SEQ ID NO: 372007 - DNA, 489 bp, Cannabis indica
ctttgaaatggagttttatttagggcataaaacctaacaattggagtaagacagacttcaagctgtccttctattctgggaaggtgggttgaagatgtgccatgcctcagtaatatatcttggacgaaaaacatacacgcatgagagagtcacgttgaatatttaagaggcaaggttcggcttccacaaaggaaggctaaagttgcataaaaaatcaagcatagacttcgctcgaaaagatcaaaaggagaaagcaacacaaagagtaagaaagacttcaagcagtcctcccattttgggaaggagggttgaagacgtgccatacccccagtgatctttcttgcacaaaaacatcgtccatagaggagtcacgttatatttttatgaggcaagctttggtttctacaaaggaaggctgaagttgcataaaattcaagcttagatttcgcttgaaaagattaaaaggataaagtgttggaaattatttta

SEQ ID NO: 372008 - DNA, 557 bp, Cannabis indica
ttattaattaataaatttcatttgacatatttttttataaaagaaaattgtgaaaattcacttatttataaaaatgagtatttaacttattgtttgatttattttatatatacaatgaacatactgtggtcaaacataacatcatattatataagtgagatatgacaataacaatactcttgaatgtaatgataactacaagtgagatacgatgatgagaatagctttgaaattatatgattaagttttttttttataaatttatcaatccttataacaattcgagggatcaagtctaacattatgttatacaggtcgtgtctgactttcattataataacgaaatttgataaatacgagtttgatttgtctgttggtacacccttaatttttaaaaaataaattaaaaaattagattaaaatttaatacaatttattacttagttgtcattaaataaaaattataatttattttatatatataatttaaaatttttaccgcaaagcgcatttaatatacaccaaataatgtatctatataaattcaagtttcctat

SEQ ID NO: 372009 - DNA, 518 bp, Cannabis indica
actaagcggtctttacaacaatgaggctgggcaaccagtcgatgctgacggggacgtcctggttgatggcgttacctacgtcagtgaggagcttgctgagggggttcctcataggaggcagggtgccttaggcgccaggtgggtaagtcctccgtctaagattttggaggcacgcctccgcactctcgaccaggagggatacctaggcgagctggactggtacattcccaccgacgacaatcgtgccacaaactctgataaggggatgtgttcctggttgcggactcatggcccgcaaggggcgctgatgcccttgcataagtacttcagggatgtgacggacttcttcggcctctgcccagcccagattacacccaagggcattaagtatttgtccgctctcttcgtcctctacgcttcccagggatgggatgctccttctccccacgaggtcacttggttctttgacttgaagtctacccccaagcaaggcaggtcggggtatttttacttctctc

SEQ ID NO: 372010 - DNA, 640 bp, Cannabis indica
ttacataattaaaggttaaaggatggaatgcttttattttgacgcattaaattattttaaatttcttaaaaaattacaagatgtcttaaataattatgatgcacaatgttatataagaaaattacaattgaatatatctggatgtcaaaaatataaaatagatgcatcggtacactaaattttagagatatttgcacagaaatacgtgcatttaaaaataattgtatgaatgccctcttctatattaatgccgtttttttaataattgcacacacgcataccgatgttcacctttcttagattgaagcagctcatttcgtttttaatgcaaatttcttctccaacattatcaactcatgtgttgtacttgctagctgccctactctcatttgtaaccaaataattatgaaaaaaaaaattaaataacaaaagattgatttacctttttttccttaaaataaataaataaaaagttttttcctcatttcttttttattttttttcttacttaacttttatcagtatttgaaattttaataaaaaaaattttcaaacaggcacatcaattttttttttattattacttttaattaatttattactttaatatatgtgtaattaacttttaatacgaaaagaa

SEQ ID NO: 372011 - DNA, 1017 bp, Cannabis indica
tacaatacatataaaaaaaagtatatttcaattaaataaaaattggatgtaaatttaattaattgattaataaaagatattttttttcaacttaccccaaatacttacttatatctactactatttgggaccgttcaatatatttatatgcaggcccaaatttgttagttccgttttcagcatattgcagttgtgggcctgtggcccatttattctattacttcaaaggtccaaagtataaatgtttaacttaaaatggactatattaaaatggacattagaaattataataagtggcactaaatcataagcatgtaagtaaatatctttattttaaaatttataaagaaaaataacctttttaattagattatttattatttataatgtcttttgctatacataaaaaattaattttatattttatatatttttattaaaattagaaacaacttacttaaagatcatgttatatttatattagttttgttaaaatcttttttaattttaaagttatatcgcttaattttttttttaattttttatggggttgttgtgggttgttggtattaaaattttgatgtacagtatatttttattttgttatatgatatgttattatttttagatgatatttaaattttattttgctatgtataatagtggtatataattttgttaacataatacaaaaattttaatatatgtataattttactggcatgctacatatatttaataattatttttatatattttaattgtatgatatattatttattttaaataatatttaattagtttttaattaattatatacaactgtagtatattattttgttgtcatgatatatatattttaattgtggtatataatttagttagtatagtatacatatatattagtatgggatatgattttgtcccgttattgtactttcacggattgtaatccgtgatgtacgacaaccgtcagatgagggagttatttgatctgacggttgagattgatctagg

SEQ ID NO: 372012 - DNA, 520 bp, Cannabis indica
tagatcatccttgagattatgagctattcctagtctattaaatacaaatgcaccagattatctcagtgactagttggtttggctgagcacttggccagaatcgctagtccgggaggagttattaggtataaacccttcaaaaaatttccagataaggtgttgccgcctaccgcttggcccacaggtggaacctatgaccggggatttgacggctgaccattcagagtttgggaagtgttcccagcaggatcttcatctgaaccgcccaatgggatgctagacacgggttactaattagtaacttagtaggctcttcgcatcagtacgatagcctgtctttttcggtcgtcgatggctgtttgttgagccctcaacgtttccatttctttatctcttcattcatcaaacaaacacctttgctcttcgaacgcaaggttcactatagcacagagctcttcctgttcatgatgtagagtattagaatggccttgcatgagtccaagagcattacggagattct

SEQ ID NO: 372013 - DNA, 782 bp, Cannabis indica
acaaccttcacatgaaagtagttgacaccatccacgttaaagacagggggagcttcctcttggccatcttctttccaaaacttcacttttcggaagaatatctccgcggtttctttctgtacttcacctcgatagtcgcgaaacacgatgttatcgccgcgctgagatagcacgaagaactgcgagatcatggctacggctacctacttcgtatctgggtcttttgctgcaactattaatggatatttatgtttatgcaatcaccactggaaaaagtatgatcataattcaaaattaaatctataaaaggatataatatatataaaaaaaataaaaggtatgctaataacacaataatttataacattccatatagaactataaaataatgaaatttggaagaaaaatcaaactgaataccgtaatacattaggttaacattcctgtctttgtggattcaattgacctttttttattcaatttccaaaatttgaccaattcctccaaggcataaaaattcgcagatgttttcgttctacatccattaagattaattaatctatttatttatcaatctatctaaataacttaaaacctgtttatttatttttttattttttttaattatttaaaacctatttatctattttttattttttaattatttaaaacctatttatttattttctcatatttttaattatattttttttatttttcaaaattttaaataaaaaaaacacagaaattttttttaaaaaaaaactttaataaatatctaa

SEQ ID NO: 372014 - DNA, 859 bp, Cannabis indica
gttaaaacttcaatgttatgggccttgaaataaggtcgcaattttcttgacgctattaccaaagcaaacgccagtttctccatttgagggtaacgagtctcggcgtctagcaaacgtttactgacatagtacaccgggtattgcctaccttggccctcgcggattagtactgagctaatcgcatattcggataccacaaggtaaatggataaaacttctccaggtattggctttgacaggattgggggttgccccaaatgcatttttagtgcttggaaagcttcttcgcacttttcggaccattggaacttcttattgccttttaagatttgaaaaaattctttgcatttatcagaggatcgtgatatgaaacgatttaaagcggcgactttacctgtcagactttggacttcttttggcatagttggagatcgcatctctactaatgctttaatcttcgcagggtttgcctcaattcctctccgattcaccataaacccaaggaatttccatgaaccgaccccaaagacacactttagagggttgagtctcattttatatcgtcgcagtattttgaacatcacttgtaaatggttgacatggtcttttgcatgttgagattttacgagcatatcgtcaacatacacttccatggtgtccccaatcaaatctgcgaacatcatattcaccagcctctgatacgttgcacctgcgtctatcaaaccaaaaggcactaccttgtaacaatcaaaccttgatctataatgaatgaggtatggtcctgatctggttcatacatcgggatctggttatatcctgagtatgcatccatgaaactgagaagttcatgacctgcagt

SEQ ID NO: 372015 - DNA, 786 bp, Cannabis indica
gccaacattcaagtctttcttttcttttaactcacctgagtcagaaaaaatatagcgagcatcatccatgactaattcaccagtcgccatagcaccacttttagtaagatagtagtccccatgccactcatcttgagccatgtacccccacttcttgaaatagtaccacttgccatctaccttttgccactgttcattagcataagaaccatcagacttcaggtagaaataagaagaataagttggatcataaagccattcattttgcatcataacaccttgaccattcaagaaataatttccctgccattgacttttagccatatagccccacttcttaaaatagtaccatttacctccaacagaatgccattcctggttagcataagaaccatcggacttcaggtaaaaccaattcttataggcgttatcataaacccattcattcttagccatatagccacctgattttaggtagtaattgctctgccactcattttgagcataacgaccgtctgacttaatataaaaccaagccttatagtagttatcaaaaatccactcactcttggctttggaaccatcagcctttacataataatctccctcccagtgggcagaagcagtggtctttacacctgccactcgtttgagttttattagaagactgattttgctctgaactacttgaaactgtcgttgtatcctgcgaagtttttgaagcttcggttcatttgcagcgacatgactaactgccaagcctagtaaaaagatacttgctaatcc

SEQ ID NO: 372016 - DNA, 660 bp, Cannabis indica
taaaaaatcttacttttaattacaataagacttgtgactaaaataaaaaaattgtcactaattataaattatcattcctatgttgtaactaaaacgtctgtgactaaaggtatttatcacaaaaattataatttgttgtgactaaatgtgtttttagttacaatacatgttgtaactaaaagtaaattagtgacaacttgtatcttaataatatattttagtcacacaagtaactttttgttgtgactacaagtcacatttagtcataaaaaattatgttgtaactaaaaggttgtcactaaaagtaattatttttgtagtgtaattaaattaaaacttgagctataattagatttgttgattaaaacttaatttacttgacaccttgagctataattggacttgttgatcttgtagcgattgaataaagaacattaaaattttctataaatatgtaatttgatatttttatttttttctactaaatttaatataataacaataaattttttttattcaacttgttgaattaaatatttatttattatattattttctatataaataattcttaattttaaactttttgggcctctaaaattgtgaagctttggacctagtctcaatatattatgggtttgagatgcaaaatgaccctaa

SEQ ID NO: 372017 - DNA, 457 bp, Cannabis indica
aaaattaattaaaattaatttccaacttaatctaatttttaaaattgaaaaaattcgaagtatctgcatttaaaataaagaaatgcaattgaaaattagggcgaaaaatgattattaaaataaaataaaatatattctagaaattattttgatttaagtgatctgaaattgaaaattttccaacttaaatataattttctatttaattaaattcattaaaatagaaataattaagtatcttgaataaaatcgacttaattattaattctatttaatatctaagaaaatattctaatttaagttggtctaaaattaattaaaacattaattttcaacttaaatatattttctatttaattaaatttcatgaaatagaaataaataattaagtatcttgaatgaaatcaatttaattattaattctatttaaattctaagttctaagaaaatattctaa

SEQ ID NO: 372018 - DNA, 577 bp, Cannabis indica
aatagaattcatacattatatgcatataatcatgaaataaatcatgtgaaccatgcaacataaaaatgtcatttctgatctttattattgttatcccaaatttggcactctgacgtggcatcacgagaatggtgacacgtggactctacttagagcatttgttcaaatcaacatgccgagaaagatgcctcgctggcatatccaaaatggaatactcagcgagccgtgcagaatgagcaacacttagcgaattcagccaaacggatggtgagtcaccagcttaatccctacaactcagggatcaacttgcgtggatgtggcatacgcacgatcccactatcggagtatttagcctcaatcccacgatccttggattcaacattgatcacacaatctttttgtttatgcgcattttaacgagagaggaaactcttcctcctctagtttccagccctataaatagtgaggaatgttcacttggcataggagggagaaattgtacgcgaaacgctataagctaaggctatctaagaattatatattcagagatattattgtaagagctatacgaaaagga

SEQ ID NO: 372019 - DNA, 768 bp, Cannabis indica
tggaacgcggtgtatggctattagaatcacatcttaatatttttagtatagcgggacaatagtttagaaattagaatgtcaggaatagacgggattttagagtttcccaaattatccctaagtgctcttttatgttgttttgtggggaaagggcaaaatggacattttgcccatttgtgctttgtctttagtgatgtttaatttaaattaataatctgattatttattatgttttggctgagaataattaatacaaccaatctttttatttcatttcactcatttttaaaaaaaaaaaaaaattagaaggaaagctcttctccttcaacctctctctctctttcgaaaatcctagggcaactagggtttcttttgctcttcaatttgctgaggttttatcaaattgtataggagctaaaccaaggtaacctctttacaattcttttccttagttttcttgaagtgtaagaaaatggaatttttgcatgaattgatgcttttgctgctgtagttgttgtagttgttggatattgtttttcagaggtttagttgtggtttattatgttgatttaagcatgaattagtagttgtttgaaggttttagcaagctttgagttttagaactcaagcttgaagctttaatggtgaaaattgattctaagctttgattgttgttttgttacttggaatatatttattggggtataattgcaggtctggaaagtttgattgagtttggaaacgttttggttagggtatgaatttttg

SEQ ID NO: 372020 - DNA, 740 bp, Cannabis indica
taaactaacaaccttcaagctcaaccaacatgaactccaaccccaattaaatcaattttccagcagcaaaataccttaaaaatacataatttcaagctagaaaaataccctataatcatacaccaagctcaacaaacatgaatcatgcaatttctcacttaattcaccaaaatcaacatcaaaaccatgaacatgcaacattaagaacaaaacaacttaaaacatgcttttcatcaaaaaaattcagcaagaaggacatggttaaaaatctgtaaaagctacctcaaatatagctagcacttccttaaatttcaagctcaaaaatcccccaattccaagctccaagtcaagcaatataccaaaaaccaaattgagattttaagagagggtttgagagagaggggttcgggttatgggggtgatataaccagaaaattcatttgttttttttctcaaaaatcaacttttatcaaatgtaaatcaaataaggtcaaaagaccattttgcccctagggccatatatcatatgcttttacactcacaagggcaaatatgacattttatgcacaattcaattccaattaatttcagatttcccattaataattaaaatgccaacatttaatcccacattgcatttcgggtctgaacccggtttggcccgaaatacccggctgcgactataccgcgccaacctgtcagaacacacctaaaaaaagacaacacaggcatactatata

SEQ ID NO: 372021 - DNA, 1103 bp, Cannabis indica
ctttattgtgtgttaatagattttttttaatatcttaagtttaaataactgagcaaacgctgtttaataaaaattatacttatctttatttcaattttatttgaaacgtaaaataattaaataattgaataataataataataaattcttcaatctttatttctattattgataaatctgcacagaaacattacaatgatagagaaatttattaattaactaaagaagaacaaagttaccataagttttgatcatgttcactctatatttcttgaaaagaaaatccactgatcaaaaacataatcatagctatcaccataatcatgttcactctatatcactcaacacttgagaaaagaaaatccactgatcaaaaacataatcatagctatcaccatcattactttcatggtccaaatattgatcaatacagttactccaatgctcatttatcttattatggattcttttcaattggtctttggaaaccttactttcaagaaactctacctttgaatgaaacactttaataaagtttttgatctctatagggatgaattcaggactaaaaagcttacctcgaaacgaagaacttaattgatgatatgctgaactaattcgtcttcgatttcatcattcaaataaatatgtcttcttcctttccttcttcttcgtctcgttatacaaaaatggtaccaaccaactccattacttttttaaaaaattacgcaataaagtatcagaaccatctattacaaaagacttgttacgattctcctccatatttaagcattggattaaagttataacctcatcaagaaacaacaacaatgttgaaaatattaaacattttgaacactttgaaaagtagacgttatgttgaaaatatttaaagaaatgaatcttatattcagaattgagaaagattggttgaaaaaggaagagagactaataaagtagttcaatgatcaaggaaaacgttagagaaagggttaaataaggagtcatttataattactattatcatatataaaaaacaaatcatctctacttttatttgagtaggtacgcatataaacatcaattatggttgtaacatgaat

SEQ ID NO: 372022 - DNA, 650 bp, Cannabis indica
tgttagaacgaagatctaagaattgtaattccttacatggaacttgccctacatgtgtgaggaagttgtgagaaatgttcaaatcagacaatgaagtaattgtttcattattccatagccactcaggaattcttccttgaatttggttgtgggaaagttgtaaggtatcgagtgttttcatgttttctagaaaatatggaaatgcagtaatattgcaagaggccaaactcaattcagaaagcttaggaaaaagattatcattggtaaagttatttgagtgcacaatgaaattgttaaaagaaagatcaagactctgaagattagttaactttgaaaacttgcttagctccacaacaccatccaaattgttgtatgagagatctagccatgaaagattttcttgttgaatgattgagtttggaatgtccccattcaatttattgaaacctaagtaaagactttgaagagattttgacttaaaatctttaattgggccagtaaggttattattagacaaggataaataacttaaaagtggaagagaatatatccaagaaggtattggtccactgagcaagttatcatctaaggaaagggattctaaatggttaggtagtgggtttgggtggagtttgatgtttttgaaaatt

SEQ ID NO: 372023 - DNA, 626 bp, Cannabis indica
catatacctcgcgtaccgccaattgaacttagaatgatgaccttcccctacccattgctatatgggggatcgacctaattggggcattacccactgggtgaggaggaactaagtatgcggtggtagtagtcgacttcttcactaagtagaaggaggccgagcccctattatccataacctgcaagaaagtctttgactttgtcatcaagaacattacctgtaggtttggaattcccataaagatagtatcagataatggaactcaatttgatggcgacttgttcactgaattctgcgagaggaataaaattgtcaaaagcttctcgtcaaaatccaggcctcaggcaattggacaagtagaagccattaataaaaccctaaaggatactatcaagaagaagttagacagtgccaaaggcagatgggttgacgagccacctcaggtgctctgggcccacataactaccaagaaaatagccacgggacacactcctttctcgctagcatttggctcggaagaaatgctgcctgttgaagtgaatatatcgactcacagaagatagttttataatcaagaagaaaaccaagaacttttaaaattttccatggatctacttgaggaaaaa

SEQ ID NO: 372024 - DNA, 533 bp, Cannabis indica
atattgtacaagatgaatattatatatatatattgacattaggtgtaatttttttattttggtaaattatttttttttttatattaaaagaggtctatgtcaacgggctcaatgtgtgctgccgagattgatcaatctcggggagctaagcctgccgatattggtatgtaaaggtgtagacaaatgtattagaattgtacctatcttgacgggccttagaaggcctgccgagattgcataacaataacgacgagccaggactatcgagatagccccttattcaatctcggcagctgaattctcgacacgcgaagaccgccgagatagagcaataacggggggccgggactgtcgagataggtcttattttttttgtagtgtatttttagaagtagtattaatttaattagagaacatatttttctagtgggcttaattatacacattttccaactataattaatggtgtagaattatagttgaggttaaagaatcaattttattaggaaaatataattgcatgtacaaagctt

SEQ ID NO: 372025 - DNA, 962 bp, Cannabis indica
atataagtttccaaaaagatttatgcaaaataatcattgattagcttccacataaatatgtcatatactaacaaaaatattgaagagaggcaaatgaataagccataactgttcacaacttctctaaacagggtagaataagttggtagctattcaatgaagtaccgtccattttggttcaaaacttctctaaacatgttattactgagcattggtattaaatatcagtagtgcctacaaccatgtcttacgattagttagcgatattttatataatttattatattaaattatatgaaattaatatttaattgcatcagtagtcatatgacacgaatttttttagcatttctcgttattaattagtaactattcaatgaatcactgcctattttgcttcccctattaaaattatctctccaatcaacaaacacaacattgttcagtacgagtagttaaaataatcacaatttaaatcacctagaaaaaatcaccaaataaatgagattgattcacaaaaagaaacagaatgtttttattgacaaaaatcagaaacttatcaaagtctctttggtcttcctggcccttacgattcaaatattttcatccagatcagaacaaaaccatagaactactaaacataaatcaaaaactaattataaaaaaaactctaaactaatgattatagaattcgataacagctgaagctaaatcatatcccaatagaactctaatcaaaaaacagagagaatcacttgagaaaatctttgtattagcattatagcagcctcataatcgtaagtgtacctgtttatccggtgaatgagtgaaacggaattcgtatactccgatctccgatctccgatctaagcttgataatatttctaaggtaaccggtgatgacagaccgaagaaagccgagagagagagagagagagagagagagagagagagagtattat

SEQ ID NO: 372026 - DNA, 558 bp, Cannabis indica
aaccgtatggaaccgttgtacgaaaggttccaaaagcaagcacctccagtgtttttgggaggtcctgatgtgatgaaggttgagctgtggcttacagtgattgaacgtattctcaactttatgggagtggttggtaatgatcgggtgacctgcgtcacttttcagttccaggaggacgctctcgtgtggtgggagttgataaccctcactcgggatgtcagttattacatgggaagattatattcaaggagttgtttaactctaaatactataatgaagcagtccgcagtgctaagcggaaagagttcactgagttggtgaaaaccgaggggatgtcggttactgagtatactacaaagtttgatcgtctggccaagcttgtcgtgggtttcgtgccaactgactttagcaagaaagagaagtatttggccggtttgaatgtgaagatcaggcataatctggtgataaccaccaatgaagcaaccacataacatattatcacaaattaattataaaaacacacaaaaacatatcaaattacaataaagttaataaatt

SEQ ID NO: 372027 - DNA, 537 bp, Cannabis indica
cgggaaaggtatgcccgaacagtgcagcacgagcaagaagaggttatcctggccgtggaagaaaggaagcccaaacttccacgagtaggagagccgaccataaccttcaacgatgaagatgctatcaaaattagatttccgcacaatgacacgctggtcgtggaagtccagatagccaaaaaatggtggccaaaccatgatcaataatggagcctcttccaacatcttgttcaaaactgcttatgaaaagatgggactccaactcaaggatctaaccacatgcctccagcctgtctatggtttctccgatcatggagtcgcacctctaggataagttcgtctacccctcactattgaacaagctccgacgagcatgactgtaatggcacagttcttgatattatatgtcccttcagcttttaatgtaatgctaggccgaccgaccttatatgagttaaaggctgtcacatcaatatttcactcgtgcctaaagttttcaacaagaatggggcaaggtgtctaagagcaaaccagcag

SEQ ID NO: 372028 - DNA, 1202 bp, Cannabis indica
gctctcacggctcctcagtttttagccttgcccttacctacacatagcaatagcactgtgagtcgatagactcagtaagaaaagtataatatgataaacatactaaaatcccgggttataatcaggctcccatacacctaaccataaccctaactgaatcaggaacgttcttgacaaagtatgattaaccgcgaatccagcctatactcagtactcaagttgcactgatgtggtagcagttaatccatactatctgatagcctagcatatatctgatggcatctcgatgcaactctatgtacacctcattgttgccctgatatgctaatctgatggctatataaaatttgcctaacatatatctaatatgttattttgatggaatctaacatgtacgctaaacatgtataagcatatgcatgacattatactaatcttacctcgattccgaattcaggtggaacagctgagtggaacagctggccggcaaattacagggtcctaaatcacatcaatcgtaacataggtgagtgacacgctaaataacttttccgggacttaaacttgaaactaaaagtttccctatcgataaataacatgacaataccctaaacaacacaaaaataggaaaaactggggttcccaaaattgccccaactggtagaccggttccccaaccggaattctgttctaggaaaactcctgggagccaaccggaatttcggttcctagaggcccctctgtaccggaattccggttcagtccaggaatgaccgaaaattctataactcaaccaaaacaaccccaatccacatgaaaccttccagacctgttctaagcatcctaaagatcaatttaaaagcaacaaaaccaatacccaaactcagaaagaagaaatgccattgttgagccaagcttgagttctaaaactcaaagcctgctcaaccactaaaccaaccaccaacacaagcctaaatcaacatatctaagaataatttatccattgaaaacaataataaacactaacagcaactacagcaaacaaaaccccaaaacattcaactttcactttcttacaattcaagaaactaaaaaacaagttacaagaggcttaccttggcttgggaaacactaaaatcttgctgaacttagcttgatttgcaaagaacacaccaaccctagctggttctaggtgagttcga

SEQ ID NO: 372029 - DNA, 813 bp, Cannabis indica
tcacgttcccggggacttaaacttgaaactagaaatttccctatcgataaataacatggcaataccctaaataacacaaaaatgggaaaaactagggttcccaaatttgcccgaaccggtagaccagttccccaaccggaatttcagttttgggaaaaattcctggaagccaacttgtagaccggttcctacaggcctccctgaaccggaattccggttcagtgcaggaatttttcaaaagaccaattcaaccccaaaccaactcaaacgttccagacctgctaattagaccccaatgaacatttctaaagcaataaaacagccacccatacacagaaacacaattcaccattaaagctccaagttttgagttcaaaactcaaactttgttaaatcccactaacatgcatcaaaacctgttctaatccactcaattaagcataaataagcctctgaaaacaacaacaatcaactacaacaagcacagcaagctaaacaacatttcaccactaatgatccaaacttgagttcaaaactccaaagcttgctcaaacaacctaatcaccaccaaatgatgcatagatcaacataaaaactcaacacctctgaatataacaacaaacaactacaacaactatatcaaataaaacctcaaaacatgcaaaacatctttttcttaaaactcaagaaacttaagagaaagcgacaagaatcttaccaacaacttgagatcacaattccttactaaaaccagcttgaaaatgtagagaaatcaaccaaaacctagctgctctaggtgggttcgaaagagag

SEQ ID NO: 372030 - DNA, 1119 bp, Cannabis indica
ggtatgtttcaattaaatataaaattagaggtaaatttgagtaattgataaataaaaatagtatttttcaacttatccctattgagaaacatgaaaaatctcgaaagactaataaaaaaaaagtactactttgaattaataaatgctataatgatttgattaaaatatataataataattagtaataagaggagtaatttattcatcttatatatgatagtttattactgttatattatttttaatataataatatgtagattaaaatgtggtaatatatattattatgtgaataatatatattaagtgtatggtaaataaatgtgtaacctataattttaacctacacttttgtaacctacatagtaacttggagaggagttacaatttgttatcacttgtaactcatgtgttgatcacacattattagtgtaataaaagggttgttacacaattgatgatagaattcaaatgttatgaaatatagttgttacaaactatattaatactcatttatatgagagaaatgaggtgttgtgtatttgaattctaagtgatcacctaaacattataaaaggaggtctttggtgctcatttgagagagagaacaagttttctatcaagaaagcactttgctagaaaaccctaaaaggcttgataattcccaaagctatttcctagagagttcccttagtgcttagagatagggaaaataagcttttggacaaaggtgtaataccttgttcaagtcatggtgatccccactattattctacactcaaggttgtgagtgagtgtatctttttcttcttcatattatgttatatgttatataatattgtgtaatctatttatctattctatcttttcatatatatatatatagtaatatatatagtgtatatatatatatatgtattgtaacatatatttaatcaatctcttttattgttccttgtctttatttttactaattgtagttgttatttattcttgatttattttccagaaattctatagattttattagaccgacaagtaggctcttttggaaattggatattcattttagaataagatgaataaagatatattttaaactaatggacaataataaca

SEQ ID NO: 372031 - DNA, 511 bp, Cannabis indica
ttgcaggttcgtctctctctcttctctttcaatctctgttttaattgaatttaattatgagcttaagaacttgattagtctcttaatttcattattaagtttggttttagagtaatgattagctaagaacttaagagttgattgattagtctcttaaatttctagcctgtgttttactttgatgattaattcaaatatagttatgaacttaagaattgattagtctcgtaaatataggtttattattagtttggtttcagattaatcactctgttttagtttgatttgatgattaatttaatttaattatgaacttaagagtttagttagtctcttaaattattactttttaagattaatgacactctgttttactaagtataattcaaattcattatgaacttgttagtttggttttggttgagaggagatgtaaccgttcatttagggttcgtttgaaacgccgtattaggtcgtattgtattatattgaattggattatatatcatat

SEQ ID NO: 372032 - DNA, 558 bp, Cannabis indica
gatagtgatgaagatatccctaatgctcaaccattgcctcatgtcactttggctgatagtgatgatgagggggaggttttgatgagagtgtgtgtaagattgatgaagagcctcgagctcttaagtgtgcgacaatggtacatgattatgagggtgacaagaatgagtatgtcgggcggtcccttcactttttgagggacaacccgatgtccattatgactaagggctatatcctatacaaatgtgacttccaactatctttgagcggcatgattagggtagtggcaactgggtatctatgtatgtatgagtttccttagtttctttataggattggctttcgatttcctttccctacatttgtacaagaagtgtttgactattatggggtagctcctagctcatgccaaatgcttaggcccaaatttcaaaagtccattgtatttattaatgggttgttatgtgtttttagtgtgataagggtttaaaataaaaaaaaaaaaaaaaaaagaacaaatagaaaatgggctaatcattgttctttcttttgtaattggg

SEQ ID NO: 372033 - DNA, 658 bp, Cannabis indica
tggataatggttctaaggcctaaagggaaaagagtaatagcatgcaagtgggtttacaagcataaagagggcagattcagggaagaacctataaggtttaaggctaggttagtagccaaaggatttacacagaaaaaagggggttgactacactgagatattctcaccagtagccaagtacaagactataaggattatgctatctatagcaaatcaatttgacatggaaattgatcaaatggatgttactacagcttttctacatggagacctagaagaagagatctacatggagcagcctaaggggtttgaagttaaaggaaagaaagaaatggtctgcaaactagttaagtccttatatggacttaaacaagctcctagacaatggaataaaaggtttgatgcttttatgataaagcatgagtttaacagaagttatcatgacacctgtttgtactggaagggaagctctataaaagatgtcatctatctactcctatatgtagatgacatgcttattataagccaagaaagatctagggttgatttggttaaaaatctacccaaaacagaatttgaaatgaaagatcttggcagtataagaatattttattttgggaaatatatttctatttaaggaaataaataaataattgat

SEQ ID NO: 372034 - DNA, 647 bp, Cannabis indica
tttttctttttcttttaattttcttttaattaaaattgatgatgaaaaaagtgatactctaaatattaaatatccgttccttttagtttaatctcacttctccattattctctcttcatgttcatcattgtaacaccctactagtttaggcgtgttaacgtgttttttaacttaattgtgcagctcgttactaatcaatgagtttattgaaaatcgtgataaattaaaactttatttaattatttataaatactaaaataacataaatatataaaatcgggatcccattcacaaaatatttacaaaagtttcacagtgtgtagtacaaaagttgtcgcctagcgactgtacaaaatatgtccagctgtcccaaagaccgtacgctccaggtcaaactgtctcaacatgtacaagctgttagaattattttaccaggatctaaatttactaacaagtatgttgttaacatcctaaatacttctaaaacgatatgaaataaacacatataaagtatcaggaaccttacagtggttgcagcggaatataatgtctccttccactcaggtctctaacccttgtatcctttgtgtagcagagtatcaccaagatctgagtccaaatctccttctcttgaaactggattcttc

SEQ ID NO: 372035 - DNA, 857 bp, Cannabis indica
tatattatttttacaataataaacacatataaggctatatttgggttttttggtaggcttcatgtcataatattagtcaaccactcaactcaatttgggagttgatgagtttcaagtttcaactcaatgatgtttgctacaaattattctaaatttgacatttaatagccactaaataataaccaaacaattgacttgtaaaaattaaaatataaaactcaagagctaaattgcaaaagaaaaaagtaaaatcttaatttgataaaaaaaaacatgaacggatgttgttggagattttttagtactcttataataattgatttgattatcatataacgacccttttttcaaaaaataaaaaagaaaaaaaaaatataaaaggttaatacttttttaaactctgtgttttataaaaattattgattgaactctttgtttttattaaagaataaaatataccatgtattttataaaatagtatgaatataatccttaatttaatttttgacaattttttaatatagcatatgttatttttctaattgagttttcaaaacatgacatttttaactgtatatttctataatggcttatttcaaactgacttaaaatttgttacttgtaattatatcaaattctcgggtggaccattataaatattaaatattcatgccatattcatagggaaacttacattaatattagaatttgggttcatttttacaaaaatactgtcacacagaaatcttttcaaaaatactgtatttttataaaacagtaaaacacaaagcagaacaactcaaaacaacagtaaaacaccagtgaaaactttaactacagtatactgcagtatgaaa

SEQ ID NO: 372036 - DNA, 738 bp, Cannabis indica
gccatccagtttggggaagtatcaatcatttcaatttcttctgtgccagcgatgctaggctcttcgaggaacttgataggaaccaagttcgccttgtcacttacattactgcttgccaatcaagcaaacgcgtctacagttgtgttttcttcccttggaatttgtctgagaccatagcttttgaattgtgcgagcagatcatgtattttgctcagatatcttatcatcttttctcccgagcctcgtattcttcggatacatgatttactacaaactgagaatcactgtagatttcaatgtgttcggctttcatctcccgggctagttttaggccagatattagagcttcatactcggctttgttattagatgctttaaatccaaacttgactgcactgtgcaggtgttgcccccaggcgtgacaagggcaaatcctacaccagatagctgatttggagatgacccgtctacatgtagtttccaggtcggcttatcttcactgttactttgctgaggtgtttgtactggcttggggttgctttctagtacgcttctttccttgcctgtgcattctaccacaaagtttgctaaggtgtggcctttgattgttgttcggggttggaaagtaatttcgtattggcccaactccaccgcccacttgagtagccgtccagaggcatctggcttttgcaatatttggcgtaatggttggtcaatgtacacccgaacaggatgagc

SEQ ID NO: 372037 - DNA, 600 bp, Cannabis indica
ttgctgcccgcctacccgtgctgatggtccgagaaactattgagctagaaatggctaaagaagacgagttggatccccgtgtgggatccgaaaaaattgtagaaccaatggaggacgtcgaggaagtatcagtgtgcgacctcgaccccaccaaagtactccggctaggaaagagcctagacccggaggaaaaagaaaagataataaagacactgaagggtgccattgacatttttgcatggtgccaagaagacatgactggcataagtccccacgtcatcacccatgtcctcaatgtcaacccggacatgccgccaatccagcaaaaatgacaccccctcgacttagtgaaggtcgtagccttagagaaagaagtggataaactattaacgagcagcattattcgggatgtatactacccggaatggttggctaatccggtcctggtgccgaagcctaatgtgtaaagaccgcttagtttaatttggaaattagcagttaatcatgtttatttatgaaaattatttatagctatttaaataattatttatactgttattattgaattcttagatgcattttatgtcatttagtagtttt

SEQ ID NO: 372038 - DNA, 843 bp, Cannabis indica
gagcctaagcatatcaggattaagatcttttgatctaagatcaacagttgatattgacatggaaagatacaacgataagtattataatatcttaaccaagataaatatcggcacagtccaatgtatactccatacattcgaaactagtatactttgccaatgttctgcaatgaacataacacttatgcaaagtgtaagtacacttcatcggtgattatcacattagtgtaaatccaatgcactgatgaaacagggacttagtctttcgaatcatataatcacaatcacattccattgtcttgacatcacagtaattgtgaatgactatatgttctggacttaacagattttgtacatatattaaaccataaacatgaaaactacatgttaacataaatcacttctaatctcttattgataacaaataagattagattttaatgggttttatttagggcataaaatcccaacagaaggaagccgagaaggctaaagaggaagtcgagaagacgaaggaggaggccgagaagaccattaaagtccaagcggatgagtttgaggagaagcttgttgaaaaaacttactaagaaagaaatcgagaccgtagaacggtgcgataaagttggtgttcgcgctgtatatcgggcctggctttggaaccctgacatggataccagtttattggaggagaaggaagaggaaactttagctctttgcgagaagaccaagatggaggaagaagacagcgaggtcgatgaagaagaagaagatctgtccaagtctcccagcatgtagacttggtttatttatctcccttttctttcttttaggaaatggcccttt

SEQ ID NO: 372039 - DNA, 406 bp, Cannabis indica
tttagtggacttagaaattggaaatttggtattatgctatgtttcttttggctgaagtaaatgtttattacatgcaatttctctcattttattcaaattggaaaacttagaaaaattagaaaattcaaaagctctttctctctctttctttcggccaagcttaggagctgctagggctgtgtttctttgctttattcaagtgatttttcagtaagtttaaattaattctagtagaggtataccttgttctagcttcttttctttgtttgttggaatttgttgaagaatttaatggtttgcatgcttagtttaggttgatgttgttgttgtgattttgttgttgtttcagaggtttaatcttgttattttgagtagattagagctagtttgatgcatgatagtagct

SEQ ID NO: 372040 - DNA, 547 bp, Cannabis indica
ttttgaaaaaatatagggtgatcacactcgctcacgcgcgcggaaccgaggttcactcggtcatcagtgtgttcggacaggatctgtccgaaggaacacgcgcagggatgtctgaaatcccttcctgcgcgcgcggagatcatgccagcagcctctggcaccgaggtttctcagctgtgcactcagtgagcgagcacggatgggtatgcaacgcataccatccgtacagctcacaatttttcaattttcaaatataattatcagaattaaattcatttgtattttttaaaattaattcaagatataagtgtaatttgaatttgaaataggtaaaaatctatcgtttttgcttaattaattatcttatttttaaaatttgattattttatcttatttttaatttaaggtcagatattaatattttttaaattattctattttttaaattaaattgtagcttatttaaatttaaaattaagattattttaattcatgtatattttgtaatagaaatacgatattatgctaacttttaaattttgttatt

SEQ ID NO: 372041 - DNA, 645 bp, Cannabis indica
caaagattcagagaaagagatccaggttcagatattgataatgctctgctacagaaaggaatcaagggctagatatctgaacggaaggagtcattatattccgctgcacccaatgtaaggtttcctaaactttatatgtgtttatttcatcgttttagaaagttcttatttaggatgttaataaacatacttgtgagtagatctaagatcctggtaaaataatttccaacagggcatgcactcaatcactaaaggctgaattttgttttgtgaagagcactaaggatttcaaaaattagagaagaaaagaagaagaagaagtctcaaaactcactagttatctgacaagaagaaaactatgtcaatagttaatatttgcattagttggataatgagacctttcttttctttttatactaatttatttagggttaggattgaattatttgaaataaaaaaaaaggataaaaaattggagcaaaattaggacctagtagccgaccatgaagtgggccaaacactagttagatttttgccattttactcaactatttatctatttttcataaataacacttttgcaatttcaatcccatgaatgccaaaactttctatttaataatcaaattaattatcaaataaaat

SEQ ID NO: 372042 - DNA, 590 bp, Cannabis indica
gaaaggcgggcattccaggaggaagctcaacgaagggaggccctcgtggaggcgaagctccgggaggaggccaagcagaaggaggcccttgcggaggcgaagcttcgcgaggaggccaagtagagggaggtcgaggtggaggcgaggcaccatgaggcgctaaaggtggagggtgaggccgctgcccgggccagacgcgagcctcgggaggcaagggaagccatggacgaaatggctgccaaggtgaagtccctagaggatttgcaccaggcacacttgcagtctaacaccaacctcaccgtggagttgaaggagctgagggacttcagagaccaggccttgaagaaggctaaaagagatgagctcctgacccctgtctcctgcaagcattgcgccaagcgctttgacgacggcgtttacatggcctggcagtcaaatggccaaagtattaagcttgacttctatcccaagcctgaagaggctcttgctaaattccgggagaagaagaaaaggcttgatgctttgcttgaagcgcgtcggggccctcgtcttcctcctcgcatcgactaggccgcggagtccaacccatt

SEQ ID NO: 372043 - DNA, 1031 bp, Cannabis indica
ataataaatacaaacacgagtgtcaagaccaaaaccacgaacatgccatgatttcttaacaggtcacatgacacggagcacgtttcataaatgtatcatgacacaaactcgaaataacgtttatcgggcaattgaacatgttatggcatgatgcaaatttgacacaattaacataattatgtatataaatacatatattactaataaaatttaaaataataatctactattattattattattattattattattattattattttgataaagaaactaaaaaaaaaagtttttaatagatattttttagtttttattttatttgtattctataaaaaatatttatatatgcttatacatattataattatgtcatttttaaattaagcgtgttgatctaaaaatgatattataaacctgaatttgatacgaaaataaatgtatcacttagccccaatttcactttgtatatttatttgaaaaataaaataaaaacaaattatcctaatattatatgtataatacaatatttttttcaaaaacaaatatatacaaaacacttcttaataaatattacccattaataggtactaaacaaaattaagtataaatattaattttaaaaatattaaactattagattttagtccaactaacgaataataaaaagagaaattttgaatttctatgcttaatttaactacttaattaagaaaaatatataaaaaatattactttttacactatatcaaaaatatgtttatataaaaaatacttaagtcaaattcaattttttttttttgtccgatattttttttttccttatcttacctcatataatgtaaaaatgagagattttttttaattagatagaaaaactaaacataaaaactcaaattttcataaatggataatatcctttaagagtgtactcatacatatatataccaaaaatactagctatttgaatctaactgatgttttgaattagtaatttttttttttaagaaaatgaatacacaatacattaa

SEQ ID NO: 372044 - DNA, 562 bp, Cannabis indica
aacatcatcagactcacaaatctccctatcctttacaatctgataacaaagaggctcccttagccacgcattttcaaactgaaaccgcttaacagaatgatgacccgcaactgggatcataaccataagaatcggagcatggtctgaagttgagattttaagattatgtagctttgccatagtgaacatattcaaccaagcgagattagcatgccctctatccaaccgtacttcaatccaatgactagttcctcgcccacgctaccaagtaaatggatacccacataattccatatcttgaagcccactgtcaatcaaggattgttgaaaaccttggatcaaaaaatcaggatacctattaccgcctcttttatcatcatgagataaaacattgttaaaatcacccatcacacaccatggtaaagtagagttattagcaagagtacgtaacaaattccaagtagaagcacgcctactcttatttggttccccatacacaccagtaaaatgccattcatgcacacctttagaagcaactctcacattgttggaaattatttta

SEQ ID NO: 372045 - DNA, 560 bp, Cannabis indica
gatgctggcccattaaatgatccggctggttcctgaggtcagtgagcaactggctggtcctgacaatgactcttctttggatgtgttggtgggcagagtcttgaaggagttcaccagcgtaaatccttttcgatacttccctttaattttccacacttagctcactatgctaaagtttttcctttgtgcaggccagtctgaagtgggcctacacttactcctgggctaaatctgctgcttccaagaacgcagctctgtccgacaccctgaaggcggaggcgaacttggcaaggaaggatgatgaagaagccaaggcgaaagccggagcagttcggtcggagttgggtgaagccaacaagaagttgtttcctactgagaagaaaatcatcgtgttgactaaggatctggaggttgctgaccattttgaggagatcattgagaccttatctgttgaggtaaacagtcttcaagatgagaggacttctctgcgagctgttctcaatcgggtgaagaaggaaaaggatgccaaggaggggagctttcggccgaggtggacaggt

SEQ ID NO: 372046 - DNA, 1424 bp, Cannabis indica
cctacaattgattttatacataaagtaaaattactatagcaaaaatgtgaagagaattcacattgatattttttgataaatatatatatttttaaaaagatcgtgttctcaacagtacttaattaaaaatataaaatgaatatatttagagatatttttttattttattttatggtgtttttctttttccttttttctttttttttttctttttttttttttgttgaaagaaaaaatctttagagttctctatctagatttattgtatattttagtcttttcacataatggtaaatatgtaattaattgtttccaaaaaaaaagttgtctttattaagattaggagtgtaaatataacttttctcttatttttacatctatctatataattatatgtgaatttatactataatttatttctcacatatattaatattttgacaataatcttatttcttatctaatacgcctttgtatattaaagattcttaataatatttttatcatttattttaatttaattaatgatggtagtagatacataatgtgcataattttttataaatgatatttatttaaataaataaatatgagttttacatattctttttaagtgcaaggtgaaagtgcaataatatatttatcttaatatttatataaatagtaaaaatattgatttcgacgattcttttcttttcaaatatttttttcttaattgctttgataatgttttgatcgatctatgatatggtgatgacattaattttgaatataataggattagtgaaatatggtgttgacaaaaaatttgaaatgtaatgacgatttaagtgagatccgataatgacttttaatgtagtggtaattttttccattatttgttttgataatgtttggtcaatcttcgatatggtgataacattaattttgaatattatagtgggattacaaacacagtgttaacaaagaatttgaatgtagtggcgaccataagtgagatttagtaatgataattaatgaattttaatgtagtggtaactacagtgagatacaatattgacgataactactttgaataatgagaattgctaaaagagcactactggtgactagcaccctccttagtatcataccgctattggtataattaaatagcaagtcccatataaacttaagaaaataaattttaaaaaatatcgctaactaagcataaggtgacacctataaaaagtactgggcaccactggtacccaataacaatcctctttgaatatagtacaagagagaaatacacgactttaaatactttttttgtctttcaatttacatagctagatataatttttgccataaatatattataacattttcaattatatgacataaattttgtggtgtatacacgtttctaataacccacaaat

SEQ ID NO: 372047 - DNA, 542 bp, Cannabis indica
ttctcttccctttcccattttttttatctgaaaaaacccatgaccatgaacaagaagaggaagaggagggagcagtccttaccccaagaccacgaacaagaagaagatgaagaggagagagcaaccattaacgaccccgaaaacaaggtttgtttttattttttttttcttccatttcattttctctaaaaatacaaagaaaaaaaaaaccaatctcccaaaccggcatccacatcatccgtccgcaccacccaacttcggtgttcacccaacgtcggcctccactcaatctcagtcaggtactctctctctctctctcattctctttcactttttattatgatattggtaatattgcaattgactaattatattattgtgttgaggttaatataatttataaataattttcttattacattttaaagagtcatatatatatatattaattattggttttttattttacaaaataatttagttaatatgtattcgtatatcacttaaaagataaaattaatttataatttataattttttta

SEQ ID NO: 372048 - DNA, 745 bp, Cannabis indica
tcaactcccagctcaaaggccccgactaatggatcgacccattacattcacggaagaagacaccaaaacagtgcgttttccccaccatgacccgttggtcatagaaacccccattgccaataagattgtggccagagtcctggtcgacaatgggagttccgtgaatctgctgttcaaagaggccttcactgcaataggcctaacggatcgagacctttcgccaagtggttcccaactcacagggttcaatggaacaacacttatcccaatgggaaaagtgaggcttctagtcaccttgtgccccaacacaccccagagcaccttcaaatactgcacgttcgtggtagtggactgcccgacagcgtataacgcaatccttggccgaccggccttggtgcactttggtgcggtcacgtccatacgacacttgtgcctaaaattcccaacttagtaagctgggatagggactgtgaggggaaatcaaggggaggctaggcagtgctacaacgttgctgcccacctacccacactgatggtccgagagactattgagccagaaatggctgaagaagacgagttggatccccgtgtgggatccgaaaaaattgtagaaccaatggaggacgtcgaggaagtgttagtgtgcgacctcgactccaccaaagttctttggctaggaaaaagcctagacccggaggaaaaagaaaagataataaagacactgaagggtgccattgactttttc

SEQ ID NO: 372049 - DNA, 1045 bp, Cannabis indica
tgcccccggaaatttagacaataaagctataacatctttaaacagcacccccagctcattaaaacacaacatccttattgatagctgaaaaaacaaacaacaccaagcaacaacaggtattaaaagagacaaaccttaaattaaaacttaccgacaaagtctctgtattcgtagggcgccgtccacaaaattgacctacaaaacaacaataaataaaattatattactacataatttaatgaaaaaattgctaaaagacaagatagttaaataatccatattataatataaaaacaattcataaatataaagacttgaaatacttatctgtcaaaactgaaaggtcgttgatgtagaagccaagagcacaaaatggatcacttcttttgtccattgactgtaccacaacactaccctaaacaattaagggcaagccataaaaaatggcacgaaagccgtaaaaggcacaaaagtcgtaaaaggcacaaaatatacatgtaaaaagcataaaaaccatcaaatcattatgaagaatattgaatgagaaactataaatataattaatagattttaaaataatttgaaatagataattaatctaaattttttaaaaaatttgtttgatcttacttataaatacggaaaaataaaagtaaaaatactaaagatatacaaaagtaggctcaaaaacagtataaattattttaaaaaagtatagtataaaaacaaaagtttatataacttactaaaaattaataataatactattacataatagaatagactataaaagttaaaaactaattaataataaaataatactaataaaccctcaaataaacaataaaatatgaaaaaacattataaaagttaaaataatataacaactcatgctaaaaaaaccttaataaaaaacttagagaatgattaatatacaaaatataaataacaaaagtttagaaaatagatattaaaaccatattaataaatagctaaataatataatgaagggaaattcaaagtaatcaatataataaattattaa

SEQ ID NO: 372050 - DNA, 502 bp, Cannabis indica
atctagttatgtgtgatttctagtattttttttttttttgagagttttgtgatagatattttttatttgagtaattaatgtataaagttaaataagaaaaagaaagaaaaaatgacaaaatagaaaaattaagtgaaaagttaattaacttacgaaaatttaaattaatataagaaaattatatcatcaatataaatatattaaaaaaaataattagcaaaaattattgtatattgtaatccaaaatattacgttagggagtgaaaactaaatatgacactaaattaattatcacgtgtatgtagaacttttggatgaacttttggattattattgttttattaaattactttaatcaaataggatttgaattatttttgattaatgggattaatatatatgaagaataatttgaattaatcttataatcttaactttaatcaaatagggtttataaaagaggcataaataattaaataaggttagaaatacggtaattaaa

SEQ ID NO: 372051 - DNA, 529 bp, Cannabis indica
cttcaagagcaaaagagccaccaagaggtaactttggtttcaataagagcacctaaatgttacctaaatattttatatttaagtattaatgacaacctcaaacaatatttatgctattttatagtaattttttccccaagttatcaatttgatagtagtagtgtatgacattattttatttgtaaagtaaaccaattagaaaaaagagattgtcctatttatatttatacattagtggaataatacaaacgaagtatggttgataacatatatttaatgctcaaaaaataatttttattagtagtgattgtagtataaattggacagtcgattcgataaataggttattataaacaaaatgttagtagaaaaaaataaaataacaacaaaaaaagaaaatagtttagcatgtattatgtggtgttaagtacttctcaatgccaataatttctaaagaaaaatttaaattgatacacattcagcaaataaattttaaaaactcaaataacaaaatttaaataattaaatg

SEQ ID NO: 372052 - DNA, 522 bp, Cannabis indica
agatcctggtaaaataatatccaacagtatgcgttcttgtatagtcgcacttacggacatcgcataccaaaatgatagaacctagactttcgagtctgcgttggtttatcgaggctgttgcgtcatcgagaccagctcgcgtcatagagactcaagctctaagtttatgcaggaggatcgagaggatactcgcacatatactggtacatacgagttaaatctgttccttggtcctacataatgcgaagcatacgaatgcgattagacttggtcatattcgcatcatctcgctgattctagctcagacgaggtttaaactggaggagtctctcatggacatctcaacttttcttgggaaaattgagtacacgtgtcctccaaacaggagtctggtctcgagtttctaggtgagagaaatctcaccataaaacatgcccctagtttcacgacttgacagatgcggtcatgagggaaactatttgcgagagacaggggataggttgtcacgaggaggtgaccttt

SEQ ID NO: 372053 - DNA, 575 bp, Cannabis indica
gggctacatgcatgacgggaaggtttccttttgcttacaatatctataattggaaaagaaaatttatttacataatttagaatacatgaaataggggattgagacagccttccgtatccctctgattcaatcccatgattgtagggattgccttcgtgcttgtacttcacgataccattctgcagtagtcaagtcctggtacacagctcggagaacaaacctcattctttgctcggatactttgccctttactttgctcggataagcagattttatgcgtgcagatatgttgcttgaagtctgttcggaatatctctccacccaagtgcaaggaatgatagacacgtgtcactcgtacatgttgccacgtcatagtgcaaaaaatgggataacatttgcctccaagtctgcgcgggacttccgaagtcgcacgtggacttcactcggtttggatctttatttgaacagttggcacgtgttcaaagcgtctgttggtgatccgacgagatttgaccaagggtatcttcaatattcggctcattaatgttgactgacatgtacctcgaattacaccc

SEQ ID NO: 372054 - DNA, 647 bp, Cannabis indica
ctagtggtgcctaacactttctaaacgtgtcgtataattaattagcgatactccctaaaagttattaaattaaactatatgagactttatatttaattggactaataataatgtatattaacgtagaaaagggtgttaggcaccactgatactcttttaacatttctcatataattatatacaatcattggtaatatcgtctcacatatttgctgttccaatactaatttataaactctggtatattattacaacttcaataacatatgaatcttcccaattttatattaatggatatacataacatataatattaaataatagcactttatatatataaggttaatttggcttatatgccgtcttataagtattattagaccaagtctaattcaaatcacgagtttagaggattgagtcatggaaaacatatacatagattacttttaaacggccggcatataatttcattatatatatatatatatatatatatataatattgtcacactacttaaataaagaaagaaccacttcttttattgaatagaaaacaattaatagtttcgttcatgacaactaaaatagaatacaaagaatgacaaaggaagtgagttgaattgagttgagttcagtatatagttaat

SEQ ID NO: 372055 - DNA, 345 bp, Cannabis indica
tttggtatctgatattactgtcccgtttactattcttttctcatggtaaaccaccactctactcttagttttggtttgcttgtacgagtagcctgtgggtgttttgtttcaattgatataaaataaaatagcggaattttcatttttttttttttggaaaatttataaaaaatggtttttttaagaaaaatatattttgtggatttttttttttaaaagggttatgggaaaaatttaggtaaccaactagttatgtccttagtgtaatcagttactttcttgttacttattttttttctatattttaaccttttatatatatataatatataaatatatatatat

SEQ ID NO: 372056 - DNA, 658 bp, Cannabis indica
tcaggggtggtgacacacccacacgcgcgcggacaccgagttttactcggttagatgcgtgtttagacatagcgtgtctgaagaatcacgcacggggttgtccgaattcccctatccgcacccggacgaggctgcttgcagtgtctctggccgagttttcccgacgccgtcccctgcttagagcgcacggatggtatgcgttgcataatattgatacaacttgcaattttttttttcaattttcttcattttttcatgatttttaatagaattaatttcggattttttgtgtagttttgtatttagatttttatttctcatattttaaatctaattatcaaaattaaattaagtagtaatttttaaaaattaatttaagatattagtgtaatttgaacttgaaaataggtaaaaatctaatttttttctttgcttaattaattatcttatttttaaaatttgattattttatcttatttttaaattaaggtcagatattaatattttttaaattatttctattttttataataaattgatcttatttaaatttaaaataagattagtttaatcatgatattttaaatagaaataggatattatgctaacttttaaattttgttttttttttatttaaattaaattgtaaaatcagaaa

SEQ ID NO: 372057 - DNA, 524 bp, Cannabis indica
ataataataataatagtaaactatagattaaataaaatttaaaaaaatactactaattagttgggtaaaaatgatttagtcgaacaatctaaggagaaaaatataaattaaaaattaaatcacatcatttatttatagtgtatatatgaagattgtgaacaatgtgagatttttataaaaataagcttagtaaataattgtttttttatgatataaatatgagattctcacaaaatttgacaaataaaaagaaaaaatataaaaaatcacatacttttatgctttcctttttataaatatataaattaagagaaacaaatttgatataaatatataaataataaaatagatataattataaactataaatttgacaagtatataaatatagggcaagattgtggtaggacttaacaaaagttccctaccggtagggaacttttttggaccattgagattagatcatgtggttattataatgtaaggtgtatattcttacgataagactgcttgtatacaattaa

SEQ ID NO: 372058 - DNA, 605 bp, Cannabis indica
tagaaccgaacacagacctagcctcagacccaaactgagactggaacaagggcccaaacacggtcgtgtacccagacctgtattgagacccgaagcttgacctaaatctgggacccaatcccaaacacagacttggacctagatagggatcctaatacgaacctggactcggaccaagacctagactgggatcgaaatgcttgacatagatcaggaccgagatactgacccagacccaaacttggatcccctctcgggaactgaactaggacgtggacctgaacctagaaccaaatcgtggtccagacctggacacagactttgacccgaactaaaacccacacctagaatcacacccaaagctatactcggacccgaacctgaacccagacagggatcagaacaaagaacatagacccataacttaatccagacttagatcgggattggaacttgggactcagacccaacctagaccaagacccaggacccgaacccacacccggaacctgatctcgacttagactgaaatccgaacatgaacccaaactcagaccaggacttgaactacgacccgaactcaaacccaaactcgaacttagaat

SEQ ID NO: 372059 - DNA, 803 bp, Cannabis indica
atcaagtttatttcatttaatttacaaaatatcaaaagataagcaaaaatcaacttttctctcaagttctctatctccttcaaacccacccagaaccagctagggtttgggttgttcttcagcatttcaagcttgttcctgcaagtgttaggtgatcttaagctctaggtaagtttctagtatccttctctttagtttcttgagttttaaggaaatggatttatgcatgatttatgaaattagttgttgttgttgttgtttgaagtatgcttctgatgtttatttatgtttagatatgttgaattaagcatgttttgatggctggtttgttgtttgagcaagctttgagttttaggactcaagcttggctctttaatggtgttttcaattctgagcttgggtagttgttttattgcttggaatatgcctattagggtatattatgcaggtttggaaggtttggtaaggtttggaattgatttggttagggtttggatgtttttggattttctggtgttaaccggctaaccggttttacaagacctgtaaaactggttacccggatttgctgctgggttccctgaaaaattcgtgttgtcgattcgtactagtttcagagctttagttggttaattccctgctagtttagggtatttccatgttatgttacaatagataggtttttggtttaaaacctaagtccccggttgtgatttagcgtatcacttattcatgatgttatcgatgtgatttaggagcctgtaattcacagagcagttgttccactcaggttggccagcaca

SEQ ID NO: 372060 - DNA, 511 bp, Cannabis indica
tagtaggtgactttttccaagacatggtattttcttgattataaattgcagtcataacaaaacaaacacaaccatattcaaatgtaaggtaccaggttactttcacaagcaataaaaaaccctaggattgaactagcaggtgacttttttcaagacatgttaatttttttattataaattgcagtcacaacaaaacaaagtcaatcatattcaaaagtaaggtaccaggttacttttaacagcaatataaaaccctaatattaaactaacaggtgacttttttcaagacatggtattttttgttataaattgtagtgacaacaaaacaaactcagccatattcaaaagtaaggtaccaggttactttcagaagcaatataaaaccctaaaattaaacttgcaggtgacttttttcaagacataattttttttttgttataaattgcagtcacaacacaaaaaacacaaccatattcaaaagtaaagtaccaggtgttgggttttatgccct

SEQ ID NO: 372061 - DNA, 741 bp, Cannabis indica
gttatttttatgattgttatttttttagttttatttctaataattttgttgttgtatgtgtgtttctttgtaaatgtagatatgtatatttagtttattttttttgactacatttttttaaaatataatgattaagatttttatttttttaattgacacaatgtgcagtagtagatattgacatattaattatatattacccattatattatataccctattttgaaatcataagttttattattttttaattaatgtaaatatttatttaaatttaaaaaaataaattatcattttaactatcactaactcaaacaaaaaaaaaattgaaagaataaagttgtaataataaattccatgaaaaaaaaaataatttaatagtacaaaaagataaatcaagttgtcaaaactaagtacaaaaaaagttcgtaagacaaaaatatattgagaagttgatattagtttgcttattgcaattagtcaatgttttgttattttctgttgttttgtagttatttttttttttctgttttcatattatttgttaagtgcatgtttagcatcataactacaaagttataaaaacaattttagaaaataaaattacaaaaacaagaattttaaaaacaacaaaatattttttttttctgttttaaaaaacaattcacttttgatcaatattatttttagaaaatactaaccaaacgcgacatgtgttttgaaaacttcaaaaattatttt

SEQ ID NO: 372062 - DNA, 479 bp, Cannabis indica
ttttctccaatcattgtatgtcaatggaagattttgtcttccatacaagccaatctggctaaccagttcatttgcagtgtccccaatgcactggccccattggttgtatactcgacttcgggagtattccttcacccctattctttatatgcttcaaacccttatatgccccctaccttttttcttctttggttgtgaatcaaggtcaggtttgggttctggtgcagctagatttgatccaggttccccaccaatagattgtccccaaagggcaaaattatcatcattgtcatcggggtcatccatagtcaatgtacctacacattaaagcaaaataataatatataaaagtaacataaaaaatttagattaggcgcaaaaaaatataaaacaatataaaacaaaacacaccaatatttatagattgatagtttactcaatccatagtccttcaccatcttcacgagaagatatgattt

SEQ ID NO: 372063 - DNA, 551 bp, Cannabis indica
aacagaacgatctagatctgtggtggtataggagggatagtaagaagttggtttaacatattgattaatctcactgtaggaagtgctagaataatctccccattgttaattatatgtgtaagtgttgtaatagggatcatattgatacacttgtggtgaggtacaataaggatcatagtattgttgattgtacatcgtcatgattctaaaggaagatctgaaaattaaaaccacaactagaagaacaagttagtaacaaaaattaaatatgaatatttttttctaatttttttttctaaaatctaaattttttctctaataaatttttctctaaatatctatcttttattctgattttttttctaatgatttattcttcttatttttttttttaaaaaaataaaactactaaaaactaaatatgaacaataaaataaaacaatagtccccgacaacggcgctaaaaatttgatgcgtgtcgtaaaccacaacaaatttactatttttttaattccaatactttcaattattttagtataatcgtaagtaag

SEQ ID NO: 372064 - DNA, 353 bp, Cannabis indica
tcaaaacccaagtcgccattaaagcccaaagctttgaactcaaagttcaaagttgcataaaaccaaccataaacctcaaaaccatctgctatggactaaactcaactcatactaaccctagaattcgaactaaacaaacatcaaaccctaacagctcctaaaacacaatttcactacttcaactaattcaaaacttaaaaattagagaagagatcattagggcttaccttaggttgatttctgcccttgaattccttgctgaaaaataaaaaaaaaatggaagggaaaattggttcttgccccttgattgtcccagccgaaagaaagagagagagagagttcatgaaatgtct

SEQ ID NO: 372065 - DNA, 505 bp, Cannabis indica
tggcaacgaaatataatgtcttctttcattcagatctccaacccttgttcctttctatcgtagagtattaccaggatttgaacctggatctccttagattatagaattcttcacaatcttccacactatatttgagtaatgacttgaattgtgtgggcaagtactctcttcactatatagttcaaaatcttaaggagagaagagaatagattttgaaattaataggagcctctcttattttgtctaacaaagtgaatttgagttatcagcttatgaaaataagagcctataattatctatttataggatttttctcctagggctatgatttaaattatatggaattaaagaaagataaaataatggcttaattaatcccttaagtggctaaacctctatgtgggccctacaggtttcaattttgttattttatttaacaatttaccttttcttccataaatgtcatattttaattctaatcttataaatatcaaatctatctatt

SEQ ID NO: 372066 - DNA, 679 bp, Cannabis indica
tggcataataatactgtttatgaacgtcttgattgggcaatcggttctgagtcttggagggtgctattcccaaatgctattttgcaccacttgcctttttatggttcggatcatcgagctatcaagattgttctacactctaacccagatcttaaccaatcccgtagacttagaaagcgttttcaatttgaaaatatttggttagacaaccccagtttttataccactgttagggactcttggaataattcttcccacctttctgatagcctagatgctcttggcacctttttagccaagcaaaattcctgcgtcactgctttgtcctcttggcacaagtctgttttgcctcatttccagcctcgtattcaggatattcaaagggaaataactaggattcaatccttaggccctgattctagtgagcataagattcatctcaaaaatctccaatctcagcttgatgctcttctctacaaggaagagatttattggaagcagagatcccgtgtgtcctggcttaaggctggagaccgaaacacaaaattttttcatcgttttgcttcccacaggaaaaagaataataccattcgataccttaaggatgatgctggtaattcaactagtgatcctgaggctatgtttgatattatctcttcttttttctctagtctttttt

SEQ ID NO: 372067 - DNA, 736 bp, Cannabis indica
atatgttcaaaagtttaattcccatgatttgttagtacactgaatttacagtgacatgataatcagcgataaagtatacttacactttggataagtgttacgtcttttccagtgcattggtgaagtaagctagtatcagatatatggagtatatatcaaattggaccgatattaaacttggataagatatcataaacttaccattatatctttctacgtcaatatcactagtcgatcttaggtcaatagatcttaatcctgagatagttaggttcgatcttaattgtattatttatcttcttagacatgttcgtgaaagccaaccaataatttgggaaaatacttacatcttgggaacatgatagtataattgagtgggagggctaatcatagataaggaatccatagcttctataagtatttagaagtgaaatgatgatctcctttgaacttgaattaatagagataaatgattgacgcctcatttcagtaattatattatcttactgaaatatcatttataggtagctaagtgttttaaggataaagtacattgaagagtagaatgataaatttatccctatacgatgtagatcatctatagaggatctttgactatttggattagatcgatgtacaattcgtagagtttatatatcttggtacatgtagagtgttctatgtaattaagagtgcaattctaaatctatagaagtgcatgttgggttttatgccc

SEQ ID NO: 372068 - DNA, 621 bp, Cannabis indica
tatatatatatatataaaatgctattttgaagggaggcaatccgtcaggccagggaatggatagatggggctggaccttagagtctagcgggaggtttacaagtaaatctgcttaccttgctcaagctttggagagagccagccactgcgaggtggctccatcgctctggaacaaactatggaatagtgaaattctagagcggcacaagattctttggtggtgcatcctctctacggcgctttctgtcagagatgttattgggaggagattccaaattgaagataccagatgccccttatgtgaacaggaggaggaatctattgaacacctcttcctaacttgtgatgtggcattacacttttggcgttcctccccttggggcatatatccggtcagtggcaatgggattcgtgtttggaactgggtgaagtttctctggagtcttaaaaacaagggtatccgtgaagaggatgtctttctctatgcatcgatagtaattgataccatctggagggcgcgaaatgaaaaagttcacaataacctttccccggatgtttcaaaatgtattgacctttgttgcgaaaattatgtttatacgcaagtgtacgcaatcaagtagt

SEQ ID NO: 372069 - DNA, 569 bp, Cannabis indica
attatattacatccatgttttaatcaaaatatgtgtgctatagagatactgtggtatattgagcattgtctagagttcaaaatgaactacatatgtcaatagctttatccacccctaagtgttctagagatcatgtggagtgatgaatataatcaagagttcaaaaatataaaagatcgtttaactgcatatattattcttaacttcttccacccctagcagatcaaaagatcttttattaaacaaaatcttaacaattatttaagaattaacaattattcataaacattgaattgaaaattctaagtgtttatgtggtattagctctttgcagagatgaatataccataaattttgtatcaataataaaacataaacacatacaaacattataaacatataaatataattggcattggcatacacaagataaaaaaaatatgaagctcaactcataaatacaattcattaccaaagagaaaactttattataatattctcaaaaaaatgaattgtctacaataataatgaaaaatagggaataaaaaatctcaaaccaataattgaaa

SEQ ID NO: 372070 - DNA, 514 bp, Cannabis indica
accatgggtaatgcatggtcaaatccctaggtgctgtagggattttatgtggaatgtccttattgccttttgactgacgtgactcttcgcagtgtagccgtcaatagacttaagtgatcatagccttgtaggtgcagatcgggggttgtgtcgtcagactttattgcgtgtggcagtcccaacacgtttcctcccatgcggcattaaatgcgagatgactgctcaggggaagcctgacacctcgcggagatgctttgatgctacttaggcctccgggagcataggggacttcgtatgccttctccgggaggcaggtcccggatgctgcctttcttcataaagacttagcaattaattcaaatgttaagatcttttggtccacgtgtccctgtctggttggtccacgtatattgggcaaaatcaggggcaacaaagttatattctagtattgattgagttcttatgcggttattatttttggattttttttttttttttttaatttttagtttgt

SEQ ID NO: 372071 - DNA, 465 bp, Cannabis indica
tgactaaaagtaaaaaaaatttgtagtgttaggcatgtttaaaatttttgggaacgcctaatttcaaccgttatgctgtcaaaattttggtagaattaggataaatttttctaaaaatgcataaatgttaaatgaaatgtgcataacacaattaattagttaattactagctagttgcaagaaactaggtggcataacacaaataattatatacacatttatataatttaatcattacatatattctatataatttatatttatgtctaactttaaaagctcaaattagtaaaactctaatagtaaaactttttttacattttaaaaaatgtacatttgacataatttaaataatgttgtgaaagaatcacttttcactttattttgttttgaaaagataaatcctatatccacatgaattacaattccaaaggaataagtgttaagttttatgccctaaataaa

SEQ ID NO: 372072 - DNA, 563 bp, Cannabis indica
ctatttagattgggatttaactttcttgtgctcgttatgctttacagttggagtggcaattagtgttggtgtgtcgtgttcgtgttgtgttgtcttaaatttactaaaaagttggtgacacgaacatgacacgtgacacgaaaaaaaaaacacagacacgaacacgactcgaataagtttgtgtcgtgtcgaacccacaatatcgtatatcgtgttggcgggctgtaaactaaattattgattttcatgtcatcatgccttgttcgtgttatgttgaattttgaaatttattttagatggcagacacgaacacgacccgtaacataaaaaaatgataaaacgcatatacaagtagcaaaattttcatgtcgttgtgtcaaactcgtaaaatctcgagtcgtgttcatgtcaaatctgcgtatcgttacctaaattgctttcctactttacgtctcaacttgtattttccttgtatagatgttttgaagtcattaatgattaatttttattttttaaaaaaaaacatatattaaataaaacaaataataacaaagttgtaaaaa

SEQ ID NO: 372073 - DNA, 967 bp, Cannabis indica
aatttttattaatttaaacaataaattacataaatttggtaataaataattagatgcacaattatacaaattgacacaattattacatgacctaaataaatcatgtaattaattaccaaattaaaacaaatttttattttcaatttatactagatatatgtaattaaacaaaaatagaaaattgactaaatgcaatttatggactaaattaacacaaaataggaaagtaattaatattccaaataaaaatttataaaaaatttggaatttttccttttttttaaaaaaaaaaaaacttaagacactgcctataaatgacatgtcgttttggcaaaaccaaaacgacacgtcattttttccaatcctgaagggctgaacaaaggagtaaaaacgacacgtcgtttaacgttctaaagggttgctaatgcatgtagaaaacgacacgtcgttttccacaggggaaaaacgacacgtcgtttgggaaaacgacagcagccatttaatcttaaaaacgacatgtcgtttttccactctggaaaacaacacgtcgtttgggtcgtcttcctaagccaaactgggtcgttttgacccgtttttctgcaactcgagtccgaaggaatcgacccaaacccgatcttaaatttcgttttcgacgaccaaaagaccccaaatcaattccaaatggatctaaatgtaaaaattaagacattcatatagatttcatgcatcgaaaacacgtaaaacaaagactttaaaatcaccaaaaatttcgggtccgaattttttttttttgtagatttctttatttttcaaaatgagttttcatgctttagaacaatctatattaatatatgaatgtattgattcagaatgtataatgtatatataaacatatatacatatatatatacagaaaataaaataatgtaccgtatgtatatatataatcatgaaatgtatatatgta

SEQ ID NO: 372074 - DNA, 703 bp, Cannabis indica
gttactattttttcagcatacaagtgcataaatttttgaaagtttgggagtctttctaatagctcaaacctcctccaaatcactcatttaatactataaatgcccaatttatgattggcaacatccaagggctttattgtgatcattcatgttcatatgagagtgaaaactctatataaattgaggtcatattgttcacttatgagagatgtagtttaaatttattgcggttagaacctcgtgaggatatactcatccttagactctaggctaagcatatgaggcttgataaatccttaaaaatatttctagagtttccataagtgtcctatgaggaacgaaataacttttaggacaaagatccttgagtcttggtcaagcttattatatgttattcttcttcttctctagctttcttgtaatcttgatgtaatacttttatttatattttgagtattttattgtaatcctcctattttctcttgtaaagaaaacattttctaacaatctaaaagtcattttgatggcatatatttatttctaaaagacttgacgtggaggtcatacaatcaaaaaagttatccatgagggagagcatcaatcaagatcatgagaagaaaaacatgtgataagagattcaagccatccatgggtaagcattgtgaatttattttgtgatatactatttatttgatagtaatat

SEQ ID NO: 372075 - DNA, 548 bp, Cannabis indica
gaataaagtaataattttttgaatactatacaaatatagatatgtaataaaaaacagtttaatgttatgaatacattagtattatgagacacaaagtgactccggtaataaagttaggagaatagtgatcccggtacactactgatgatctgagtacatactcagcccaaaccacctacattgatagtgcgacttctgtcatagtgcatcgacatcaccgagtagatccgtggttgtactgggttcagtgagttcgttaagagaatagtgactccggtacaccacaactaacttgattacatactatgtgtcacgagacccctaaacactgccagtgatagtgtgagtactacgaatggttgagtgtcactctgtacaaccctagctcgaaggggttcagtgagttctttacgagaatagtgactccggtacaccactgttggatatattttaccaggatctagatttactaacaagtttgtttcattaacatcctaatatgaattctaaaacaatgaaataaacacacataaagtttaggaaacctt

SEQ ID NO: 372076 - DNA, 689 bp, Cannabis indica
gaccccacgacccaccacaccacttccagcgaaacacatttcgaaaatgaaaacatagaacaaaattaaggaggagatatcgcgaaaccataaaaaaaaaattgtacatctcagaaccaaaatctatgagctcaaccaccccaaaactcctgaaatccctacctatcgttgaagttctcaactcacttgttttctgcatttttgtctggtttttgatgatgtcgcgaaacatcgcgaagtcatgaaatatcactaaatgtcatgaaatatcactaaatgtctctaattcacaatatcgcaaaacacatcgttaaatgtcacgaaattatactcaaattttcatgattattagcaatatttagcgatgtgttgtacattttttagtctcatatcacaaatacattgctaatatcatcgtgaaacatcgctaaatacgcaaaacatcaccaaatgttgcaaatcatagctaaatttcaccctaacttcggatttgttctatcattgtaaatacatcgctaaatatcgcaaaaaaactggtaaactagaagaaagaaatgcaaaaaatgagagaggccgtgagagaagacgacagttaggccttgcggctggggttctaggtcgttcgacggttaggggttatgggtcggcgttaacaccggagagtgagagagttagagagagaatttttt

SEQ ID NO: 372077 - DNA, 721 bp, Cannabis indica
aaagttaaatggaccattaacaatacagaaaagatatattgtatatttgatattggtgcactcttttacatctggttttttctttaaaaaaaaaaaacctactttatcaaatacagacgacatggtgttgggtttgagctttcaaaaaaattttaataagttaattccaagctattggtgacactataaatatataaatatattgtatttcaataacaataatatatatgatgaaaaactcaagactataattattaaagatctaaaaacactaaaatataccaatattacttgtcgaattatatattttaaattagaaatacattctttaaaaaaatatataataatatttttacctatgaatttatgacactattaaatgatgtctcttataatataagaaaaatattcctcaatattataccgttgtagaaatgtgctccttttgttactttttattaggagattttacacaaaaaactagattttaggggcagttttacagttttacaatcaaagtcaccccttatgagtctcagttccaaaacttaactaaatccccaagcagaagaagaaagaagaagaagaaaaaaagaaaaaagtaaaaaaaaaaattaattttttaattttttaaaattaaaaaaaaagtaaaaaagaaaaaaaatactacatttttaatttttttaaattattataattatttttaaattaatattaagtg

SEQ ID NO: 372078 - DNA, 562 bp, Cannabis indica
agacaacagaaaacagtttgactgcgaagaatttaccgacttctgcaaccaacacggagtcgtcaaaagcttctctgcagtggcaaggccacaaacaaacggacaagcagaagcagttaataagatcctaaaagtcaccctaaagaaaaagctgttggcctgaagaattgccaagagtgttatgggcttacctgacaaccccaagaaccacaaccggccactcgccattttcaatggcatacgactgtgaggcaatggtcccggtggaaacgctattcccatcccacaagagaacgacttatgatccaataataaacaagactttattacaagaagcgttggatcagattgacgaactctagatgagtcttaaatacgaatggcagcttatcaaaagaaggtggctaaacactttaactcaaaggttaaaaatagaaaatttactgttggtgatctggtactaagacgggtcttcccagccactcaggaacccaaagtgggggtacttgggcgtaattgggaaggaccgatatgaaatcgaggacgaaattggctccgggac

SEQ ID NO: 372079 - DNA, 357 bp, Cannabis indica
ccagtgccacaaaccgcaacatggaaagtattgtggacagagcatccaacgaaaatggatccggagatggggtagcaatattatctctgagtggactccaactccaggcggccctacgctttgaattcacgacttccagtaatgaggccgagtatgaagctctgattgcaggactgagattagcaaaagtcgtgggggccacgagagtagaagtcttcagtgattcacaattggtggtaaaccaagtgtcgggagaatatcaaacgcgcggagaaaaaatggccagagaaaaaatgtagcaatttttcgggagctactccatgagttcacagattacaaagtggaaagaatccccag

SEQ ID NO: 372080 - DNA, 683 bp, Cannabis indica
aaaaaaatattaatgtgtcataaataatatattatgttcaaaagaatgtattagcaggtgcaatttatagtatttgagtaaattaaaatttttatataaatgaaaaaaaaatataaaaccgagttgtataaatagtagaataaaatagagcatcaaaagtagacttgatcttgtacaagaaaagaagttatctagcagagataaaattctcttttgaaagaaaattcttttgtggatgtaattgagtcggtttgaataataaaaattatctttcttgataaaaaaaaataataaaatatttcaaatcaaaatattaatacataattttataaaaatattaaaacaaattaatttaaaagaataattatggtagaactatgtatgtaaacaaattaatggcgaaagtacttagtaatcaatttcattatagttaattattaacataaaaaaattgataacaaaatttgtatgtaaaattatttcttgaaaataaatacatatataaaaataattcaaattaattttttttaaaaaaataattataactaaaattaaaaattaataaaatttttaattatcaataacattttaatttttttaaataaatatattattaaatattattataatatgtataaagttttaattgtatacaaacagtcttatagtaagagtatacacct

SEQ ID NO: 372081 - DNA, 560 bp, Cannabis indica
tggtaaagtttggtttggttttgaggtaatagggtcaatttttgggttcccagcacagaaccggtcgaccggttttgggggaccattagaaccgatcgaccggttggtacccaggaaccgggctttcagttgggaaccggtctgccagttgggactttttccagaaccctagttttctccgttttgtgttgtttaaggtgttagcatcctatttattgatagggttatacttaatttcaatttttaaatccccgataagtgttttagcgcgtctctcatcgaattttgaacgttgtggtttagggccctgtaaagcgtcaagctgcacttccactcaggctgaccagcacacctgagcacggaacgaggtaagatagcataaatattacatatatgtgaatggatgcttgttttggatgtttacactactaacactaatgtgtatgtgattttaagggtgttatagtatagtgtaggatatcagtatggttacggtgttactaacacgagtaacagggggtacgtctgttgggttttgtgccctaaataaaacccattac

SEQ ID NO: 372082 - DNA, 397 bp, Cannabis indica
tatttgtacaattttggaaatacactatacaaggtctattttattatttaacaaaatagagggtccaatcgataacttttacaaaacacagggtccaaaataatatttaccttatattaaataaaaaataaaataaataaaaattattcattacaattactacattattaagtaaggcatgattttaaacatgtgcttctgtatttttttttttttattttaaaaaaaattgatcaacattttctattttgaactcatgttagtcaacatttcaaaatatcaattatataacataaaaaaatagaataaaaagtatacgtgacacaataaaaaaaaataaacaatttttatatgtatatattgattatttttaaaaattattaaaaataaacatgac

SEQ ID NO: 372083 - DNA, 556 bp, Cannabis indica
ggttttgatctgggttcgggtttggatttcattctaggtccttgtcctagtcctagtcctagtttggttcttgttccatttgcgattcttagttcgagtttgggtttgagttcgggtcagagttccagtcttatcccttatctaggtcttgattcgaatctaggtccaagtgggggtcttgagtacgggtccaagttttggcctggctccggatctcggtccaaatctaggtctagcatttcgatctaagtctttgacctggttcgtattcgaatccctatctaggtccaagtctgtgtttgggatcgagtcctagatttaggtccaggtccgcgtctcaatttcggtctgggtacacgaccatgtacgcgcccaagttctagtcttagttacggtctgaggctaggttcgtgttcagttctaggtctgggtcttggtcctggtcacgatcctagtcttgttctcgagtctttgttcagcgattcttgttcaggttctaatattgggtactaggtctaggtctgggttagggtttggttcttcgtctgggttctgg

SEQ ID NO: 372084 - DNA, 807 bp, Cannabis indica
agaccttttataatgtaacattgaagtttagtgggtctacttatgtaactgcaaataagtacttcattgagatatgtaatattcacaagagttggccgattctacagttgatgaagatgaggatgagttgttgaggaacatggcgcataacatgaaattcaagtatgacaagtattggggaaagcttgatgattgtaatgaggcacttctaattgccttggttcttgaccctagatacaaacttgattatctctatcattgttttagctttactcatacggagttagaatgcaaagagatggtgaaaggggtggaacaaacgattcagagtatgtttaatcaatataatgatttagcatcaagaagtattgatccttcaatcaatcaatcacatgctcaagctcaacctattgatgatggtggttcttcctcatttatcgtttctagtcgacctaaaggcaagaagtctcgtaatgtccatgatgagttcgtggcacgaagaatggagaaaaatggtggcaagatgaaaaatgaacttgataagtattttgaagaggaagctgagcaaccaactgaacaatttgatgttttaggatggtgggctagtagtgggtgcaaatacaagatattgtccctcatggcacgtgatgtgctagctataccggttaccactgttgcttctgaggcggcattctcaactgggggtcggattttggatccttttaggagtacacttagcccaatgatggtcgaagcattaatttgtctcaagaattggtggagcggatcacatcaacccattattgt

SEQ ID NO: 372085 - DNA, 509 bp, Cannabis indica
gagtctgagacatacttccgaagcattgaaacgtggaacacatcatgtacagctgccagcgctgggggcatagctaacctgtacgctacttgccctatcctgtcaaggatttcaaaaggtccaatgaacctcgggctaagttttcctttcttaccaaagcgtttaacgcctttcattggtgatattcggaggaataccttgtcccaaatttgaaaatcaatatcccaatgctttggatcagcataactcttttgtgtactctgagccgcgagcattcacgctctaatcttgtgaactgcctcactcattctttgaacagcctcgggactcaagaactttttttcacccacttcaccccagtgaataggtgatctacattttcttccatataaaagctcgtaaggggccatcccgattgttgcctgatagctgttatcataagagaacttgatcaggggaaggtactttacccatgatccttcaaattcaagcacacatgcccgtagcat

SEQ ID NO: 372086 - DNA, 635 bp, Cannabis indica
gatacgacacattaattctgatctaaaatattcggatacttattggatctcggatcagatccgctctgcctcgccaattttttttcagatccgatctgatccaatccaatttctatatattaaaaaaacttaattcaagacttggaccccgaatccagactcagactcgaagcggacctgctgctcgggatccaaaccggacttgagaccggactcgaacccaaacttagcctcagaaccagggcctagacccggacccaacacccgaacccaaacttgaacccgagactcgagacccgaacctgggacccgaaccaggaccctgtcctagacttgggacctggacccagaatcaaacccgaaacttgggcttgagacctagactcggacccaggacccaggaccaatacccggacccagacccgagactcaaactagggactagacctgaacccaggaccagaccccaacctggaccagactcgcgacccgaaccggactcggatctggacccaaacccgggacccagatccaaacctgaacctagatccagaaccgaacatgggagtcgcgacccgtacccaaacccagacccgaaatcggcacttgaacccgtagttggtgttggaatcgag

SEQ ID NO: 372087 - DNA, 520 bp, Cannabis indica
atgcaacattcctccacttgtattccaaatttcactagcctttcttttgtctttagcctattcaacattgccaaccatagaatgttcaatcttgcccaaacttcatggctccaagacactcggttaggactaggcttgaacaaagtataacctgctgaaatgtgatatttctgttcttggaatatagcagggtcttgtatggttttgagattgtatttgagagctacaagcttcttccaataacagctggaatggatagaatctgagtagccccaccactcctctctcttgatgtacacactatataccatctcaaccatatgctttcttgtttgtttgcaataacccatatgtatttacacatagcagccttattccattcctctaatcttttaattcctaatcctccatctcttttttgttggcatacatcatcccatgccacagcaccagccccatgaaaagcagcttgtcccttccgaaggaaggttctacaactgcacattgtgtcaactaaaaa

SEQ ID NO: 372088 - DNA, 790 bp, Cannabis indica
tcttggggcgatcagtcggtggacaactccaacctttctaaagtcgtctatcctaatgtgagggttccgaccgcagagaaggtattccaggatgacatcatcgccacggcagaggataagtaccaaaagtacctcttcaagaggcaacaggaacgggcttataataaggcccaggtgaccgccggaagggccctttcgcattggggctccggtagagcagaggacccccagaccaaagcccgtggtcccggtaccgaatacgggggctcctgatgccagcacttcgggttctggtaagtctcctttaatgatacattatgtcccttccgtccgtgagtatgctagccttaggcctatagggttcgatgaacgtctccataggtttaggatgccttccactcggtgggggaatcatgccaaggagtattatttctcccacttaggcgattatttaggtcggtcctggatgggttttggacctccagtgcccattcccttggactcttcagcctatctatcttctagctggttccgtccctcggacagctatctcggggatgatgcagccagtgttaagattcgggactttgctagggccgaattagagagtcagggtaggactagcttgattgctttttgttaagtgtacgttgctttcacagatgttctaacacttaaccttttctcttgctgcagcagccgtacccatggacgaaatcttggctgttttcacaggtgttctaacacttaaccttttctcttgttgctgcggccgtatccatggatcaaa

SEQ ID NO: 372089 - DNA, 340 bp, Cannabis indica
agagcatgagcttccattagaagagccgagtgagtgcctgtccatggtttagaaactgtcagcaacatattaccttcgctgttgaaaagagccaagccaaatcctgtcatattggaatttatatcctgggctgcatcaacagtcaattttaagttgaaattttgcaactttccatgaggagcagccgctaataaagaatgatgagcccccggtgtagctgaattcatgttgttttgctggtatagattcaagtagtccgaagtagtttgtatcataagagcagggatgattcttttctgatggtggagaaattcgttcctgcaatgccaactcttccaaa

SEQ ID NO: 372090 - DNA, 1323 bp, Cannabis indica
tttccacatatctattgcctcactagtccgctgaactaactgaggatccgaattactttttttctccagttacatcccaatgaattggagaatgacatttcctaccatataacatttcatagagagtcatacctattgtactctaaataattgttgttgtaggaaaattatatcaaaggcaaatatttattccacgaaccctcaaagtcaatcacacatgctcgtaacatgtcttctagtatctgaatcgtccttttagactggccatccgtttgagggtgaaaagctatactgcattttagctttgtacccatggccctttgaagactttcccaaaacttagatatgaacttcagatccctatccgaaataatatattttggagctccatggagacaaactatctccttcacatataactccacgtactgatccattgtataagttgtctttgttggcaaagtgtgctgttttgtgaaacgatccactatagccaaaaatgaatcatacattctcgtggtcctaggtaaactaatcacaaaatccattgtaacatcctctcatttccactcaagaagtgttaaaggttgcaataaccctgtcagtttctgatgtttagctttgatttgctagtaggtcaagcacttagacacataatccacgacatctttcttcattccacaccaccaacagtagggtttcaaaatcttgttacatcttggtggtactgttggaaattattttaccaggatctagatttactaacaagtatgttggattaacaacctaatatgaattctaaaacaatgaaaataaacacatataaagttagaaaaccttacagtgggtgcagcggaataatatgactccttccgttcagatctctagcccttgattcctttctgtagcagagcatcaccaagatctgaacctggatcttcttttctccttctttgatgcagaaattccatagtcttccatactatgattgagataccacttgatgtgtgtgggcactactcatctcacaaggatttcgaaatttctctctatttttctctcttaatttcgtggcttatagcatgcaagagaagagaacaaaggttgctttatatagggagaagggagagcacaactttccaaataaaacagtttcctcttttactgtgtaattgattaactgccttatttagtgtgatccaccactttcctattatagctaggctttgattagcaattacatgacaattaaaaaataaaaataataattgggaaacacaaagggagtgctcggccatagagggaatatgggcctcacttgga

SEQ ID NO: 372091 - DNA, 740 bp, Cannabis indica
cgataccaaccccggatagttggatagtctactcacggccttggcgctgaacccggcttctgaacccgaacctgaatccaaccccggatcttgacccgacttaaataaaatcaaaaaaataaaaataaaaatgacatttacagaatatacttttgttttctgtttttaaaattgaaaaataaaagtggttaccaaaggcatttttattttttaaaaacaaaaattttactttcattttgtgattaaaaaattaaaaaacaaaagtgttaccaaacggtacctataaaaatataaaaattacttaaatatttatcattctcaaatgttacgaagcgcgatatagtttcttaattcttatataaatcttttcatcttctatagtttttttttttgagatattcatcttctatattttagtaaattcataataattttataactttcgttttttttgtgatgtggaattgtgaagaattgaggagagatggataggcattagcacgatgctacacatattgtaatattttctcatttgactctgatttgactttgtaataataataatataataataataataataataataataataataataataataataattgaggagataaacaaaaaaaaaactaagtaaaagaacgtgaggagatgtaaacgatatacgattaaatcatttctattttcaattttaataattaattatggtagaagtgcttatcattcatttccct

SEQ ID NO: 372092 - DNA, 763 bp, Cannabis indica
acccagatcggggtccagacctggacacaaacccagactcagactcggacccgaactcaaagccacacctagaatgagacccaaagctagacccagacccagacccaaactcgaacccaaaccaggatcagacaaagaactaaatcaagactatgatatggattggaacttggtactcggacccagcctagaccaagacccacgacgcgaacccacaccgggagcctaatctggaccgagactgaaatccggatctgaaccctaactaagacttggactcgaactccgacccgaactcaaactcatacttgaactcagaatcgtaaatggaactagaaccgaactaggactaggaccaggacctaaacccaaacccgaacccaaatcaaaacctaaacacagacctaaacccaaacctataccgagacccaaaccaacacaataaccgggacctggaccagaatcaggacaaggacctgggaaacagaactaggaccgggacctagtacatgaccaagacccgaacttgaacctaggagccagctcgtgactcggcaccagaaatgtaaccaaactaggaccagagatcgggatacggatctagaccaaggggttggacaaagcccgtagtcgatgtctggatttgggacccaaccttggacccgaaccgtcacaaggacccggacctgaatccagtaccaaacccaaaagtggaccttaacccgtaccttgtgacccaaaatttgacctagatccagaaccg

SEQ ID NO: 372093 - DNA, 524 bp, Cannabis indica
gagcatcatcttcgaatggtattacatcgactcagggatcataagttgtatgcaaagttaaaaagtgttaattctggttgtcagaagtaccttttctagggcttattgttggaaaagatggaattatggttgacccgagtaagattgaatcagtgaagaattggccgaggccaaaatctgtgatggaagtttgaagtttcctcagtttagcagggtattatcgatgtttcgtcaaaggatttttgaacatttctatgccactaaccgagttaaccaaaaagaatcagcaattcatgtggtcagacaaatgtgaagcatgtttccaagagttgaaacaacgattgataacgacaccacttttagctttgccatcagatcaagaaaagttcgttgtttattgtgatgcatccagacagcgtctaggatgtgttctgatgcaagctgacaaagttataacttatgcctcccgtcaattgaaagattatgagcagctctacccaacgcatgatttagagcttgttgct

SEQ ID NO: 372094 - DNA, 782 bp, Cannabis indica
ttagcacatatttgcttagaaaagctaccaagtttaagtgttcatgtttttgtgagtggcaagatttgagaaaacaacttttgaattcttactgatttttagaaatggttataattattttggacatggtactagggtttgattggatgttgctttaagggatgagttttctatagacaaatcttattagggagcctttttgcaattattttcttgttgaaataaataataaaaaaaaagatacagagcaacatttttcatcattatatccaacatgttgcctcttgttcaaaaaaaaaaagtttgttatattttttttttttttggctcctaaaataaatgtaaatgattgtctattttcgttcaaaaatcccgaaaagctggtttgtggtactcttatgatggttggtccaaataattcataatctatctttgtttcaatgtttattcaaatgtttgtcctaaattgatttatccatttcgagtgctcacttttcaatttccaactccatgagtgaatactttagccatatataaatattttcaatgacatgtgaggctaatagagttgagactttcacttggtacatttttcgaagggaaattatagtaaatgaccccaaatcataagactatgttagtttatgtcctcattttaaaaaaatatagcaaatgaccctaaatcataagactatgttagtaaatgtcctcatttcaaaatcattaatttatttttagaattagaagcaaattatttaaacattatggtatatctatattag

SEQ ID NO: 372095 - DNA, 804 bp, Cannabis indica
attgggaaaaaacctggatgaacagttgaaataacaactaataagtttcttaagggcaaaccaagatcagtttgcctagagccatggagatatgatagggattgactctaatattatctgatatcatttaaacgtcgatcaaacctacccagcaaagacacagaagaggagacccttggattccgagcaacaaggggcactcaaacaggaagtggataagttgttggtcaacgactttatacgcgatgtgttttatccctcgtggatagcaaatcctgttctcctccaaaaaccaaacggaacttggagaacttgtattgacttctctgatctgaataaggtgcgcacaatagattgttttcgactatccaggattgactagttggtggatgcaactgctgggcacgagcttatgtcattcgtggatgcatattttggatataacccgataaaaatacatgtcttagatcaagaacatacgagcttcgtaacaaacatgggactttactgttacaaagtcatgtcgtttgggttgaagaatgctggggtaacatatcaacaattggtgaatgagatgtttgcaaatcagatcagataaaacatggaggtttacatcgataatatgttggtaaagttagtaaaaaagtggaagtcataccaccaacctcgcagagtgcttcaaaatattaaagaagtataatatgaacttaacccaaaaaagtgttccttaggaaattttttgggattcatagtcaacgcgagaggcattaaagaaaatcctgagaaaatcaaggctttgataga

SEQ ID NO: 372096 - DNA, 778 bp, Cannabis indica
aaatatttgtttacttacagttgaaatttttattttagggtccaagttttgtggattttgattcttgaagaataaagactcttcaatggtggtcttgactactactagttttcaaagttgaagatgaagacattattataattttattaagttttgtgtgtttgtttgaattttaagtttatgcttatggtttttaagtttatgtttatgaattttaattttaacattaaagagtttttgattttacaatttatctaaatgactattaattatggaatgaatttaattttatgttgttttaatttagtgtttacaaatattagttttaaatatattaaaattattatattaattttgaatatattaaaattattagttttagtaatttgttttaataaacgggtccccgttaatgtgtcaattaccaacagggaatccccgccccgttccccgccggggagtatgcggggatggtgcggggacggggaaaaaaaatagtgggcggggacgggggcggggaagtgcactccccgcaccgccccgtccccactgtgcatccctactcacaccgctcacccgtataagtagtgtcgtccaaattttttaggggcaaacactactggagcaagctcgaggtcatgagtcggataacattgctcgtaatctttcaattgtcgtgaagcataggcaatgactttatctgcctgcattaacacacagcccaaaccctgccttgatgcatcacaataaaccataaatttctcttgatcagacggca

SEQ ID NO: 372097 - DNA, 906 bp, Cannabis indica
caatcattttgctggtattaatgacattagcttgccaaaatatatcatttctaagtctccaaatgtgtacatcaaggctgttgtagcagcggcaaacacaagctttcgaaactttgtgattttggccttcccaatccatctgatcagctgagggagattggttgctgctgctgtccagttataattttttttattaattgataaaatataattaataatattaaaattatttattaaatatatataaatttatattatagaaaaaattaaaaagatatagaaaataaaatttatatttcatatttttatatatatttgtaattttaagtgatttcgtcaataaacatatttactagtatagatgtaatcttaattgatatatatatatacacacatatttacacattgagtgtgaagatgtgatatggtcacaaatgctattgtttactagtagatatagatataaatatatagattgatattattattgataaaaatatagggacacgattttgtctcgtgatgtaacttttacagaatgtattttgtgatgtacgacagccattagatgggagagttatttgatttgagggctgggattgatctaggggtaattagggttaaaaaatggtaacgtaccttgagactcatctaatgtaccctgagacccatctaatgtaccacggaatatattccgtgaaagtactgttggaaaagttctcattaaaagagagaatatgaagattacaatcaaaatactcaaaataaaaatagaagtatttcatcaagattacaagaaagctaaagaagaagaagaagaagaagaagaataataacacacacaaaacttgaccaaggctcaagaacctttgtcctaaaagtacatttcctccctccatatggaca

SEQ ID NO: 372098 - DNA, 498 bp, Cannabis indica
catatgcagtgtttttagccttttgttccttccttctttatctgaaagtgagttcaatttcagggtcaatagaagcaagttcaaggtcttcttcttcctcgttcatgcactagattacacttgaaaaagaaaaattcagcgcaccaaaatagggttaaaacctcaaaaccagaaaataaattaaaaaatagttgataatactcaatttttagtttcaatccccggcaacggcgccaaaaacttgttgtgaaaattatatacgcaagtatacgcaatcacacaagtaataaagtgataagtaagaccgtctccatagggattgctataatagcaatgctttagcatttctgtccagttttcagctttagttcaaacttctcctttgcatcacttcctttttcctagcaaattaattcttcttttccacagcaaataagcaacatttaaattaaaaaaaacacacttaacacaataatttttacaagactcaaaagttag

SEQ ID NO: 372099 - DNA, 455 bp, Cannabis indica
aagaaaagaattccttaggatcaatagtgagaggtcttaggtatgctttgcaatgcattagactagacacctgctgttgagtgggagtaatgagttggtatcaaattaatctaagaaatgaacattcgaagacaatcaagtaaagcataagatcaataagaggaattatatgttagtcaataagggtggtattttaatgctcttagactacccccaaatcaggtttctagacttgcgttagtgctagaaagtctattgatgagatggtgattactctggggtggagcagtgattttggagaagtgtaaaaacctatctggagactctaactctaccagtgagactgaatgataaagttacaggaaagattcttattcagcctatggaaagttctatacagtttttggcattgtaccaacaatttattaactagtagtgttacttccttactaaca

SEQ ID NO: 372100 - DNA, 601 bp, Cannabis indica
aaataagtagaattagcggcaaattctagtttcgccgctaatgctaccactattaggggcagattttgcccatcgctaataatattatggctattgataaattttactgtagtaatagtatataataagacgacgtctaacttaactataaaatattagcacgtgaatatataatatttactctggatataaattgttactcactatgtgaatatattgctccacatacatataagtgttggaattattttaccaggatcttagatctactcagatgtatgttgattaacaacctaagtattatcaagatctgagtctgaatgtccttctcttggatttgatccttcacaatcttccaaactatgatggaggtcctgtttgctgtgtgtgggcactactctttcactagggtcattcgaaattgtatctctcttgtgtttgaagaaggagatggagggctatatatagagaaaaggaaaagctcaactttctgaaagaggcagtttcctgatttactgagtaattgcttaactgccttatttggtgtgagctatcactttccatttatagataactgctaggtttaggttagtaattaatt

SEQ ID NO: 372101 - DNA, 764 bp, Cannabis indica
tcaagtttcccaaccctacaaatagtgatgcatattcactgggcaggggagggaggaaaaaaagtcgaaacgcagctaagctaagaattaaatattcagagatactgttgtaagagctataagaaaaggaatcttcttccttgttcttaagtcaatacaaataacgaggattaggctattaccgaactgctcggggctgaacctctataaaattcctattgttacaacatatcgtttatcacttataaaatagactcattgccgttggctaaaagcgaagtcaacattttggtgctttcattgagagaaggatcacaaatctctctttattcgacactcaactgccaacacgatggtgcaaactcgtaaaggcctgtttgacccagcaaattcacagacactggatccagcattacaggacccagggagttcaagggttctgcctgctgttaatcccggacacacgtgaagcgtggtgaatggtgaaataactcttattactgaaactgcgcctggtgtgcaagagactggaataatagttctgcacccaaccaggggattcataatacgactgttccacctggaactaacgcgtagacgaccatcggagacgcaactgaattacaaaatctctgtgacgcgctcggactcatgcagagtcatagcaacactctgcatcatgatcaggatgaactgcatgctgcagtaaatctcgcgtttgacaaacaaaggcgtatgtttgctgaatggagagataaagagat

SEQ ID NO: 372102 - DNA, 629 bp, Cannabis indica
atgcgcttgctgacatagtacatgggatgctgtagttttcccctcttcccggactaaggctgggctgaccgcgtgcgtcggagacggccaagtacaaaaacaaatcctctccgagaacgggctttgacaggattggaggtttggcaatgtgctcttttagttttttgaatgcctccttgcactcgtcggaccattcaaatttctgacacttcttcaagatgttgaagaagggaatgcacttatctgtggaccgggagataaaacgacttagggcagcaacctttccggttaggctctgcacatctttgtgtttctttggggatggcatgctcaggagagcttgaattttttctggatttgcctcaatccccctctgactgacaatgaagcccagaaacttccctgacttaaccccgtaagggcacttcttcgggttgagtttcattccatacctccggactacttcaaagcattcttctaagtcgtccgcgtggctagtgcatgctttggagttgactagcatgtcgtctacgtacacttccatatttcgccccaggtggccgttaaacatccagttcaccattctttgataagttgcgctagcgtttttcagtccgaaaggcatgact

SEQ ID NO: 372103 - DNA, 691 bp, Cannabis indica
ctatattaatagtaagatatatatgtatatatatttttttaaatcagcaacacctatttctcaatatccaaattttatatcaattaatatataaatatgacgatttttgtcctgtacttagggaatatagattggatattatttgatttgagagttagagttgatctataaaatgtcactatcatatagaacaaaggaagtgtttctatgcaataaaaaaaatattgtatatgcttaaaaaaaaatatgtttttcccaattcgtatgtagatacatatttttctttttttagaaaaaaaaaacttactccttaatttaactaacaaactatacaaaatcaaaactaacctacataaaattctaaacctaaaaacataacctatccctttctctccctctcaattagtcgctcattcattcatgcaaccaattctttgttcaaaatatttgttactgtgtctaaataaaaacatcatagatgaatcattctctaattttgcttcagtataatatcttagtcgactattcaattaatagttatatttttattgtaaccatcgtgattatatttttctttgacctacaatagcaggtaaccaataaataaccattctttttttaattataattaactattttctttaaataattaattaaatatttaagacctcttttagcaattaatatttat

SEQ ID NO: 372104 - DNA, 1016 bp, Cannabis indica
aaatcacacagctgtgattaatttgcttttaccgggtcagtgttgacgtggatttggatatgctgcaaagtgtatcttgttgggtcatctcgctgggatagcaacaataaccctaacagcgacctggaacttttcccatatcttttcgaggttaataatgtaaatatcgttgtttttgctattgaagacataacgctccatctgacaatcgcagttcttggtgacaagatgatcttcagcagtcaacatcattgacggagcagtggatctcattgaaagatgtctgaagctgattagtgaaggtatcatgagtatgccttcctatagcgagatggatgccttgctatttgttgttcagactcaaccctgttatgcttaatttgtataatgtatattacacgctaagtgttctaatagtcaacatgtctcatcgctaccttcttatacatagcgaggttgatgcctcgcctagtattatttatgccaccctcatgattgtgtcttctgatgtgaaatagtttctcgtcaatgcatgagtcaatatgttgtacatccttatctcgcttaaggctttacagtcagcgagttataaatatactctgtcaactccgcatttaatgagttattccattttaatatcctttgatataattgccattatattcgttgattcgtattctcctaggttgacacgtgtccttctctgaagtgccagctaaatttcgggtataacaacttgtttataagataaaattatatttttattgataattattttatataatttattttaatatatatgattttatttatttatctagaaaataaatatatattaaattatttttgaagaaaatatttaaattatatttctttaacaatcttgagccattgttagatttttattgcatagtttcttatcaatgtgataagatcatatgatcatggatttagaaaatttgtaaatttatgtatttataattatacacaaatgactcattctaagaaatgaatta

SEQ ID NO: 372105 - DNA, 1587 bp, Cannabis indica
tcagtgcaaaccaattcgggagcatcgatctgtccaattttgacagctcccttctcatcggatgagcagatggttgttttagttttcttagtcttcttagcgctttgttgtttgttcttttcttgtgttagtttgttggtttcttagctttggtttgtactctgttaactttgggttgtgttggtgtttttttcttgtctctattgagtctaggaggtccctggccctagtgctgctttttgttctttttgttgtttgggggtgctctctcggagcccagtaataataaaaaaaaaaaaggtaattccataaatatagaaaaaataaagctagtttagataaatataggtaaggaaatttaataggaaaaaaatatgttaatttaaaataaaaatttaacatatatgggattgaattaccataaaagatataaaattcacttcatattttttttaataaaaaaataaaactaaatgaaactacagtgaattgccgaagttgttaccattgccggaaaaggcattggagttagctgtcggaaacagaaaagttgctggagttgctgttggcaccaaaaaagtcgctggagttgctgtcggcgacgaaaaaataattgaaattgacattattgccaaaaaaatcatcgaaaaaaataccaaaaaactagttttttcatcaagaaattggtttcttggtgattttttcaataattttttcagcgacaatgtcaattccgaaaaattttctggactttgctttcagtaccggcaagtcaccggagtagctaacgttgtcgaaaaaatcgtcggagttgctaccaacgccaaaaaattcatcagaactggcattgtcgttagagaaataccaagaaactggtttcttgaaatttttaggtgactatgccaattctgatacttttctgaagtttgatctccgtgccggaaaggtcactgaagtagttgctagtgtcagaaaagtcgtcaaacttggcattttcaccggaaaattaccaagaaagtagtttcttcatcaagaaaactggttccttcttcaagaaaccagtttcttggttatttttcgacaacaatgccaatttcgacaaatttttcggcatcaacagcaattctgacgacttttcctccaccgaaagctacttcggtaatttttcggcaccgacaacaatttccaatgactttttccgacattagtgacaaataaaaatacctaaataaataaaaactttaaatatgagacttaaaaacctaatttacatatatatagcatatcaaataccataaaaagacctaaacacaaaaaaataccatataaattggtcaaacttagaagtgccgtatttataataacaacttttaaaatcccatagtgagtgtaatttcttaaaaaaatgaaaaaaaaaaaagttcgtcatctggcgcccaactatctctttcaaggaaaaaaaaagataattagacttatgtacacgctacaagcaattgaaaaatatattctgaatattttgttaaaaataactagacacaacttgcgattaacaacaaattttatgctcatattaatgaagattaa

SEQ ID NO: 372106 - DNA, 557 bp, Cannabis indica
aaaacataacaaaaagtgactaattgtgaacattatcttgtgatgcatgttgtaagccacatcaaatttattattttttttaattccaatactttcaattatttaagtataatagtaagtaagattcgatcccacaaggattatatttatttaattattcagaaattagtaacaagaattagaaaaagggggtttgatgattagaataaaaattgcaataataaaaattaaagaaaagaataaatttaaagtgagactactgtatgagagactagttaaatgttattcgccaccctcaacaatcattcctaattcctactaaagaattttattttcagtttccaatcaaactattaatcccgtagataacgctgaagcagtcaattatcccaatctccctattatatgtaatcaaggcgaagcgctcaataattaactctttcacctaaagcagtaaatcagtgaagcatacaatttatttaacttagtcaaagctttgagatttatggagatagactaatctagacaacaaatcaatgaagcatataattcattta

SEQ ID NO: 372107 - DNA, 749 bp, Cannabis indica
attttcttttacaagttttgggttacttttcacttgacgatccctgaaactttcttcgcattgcaagctttggatttatttcgatcacacacacagatcaatatcaacaaaccaaatcatggctaatagaaatttaaacaaaaaataagaaaatgttgtgcttacctttatgctaccacgagagagcggaggaaagggacaaagtgagagagagtagaggagggacgacatggctcgtggtcgcaaaggagagagagccgggaaatgaaataaaatttacaaaagactttgaaaaatgagatataattttttgggggggttatatcttaaaagaggaaatgaaatttaagatatggaaagtaaaatttgaaattgaaggtgcgggaaatgatatttcagatccaaaacgcgtaaagttgaagcatgagaattgccaacggttcaaaactgttggcaatactataggcgacggtttaaaactgtcggctatactaaatcgtcgcttatagtatagtccgatggttttaaaccgtcggtaattccctttttagcaaataatgggagtttttaaggcacgtttaaaaaatatcacctataccttccgacaattaaaaaccgttagaaatatcctatttttcccaacggtttggaacactcacataattttttagtcggcagttctccataaaaagtatttttaaaaaccgtctacgaatactcttttttgttagtagtgtcttttgtccaca

SEQ ID NO: 372108 - DNA, 757 bp, Cannabis indica
  modified_base (699)..(699): a, c, t, g, unknown or other
tataatagtatattaagtcacacaaattttatcaagttacacaaattttaagacggattatgtgttgcatagtatctatttaggttatgtttgaaagttggattttagtgaaagaaactggtagggtaaatatagaaaaaaaagtaaaaaaataaataaaaattattatatttggtatgaaaataaaaatgtataaaaacactcaattcaacaaaatttatattttaaatatgaaatattgatttttttttttttgttctccatacttatttatttatttattttttacatttttcttatttttttcttttcacactaaaattcaacttccaattttatatataattttactaaataagtgatgcatgccctaagaaaaaatgagccttaggtgaaactaaattatgaggcctttttcttaataaaaagaaactgtggtatttttcaatattatactctaagaagttatttttataaataaattttgtcatgtacgtatgagactcttttggatatataagagccctaaattattagactaagatatattgtcctttgtttggactttgatgatgactcaccttagtcaagaacaaattaaaatacaattaagattatattataatatagtattatagaaacatgatatagaaaaatacaaaaaacttaataaaatagatggaccacaataattaaatntttttagttcttcaaaacgtacacacaaaattttgaagacttttttctgactttgggt

SEQ ID NO: 372109 - DNA, 349 bp, Cannabis indica
tggatgaggaggaggcgcttcctgaggaagctaaagaaggtcaagaagagcaatgggctcttcgtgaggaagttgaagaaagtgaagaagagcaagaagttgctctgatttgcaagcgcaagggcaagatggttgccgaggaggtgcccaaacggtagcggaaagctgatacaccggcccttggccctgattccgggatctcttccgaggcggaggaatacacagtgcctcccaacatagtgctgactttggttcctagagatgaggcgaagcaagaactccggatagccaaacacaactacgccatggacgagtactcccgggggcatgcttgttggaaattatttta

SEQ ID NO: 372110 - DNA, 580 bp, Cannabis indica
attttttatcattttagagattcatatttaggatgttaagaacatacttgttagtaaatctaggtcctggtataatataatccaacaactagccttagagtcgtggtaataatttactttcaataaatatggatttaaaacgaagtatgtgtgatttggatgtgattcatattgatctatgtgtttattgatgtttgcaaaatttttacgtaaagtaattttaattttgttctggaattattttccctggatagtttgtaaaaaattaagcaattcacttttttagagaacttgatttcgattttatttgaattagttatgaatttttgaaaattgaaaaatattaggaatggggatgcaccccatacgcgctcgtacaccacgtgacgcacgggtgtcacacgtgttcggacaaggcgtgtccgaggaaacacacacacggggttgtttgaaaccccactccgcgcgcggaaaggctgctagcagcctcatctaccgaggtttcttggttgtgcagccatgcatgcgcgcgcggatggtatgcattgcataccatctgcaccaaatgcaattttttcat

SEQ ID NO: 372111 - DNA, 720 bp, Cannabis indica
tttgagagaagaaagaaagaagcactaaaataaactaaaaagtcctttaactgaatttgaatttaaatttaaatttaaattattatttataataaataaaaaatggaaagagaatgcattgaaatcgacatatgattcgtggtttcatttacattttccttcacttttgtatttaataattgtttaaaaataaattataaaaggagaattaagaaattattatgttttatatatgagacttttaattaaatgtattggtctagacaacagtcacaccacttcttatgtttcatgtcttttctgtaaagaagaaaaaaaaaaagaaaaagaagaaaacaattaaacaagaagaaaaactgaactagtctgaacaaatagacaagcaaatgtttattttactgttgcttatgaaggtttgaaccagaaacgtctggaataattattatacacaagcaatcatttcatatgatattcgagtggaaatgacgtacaagctaaatggtaccaccttcattcatttgtgcataaataaatgtaacgaagagaaattttccaggctgcctcggtcagcttctgcagtaaaaatacaataaaaaagtcatcagcgtacagttcgttcaatgatagtttcttttgtttggactaaagttcgtccaatgattttacttccaatataataaccaacgaaagacttgaatcctacaggccaagacctgagat

SEQ ID NO: 372112 - DNA, 649 bp, Cannabis indica
tataaaagagatgtgagagcaatctcaacaccacaaacaccacaagtgtataataagggaatcacaaaacttgaacaaggtcttacacctttgtccaaaagcttatatcccctaccacaagcacttagggaaaagaaaagaatggaaatagctttctggatttatcaagcctatagtgtttctagcaatgtgctctcttgatagaaacttattctcacccaaagtgaacccaagacctctatttatagtgttttgaggatcacatatgaaaatcaaagtctcttcaccacatggttgttaccagcacattaattggtgtttaatagaataaaaacattggacaagagagctggaaacatgctcaattaattcatgtacctttatggacgttttcaaaaactggtttcaggtgttcataaaacaaccattaaacaactattttcaaaaaaactcaaaattgagtttttgtaactcctctccgaattaaatattcctccaacgtcccaatactcatttaaaagatataattgggtattataacaatttctaacagctagaagcttatcccattgattctataacttctataagtaatacctcacttaattacgagtgatccttaagttacaatctatttcagatttgtaac

SEQ ID NO: 372113 - DNA, 594 bp, Cannabis indica
agatctctacttatagaactctccaaacaaaaattgaatatacctaaccttggaagacatatatagaatcaaaccttcccaaaacaacaatatatataaataaaaattatacggtaattatttcatataatatttttttttaatttataaacagagttttggttgtatttggtagttgtttctatagttcttatgtagcttatagattttgtttgtgatttaagttgttcctatcaatttctatgttgctatatatgaatttctgtaaaatatttataaaaggtttgttttgaagtgtaaaaatgaaaacaccccatatactatttttaattttttttaaatttgctgtttaggttgctccagtagtttttatgtgagttgttatatatgaattttgattgcaatttaagttgctatgtgagtttctaattagatttccgtaaaaatgtaaaaaaaacaaaattatttaaagtataaaaatatataaaaaaaaaccattatatttatataaaaaaattacgattaatatataagtaataatttatttaacgctaagtgttgagaatcatggggttccaactcaaaaccaattgg

SEQ ID NO: 372114 - DNA, 432 bp, Cannabis indica
tatatatttgaataataagaaaataaaataaataattaaataaaaataaaatagaaaaagaacaaacaatattagattatgaattaataaaaaatgaaaagtggaagagaaagagttaagaattaattaatgtatataggaattaacagagaaaaaataattgaaagtacataaattaccattaacacaatagaaaaaatgaaaaataagtattagagataataagaagcttaagtatgccacattatctccttaaaacattctttttatatatatatatatatatatatattgatattgaaagatagataatgaattaaaaaattaaactcaaaattgtatttatcaaacctttcaaataaaaaaataaatatatctattggtcattgtaatattttgctagttagagttatttttaaccacaaaattatc

SEQ ID NO: 372115 - DNA, 841 bp, Cannabis indica
acaatattatttaaaaaaaataaaattactaaataaataataaacatcaatattacaacttcatttctaaataaatatcataatctttaaacaaaaaattgtaataacatccatattacagatattgttcttcaaaaaaaattaattacaatgggtcttcttcaaattttatagcgttttcgagtttagacccatcaagtaccgatctttatcgagaagaataaaaatgtgtttcacgtctgaatcttttttccctgttagctatggttgccacaaacatcatttatcttccattcaactaccgaataatctcaaccattcatcaaacctcaaatggagcttccaatagccattaacaacatatacacttacctggagaccttctttcaaagcaaggaataagaatatcttttgaatgtatgaaacgatgactcaactggacccatccatattcggagatgacaactcaattggactcgtcgagatccatggactttgttgctggagatgactcgtccgagaacatgagagagggagaaatcctgttgataacccccgatcaattcttcattgtgcaagcatgtcaccatctcttccaccaccccttgcgcaagtctcctccaccatccctagttcaaagagtcgtcatctcctccactgccccctacaattgagagaaagagagagacgtttgagatgtgcggctgagtgttttcatttaggttcttcgttttggggttacacaattttttatatgtaccctatttgattttaccctaattaattattttattatttatttatataaaataaagtaaaatctgatacactttaattttat

SEQ ID NO: 372116 - DNA, 574 bp, Cannabis indica
gaatagagatagagaatattaaaaatatcaattgaaaattgggacattgatgatgaacaaagaaacaaataggattaaagataaatgaagaatatatgacattaaaaaaaaatagaaaaagaaactaaatattacctcacacgtaattatgaagcatgaatctctagaactttaaatattgatatagtgaaattgtaaatccacttttggtaaatgttaagtggtaaatcggttagggttgtattatataagtaattttattttttttattttatttttagagtgccatgtcactatttttatcttttttttttataatttatgctctaataaaatattaaaaaattgagagaattaaggagaataaagaaaaatagtttagagatattttaaaccgccacatcaccgcctcatacttctccttttatatatatatatagatatatagatatatatatgtatagatgtgggtcaccatccatgtagttagttaaacctaaatataattaatccaactaaagtgttgcaattaataataattttgtttatttttttattaaaaattattttcaaa

SEQ ID NO: 372117 - DNA, 870 bp, Cannabis indica
cataggttatccttcttagaagcaatcacccacacatgttttgcaactgcagcttgattccatttggcaatatcttgaaagccaatccctccagcttttttagacttgcacagatgctcccaagcaatgttgcctggtccattcatgttacttctccctgaccaaagaaagcttctacagatactctcaatctctttaattactttcttaggtaggataagaatttggctccaatacatatggatggttaggaggactgagttgattaacacagttctaccagcaaaagaaaggttctttgagctccacagtttgattcttgaagtcattttctcaactaaaattgaacattcagctgatgaaattctcttggcacagataggaactccaagatacttgaaaggtagattacttctctgaaaacccgaagcatctacaagccttcttatctcattctcatgcatcccactacaataaattgcagttttcttcttgttaggttgtaagcccgaagtcattgagaacagcttaagacccttcaacatcaaatagacactcttaaagtcacccctgcaaaataacaagacatcatccgcaaagctcaagtggtttattttttaaacccccacatctttcatggaactgaaagtcttctgtatcacctaattctcttcattattctgctaagatactccattcccacgcacaaaaaagcaagaggtggacatggggtcgaccctgcctaagtcctctcttcgcttcaaaaaacccaactgtagggatccattaaagagaagagagaacctaggagtggtgatgcaaatcattaccagcttgatgaatgagtttggaaattgaaaagcatgtaac

SEQ ID NO: 372118 - DNA, 901 bp, Cannabis indica
aaaaaggtaccaactaatattttatttcttgctttatttataatattcgtattaatttaaaattttaaaagtttttatgcattcattattatttttatttatatactgattagtatattttaataaacatttcttgttttgttttgttttgtaagaaatgctggggtttttttttttttgtttgacatgatgcacgtagctttttaatagtgggtatttttaaaataaatattgtgtgtgatgtttttgttggatctcgctacttttatcttgttgagccgctaactcatcttagttctctcattagtatgatattatccactttgggtttaagtcctcacgatttattttgagaaatttacaaaaatactcgaatttgggttaatttttacaaaaatactatcacactatttttttcttcaaaaatattgtacttttataaaataatagtgaaacacaaaacagaacaactaaaaacaatagtaaaataactaaaagaacaaccgtagaattatagtaaaaatttaatatagtacacagtataaaacttacacagtatttttgaaaaaaaaaacacaatattttgaaaaaaaaaaatcgccccacagtaaaaaaaaagggtaaattgcggcataaatacttaatgttttcgattttatacacttaaatacctaatgtttatttttggtagcaaaaatacccaatgttacaattctcttacaccgttactactacttctgttaactcataaatatggacacgtgacgggttcagatgtattacatttatttttattttattttaaaacttaatattcttaatatcagaaactaaatgctacttgtttaaaaaaaaaatgtgttctcattaacaattttcacatgatattagcacttcaatt

SEQ ID NO: 372119 - DNA, 582 bp, Cannabis indica
cccctccggacacgtgtcacacaggaaaccctagaaggattccctggacaagtgtcgggtgcagtaaattcacagaagacggctttacgcgataaagaaaacagaaagaaaagagtctgttctatgccctaagcaacccttaaacgaagaacgtatggctttctacaaagaaaatgcacaataacaacagaggcgtgacaatggcaaccctaccactagagcggtaaattcaaacagactacatgaaggatttaaacacttgcatgcccagaaatttcgaatgcaaacccagaaaagaacaaacagaataagtaatagcatgccattcagtaatagagcaaaggatgcaaaaaaattacgatgaagtgttgaactgggggtcctgatgcaagtcgagtgaagacgagaaggactggtagcaacgagcaaagaagaactgggaaaatcgcaaagtgtttgaaggccttgttctaggtctgagaattttctctctaggaaattcgagcaaagttggcaagaaatgggaagtaaccgaaatgaagaaaagatggtggcttttataggcaaaaatgcatgaggaac

SEQ ID NO: 372120 - DNA, 577 bp, Cannabis indica
attcaacatctacccttttggaaatcttctcctctattgttgtttgtcatttctttcttttctcttctctaactctagcattcaaactccatggctgaattttatattgtaatggtgattattaagttagctatgagccaaactttttatggtttgaattgttgaagaaccctatgttttagtttagtaattttcttatgcaaatatttagtaaaaattctcatgttcattcaagtgtgctttatgttagtttcttgatattgtttggccaccaatagcttgatattgagttatatttaattctgaaaaggttaaatgtaatggacttagcttgaatgacacaagatctcaattttattagattatattagagataacataggaatatgttatatccttgtgtaacatttgagagtttgtcttgtaaatggtattcttgagcttgattggcataggaatatgtttgaacaggtccaatgattgattgcataaaatttggaagagttttgtgcattttattggagttcttgttaacctgagatttttgctaaagatttgctaacgttttgctgcagca

SEQ ID NO: 372121 - DNA, 641 bp, Cannabis indica
gtctgaactggtcaggagtgatcttgaacgggtgcgggcacctactccacctttgtcggtgcttccagaggccaaaaagggcaaggagatgctggcccattacatgaactggcttgttccttaggtcagtgagcaagtggctggtgttgacaatgactcttctttggaattgctggtgggcggagtcttgaaagagttcaccagggtaagtctttcttaatgcttccctttaatcttccctacttagctcaaatgctaaagttttttccttgtgcaggctggtctgaagttggcatatacttactcccgggctaagtctgttgcttccaagaaaatggctctatccgacacctttaaggcggaggcggacttggccaagaaggatgctgaagaagccagggcagaagtcagagttgttcggttagaattggttgaagctaataagaagctatttgccactcagaagaaaatcactgtggtggctaaggatctcgaggctgctgaccgtttttaggagaccatcgagaccttatctgctgaggtgaacagtcttcacgacgagaggacttctcttggagcagttcttcatcagatgaaggaggaaacgaagccgaagggagggggagctttcgggccgaggt

SEQ ID NO: 372122 - DNA, 856 bp, Cannabis indica
cttgctgcaatagctgcatgccaaatgtatatgaataataataaattacgatataaaaataattctatgaaaatgataaatataagagaacttccataatatatctaaaaatataattctttattttctacaaactgtttttatctacatttttacagattttttttcacatattgtcacttgtttttttgtctttttgagaaatattgttatttttctgtaatagcaatatcaaaataatattgttctaaaataacaaaaaaaaaaatacattattttccgtaacaacattaaaacaacattttttcaaaaacaagtgaaaaacaacaatatatatttttataaaaaaatccataaaaatatatataaaaaaaaacagtagctctatacaaatgtaaaaagtttatcattttttttttttgcatataaatatgaaataatccgaaaataaattgtatatgatatatttacaaaattaatgaatgattgttacaattatagttacctgtcgcaaatgtgttaaaacgaaatccttgacaattatcatttttcccatctccatgcatcccaagtggacacttgcatgtgtaatttccaggtatgtttttgcatcctttgcaatgtggtatgatagtaggatctgagcactcatcgatgtctaccaccaccaaagatatattaacaccacaaaaacagagtttgtaacaaaaaatgtgaaacatgatataattgacataatatataagttcatgatataatacattttttctttagtaattttctaaaaataccttgacatcctgtttgagataaggatttccctcgtatccttgtttgctaacggcattgatatcca

SEQ ID NO: 372123 - DNA, 556 bp, Cannabis indica
tatgtatagcatttaaatcatacaaatcaaaattaattgtattaaaaataaattttccaaataaatacaaattaaaacaattattgtatgataataaattaaatgcttaattccatgatatgtaattaattatgcatttataaccatataatatcttaaatatttgtactaataattaatttgtataaataaggtaaatatacaaattagtacaattaattatatgaaatgaattaaatgcaaaattaaagaatatacttaatggcagattatcaattaatttaatcaataaattacttaattggtaaataaatataataattgcgcacttaattgtagaataattaaatattcacattcttaaaatatcacaattattgtaattacatgtaaaaataaagcatgtaattaatttaccaaattaaaaactttccataataatttattactaaataacatatatgaagatatatgttaaataagaatggaaagtttaaacaaatgtaatttaattgactaatcaacaaaaataaggaaataaaataaaattccaaaa

SEQ ID NO: 372124 - DNA, 1215 bp, Cannabis indica
caatttgattacgtacttttgggagtatattattatatagtatgcatgtgttgtctttttcaggtgtgttttgacaggttggcgcggtatagtcacaaccgggtatttcgggccgaacccgaaatgcaatttgaattgaaataattggcattttgatttaatggtgataatctgaatttaattggatttaattatgcatggaatgacaattatgcccttgtgagtgaatatgtatgttatttggccctgggggcattttggtcttttgaccttaactagtgggatttaaacaaaatcagatttttggcaagaaaggatagaatttctggtctccctctcccttacccgaaccctctttctctcaaaacccctttgaaagtttcaagttctttttgtgaattgcttgggtttaggttgaaaattgaagtaaagtattgggggattattgtgcatgcctttggagtgattcttgaggtagttattataactttgattctcattttgcttgctgaattttagtgttggaaatgcctgaatatgatgatgatgatgatgatgatgatgatgatgatgataattatatgttgcatgaagtagtgttcttttgttgatttggttatgttttgcttgaattcttggtggggaagttatttgagctcttgatagaattctagggtttttcctcatgtcttgaattcaatttgttttcaggtggttgctgctgaaagtatttgggtttgttggaatttaagctcaagttcaagagcttgaatttttggagtttgagcatgattttgagttgattatgcaatctgaattttggggtttaatattgaaatatgatgcatgaattatgtgttttacccttttttggttgaggttcgaaatttaggaaaagtgggtatttttagaccttaaatctggttttttgtgtttttcgaacccagtggccgcggccagatttatggtcgccgcagccataaacctagcagagagccatcccttttcccgattttgttttggccataacttttgactcgggactccgttttggacattctttatatcgttggaaagctcgttccaagctctttatgattatctatattttgaatgccaaatttatattttgtgaaattgaaattagggattaaccctatttgtgaaatcctggattgtgtgactagaattaccggcacctgatcaggagcaccc

SEQ ID NO: 372125 - DNA, 509 bp, Cannabis indica
tcggttttctccctcggcctttgcttcctcaatctctctttcctctttttggtctgatcagttgggttgttaaatggtggtcctcctttttttggttgaacatcgacctacaaatcaccaaattttatcttaattagtaactaaataacatcataaaactaacatgtgcgcaaataaaaaaaaatagataaaatgaacctgaggaactatttttagacattttcttgcaatatgatctactacaccacaattgctacatttatgcacttgtcctttgttggaatttattttaccaagatctagattactaacatgtatgtttcattaacaccctaaatatgaattctctaaaaccatgaaattaaacacataagagtttaaaaaatcttatattgatgcaagcgaaataataatgactccttccgctcagatctctaacccttgtttctttctgtcgcagagtaatcacaagatttgagcctggatctccttctctccttcgggtttgg

SEQ ID NO: 372126 - DNA, 541 bp, Cannabis indica
gaggatctttgatcacattaagagtataaaatggattaaatgagatagcatatctatattgtgaaacatatagaatgctctacataagtctgagagtgcaattccaagttctaagagtggattcaacaaggaattaataagtagggaatttacttagtaattcggttcgcttattgcaagctcagtattatagatccatggtccccattctatttgagaccatactgcttgcagaggcagacccacatagaggctaggtggggcagtcgcccaccctgaaaaaaaaatcggtaaaagaatatatatgcattttagttagttacaacatatatttataaataaaagtgatatctatacacataaaataagctttggtataatggtaaagtcatttcatgcatctaaaggaggtcatgggttctaatcacaatacaagtttgtttactttggtatttttattttacttttttaacctctaccaataatacttatatttaatgtcttaattatttaaccaaatatattttattgttactttttt

SEQ ID NO: 372127 - DNA, 510 bp, Cannabis indica
tttttttttttctaaagagctcaattttaaaatttcgcacaaggccccaaaaatgcttggaccggccctgatttacaacatgttttatatgggactcgaactcaaaacctctaacacacctacctatggccacttgagctcaagtgattatgtcctccaatctccattactcttatctttgctctcaaattttggatattataatttataattaagctcaccctactctcctcttcaaccaaaattactgcactattaacgggtcagctttgagttgaaatgggatgtaaaataataagaattcttaattcgtcttaacctaaaattggccccaaatactccatatattattatataaaaaaaattatttttagtcataataaaatttattactaaattaatgttgaaaaattgtgagtaattataaattattattcttatattgtgactaaaaaatttgtggctaaaaatattacaatgactaaatgtatttttagtcacaatacttgt

SEQ ID NO: 372128 - DNA, 540 bp, Cannabis indica
tagtcggtgtctagatctgggactcagacttggactagaacccaaacaatgaaccaaacccgaacccagacctagacttgggaccaaaaattacaacctgaacaacaatcgccgaaccatgaccctcgaaagagactaggaccgtgacgaggacgcggacccagaccagaatcgaacatagacctaacctaagaaccaaactgagattggaactcgggcccagacacggtcgtgtaccaagaccggaactgagacctagacctagacctaaatctaggacccagtcccaaacacagacttggacgtagatacagattcggatacgaaccaggactcagaccaagacccagactgggatcaaaatgcttgacctagatctcgaccgatatcctggtccagacaaaaactttgacccgcactcaggacccgaacctggacctagacccagatcgtggtccaaaccttgacacaaaacccggacagagatttagacacgaactcaaacccacacctagaatcagacacaaagctagacccgga

SEQ ID NO: 372129 - DNA, 704 bp, Cannabis indica
gatttcgtaggtatccatttcatggtggatcactcctttatatacaaagcaagtgtccgattatttacaaggattgcattcatttccaatccgttcatacattgatttataataattaagctaaaacgtaaacattaataaatgaagaacaatttctattctctaaatacagcaacgtatgcaacttgtaatgtgcgagttggttgttcatattctggtgtaagctcgtgggcaaatacacctaacttttagttaagtctaggatgtctgcgttcttgtatagtcgcacttacggacatcgtataacgagctgatagaacctagacatgcgagtctatattggcttatcgaggctatggagtcatcgagaccagctcgctttagagagaatcggtttctatgttttcgcaggaggatcgagaggatactcacatatatcgtggtatatgcgagttgagtccgttccttggtcccacataatgcgagcctcgtgaatgccatcagacttggttatattcgcatcatcccactgagtttagctcaggtgatgtttaaactcgatgagtgtctcgtggacatctcatttttccttggggaagttgagtacaagtgtcttccaaacatgagtctagtctcgagtttctaggtgagaaaaatctcactataacaacaattagacttagtgtatcgttatattttatttt

SEQ ID NO: 372130 - DNA, 311 bp, Cannabis indica
tgttgtcatccaaattcctaaccctagccatagccatgctaaaacgacttaagtacgccttaagtatcttgccaggctactgatttatattgtttagtgaagccgcttcgggtcgcctatccctagcagcctggaatggtttcttaaaatctctggacagctactcctaggatgttattgaatgatgagtaaacttgttaaactagcaactcgctgcttcaataagtgaggtaaggaacaaaatgttggaatatattttaccaatatctaaatttactaacaagtatgtttttaacatcttaaacatgaac

SEQ ID NO: 372131 - DNA, 562 bp, Cannabis indica
tttcttctctcaatctcttattgcaataactaatcattcaaaattataatggaatcaacaagtgatgcatcaaccacaatacccacaccacccaatgaacatgaacaggtaacatatatattttattacagtcttttgagttataattttgatttttgtaatttatggataaaagaccttgaatctgctctgaataaccataaacgaccttaaatttacactatgcgaccatcatggccttttatgttctttaactaactttaaagaacttgaattttctctgaacgaccataaacaaccttaaatttacattatgcgaccatcatggtcttttatgttctttaactaactttaaagaacttgaattttctctgaacgaccataaacaaccttaaacttacattatgcgaccatcatggtcttgtatgtttttcaactatttaaagaacttgaatttgcatagaatgaccataaacaaccttaaagttacattatacgaccatcatggtctttgaccaattttaaagaacttaaatttaatctgaacgaccataaacgacct

SEQ ID NO: 372132 - DNA, 565 bp, Cannabis indica
aaatcagggaattaaacttttgaacatataatcaagattatattccactgtgctgacaacactataatcattaataaatgcatatgttctagacttaatagaattcatacattaaatataatcatgaaataaatcatgtgaaccatgtaacataaaatattatttttgatctttattaattagtaaatctgattatattgaaatgagttttatttagggcacaaaactcaacaataattctctttgacgttttttttctaaacaaatcttctcggtgattggtgattggttttttaagtggttgttttgatttggtggaatttgccatatggacactgccattaattatcaaaaataaatgcaattttttattatatacgtataattaatatatcagtataagaagggaaatttgacaatatatgcttaaatatagcatatattgttttaatatactatgtaaaaaaaaattaaaaaaaactctccaattattattatcccaactttaccctccccatttcaaactttcactctccctctaactctcagttttctctctctctct

SEQ ID NO: 372133 - DNA, 579 bp, Cannabis indica
aggaaaagtacattggcgtttaccttacgtagtgcaatgggaagatcatctttaatttccggatctgatgacgaagatgcaggtacaggacatggaacgggaggtggaggaggtgcacacctggtgcacactattggaggcctaggaagtggtggaggtgtaggcattgtgggagttatgaccgaggcatgtgaaggaacaagagactcgtcagaacattgatcaggtgtagaggatgtgacagaatataccaacaaatcatcatcctccccctgacaagtacgagcgggtgaagacaaaaaataaggtgtagtttctacaaaagtaacatcgatagaaacaagatatttgttaagatcgggacaataacacctatatgttgggttttatgccctaaataaaactccatttcaatgtaatctctattattcaatatcaataaggaaacataagtattttcatcactcttttgtgtgtcatttgattcatgtcatcatttacttgtttatttgatttataaattcatccaaatccttatcacatttatgttcttgtttattgtgtcgtcagcacagtgga

SEQ ID NO: 372134 - DNA, 715 bp, Cannabis indica
aatcctgatatggttaggttcaatcttagttgtattatttatgttctttaatttgttcgttaaacttgaccaattagatcttcttgtgacatacatattaaggacattgtagttcaattgagtgtgagcgctaatcatagatatagaatctatagcttttataagtatttaaaagtgaaacgatgatttcctttagctttgcttgatagagataaatgagtgaggcctcatttcagtaattatgttagtttactgaaatatcattttgaagggtagaacggtaaatttgtctctattcagtgtaggtcaataatagaggatctttgactattaagattgtaacaatgaataatcattacgtatctatacattggtacatataaagcgttctatataattgagagtgcaattccgaatctatagtggcgcaaggcgaaattaataagttagggaatttacttggtaaattctagatttacttattggaaatttgattatataggcccatggtcccctcactagttaagataatactgcttgcagactcaattaaatgattttaattaatgaattataattctaaaattagactatgtcttatttatgaattttcattaagcaagggcttaattgtgaaagaatgagattttgggattaatttattaattaagagactttatatggtctaattaataaataatataaatagcaattt

SEQ ID NO: 372135 - DNA, 692 bp, Cannabis indica
tttatgtgttagttgatgaacgtatgtgttgtacaaaacctttttccatgaaaaatattttttctgtttttagaaaatattttatttggattccttgtgaaaaattaagcattttttgttgttacggaacttaatttcgataaaaaacgaagaagttatgaatttaggaaaattgggtgccatggctgtcgagtgggtgcatcaatcgcaccaggcactcggacagccagggttacgcgcgcgtgggctcggacaccacccttgtctgaagccgtgtccgcctgaggagcaccctgcaaatctgcccaaacgaaccctgccagcgctgagttttcccgcacacgcaccctgcaaattcccttcgtccgcgcgcgtaagggctgctagcagcctctcctgggctgcaggtgcagcctattggcagcctattcccaaaaatctactttttccaattttcaaaccctaaatttaaaataaaatattatttttaaatatatttgaacttaaatatcatattttaaattaataatatttatttttcaatagattattattaattatgatattttgaggtttaaatttaaaaattgattattttttttttaatggtcacatttaaaaatttgttaatttctttaatatttatatttgattataagattagatattttgatatttaacatattttaaat

SEQ ID NO: 372136 - DNA, 661 bp, Cannabis indica
ctaagtaaacaaaaaaaaaatatatatattcgtgatttattttatattttaaacttatttcatttttttttttgttgattacgattttaattatagtttaataaatatgccaagttaaactagcggtaggagaagatgagcataaaatgtggtggcctagttattacccttattgtattgactgaagttattcatcaatgacctaatttccagcatttctaatcataagaacattaaagtagttttcttttgtcaataaatttaaaatacattaattagaaatttactttttgatactctcttaaaaaaattctctctctttagaaatggtttcctctctcccttttctcttaagctttggctagggttcctaatgctcctgtaatgatcgcatattagaatatagattagtaaagacaattaacactaattgtagatatttttataattatgcatgattttattatgttgtgggtccttttcttgaaaatagacattaaagttataatttctcaattcttgaaattttattaaactctaaggtggcattttggttggaaataatgaaattatgtaatgaaaaggaaaggaaacaatctttatttcattcctttgtttggttgcatattaaagtgttagaatgttattccaatggaatgac

SEQ ID NO: 372137 - DNA, 688 bp, Cannabis indica
aggctcaagagtttaatgagattaggccacatttttctgagagcacaaaaccttaaagattaaatttggaaacacaagcttaaaagttggctttttacatcttcgaaatgagacaatttggttcaaaatgtgggaggccaagtcaatagatgctcctgaggtgatacggtagaggaatgaggccacatcttgagacaccacagtcttgtttgagtttgaaacctgattgcttagagcaaatcgcatgagagatgcatgagcaaatgtgagatgtgtgatgcgaagactctccccagatttcagttctgcccgtgcaccagtgagttcagtgagcatcaattggcgatccatagacattatggcatttgggacattctctggcagttgcaaggcttgagatatgtctttttcagaaaaggaaaaccaatatcctctaatatacacttttcgataaagtcgagaattctcatcaagaaaatcatcggataaattagcataaaattctttaacaatatttgcaatgtaccctttgaaaccagatagagtgttctcccattgatggtattgaatgaatttaacaattccatacaccctatgagcatgcaaatcataattcctttcactctcaaactttcgagtgttgggttttatgccctaaataaaactctttacaatctgattagttatc

SEQ ID NO: 372138 - DNA, 572 bp, Cannabis indica
tactgcgatgcatctagacagggtccggggtgtgtactaatgcaggctgaccgagtcatggcttatgcctcccgacagtgaaagaatatgagcagcaatacccaactcatgatttagaacttgatgcggtggtatttgctttgaagatttggcattattatctctacggaaagaaatgtgagatttatactgaccacaagagccttaagtattactttatccagaaggatttgaatatgaaccagaggcgttggttggagctagttaaggattatgactgtgaaatcctttaatatcctgggaaggctaatgttgtggctgatgccctgagcaggaagggtcccgggcagataactaatatgattaagatttcacctcagctagcagaagacatggtcagatatagcattgagtttattgtaggtaaactttataatttgacgctgcaatatgatctattagaacgaattaaagttactcagttagttcatccaaaattagtgaagatccgagaagaggtttcagctagtcaagccaaagattttacggtgtcagatagtggaatgttgttg

SEQ ID NO: 372139 - DNA, 641 bp, Cannabis indica
gaaacagagttttatttagggcataaaacccaacaggtgtagtgccttctctatgcacctccaagccttttcgtaactcatttggatcctgtaatcgtggtgcatatctttccttatatcataggccaaataatccgagttgtcagttgcaaatttatccttaattaggtgggcaattatcaaaggtgatgtgtgacagatatcttttcctcgaacatcaagggaacatatatttaaattttgaaatgtagtcacctcaaatatgttagaaagtacgttattcttcgctcttaatctccacccacaatctagatccttacatgtaatgtcccacacatcataattgaacttcttaacaaagtatttgaaccctttcttcattgcatacaagccaagaagcatctttaaatgctctctgtctctaaaactttcctagatgtaactccccacctagtgtgccacccgtagatgtataatgactattatcatcatgaaagggcatttgtgctacattgtcaactgtcagcatcttagtatttaattcaggtaacacatcggttgccaacacctctgaattaatttatggaatgaaggtcccaacctcgctacgagtatccttattagtacttggtgtaggacta

SEQ ID NO: 372140 - DNA, 590 bp, Cannabis indica
tcttcttttagcgcttggtaccttgcggggtccatctactgacgcttttgtcggacacctcgcacttcggggtcaatgttcaagcgatgacacatgacctgcggagatattccgaccatatctgaatgtttccaagcaaaaacatcaagattttgtttgagaaaagtcgttagttgttctcgctgttggaaagtcatttagaaccaatttttaaaactttactattatctacggggtctataggtacctcgatagtatcttccgcggcttgggccgctgcggcatgatcgaggatcattggatctagatccggtccatctgtgtgtggcacctcttcgattctaaagacctcctggcgaggaggtggtgcctctaataaatagatgacatttattgacttcttttccgcgagcttgactgctgcattgtagcattctcgcgagtctaattggattcctcgcacagagcctactccagcgggagtaaggaacttcattgtgagatgatagatggatgttacgatcttcatctccttcaagattggtcgaccaatcacgacaaggttactgtaaagtcagccattgacttgg

SEQ ID NO: 372141 - DNA, 609 bp, Cannabis indica
aaaaagactgtaaaatcatacaccaaatggaatagctcaagatgtatagaacgtaacaaaatcttttttttcttttgagagcagaatgcaagagcaattaaataggcttaatacataaaaattattttaaatatttgttacaaaattgttatgaaatttaagtttgttttaggaagatattttatttattttaaatattattaaagcaaaatttattttaaatatttgttataaaataatatattaaatattacattatattaatttattgtgtggttatcaattttacaataaaaatttacaagtaataatcacttcgcatctaaaaatatagtatatggggtaattttctaaaaaaatatgttgtattttaaaataaaatgaaactattctataataattacataaaatatattgtattttaaaataaaataaaattacttcatagtgattattatattctatactaattagacagttactttcaaccacattattatcattgactaggtactaggtagtcaacaataccattgtctgtggtcacaaaattcgtatcctccggaacattctttcttcttcagattttcctctgtaattacattgttt

SEQ ID NO: 372142 - DNA, 982 bp, Cannabis indica
aacttttttcttttcaatttatattcttaaaaaaatatacctatcaaacaaaattaaattatattttaaaaattatgacaaaaaaattaaaataaaaaattatatgaaattttcttaaaaaaaataaataaatatttacatgagttaaaaaaaattatgaaaatgaaatcaaaataagtattaaaattaacataaaataatgtgaggaaaaaattttaaaaaaatattaagaataatttttaaaaattatttaagtttatagttttttttaataatggggtgtatttataattttatggggtgcaaatataactccccttaaattattatagaaagacttaaataaccctgtgatctgtgtttggatattattataaatagtaatgttctaatcaaacaaattacacacattaagtcttgtcattctttatatcaaaaagaaaaaactcttgttgattcttcactatagcaaaaaaaacaagaaagaaaatggcacaatatcgggcagttataggtaaagcttcatacttaacatttttttatcttcattcgtaaatatgccttacataaatataaatagaaatatatatatatatataaaatatatatatatatttagaaagtaaattttcctatcgtatattatattctagttatttttaatgaaataatgttcactgtcaaaagaaaaaaaaaatgtatatatttatgtatgttaattaattgtattgttttaagagattatttcacaaatacataaaataataaaaaaaaatacaaaaatacaatttcacggaattttaaatatttttacatttttttgattttatttacagtaaaatacggtctttttatgttgtactcttgttaatttgttgttgattttttgtaatctgtatgttattttttgttgttgttttgatgttatttttatgttacttttatgtaattttcttattgttttcgtgttgtttttatagta

SEQ ID NO: 372143 - DNA, 602 bp, Cannabis indica
ataaattaccttagagcatcaattttgttcctatcaataaaaaaagaatatttactttcgtcacttgaaaaaaattagagcaaatttttcatttcactaacttaatgtatttttttttttttgttttttttttgttaaataattgatggtgcctaatgaaaagttcaaagttgcatcataaattactaaattcttgtaaaaagtacaatatacgtacacaccattataatttatttactacaaataataaaagatagtccacactataatattggtcaataaatttcacagaatgatagatagataggggacacaacaaacacaattatttattccttaaattcaaaacccaaaatatatgacttaatttaaagctaaatgattgaaaggttaaatcttttactatggtgggtagagaaattcttaattaaaattgtcattcaatccattttgatttatactatgttcctcttccagcttcacaaaagttatgtaaaaaatattcatcgcttgtgtacaaaattttggtgcgaggtgtattagaatatttctaattaaggaaataaaataatattattgattctgataaatgaatattttat

SEQ ID NO: 372144 - DNA, 675 bp, Cannabis indica
atttagtctaatttacataattaaaatacagatttatgtgtttgtatatcgatggtatatcgacaggttgtcgatataatatccacattagttgctcaatattgtctctgatttatataatttaaaatacatattaataatttggtttgttgatggtatatcgatatattatcgacataaattaatcaacatttaattgtcaatggtgttttccaaagtaaagtaccttgtcgacatatcatcaacatattatcgatatataatcgacatacgagcgtaattgtggttttgcttggcaaagtagttcttgtctacattgtcgagatgatgtcgatatgttcttgataatcttctaaattaattggctatatttttttcctacaaatatagaatagtgtctatgtcatgtcgatatgttatgatgtctatctgacacaaacactaagttctcaaccaccacaattgctaccctcaacttctgtaagaaatatgtccaagagtcgttattctcactgtcaacgataccataagcaaccggaaataattggttgttcgcatcgtatgccacaacaactaacattataccaccatactttgtcttcaagaaggttccatcgatactcaaattagaacgacacaaagtaaatccccttctacatgcactgagtgatataa

SEQ ID NO: 372145 - DNA, 766 bp, Cannabis indica
tttttttttctattttctctaaaattcacccaaataagaatatattatggacaaaaaaaatattctaactaaataaattattctgcaatattacaacctataatatttattaaaataatctaaaatatcttcaattatataatacacttcaaaaaaaaaaaaatctaacctctgaaattaatcgaaaactacaattcaaaattatttaataaaaaataaaaaatattttgtacaacaaatatgaaatacatataactcaaataaactattttatatgtttatttttattttacaaatagtatgatatctatttgtttctttttttgaaagaaagaaaaaaaatcttgaaatggtaacttgaaatatctttgcatagagaaaaaaaaaaaaaacaatttgactaaattaatgattatgatttctctgaatttgtgggaagatatttttcttttcaattattattgttttttgaagggtttatttatttttacactttaaaatagtttttttttatttttttttattttactagaattctacataaaaacttctattgtaactagcgctgcaacttaaattgcaacaaaaaaatcgtatagcaacccacatagaaaccaccagaaaaaccactttagaaactcaaaccgtaaatttaaaaaaaaaaacgttaaaaaaacaagtatatggggtattttttttaattagtatgatttaattaaataattcatatatatatatatttttaagtaaaaatattataatctgt

SEQ ID NO: 372146 - DNA, 501 bp, Cannabis indica
atgggctaccgaaaaacaagatgcaccttgttgacataggtagtaccaatcaatccatgaatagggggacgttacaagtagagtagcatatattcttatatacgactcaatactttaccatttattttatgtgggacaatgtccacaatatagatgatgataattcttaaaaataatttataactactaataatagtaccatcactactacaagaaatgtcacttttgtcaatacatttttgtgctggcaaaagttagtattgcgctggtaaaatagaatttacttgtgatgtgttggcaaaagagggttggcaaatcaatgttggtattagaacttttgccagtataaaatgaaaagtgctggcaaaaataacttttcccagcacgtaaatgcgctggtcaaagttagattttagccactgcaaatgtacgctggtaaaactttgacctctttgcaagtacagtttgcgaaaagcgctggtaaaagttacctttaccagc

SEQ ID NO: 372147 - DNA, 122 bp, Cannabis indica
cttgactcgggattcgggtaacggggcctggaacaaaccagtagtaggtgtctagatctgggactcagactaggaccagaacccaggcgaagaaccaaacccaaacccagacctagacctgg

SEQ ID NO: 372148 - DNA, 590 bp, Cannabis indica
aaaataaaaaaaaaaaaaggtttttccttaatttattttaattttttttccataatatttaatattagcttgaagttttattagaaataacaacaattttaataaaattgtttaaagtttttggtgcttaattatgtaaaatatattttcataatatgatgatatttaaaaatattatttataaattataattttttttattagaggcctacttttttaaattagaacagggtctccaaaatatttgagacggccctgcgtgtggctggctaggggtcgtgaggctgggtggtgcgtctcgtgtggctgggtgggggtctggtgtgtatcgtgtgggtggtgggtggtggaggaattgggtttgaaaaccgtaagaaatttgaacaaaatattaaaaaaaaaaatacatgtgtaaaatgacgtggactgcctaatggcacccacgtcatcacttcgttattaaaatgaatggaacaagacagaatatcataaattaagcattgtcaatagttcgagggaaattttttacgtcaaaaatagttcagggagcacgatttagcaaagtgtcatagttcggggggaaaaaaaag

SEQ ID NO: 372149 - DNA, 522 bp, Cannabis indica
tatgagcagcagtatccgactcacgatctggaacttgctgtcgtagtgtttgctttaaagatttggcagcattgtctctatggaaataggtgtgaaatttatattgaccataagagcctcaaatatttctttaatcagaattacttgaatatgagacaaaggcgtttgttaaagttggttaacgattacaattgttaaatcccttaccatcgtgggaaggccaatgtagtgggtgatgctcttagcatgaagggtcccgggcaggtaactagtatgattaagatttcacctcagttagatgaggacatggtcagatcaaacattgagtttgttgtaggcaaacctcataacttgaccctgcaatatgatttgttagaacgatttaaagttgcttagttaacttatccagaattagtgaagatcagagaagaggtttcagctggtcaagctagagattttacagtgtcagatagtgggatgctgttgttcaagaccaaaatttgtgttccaagtagtgtggaa

SEQ ID NO: 372150 - DNA, 512 bp, Cannabis indica
aatctatagtggcacaaggaagaattaataagttagagaatttactttgtaaattttagatctacttattggaagcttgattatataggcccatggtccccacactaattgagatgatactgtttccagactcagttaattggttttaattaatcaattataattctaaaattagactatgtcttatttataaattttcactaagcaagggtttaattgtgaaaaaagaggttttagggtttatttgttaattaagagactttgttaaatctaattaataaataatataaatgacaattttatttgataattaattataattatcaaataaatagtttaggcatttgtaggatttaaactagaaaatatggtattattgaaagaagaataagtagttgaaataaagtgacaaaattgtaactagagtaggccattaagtggtcggccactagtatgtaattttatccactattttattcttttttaatccatataattaaatcctaaaccct

SEQ ID NO: 372151 - DNA, 662 bp, Cannabis indica
agaattctttaaaaaaaaataaaaattaaaagacacaatttaatagtggtcctaaaaaaacctttaatacaaatgtattcccttttcttagaaaaaaaaacaccaaaataaaataaaataaaaatagaagaatgtatactacaaaaaagtagaaaattaaaaatattaaaattatcttttaatatgaaattatgaaaaataagttataacaaataaatttagtaaattatataggtaatagactttaaggctaaatttccttaaaaagaaaataaaactaagagctaagtattcattttttcacatcattatctcttatcccgataaatatatgcatatatatacatgagacaaaaaaaaaatcaaaacatgttttaaatatatattttgtgaataaaatttaattttattaatgtatcaaaccaaatcattcaacataatgaataatttagttaaaaaaaaaaaaaaaaaaaaaaacaaatcaccacataggacttttggtaatttaaaatagtggaaagtctaaaaaaaattagtacacttttatagaggttagagatgtaatgaaattttgattctatagtataaatatactttattattaagatagaaatagcatatctattctatataaagtgtgcctatataacagaattcttggt

SEQ ID NO: 372152 - DNA, 742 bp, Cannabis indica
agcgtgggtggtaaggctaatcgataggccacctgggctatctgctccaatagctcaaaaggatcaatgtatctaaggcttagtcttctattctttccaaatatatgcacccctttcataggtgatactgaaagaaatactgagtctcccacttaaaatttaatatccctacgcgttaaataagcatagcttttctatataatcaatgaagcgagtatatatcttgaactcactctatgatttttataagttccttggaaacttttcggtctattgtgttcttttatcacctttgttactctagtaagcaggtgtctaatatctttatcgtaccagacttatcaaagtacctaaccaatggtacatttaattctcacttttaaacaaagactttgttaggggaaaaagattattctaagataatctaccctttatcaaatatgttcacaacatgtttctaatattccattgatcctcctagattacctatctttcaagaataaaacattatattattttcactttgagctccatggttctcaataaccttcattaattcttaccattatagccaaagatatcaactttaggattacataaggttagactatttctttgtatgaatttcatatcctcatttatcgtataaattgtttgcactggtagacagcatattaactcggtatgtctaaccattacaactcggttgaaaccataagatcccacagtacatagttcataa

SEQ ID NO: 372153 - DNA, 346 bp, Cannabis indica
tctggtcgtaattcaaaaaaattgattaagaaaaaaaaaaaactgtttaaaaaaaatattgaaagtgatttttttttttttttgtttttaaaattttgattctcaattaaaaaattaaaaagtaaaaacagttttatagaacatgtttttgaaaaatatttttacttttccaattttaaaaataaaaaattgataaaaaaagtattaccatacgtatagttctagtatagttttaattttctattttacaataatattgattatagaattataaataactaaacttatattgcactttcacatttcttttacatatatataagttaatataacataaataattatt

SEQ ID NO: 372154 - DNA, 781 bp, Cannabis indica
ttctggctgaacagagtcaggccaagtggtatccaataccatggctagaaaccctagacatccctttcataacaattccctagctgttagtactaaaattaccgagatctgagatccccaaaccgatccgacaaaaacaaacggttcttcgccttctagttggaagatcaccatcttccttttacaatcaataatggctgagtacttggacaagaaatctattctcagtataatatcaaaatctgctaaattcatttctattaaatcagtactcaactctctatcctctattctgataggcataaacctaatccaccttttggagatgactaactctccgctaggcagtagggttccaaaccctatttcgtaactatcatgaggtctatcccatttactaaaaattctggctgccacataggaatgagtggccccagagtcaaacaacacatagaaataagagttgttgaccgagacctaacctgttaccactgaagggttggcttctacatcaccctgagttattgcgaacacccttgtgaagtgggtttcgctgcaatctttggtgcttcaatcttgagttggggacaatcccttttgtaatgccctggcataccgcactgaaagcacccctgccctttacactcccccagatggtactttttacaactggggcactctgggtaagtgtatcgagtttcagagctaccctgacgattgcctcgaccctggttccctcaaaactcttgttctgacctgagccgctggatgcagtaggtgc

SEQ ID NO: 372155 - DNA, 929 bp, Cannabis indica
tagtttatctattttaggaatatagagaataacaaataggaaatattaatttttaatatttaattaatgatgataaatatcaaccattagatatttgatccaatggtcaagaataaaatacccatacatgggtaatacccattaagagcatacccatatatatatatatatatatatatatattataaacttgaaagataatttatcatctctctttgtctttgaccttcggcatagacaccaaaaccctcacctcctgtatatttcataagttcttaaaaaaaaaaataataataataaagaataaagtaatagtttaggagaaactctttgtagattcaagagaagtatcaaggttaagctttattaattattctagcaatgaatttttttgaattaaggaattagacttttaaagagggttatatatataaaatttaattttagaattcagaattatgttgttgttagaatatttgttagagtatatattatgattgaaatttgttatttaagaagttgattaggtgacttagattgtgttcttgagtttagaatgcaatgatttatcttttaatgacatttttcatttaagggctcgatttttatgtcggttacgtaaggatgatagaattcatagtatatctgtgcactgtgaagtttggagtgatttggataagtttgatagtgtttcggtgagtgcgaaaattgagattttcgtagtttcatagtttttagaaattcataagagatcagaaatcgtatttttatcataacttttcactcaggtgtccattttagacattctatataccgtctcgaagcttgcaacgagctctacgatatggtgtatgttttagagccaaataataagttttattttagtgtattttcatcgcaagatttggtagaaaatcctagattgtctt

SEQ ID NO: 372156 - DNA, 727 bp, Cannabis indica
tctcaaacttattttatgattatgattatgattatgattcattaaaattaattctcaaattaacaatcatcaatataaatattcaagtatgaataaatcaaaataattcaaaatcagaacaaataaatattcaagtatttcaataaattcataaataaataaatctgaacaattcaaaatctcaaatcaagaaaattaaaattttagatttataatctttacaaatatgaaaaacttaaatagatctatctatcattgttgttgccgttgtttagttactgaattcttaaacaaaaaccactagaacttatataaaactaatatttacgtggctcgccacgtaactcacatctagtataattaatatgtcaatatctactatcattgtgtcaattaaaaacacaaaaaatcttatcattttattttaataaaatgtgttaaaaaataaggacaaatatcattttagaccctgtattttgtaaaagttactaatttgatcttctgttttgttaaatgataaaatagaccctgtaatttctaaaattatacaaataggatcctgaactgattttttgtcaaaataaaacttaaagataatctaatctaaagatgtgatgacaattgagccaagggtcctattttaccattttggataataggtttacaaaaatatgacacatcaaatgaccataaaaaaagtcttaaaatgtgaaaaaaatgccataga

SEQ ID NO: 372157 - DNA, 611 bp, Cannabis indica
tcaactccacataatctctataacacttagagaatcatgatctttataacctttaggggtggatcataatctctatatacttaggggtggactttatccacagtactccctgtaacacatattttctttaaacatggaagtaatataataaattagctattatcaaaataaatccttgatcttgattatatgttccagtttagttttactgttgtaataaataatgataccaataaagttctttgataatgtatcacactaccttaattgagtgggagaattttaaaattctttacccatcttcatttggttgacacttgtgataggaacttaagaacactactgagaaagcaaatctaaccattcatgtggatagaaataacttatcagaattatgagaataagatagaagaattctagcatagtctattcgaatgacttgagccaagatttctaattctcataacattttatggtatcttaatttgattacttaatctctagcaagtattttttcacttcaacttactaaactgctatgttgatgatttagtcttaagagaaacttacagtttcagactaagacattaagtcacaactagatatccctc

SEQ ID NO: 372158 - DNA, 1000 bp, Cannabis indica
ataataataataattcaaatttagacattttattgctcctcgtagaattcagagagattgggatttgtcacgtgattttcacgtgagctacatgatgacttagtcaaactttctcttgtttttgtattaattattgatgatgtctaagttgagcattaatttaaattcatgattttcaacatattttacgtttctttttttgaaaaggttcaacatattttacttaaacggtgaaattatttcttttttttatcttttttttagagaatgaatttgatttttaattaatatgcttaatatcgccatcaaaatactaataaaaagcccctaaaacttaagaaaatatttaggtagagtacacgtacaaaaaatatatgtacttagagatattttttttcattaggtcattttatattaataattaattaatttattttagattatattattttttttaataagttggtaactctaataaagaaaattactaatatttaacattgtgaactcttaagcctcatttacaaaaaaaaaagaattttttgaaaaaaaaaacttttccaatatttttgtttgatatagtgaaacttggagattgaacattatgaacacattggacatataaaactaaaatttaaatatatttgattgtataattaattaatcaaataacactaatgttttaccacagtttgtattactcaattaatatgactttcgataaatattattcacttaaaggttacttatgttgtatgagcatgcatattatttgttcaccaatcaagatgcaattaagcaatcttaataatatatgactcgttatttttattcatctacatataaaagtgaaaaaataggcatatacatatcacattcaaacgaaaaaaattgaaaagtaatttctttaaaaaaaaatactctcgtgtaagatacctgatcatttgaagatcttttagtaaatgagacttaagggtccacaatgttgaatattaataac

SEQ ID NO: 372159 - DNA, 627 bp, Cannabis indica
acatcttttttcatgggtgcatgcttcttatacggggctagtgagtgagtgaactttctatgtcctctgtcaggatggtaaatgtagtatacttggtaggattctcccggggagcctatttggtattgccagtgaactttcccttttttccattcccttgcctattattgttgctggaccgtttaccatttgaactagaattgcttgggtaatgggggagctaggcgaatgttccagtagaaagagcttttgacttgccaggtttttgttgaccttttgcccactgaatagcctcttcaagtttgataaagccttctgcacggtcaagaaaattactcattgagtctactggaccgttcttccttgtgtccttccaaagctcaccaaggacttcaatgcccccagtgtcgcgaataactttccgtcttcggttacccgtgaaaccttagtcgcctccgttatgaatctgctgatgtaggcttgaagaggctagcctagtcgttgttttacatcgaccagatctcctaggtgcaatggaagttggcgagaggaggaaaattgtgcatggaactccgaggagaaagcattctacgagttgaactttccaggtgccaacttgaaatacca

SEQ ID NO: 372160 - DNA, 569 bp, Cannabis indica
aaaattacagaaaccatagatttttcactgctatttctccgtcgttgccaatccacgttctaccgtcgatcgtcatcaacttccagttcataacctttgtgtaagttttctgggtaccttatacttttgttattcacttgcatgttagggtagagcttttggttaagtgcttgatttctggaaaatgattttggcgaagactgtcgtatggtgtataattttttttttctttatttgtgttctgccgctctctttctctttcgttttgcaatcaagccatccgctgagagactatccaggatatgggacggtttttcgtacccatgttctatttcttttatttttgtttctttttcctctactttcgctgcttttaagatatttgcacctgatgtttgcctaggagaatccctggaatttccatttttggcaaacatccagaggggccctcttttcagcgattaggggacccacattcctctcttcacattagggtttggtttgggggctaactgctggattttcctttttcaaaatctcattatccttcgagaaatgtctgtctctac

SEQ ID NO: 372161 - DNA, 595 bp, Cannabis indica
atatgccgatgggagatagcggattgggatgacttcaagtcttaagagtaatactgtgtgttatcaagtttgtcaaaagttagcgagtccatcagaggatgcagggttgattttggggtgatgaacttgtgacacagtttgagagccgacacaagtaggagctcagaggagcaagtatgcagtgggtcagtgggacctttgcatgaagtcatgggtgtgcggtagggccggagggccaatgttgagaacttcgcgaagagattttgtgcaagagtggacttggtgctgcattgggtgcagttggcttacgagcctcgtccaggtgggacgcaccaaattttatcatgcgatgagagtgtcttgctcgatttccatcaggaggatggtgcaccatagagttggcgtgtgaagtttttggagggacttggcttcaatggaagcgtgttctgtaggtgccgttgggaacggttggtttgcgaacctcaccccgaggggggcaccatacttagtcattgtcgaaaggagtatgcattggacgattggtgagtgggcgtacaatcagaggatgtggtagcttcagggccagtgttgcaag

SEQ ID NO: 372162 - DNA, 539 bp, Cannabis indica
gaagacatgaataactttaaatgccttactcaataagctattaaatccatttttttgttgtagtgtacatacaacatactatgcagtacaatatacttttcttacctttaatccaggttcatacatttcagccaacccaagtggaatactatttacgatgatctcggtcctatgtcacaacaaggataaaccaataagtgtttatctcaaaacactgcttaatattcacataagataatctagggttttctaccaaaccccacggtataaatacactaaaaaacaacttatatttggttctaaaatatataccatactgtagagcttgtttcaagctttgaaacggtatatagaacatccaaaacggacactcgagtcaaaagttatgacaaaaatacgatttctgatctcttaagaatttctaaaaactatgaaactcgaaaatctcaatttttgcactcactgaaacactaccaaagcttatccaaatcactccaaacttcacagggcgcatagataccataaatattaccatcctt

SEQ ID NO: 372163 - DNA, 590 bp, Cannabis indica
aaaattataaaattacaataataataatatttttaaacttctctctttatagaagtttatcttgttttatatctattaaatgacaacacactttttaataatacataaactattattattattattattattattattattttgaaataaagtgtatggtaatggtattttttttttggagtgtgtggtaatggtatctagactattaattgctattagacaccagtagtgcatagtacctccagacatgtcactttgcgattggtcaatatagaccgtttaaaattctcaagttcggtcacaattttaaaaatctcggtagcgataataaaattataaaattacaataacactaatattttaaaacttttctctttatagaagtttatcttgtcttgtatctattaaatgacaacacactttttactacaacattattacaaatcttctcttagttttttttttaaatgattacaggttaaaaatttaataatatatatcgtaggaagttattctatggtgcacttcctaaaaagaatgtattgatttatccctttttaattttttttttcattggtcgtgtacataat

SEQ ID NO: 372164 - DNA, 788 bp, Cannabis indica
tgaaataagtaatatatatctctctttgtgggtttggtagttttaccaaactgagtaaattgctttgctttgtttctttgttatttcgctgcgcttgaagtttattgtttttcccaacaagtggtatcagagccaaggttcagatcaacacagaaaatgtcaaagatggtgtcttccacaaaatttgagatcgagctttttgatgggaagaataatttcagtttatggcagagtacggtgaaagatgtgttggtacaacaagggctcctaaaggcactgcagggaaagaaacctgagagtatgactgatgaagattgggaagagttgcaggcaaaagcggtaagcactattcgtttaagtttggctcctgaattaaagtatagtgtattgaatgaaacatgtccttctgagttatggaaaaagttagaaaaactttatatgtcaaaatctctaacaaatagattatatttaaagaagcagttatatgagttaaaaatggttgaaggacaagatgttagggaccatataaataaatttaataagtgcataactcaattgttaagtgtagaggtcaaaattgatgaagaggatcaagctattattttgttggcatcattaccaaaatcatatgagacattagtgactacacttttggttggaaagactactttaactgtagatgaggtgtcaactgcgcttgtggaaacagatagtatcaagcaaccaagtggtgtgtctcatactgatcaagctcttgtgacaagatcagaatcaagtcgtggtaggag

SEQ ID NO: 372165 - DNA, 332 bp, Cannabis indica
aaaaaaaaaaaaaaaactcttcatagagcaggcaaaatcttagcaggttgggatcgaatcgatttacatccatgtgaatataagtaaagttaaagcgatttaactttttcttgataaacctaaacggatcaagttaacatttttaagactaataaaactagaagagtattgttattagacactaacactattaaaaattaacttaccaataattaataaatttactgatattataaaattaaaatatataaaatctaatacttagttatataataagatatatgaaacccatataataccccagggccggccctgagggtaggtaggctagg

SEQ ID NO: 372166 - DNA, 630 bp, Cannabis indica
tttatcaccgtatctcacatgttttcatgactgtatctcatcccttatcattaccgtagttcatttgtagtcgtcactaatgtatttctcaaacctatatcttaatcttaaatttcatctcgaattttaaacatcttttttaacatttttaagacattggagaaaattcattagtttgttctgttattataaattaatatgttttaaaaaagtgattattatttttaaatatcttaatttaaaaaataaaaaaataatataaaaaatgtgatatatattttagttatgagaaattctaaaaggcaaggcatttcgtatggtgtggtgtacggctgttgcaatgcatttcgtgagaataatgacatgagtcgcacaaaggttttaccttgcaaagttcttgtctagacaagccgtcggacaaaaagagctttcgagacacgtacacacactaccaaggtctgacacaggggacaagatataattcggtgttagagatatgtatccgtcgccttgagctccagataagatacgaccaagtaggttctaggaccatctggtcatagccttcccggatcagactaacccactagcctcctagatactcgtagcttttgggaacattgatctttc

SEQ ID NO: 372167 - DNA, 601 bp, Cannabis indica
aacaaagctatagatatattcaagacaacagtaccatagggtaccttccaagtaatgaaaagtgtgcaaggtcgaccaatgacccagtaccatcttagatacactcactaagacatacagcaagtcctaagttgcacaatttactataatggactcattaccagccttatatagagtttccaagggaaatcacgcataaggtcacagttttatatgtctccaaggtcgttacgagaccccagccaaggtcaaaagagggagaaaaattagctgcccacttagaaccttggccttggccttggccgaccaggttccaggtcctagtggccagctagaccccaagacccagtcttgttgctggccaggaaccctaattccaatcataggccggccagcctagggacacatcccatggccggttagaccccatgaaggccacccatggccggttagacccccgatgaaggccacccatggtcggccagcatgtgcatggatcagaacacgtgtttttgcaagaactcaaacatgttatttgtgttcttcatgactcaaagagccaagaatcacaacaaatgtcagataaactctctctctctct

SEQ ID NO: 372168 - DNA, 542 bp, Cannabis indica
aatacaatacaatacaatacgacttaatacggcgttccaaacgaaccctcacggagttcttatctcaagtcacttcccaattcaattgtgaattcggtgaatttgcaaacattgaaactcaatcgttgctcaaatctcaaagaactacctagaggttttgagaaactcatcaacttaaggcatcttgaactttcttcttgtcataaattgaattctttgccaagtggactaggtaagttgatacaattgagatacttggatctttcttggaatgaaagtctattatcccttccagtttcaatgaatgatttgttgaatttgcaaacactaaatctcaatcaatgctcaaaactcaaagagcttcctagaaatattgggaaactcatcaaccttaggcatcttaaaatctctgagtgtgataaattggagtatatgccaagggaattgggcaagctaactatgttagataaaattaataattaacccaagatctatttgtatataacatagaacacaataataagatataataattaggtatg

SEQ ID NO: 372169 - DNA, 543 bp, Cannabis indica
cacacaagtgcgcagttaacgaattgaatcatacaaattggattaaatattttatgaacaaaataatccactttgttttttaaattcatttcttagtttatttttttggttgaaaaaatcacattaaacaaatatgataaaaaaataactacaataaataaatataataataattagtaccatattatttatttacaattttgttaagtataagaaaaaaaatatatttcaaagaactaatcgaaatattttgtaccaaaattgtaactacgctccacctgaaatttgatttatcattggtattgattaaaataataagagtacttagaattaagacaaaataccaaaatactagtattaaaatacaagatccaataaaatctctctttacaggccatctgcaatggggcggcaaaaacctatatgctgttatttttccctcaaaatgctccacactgggaaagccaacctattttcatgaaactctaccgtgtctagactacgatatatatttttttaataattaaataatatattttaata

SEQ ID NO: 372170 - DNA, 1120 bp, Cannabis indica
aaagttccagccacaacccaagatgccaaattggctcccccctcttaatcctcccatggaattccctatgaacgttctcacgttcccaactcctctactccaactgctactcattttctcttacgaaaccctaaacgatcaatctctcactcactctctgcttctcaattttatttttatttatttttttcctgaaatttataactttaatactttgcacaaattaatattattactttaactttaactttattttattttttattttgaaaaatgacttaatgtgaacgggtttattctcaattttaatcttactagtaaataagcagcgattcgcaacgaatgttgaagaaaattttaaattatatattttatttaagaattgcggtatagtcctctaaataaaaaaatttcgtaagtttttttatcttccttaaaagttagttgtcttctgaaagagtttcttagaaagtctttgtgtccattcggaaggagtcttcgcgaagctaatcttcctccaaaaaggaattctggatggctagttgtcccctcctgaaagggagtctaggataagtcgatttcagttgtctctgttcttatatgggaagatccttcaacatgtgcttcagttcttagtctcggaagcatactattaatgcaatttttcgtgaactttaatctaagaaaattattaattcaagaataaattcaaagtaaaaaagaaaacaaaaataataaatgaataccttatatttttacgtggttttgtagttaaatatacatactccacgagtcaatattatttatgagttttggttgtgtttacaatttggtaaagtttctgtaaatcaaaattgcctcttcccattttcctttgagtgaacccctatttataggaatagaatggtagttactcaatcttatcttagtaaaaagttacaattgatgggtagttaatgcccattttcacatttaactgaacatttagataaatataaatatctgtttatatttaaaatactacaagtggtctttgacttaatcaaaccatgtaattttgagcagatgtattgttgtgtgtaatacgagatgatacatcattgagtgtgtaatacgagga

SEQ ID NO: 372171 - DNA, 514 bp, Cannabis indica
caagaaactagtttcttgataaagaaaccccagtttcttggtgatttttccggtaattttaccggtgacaatgccaattcccactactattctggagtttgatgtcggtaccggaaaagtcgccggagtagttgccaatgttagaaaaatcgccggagttattgccaacataaaaaaagtcgtcgttcatccaatccaatctgcactattttgctcatagtgcggatttcattttttggatccaatctaatccgcacaatagctcaaatccaatccaatccaatccgcaaaagtacggattggattggttactttttaatcttaaattatttaataattataagtaaaaaaaaaatcacataactagcaacaaaataaaataaattatagttattttatgtctccaacaataaattaaaataaataaaatagctaataacaatttcaaaggaaaaaaaattgtaatgtataaattgttagaaattattttacctggatcttagatctactcaca

SEQ ID NO: 372172 - DNA, 719 bp, Cannabis indica
caaaaaaaaaataatgattaattttttatcagtatgattgaataattgttttaattatttattacatcaagtaaagtactatgacaataacagttctcgatatagagatatcacaacaaatgttggcttatttcatcatacgagaatcacaacagagttttgaataaataacagcataaatacttaatattttgaatttgtaagtatcataaattcaataatatttttagtggtataagtactaaatgtttgtaaaactatacttttcctttagttttgttagtatatagactctgttattgttttaaacatgacacatatagcactcaaattctaaatcgtttggtcgggttagcttgaatttacatctaacttctcaaattttttagaaatttatatggaaaattaataaatttaaaatttgatgcaatttttttatttagttattatcaaataaaatacatgattaatttcatacatataatttaaaaaaaaattaagagcgagttgtttactagtttcacaaaataaaaagatgacaaaaggtgaaaaaaaatatttgatatttaatataatctttcaaaaggataaatacattaatcagtttaaattttaatttatattatttaaaatttaattattttaatttattaatttatatttatattagttttttaatttattaacttttaataagaaaatacttttgtaaatttttt

SEQ ID NO: 372173 - DNA, 305 bp, Cannabis indica
aaaaatgatttttgaatcaaaagttatcacaaaaataaaattggtgcaccagggtatgcaatgcatacccctacgagcgcggaatggagagtttggccgagacaggacgaggagacacggtcagtaaggggcaaactttggacatgcccctattagaaggggtttcatccgagcaagtcgtacatcgtgtcccccatgcgcgcgcggatgtgcaaccttgagatattttgtttttcaaactttaaaaaatcataactaattcataaaaaatccaaattaggttctgtaaaagtctaaattcatta

SEQ ID NO: 372174 - DNA, 608 bp, Cannabis indica
gctcccaaacaaacatttttctgatgctcaaatagacaggattaaatgggtttatggcattatgaaaggttataatttgaatgtgggggatattattcgagtgacctttgacataatggttgagggatcttctggtggaggacttgggctggctggaattatcactgatctttgtgagaaacatggggtaccgcagtactcatatgataccaaggcgccgccacagcgcagtattaacttgtccactgttcttcgcttcaaacctcctcatcctcatggtcaaccgccagttcagagaggtcctccggcaagagaagaagaggaacatgaggacattgaaccaccacgtcttgccgggcctcttgaccccgccatgcagtacactcacaatcagctgaattatctgattcagcagaacatgcatatgcagaattacatggcccagcggagtatctttgatgagcagcaggtggctcaattgaacacacttgtcacgaggatgaatatcggtgtggacgatccgaattattttcccatgccaccccgcttcaacccttatgaccagccaccgccgccaaaccccttctaaggggctcaggtaagtttct

SEQ ID NO: 372175 - DNA, 585 bp, Cannabis indica
gggaaaactaagtattcccaacggtttataactattgggaatactaagtattcccaacagttataataccgttgggaaaaatactttttaacatttcatttttttatgagattttactttatttaagtaaataaataataaaataattaattgaagtgaagttaaatattgtatcagattttactttattttatataattaaataataaaattattaattggggtaaaattaaatattgtatcagattttaatttattttaaataaataaataataaattattttttatttaaataataaaattattaattggggtgaaattaaatattttatcagattttactttattttaaataaataataaaatcattaattggaaaattaaatattatatcagattttactttattttacataattaattgggatgaaattaaatattgtgtcatattttatttcattttaaataattaaataataaaatcattaattagggtgaaattaaatgttgtatcagattttactttattttaaataaataaataataaaattattaattgtggtgaaattaaatattttatcag

SEQ ID NO: 372176 - DNA, 891 bp, Cannabis indica
atgaaggaccagtgtgggcttaagcccatgctataaaaaaaattccttttacttcttaactaaaaaaatcttgtaattattttaattgctcactctcaaaaatctcaatcatctaatttaattattataatattattttttatactatctctcgtattctagcatacatatatatttcatttttattggatagtaaatataataatctattataataagatagatttttcagtactaaaaaaataataaaaaaataaagacatttgagttacttttttttttcttctacaagcctactactctcttactttttcttacaagatattactctatctttctctgtatgttttaattcacattgcacaacatcttagaagaggaaaagggaccaccattatcaattaagagaccattaacaccactacaaagaaaatcatattttaattattttctggtaataattttatttattttatacttttaataattaaaatatatagtgatttgttattttaatgttagtaattagttcatgaataatagccctaaatataatatcacatttttgataaagaaattatagtaattttgtttgtaattattagtattatgtttcttatgagttctaatcgagtttagtacttaaatttgtagtattgagatttttttttttttttttttttataaagtagtgtatctgagcatgcaatacaacttgagtggtgtatttttagtaacagtggtgaatgtatggagtggcttttccaatgtttcatctttagctggagcttttgtttccgatgcttatttgggcaagttctacactcttctttgtggcaccattgcttcccttctggtaaattatattccatgattatgcatatatatata

SEQ ID NO: 372177 - DNA, 1043 bp, Cannabis indica
agatcaatgatattgacttggatagatataacaataagtttatgatatcttatctaattgtcaatatcggtccagtccaatgtatactccatacattcgatactagcatattttactaatattctggaaaagacataacacttattcaaggtgtaagtaaactttatcgttgattatcatgtcagtataaattcagtgtactgacaaatcattggacaaaaaattttgaaacacataatcatgattatattccactgtattgacaacactataatcatgaataactacatgttctagatttaatagaatttatacatgaagcatataatcatgaaaaaaatcatgtgaaccatgcaacataacatgatttctgatcttttataattagtaaatctgattacattgaaatgtattttatagggcataaaatcccaatactctaatggttacactaatttggtgtagaatattctagttttggtacaacaactccaatgattcacactaaatatttcactaaataaatatattttacttaaaagatctcacattttatattatttacaataataacccaaaatagctaatttatgatataataatatcgtgactactagtaaaaatttaaaatcttaaactagcttagtaaaatgaaatatttattaaatcaattaaacattatacatttttttaaaagagaaaacttcaataaaatcaaacctaatgtttattaaattattattttacttaatgtttatttttatttatgttgctctttttaatttcataatttagtgttatattatttttattttatttaatactagtatttttattattgttacttttgtgataaattttagtttgaggagtaaaatataagattaatttttaaaataaattaaaataagggctagaatgtcaaaaaaaaaaaaaaaaaaacaaacaaaaaaattaaacaccaaattggtgtagactgaacatccaatgtcgttaatattgtagaatttggtgtacgccaatttagtgtaccattagaaatg

SEQ ID NO: 372178 - DNA, 1046 bp, Cannabis indica
ttaaagagtatacaaatggtaccaacaatgcttgtgagaatgagtcaaagtcaaagtcaaaagggtgagaatagaaatgaaaacaagctcagcaagaacaacaagaacaactttaatccttttcttcttatctcagaagattaagaagatgattatgtacactcaattacaagactagacccatttatagtcaaaccaaaatacttcctggatgaataaaagggagcccataaagtgtccaaacaagacaatttatatgtgtagccaagtatggcacaactgagtattgctccattgattttcttttccatatttgaataaatattggcctataattaataataataataataattaattaattagctacattattaaccacctttttatttgttcatcattattgtgacataataatcagggccgaccctgaaaaaatgggggcctaagacgatataaaattttgggccccttaataaataagtggtccaagtaataccattcaacaatgaagcaaatgataagaaaaatggcataaactccacactcttagtagtaattaccaatttctgcaccaaaaacaataaacaattaaaatcaaacaagaaataatgatattaaaaagtaactaattaataactagtaactagtaatttaccataacagccaatggagcagcatacatcatgatattaaagagtatacaaatggtaccaacaatgcttgtgagaatgagtcaaagtcaaagttaaaagggtgagaatagaaatgaaaacaagctcatcaaaaacaataagaacaactttaatcattttcttcttatctctgaacattaagaagatgattaagtatgtacactcaattacaagaccagacccatttatagtcacaaccaaaatacttcctggatgaataaataggagcccataaagtgtccaaacaagacaatttataagtgtagcctattaggaatactgtaaatctgtatatagccctaattaattaatgagaatcaaacaataagattaaggaatagcggaagcgta

SEQ ID NO: 372179 - DNA, 842 bp, Cannabis indica
ttgttgtgactaaaactaaattagtgacaacttataactaaataaaatgttttagtcataagtaatattttgttgtgactaaaagtcatatttgatcacaaaaaaaattatgttgtgactaaaaaattgtcactaaaaatagcagttttttatagtgggaattgagcagatagagtggaacagagataggaacatattaaaaaatatatagatgagtttgtacgtttttaataattttatgtaaattctttttttattttttttttatgtaattacttaaccgaagaagttggatgaaaaagttaaaatgttaactaacatgtgtttaggagacttcaccgtaaaaaaagtatatgatttaaggtttagccacaatttacttaaataatgataatttttcaaaaatttacaataaatcataaataaatataacatacgtattataaaatttttttactaaaacaatgtgtgccaaaatggataagcattgtactaagtactgtactgtatatttccattaaaatggtaattagtttcaaaaaataaaataaaatatttagtaaaaaaaaagtctcacataaaatagtagcaacatgtgtctctaatagccaataaagagttgaaacgtatatgttttttctttttttttgtaacaagaacgtaactaaaaaacatcatttcaatatgaatgaacaatctgttgtcctaataaatttttttaaatatattaatatatattttaatatgtgaacaatctcttaccatcgaatttgatctaataacgaataatgaaattacaaatttgaatttttatgcttaatttaactacttaattaaaagaa

SEQ ID NO: 372180 - DNA, 754 bp, Cannabis indica
gttggttgtattaaaaaaaaattgtcaaaaattaagctcagggtcctatttttactattttaggaaatacaaggtccattttgtcatttaacaaaacacagggtccaatctataacttttacaaaacacagtgtccaaaataacatttacccttaataatatatattatagtttttcctttttattcttgttaaattcattttttataataaccatatatatgcacggtggagctaatttcaatataatcttaaacttcattaattatatataaaatattccattaattagtattatatatgatcatgaagtggtctctctaaatatatctctcttagtgaaaatgatgcagaatatgttctccaccacaaagaaattggccagcaaggccattatatatatacatacatatatatatatataaatataaatatatatataagcaccccgggaccaaaagctagggtatattacatataaatgttcatattggcacaccaaccacaaaccaatatataaaagatgcttaatttgattcttttgccaacaatttggtacaattttctaaggccctctaatgataacttgaaagagtgtttagttttccagtcatctcatgtgaaaatgccaaagaaaaaaaaaacgtagaaagaaaaaaattaaatatatatatatatggtccaacactttgctagtgttggaaattgtctaatctccttactataagtagatcaattaatatatatttgtaaag

SEQ ID NO: 372181 - DNA, 545 bp, Cannabis indica
atactctatactcactttttgttttatatttttaatttttaccttcattttactactctttaatttatacccacttttataagttatattcccattatgtgcattaggaagtctaattttaataagttttgtgaggttatatttggtactttgattataaaagagggtatttatcaattaaaattattttagagttatatttagttaatgtataataaaaaagggtagttttcaacttatcccattaattaatcttgggatcttccttttactcctaattattatttttctataaattttagaaaattctatttttcttttaaaaaaaattataatatttttagtttcatgatgtatatttttatttttgtttcatgaaatttattatttttaatatacaaaaaaaaaaaataaataactaaagtgataatcttttagtcacaacataaatttcttgtgactaaatattatttttagtcaaaataaaaaagttgtttgtgacaaaacatagtatttagatataaattgttattaatttagtttta

SEQ ID NO: 372182 - DNA, 733 bp, Cannabis indica
gtatgggttggtttccgccttgtatctttccatagccgacttcccacaaggatgcccccatgatggcggcccgcttgccatcatcgcttagattttttactttggttgcctcctgcataaagcgttgaatgtagtcttttagtggctcatcgggcttctgcttgatggcgaccaagtcacccaactctgctggtatctgtcgggctgaagagaattgggtgtagaataacccttcaaactcatcccaagaagtaattcttcctgggggtagtttagtaaaccattgttgcgccgtgtccgtgagggttgcagggaaaattcgacacctaaggtcatccctgattccttgaaggtccatttggattttgaagttctccacatgagttaatgggtcttcactacccgtgtacttgcaagtgggcatcttgaactttgctggaatagggaggtcattaatcatttgggagaaggcagaccctctcctcctttcgaggtccaaatcagtgggttttggtgcggtaaggtccttgaccaatcgggttaactcgtccaaccgagcctggatcaccggatctgtggctgtttgaggttgagcaatattggcaccaacattcgcttggtccccttggtctggctcaggtgggttcactatgttggaaccacgattgtctctatttctgttgagggcgtcccgcaggtctctaccccctcgggggcctacccgttcaaaaac

SEQ ID NO: 372183 - DNA, 770 bp, Cannabis indica
gagaatcaaaatgtcgttcacggcatgtttccattgtttcaagactgactttgcaatgtgcacgatggcagcagcagaatttgatttggcttgccataacagatctttaatctaaaaaaaaactttatagacaacattgttgattgtttggctcaagagtagtattatggagacatatttttttaagaactatctttaagcattattctactaaattggtgtaaatctttatacaattatatttttgtactatttcattgtaaaattttcacactattacactttaaagattaagaaatagcaataaataccttcagtcttataaagcaaaccaaaaaatagtttaatcattgataaaaaaaaataaaaaaaaaaaaaaaaaagtaacaagaatttattttgagcacctccttcttttacaccacatcctctatttatctcattcttttacccttaggtgtcaacttaacaagattttactttgacatatgtctattacttcctatgaggtgtctttacatattttgacaggtgtcttttattttatcttaggtgtctatattttgtatctctcatatccataatgtgtaactttattaactaagatatttaagtcattagttttgtatatgttctctatcttgaatgtaagttatctattttggatatgtttatgtcatctcatgtaaggtatgtcacctcaatagccgaccgagatacgtcgaccgaccaagatacgtcattatattttttaaagaaaaaggagaaga

SEQ ID NO: 372184 - DNA, 506 bp, Cannabis indica
gactccgcccaccaacacatccagagatgagtcactatcagtaccagccagttgctcactgacctcaggaaccagctggttcatatagtgggccagcatctccttgccctttttggcctttggaagcacgggcaaaggtggagttggtgcctgcacccgctcagaagtagtcctgaccagttcagatccaactgttggtggtccagactctttggaattggcagacttaggggtagaagggtttgcaacagtcagctccttggaaaggttaatgacctctccgaaaggtctttttttcgaggacccctcaccgcccttagatttcttggctagaggagaggcgctagagcttccacccatttctcttcctcagagcatcaatcatctgccgagacatgtttgcacaaaacaaaacagtatggttagaaaacagccatcagaaagcacaaggcatgaaagtcaagaagctcaaaagtaaagtaaaatgcaaggtgactgcccgcaca

SEQ ID NO: 372185 - DNA, 517 bp, Cannabis indica
ttaaggataggtatcttccactagctagtagggccatcgaattcttagagaaccttccatgtcaattcagacaaatgaatgcccctacagtgcatactgttgcacattccgatcaatcctccatacttccgtgtccattccattgttccatataaccaagttgttgcgtcaatggttatggtgatctcgaagccgatcaatctagtatttttgcatattgtgattaatcttccatgcttcgttaaggtgagcaagaacacctgatgttgtgctcaacaactatcaacacgtaaacgatttttctatccaaatcgagtgggtgttaaggataggtttcttccactagctagtagggccagcgaattcttagagaaccttccatgtccattcgaacaatgaaagcccctacagtgcatacttttgcatattctgatcaatcctccatacttttttgtccattaaattgttccatataaccaagttgttgcatcaatggttatggtgatctcgtagtcga

SEQ ID NO: 372186 - DNA, 672 bp, Cannabis indica
actatcaaattttaatacaaatttattatgaaacaaactatgagtacttttatattgatcagttattattactctaccatccaattaattgatcatgatgagctaaaaagtacttgagattatcaattatacttaattattagttggacctatatataatattgttgagtatatatatatatgttcaattattttttaaccttaaaacttgcaaaaaaaaattaactttaaatattatttataaattgtcatatatatttatatagattgcagccatataatattaatttcacaaacaatttatggttacaatagtgtatacttgatgacttttaaatattttttatatatttaaaaattgttattatgtgtgtgtatatatatatatagataatagattaaatattgtatgtcatatacaattataacactaatattatatatacatatatataaattgcagggggatgcttgtaataatcatgatctcatggggcataagtgaaaatcgtttatataattttgcagttcaaaataatcactcatatataggctatttagaatttttttcctttaattatgatatatgtattttgtcatataaccacgtataattttatattaaaatatataaaaattagatattttaaaaattattaaattaaaaattaa

SEQ ID NO: 372187 - DNA, 506 bp, Cannabis indica
ataatatctttaccagatcaatatcggtcccagtcgaatgtatactccatacatctgatactagcatactttaccaatgttctggaaagaacataacacttatccaaggtgtaagtaagctatatcgctgattatcacatcagtgtaaatctagtgcactgatgaatcatgggacattaccttttgaagcatataatcacaattaccttccactgtgtttccatcactgtaattctgaataattagatgttctggatttaacagaacttgtacacattaaacataaacatgaatactacatgtaaacataaatgaattctaatcttttattgataacaaataagattatgttgaaatggattttatttagggcataaaatcccaacatatacaaccttagtctcatgtgtggttcccttagaaactctgtatgaaacttttaaaggtgagtctattattgtcgaatcttcaacttaagactcaacatttgtccaagttgttacact

SEQ ID NO: 372188 - DNA, 932 bp, Cannabis indica
tgatgttattagtgtaactatgacaaatatacaaaattctataagtatttacagtcacgttatttatttttacccaagatagtgtataactattattatttcaaagagtaactatttcattattattattattattattattattattattattattattattattattttgaaaatagtaactgttttattattaatatgggaaaattctatattagatttagagtcactatttttattttttctttacgaaaaaatataaagatgatactaatactaaagaaaaaaactcaacttttttttttttctatgcatataatcttgtatttttcgagttttaatcttaatttatttatatgataatgcatatcttatttttttaaacattggtaaattttttaaaaaattaaaataatctaaattgtcaaaaataagtttaaacaattgtattttatattattgacataaattatttaaattttatttttttattaaaaattattaaaattttccatattttaaataacttaaatataatccatcattatcatataaaaaaatgaaattatataagaaaaaaaaattaaggtttaacgcacctaataacaaatctgtaagaaattgagcttaggtatgatcgttttcatctctctcttccttaatcttttctactcttaatctttttccttgttattgattatactttgattaattatgtcatttggccttgttttaaaagttattgggtcagctttcgtctatacagcctacgttgatgagtcttgcatttggcactactggcaaggtaaccaaatttctccatctccgcaaagccaaggtgcgcctttacatttaaccttttacgaagctatagaaccatcaaaatttgaaattactaaaacccatcttctcctttctcttcctcgcaaaaa

SEQ ID NO: 372189 - DNA, 573 bp, Cannabis indica
aaaaaaaaaaaaaactacctctattattagtgtagaaaagcttgtttgggcggatacttttctacaatttttaatttcttttataacagataattttctttaatgaaatgtggtgtttttttaaaaaatatatatatctttatatataaaaagtggctatttaacgtcaattgttggtttaacagtgttattttattgttggtatataaaaatgcacctgctatcacatttgatcggccagtgaccagtatatactatatttataaatactgaagaaaaaataagagtagaaagtatcattaagttaaacctaaacacttattggaggtaatgaaatggaatggaacggaaaggaaatgaaacaatcttcattccattcctttgtttggttgcatattaaagtgttggaatgttattctaatggaatggttattccactattttagtggaatgactatttcattttgaaatggaagaaaagaccattccaatacatgagaaaaatattaattatttttttattaatttttttatgtcattttaaatttattctattccattcttattcttatt

SEQ ID NO: 372190 - DNA, 535 bp, Cannabis indica
tttcaattccaacggcctaaaatcagactagtgattcaactattagtcttaaaattataactcagcaaagagagttgggtaattggaactcttacctatatttgaccaaccaaatcgattagcaatctactctcactctctacaaagtccgttctcaatagagatctatgaaattttgccaacgcatgagcttgggaaccaaattcttccgtggctccccaatgaagaacccgacttagcacagaggaatttgtagagcttcacctaggggttcaatccttgtaccgtcttcctttcactggcgagactagggttaagttcccttgatggtggtgagctccaaaattcacggcgatacgcgaaactttcgaatggaaattctgacggtgatgaatacgagagatacaccggagaagtgagaaaggaaaaagttggaacgatgttttgggctttttaactggctgtgagctgggtcagattgtttgaattagaagcaaattatttaaagattatggtataattaattttgttaaaa

SEQ ID NO: 372191 - DNA, 661 bp, Cannabis indica
tttaaaataaaaaataaaaatataattacctgagtcaataagtgactgcacgtagcttaatgataaaatatgaaagtttcggaaatataacttagatattatcgagaaaattacattacatatttttttttaaaataatgcttttaatttttacccattctttcaaaatctattatgttacctcttttttcaaccattctaccaattttactcctattacttcacaatagttttaattattctctaatcaaaattttgcatctccaaataacataatctattatgtttagattatttgaaattgtgtcttgggtacaatactcataaaatgatatatatttgaattaaagtattaaaaaaatgtatttgtcaacttctcccaatattagtactgtaaaaaatttggaaaaccgtaatatttatgcacaaattactcttttataaaataaaaaacagacgaggctctatcccttgtagaaaaacaaatataaatcacacaactttaatattgcaaattttgtagttaattcgttacaaattacacataataatattcccagctttgaatgaaatactcctatataatgagcaactaatttacatcaaacaattactcgtagttaggaattatttttaaaaagatattaatttttttagaata

SEQ ID NO: 372192 - DNA, 926 bp, Cannabis indica
gtgaaccaacacaacagtactaataatttaatgtggacctggttttggtgatgacagcaagatttggtggagtgtgatgtcaaatacatttagcctttgttttgtttttatttggacaataagacttagaacgtgcacttccaaaagcttaaactaaaactaaatgtaccagtcaatgttgttataataaagaattagtattgttgaaaacttcagcatactgtagggcaagtggaaaagaggagtactataatcttagataatttttgtgttcaaaaatatatgttaagtttttttttttatgacagtgtttgttatagttacaatattatttttgaaatttttgaaaaatttcgaatagtatactaaaaataagtttgaagtttttgaacatgcaaggtagattggtatctcacgaactcgatttcagtactgtaaattatttgaagtttttttttttaaatttataaggataatattgtgactatatcgaatatcgttatagaaaaaaattgagaaaaatattctgatatgtgattaggtagagattgactcgaaaattgtaataagagattgtaattaaatagggtttgtcaaactcatttatatgaatataattacctaatttaatgcactagctacaacaaataatgacacaagtcttggcttgaaaaaaaaagcttttctcttcttgttgggtcattgtaaagattattagtaggggtgtgcagaaagtcatccaatccaattccaaccgaccgattcaatcccaaccgatccaatagaatcggatatccaatcataattggatcggatcggatgcaaattttaaaaatccaattggatcggatcggatattggaatgagacatccgatccaatggataaccgatccaatccaatccaatatcatccaatgtccatcca

SEQ ID NO: 372193 - DNA, 598 bp, Cannabis indica
gttgcttatttcattattttgtttacttccaaaggaaattttatctcctaagttatgggagctttgcaaggcatatttgttgttactagactacatatcaaaatctttttaggtcttaggatcttagtatgagatagtgatccttagatgattatgaagtaaaatgaaagagtttagttgctactagctaaaggttattccctttggctggttctagtaattttattagagatctagtcgtttagttttggtgtttgattgattttgataagcttgataattttctaattattaatttttttttctggttttctaatattttttcaggtgaaacttcagtgttgcaggctgaaactttagtcctgttagttggactcaacaaattaggagcgttgtttgaagttgttatagctttattgtctaaattttcgggggcagttttgtcccatgtggctcgctctaagattttagcggcccatgacttggcaaagcatgctctgctgttagacgatgagctatcatggttcgaggaggttccagcgccggtggcagacgtctgcgtcgtaaattcatgagtgattctaatcactttgtcaaa

SEQ ID NO: 372194 - DNA, 811 bp, Cannabis indica
gatgttaatgaaacatacatggtagtaaatctagatcttggtaaaatatgtccaacaactacattgtagaatatcctatcagttaaaccttatgtattgataaatcataggaatacatttaatcacacaatcttaatatcagtgtgataagaatttggatgaatttataaatcaaataagtaaataaatgatcacatgaaccaaataacacattaaacaaataatgaaattaattctatttctttattgataattaaatggaaaagattacattgaaatagagttttatttagggcacaaacccaataaactcccacttgcactaacataaaacaatcagtacatttcaattaatcccaaatttagtctgtgcttttcgaatgtagttaaagtcaaaactttggtgaatggatcagcaaagttgtcttcagtatccactttctccaccagtacgtcccctcttgcctcatattccctgatgatgtggtatttcctctctatgtgtttgcttctcttgtggctttgaggctctttactgttggttattgcactagtattgtcacaaagaaaaacaattggtttccattccaggaacaacacgaagtcctgagaagaaatttcttagccaaacaagttcctttgtagcctcagcggaagctatgcactcgacctccttggtagagtctgatattgcagtttgcttagtgcttctccaaacaactgctctaccccaagagtaaaaaccatcccagatgtaaactttctatcatcaagacaagcctagaaatctgagtcggtatagcctatggga

SEQ ID NO: 372195 - DNA, 572 bp, Cannabis indica
gatgaaatatcatgtccttgcattgttccttgatggatttaagatttggatccaagtatgtccccatatacctaaaccctagtcacagtgcgcccagatcgactatatgtcagcttggggcttctaggtgtcagggtgtcgtttcatgcaaactcatccccaaagtatgaaacttagttggggcatgtctctcatgtatctgacgacaatggttgagcagattgcccataagaaggtgactggaaccaaaattgatgcgagtcagcgcacaagatatcaacttgggcgcccaacactaatgttggtcctaagttgagctctgagatgtccacgtgacatcctcagctccatggttcttcattttagggtaattatgatgacctgtttgttgaaggatagaacttagaaacgactttgaaggtcttggtgcctacttgggtgcccccaaggtgcaggtaacattgtcctattttgggatgcagggccctgtgattgtttcttttcgtgtcatgtgtcaaaattagtgtccatgtcatcaagctaaatttttgggtaaacaatacacggtgatt

SEQ ID NO: 372196 - DNA, 698 bp, Cannabis indica
cttcgcgttgggagcccggttgagagaagaagccagacggctgccgggagatcccttcgcattgggagtccggttgagaagagggctcccaggccaaggcctatcgtcccagtgccgaatacaggggctcctgacgccagcacttccggctttggtaagtcccctgtagcaatacattatgtcccacctgttagtgaatatgctagccttaggcctgtagggttcgatgaacgtctccttaggtttaggatgccttcgacccggtggggggaacatgccaaggattattatttctccaacttaggagattatctaggtcggtcccggatgggttccgcacctccggagcctgttcccttggatccttcggcctatctttcttctagctggttccggccctcggacagctatctcggggatgatgcagccagtattaagattcagaactttgctagggccgaattagagagtcagggtaggactagcttgattgctttcttaagtgtttactgctttcacagatattctaacacttactcttttctcttgttgcagcagctaatcccatggaggcaattttggccacccttgccggagctcacactcctgatgctccccttcctccaacttcttcccagatgattaccccttcgaaggcttcttccagtgcccctccagacactattgacttagtggat

SEQ ID NO: 372197 - DNA, 551 bp, Cannabis indica
aaatagacttgaaaccttttagcacagaatttagtctaatatcaatatagataccattctcagattattcaagaactgagttggagaatcgcctatcaaagagttgtgtagaaaggatttttgtaaaagtaggttctcgtgagtatttaagtttttctaaggctgcaccacctaaacatcgatattctccaagctccgtgattaactagcaaaaggataaatccaaatagtggaattgttcatcctactattccagagaatgatcaatcatcattccataagatggttactccgaaaaaaaaaaaaagaaatatcactcctacacttgatttttcagatcttaatattcctattgcccttaaaaaaggaaataggacttctaaaggtcatcctatctatctatctatctatatctatctatctatatatttatataatccttttgttaggagtgatgacatggcatgttatacttcttagttttcaatattatcttttttctcctttttttaaatttttattctatattttttagtgttaactcacaaaaa

SEQ ID NO: 372198 - DNA, 596 bp, Cannabis indica
cttggggcatctctctctctcctgttagcctcaactttaatgttgaggctcatagattggttaagcatgcccttaggatagacaatgaactttcttggatggaagaaatttccctacctactgtgtaacttttgtacctttgttatttttgttgggaatattttaccaagatctagatttactaacaagtatgttgattaacatcctaaatatgaatatctctaaaacaatgaaattaaacacataatagtttaaaaatccttccattggttgcagcagaatataatgactcctttagctcaagatctctaacccttattcctttctgtcacagagtattatcaagatctgagtctggatctctttctctcctttgggtttggttaccagcgtcttgctcactatgattgagtactggactttctatgtgtgggcatgacactctttcactaagggttcgaatatgatgaagaacaatgaagaaggtgaaatcactatggaatgaactctctcatctattagttgcctgacagagaaaactagatttgatttggttgaaggcaaaagttaaaattgtcaagtggatgagatgagag

SEQ ID NO: 372199 - DNA, 595 bp, Cannabis indica
tgcatagtggcaattaattacaagggtgacttttacagccattatccctaaaattgtggaatctgattacaaatcaagccaaataaatgaagtttttacacaactgtgaatatctcgcttttattgggccgagatgaacatgtaattaaagatatacggtaagtcttatctcatagggatgcctcgccgagaagggagccaagatcactttgatagcgagcaactgctagtcattttggcttctcgagtattatattgtcttaactctgataactatactctctggtatcgagaggatcttcgttgcatgcataccatcttctagcgagataaatgcctcgctgtccgttatcttggctcgtcatactatctatactcagtttgtatatcgtataatatacgttaagtatttttagtgttgtcgctttttctttcacgcagcgaggttgaggtctcgtcatgaacgtgtgcacccacatggtttctcgtcaatacataaattagcagttcgtatgtatctgtctcgcagaaggctattcaaccagccgagttataaacataccctgcgaattatatttccaacgagttgttccat

SEQ ID NO: 372200 - DNA, 445 bp, Cannabis indica
aagatctgaaaagagttaggttaaattgtataatctgtcattcactttaagaaaaatgatagcaattaggcactaacaattgggtaaacaaatcaacaggattctctttcctattttctcatcttgattaatctttagctgtctgcttaagtttcttgaattattattctgtctttaatcataaaaactattggtttgccaaatagaatcataaatttagtctagtggtattcaatccaattccctgtggttcgacctcacatgtgtgagtttactacttgattacgtgcacttgtgtactatttacaattttcgtaacaatggtacaaggcctgatcggcccaaaactcaccgatctcaagctagaccgagcacgtggatcacccttctccccagagattgaagtccttgaactacccccaaaattcaagatgccaacttggaa

SEQ ID NO: 372201 - DNA, 711 bp, Cannabis indica
tccttttcacatatactcgactcatccaaaacttccaccggtaccaggttcaattcatcaagtttgttttgcgaggtcagtttcgctagggcgttggcattagagttttgttctcttagaatttgttcgattttaaaataatcaaacttttccaagttctttcgaaccttctctaggcatttttccacttttaaaccctttgcctagtattcgcctagaacttgattcacaattaattgcgaatgactatggcatataagatttttgacctttaacacttcagctatctttaaaccagcgatcaaggcttcatactcagcctcatgtttgaaatgttgaattgaaatcttaaggcatagtgaaacttaaagccttctggaaaaattagtatcacccctacacccgagccatgttcattggatgctccatccacgtacaaattccaattgtccacgtcttgctgaacaagtgggttttcatctgttgttatcccttctatcaggaaatctgcgaaagcttgacccttgatggatgttcgtgggtgataacttatgtgaaactgccccagttcaattgactattttatcaatcttccagaagcatctagttttgaaaaaaacttgtctcgggggttgaacagctaacaccttaattggatatgcctggaagtatggccttagtttgcgagatgcatgaattaggcatagtgcg

SEQ ID NO: 372202 - DNA, 922 bp, Cannabis indica
gtgagcccttaatgcctcaatctctttatctctccactcgataaacatacgcctttgttcgtccaatgcgagattcaccgcagtgcggagttcgtcctgatcatgatgtacggtgttgttatgattctgtatgagtccaagagcattgcggagattttataacatagtagcatctccgatggccgtctggatgttggttccaggcggaacagttgtgttatgaatgccctggttggctgcggaactgtaattcccagtctcttgcacaccaagcgcgatttcatctgtaggagttgttacaccattgcccacgttagtcggctgtctaggattaacagctggcggaacccttgtgtttcctgggttctgcaatggaggatccaccgtctatgaattttctggatcagtcaagcctctacgagtttgcaccattgtatttgtggttagattttgaataaagagcgattattaattctgctctcaatgaaagcaccaacatgttgacctcacttttagccaacgacaactagtctaatttaataagcgataagtgatttattgcaatcgatatataataaagcaatataaagacacaggaattttatagaggttcagtcccgagcagttcggtaatagcctaatcctcgttatttgtattgacttaagaacaaggagaatggttccttttcttatagctcttacaacagtatctctgaatatgttaattcttagatactatctttagtgtatagtctcaactaatctgttttgtcccctcctgcccagtgaacatgcatcaatatttatagggctagtaagcttggagaggaagagtttgccctctcgttacaatgtgtataaacagaaagctcgtgtgatcaatgctaggtacaaagattgtgggattgatgctgaatacact

SEQ ID NO: 372203 - DNA, 615 bp, Cannabis indica
cggattgcccatccgtctgaggatgaaatattgtgctgaactttaactaagtacccatagctcgatgcagactctctttgaatctcgatgtaaacttcgagtctctatccaaaacaatggactttggaacaccatgaagatgaaaaatttctctgacatataactcagcatactggtcaatggagaaatttgtccgaacaggtaagaagtgcgctgactttgtaaacttgtccactatgacccatacagagtcaaacttacctcctctcttgtgagtgctctaaatccatttttaacatgcaactcacataatgtatagtaatctaaaataagacattgccctttttttttagagagaaattgaaaaataacatgatatatacattttggggcctattcttgtactgtcaaggttgttatttcaattaaatcataaagagacatgtagatagagttacgtacgtagaaatactgttatgacttttaatgtttcataacagttgcattacaatttcattacagttgcataaacatttttgctaacagttatttcgtctaattaaaatcttcggccaaccatccatcaaccactcagaaactttcatctgattgaaa

SEQ ID NO: 372204 - DNA, 575 bp, Cannabis indica
ttctatcttttacatgattaataaaaatagtatatttttttgatgttttgtagtttattgagagttaatttatgaatgatttgtatattttaacaagattgatgtcttgatatttttcttttaatttatagttgccttataaaaagatttttctataacatgagactaaatattataattacaatacttagtttgatttttgtgtttttttgagcaactctattttactgtactggggttgcttcattttttttgttgtgttttgtatactctattagaaaaatacttatataattttaaaaattattcttaatatctttctaaaatcttttccttgcattattttatggtaattttaatacttattttgagtttattttgatttttttttttctaaatcatgtatattttttttttttacctaaaaaaaatttatataattttttgtcataatatttaaaacataatttatttttattttaataggtatattttctaagaacatgaattaaaaaaaaaaagtttaaaaaaaacttaagtaaaattaaatatataaattttatatacaataaaaa

SEQ ID NO: 372205 - DNA, 249 bp, Cannabis indica
acaagaatttgacatcacaatcaaagacaagaaaggtgttgagaatgtcgtcgcagatcacttgtctcgacttgaatttagtgattctactgatgatccacctattcgtgatgatttccccgatgaacaactgcttgttgttactaagttaccgtggtatgcacacatatttctattgggatgatccatacttgttcaagtattgccccgactagatcatgcgaagatgcattcctgatgatgaggtgt

SEQ ID NO: 372206 - DNA, 683 bp, Cannabis indica
tttagggcataaaatccaaacactatcatcagtagtgatcatcaagtcgtgtttgatctttgcattcaacccatccaggtatttctctttcttactgaagtcggttggcacaattcccgaggctaaccttgccaaacgatcaaattgagttgtgtattcagtaacactcatattctctctctgagccagttcggtgaattcttttcttttagcacttctgactgctttgttataatacttagcgttgaacagttcctggaacttttcccaggtcatagttgtcacatcgtgaatcatggacaccatgtcccaccagaccagtgcgtcttcttgaaattgaaaagtagcacaggccaccctatcattaccggtgacgcccataaaatttaaggttctggtaatcactgttagccattgctcggctttcatgacattaggacctcccagaaaaactggtggtgcttgcttgcggaacctttcatacaagggttccatccggttcactgtaaccacaggtttggcctgcacagcaggggcaggtgccactgtatttctggagcaggcactacagcagcaccttgctgtctcaatcatcgaatctcatcatcttgtttattaattctggcttgcatcgctgcgaacctattttcccaattttgggcatcctgagcagcttgggcagc

SEQ ID NO: 372207 - DNA, 1017 bp, Cannabis indica
cagaaaaatacatatagtttataagatatttcattaaactaagtgtgtatttctcaaattaatttcaaaataatttgatgaaaaattaatttcatgtatttcaaaattaattatgttgctaattaattttattaggttatactagtgtaatcaacctactacagttattcaaataaggcaaatggaccttaacaattgaggttattcatgtaagggagggcggggttcagtatgtcgtacccactactaatggccttctaactctcacacaaggctcaaaggagaggaatttaatcttaattaaacaactgttattcattgaataagcccaatactaattggacctaaataaaatctatcaaaaggtgataattttattttagcaacctagtccattttaattacaaaaattaaatgggctccctatatgcatctaggcacatgcacacactgatttggatggatcctatcatgtgactaggtttatacacagatgaaagaagattacaaaatttacctaatacaaattatttatttaacctattgacaattgaactattgattaaaatcagatcattgaatctgtcaacaagctaaccatagcaattaagatcacaaataataagttttaaaaaataagttttagtaataaacaatatataaaacacacacatgcaacaaattagatagatggatataggatttatttaatttaaaataattaaataattaaatttattttcaaaaataaacaaatatataaaaattttaaaaaaatattaacatagaattaaataattaattttaaaattaaacctataaatttgaaaaattaggtttataacaaacctaaatatctattcaaaaatgccacctaacttttcaaaatttatgttatttttaaaagaaaataaaatttaatgtctaataaaaaaataaaatgataaataaatatcatttatctaattttataatttaatttaaataaaataataaaaatttgaaagttgacaaaat

SEQ ID NO: 372208 - DNA, 630 bp, Cannabis indica
ttgggggagagagagggagttacagagagaataggaaaaaatataattatgtatttttttatttttatttttaatatgattttcttttaatttttaaataaagtaattacatagactaatatgattgcaacacatgtatattgtatacacgtggacaattcaatatgacagttaataactgaaattgaataaaaatggtaaactgctaatagaacactggtttgggaggatttatcgttaaaaaatcgattttgggattagttgtaagcgtagtgacacatttttgcttgtgcaattacaaacgctaaaagtgagataacttttaggttgcgtttggtaatattttttaatcagttttttgtttttaaaactggaaaagtgaaaatatttttcaaaaacatgttctataaaactattttcactttttaattgagaattcaatttttttttttttaaaaagaaaaacttacttccaatatttttttaaacagttattttttttaatcaatattttggactccgatcaaactcggaccccaaattcccccccccccttccccccccacgaccctggcactgaatatcgctattggtctaactaaatatcaggtctcatatagtttaatataa

SEQ ID NO: 372209 - DNA, 748 bp, Cannabis indica
ttccatagttcgccaaggaccttcaatgccccccagtatcgcggataactttccatcctcggttacccgtgacaccttggtcgctttccgtcatgaatctgctgatgtatgcccggagtagctcgcctagtcgctgttttacttcgaccaaatctcccagatgagttggcgtgaggaagagaattgtgcatggaatttcgaagagaaagttttccatgaactaaactttcctggagccaacttgaaataccattgctgtgcggcctccgacagagttgcggggaagattctgcaacatacgtctcctcgcactccttgtaaatccatctgcatctcgaaatacttgagatgagagagaggatcttccctcccagtgtacatcttccacgtgggcatcttgaacttgtgaggcagcggcaggaggttgatctctggcgagaaaggagttccgcgtgcgcggtctaactcaagatcattgttacgctacccggccaagccatgaaacatattcttcagttcgtcaagctgggcctgtacggctgggctgacttcattggcattctggtcgggttgggctacgtcagcgtctttctgagcggggatttgagtatgggcttcggactgcacattagttgtagcaatagagacccatatctgttcggaaacttgtatgttcttggtctggtggatgcgttttgatttggttgtagcctgagtaagcgtccatgaagcttaatatttcgtgccc

SEQ ID NO: 372210 - DNA, 607 bp, Cannabis indica
ttgaactctagactatactcaatacaccacagtactctatggcacacatattttaattaaacatggatgtaatataataaattagcaaattatttagaacattttcttgatcttaatttatgtttcaattaatatttattgttgtaatagaaattgataccaataaagttcttgtacacataatcacagtaccttatttgagtgggagaatttttaaaattctaagcccatctttattttggatgaaacttgtgataggaacttgtagaatacaactgagaaagtaaatctaaccattcatatggatagaaataactcatcataactttgagaataagatagttgaattttcgcatagtctattcgaattaggaaaaaattactaatcctcatgaaatgttttatggtatctctaatgattacttaatcttaagcaagtattttacattaatgtaaatactagatttctatgttgatgacttagtctagaaggaacttacagtttcaaactaagataatatgtcacaacaagatatccctaaaaaacaatagtaagaggttaaatgtacttctatgtatgaatttaaccagactcctactgttgagt

SEQ ID NO: 372211 - DNA, 1286 bp, Cannabis indica
aattcaatacatactggacctaaaatattagatgcattagatctgatccaaaaaaattaggtctaaaatattgaataaacccaaattaaatcaataaatatatataaaatatatttaatagatagaaccgatccaatccaatatccaatgaaagttggatcgattggatgactgaaattaattagatcagatcggatggtaaaatttaatattcagggctcgtttggtacgtcatataagggtcgtattgtattaaaaaataaataacattatgtttggataaaataatgtattgtattaattattacgaccacaatttttaatgcaatgtaagttgtattagttaatacataacaaatgattagtattaacttgtactataatatttgcaagggattcggggtcaaccccaatctcaaacccagatccgggacccagtttgaatcctgaccccgacccagacccggacctggacccggactcggacccaagactcgggacctggacccaggtttcgggacctagactcggacccaagactcgggactcggatctcgtgcccggactgggacccgaaacttggacccaaacccgaactcggacccagactcggatccgaactcggacctagacccgaattcagacctcgacccgaacctggacccggactcggacccaggactcgggacctggactcagacccaagactcgggacccggacctcgggcccagactgggacccgaaacctggacccaaactcgaactcgaacccagactcggatccgaacccggacctagacccgaattcggatctcgacccggactcgggactcgaatcctgatccgactcgaacccgatcttggaccccggacccgaacccaggacctaaaccccaatcctacccagacctaaaccttggacctgacccgtagtcggtgttggggtcgagtgtattaaaaatatattataactttacacaatctattaataccagtcaatgctaaacatagtattgtattaaataatactaatacaatacaatacaatacgacataccaaacgagatctcagtatatgattagattgaatttgaataggtctaaaaataatatgtggtgtaatgaataattctagtttttactatgctaccaccaccgatgatttaaattattttatggtcctaactcctaaggccattctccaacgtagcatctaaatttgagaatatagtccaatttctactccaacccaacactattcgtccaatatatgcagtggactaca

SEQ ID NO: 372212 - DNA, 572 bp, Cannabis indica
cctgaacccagtcccaaacccaaaagtggtcccgaacccgtaccttgtgaaccaaaactggaagttgacaaggacaggaactaggacatggacttggaatcataactgaaatttgacctagatcaagaaccgtaacaagaccaggacccggactccaaatcaaacctatacccgaatggggagccggacacggagcacaaccaaaacctagactcgcgacccgaacccgaacctgagctcataaccaaacatttgaacaaggctagggacacagaactagggtcgggaccaagaactgcaccccagtctcgatctcgaacccaaactcagaaatgggacctgggacctgaaccagaacctaactaagacccgtgacatggatcgagatctttactcgggatttgggtaacaggcctggaacagaccattagtcggtgtcaagatctgggactaagacaaggacaagaacccagacgaagaaccaaaacggaacccaaacctagacttgggacccaaaattagaacatgaacaacaatcgccgagccaggaccctagaacaagactaggaccg

SEQ ID NO: 372213 - DNA, 546 bp, Cannabis indica
cgacaatctttccggcgactttagaggcaatgagagacccagaatagcagtacctattccctgcgtcactggcgtagattaacgaaagttttgcatcacccgtgcaaattttgatggtataagcgaatatttaatatcagttcaaatattaataggatttgttttattattattttattatatataaataatattttattattttattaaataaaaataaaaagttacccataaatttctcctaaaccaagaattttagttatatatgcacactttatataaaaaatagatatggtatgagtgtaattatttggtaggttggagcatgttgaatggatgtttttgtttgagttgttttatttaactggtttttgtgtattagtttttaacttagttattttacggaactagttttttatctcaaatttttaattagttgataaatattattggattttttatattatatttgagttattatgtgttattatttgtgtttatttattttggtatggaaccagttcttttcatatttatgcctcaata

SEQ ID NO: 372214 - DNA, 805 bp, Cannabis indica
accgcagcctaagcttttattaattagtattggttgagagattcagtcaaaaaattttgatctaaagaagaaaaaaggactcaaaacaagaagaatagtcatgtgtaatcttatcatatatatatatagtttttgttttttcttcctttcttcaatgtaataataataataataatattaataataaagttgctcaattattggtgtagtgcagtcatgaaagctcaatggttgcacgtgtaatagctatagttactagctagtttcaaataaaagctgatcttttgattcaacacccttatttggtagacatgtgtttttccgcaatttttctggttttttccgtcaacttcaaaatctaaaaagtacaacattttcataatattttgcctacaattaaactatggaaatgaacagagaaaacataagaatttcaaatacatggtcaaaattaattaatgtacaccatgttccattgcttatgtatgtacaaagtaacctcatgataaatgatattcataagaaaaatttgttgcatcttatttatcattattttctttttgagagatgttgcatcttaaattaattaattatatataattaaaaagataaggtttcaaaattgaggtagcatatctcatatgtgtacatatttaggttaaatattattttggaccttgtgttttataaaaattatcaactgaactttctgttttgttaaatgacaaaatagactttatattttcatttttggctaattagtaatttttccccctgaactttgacatgtactaaattgtgcctc

SEQ ID NO: 372215 - DNA, 686 bp, Cannabis indica
gctactaggcaaaatacacactaccggagaccgcctcctttgtacaaagacagctcccggagggatcccaacaagagatgcgagtaccataacgacattgggcacagcaccaatgaatgcaaaaatctcaaagacgagatcgaaaacttaatctgactgggacacatctacgaatggatcaagaatcggttgcctcacctcaactcgggttaggcggctggaactttgccgcaagtagtaccagggggtgcagcagggatattggccacagttgctccccccggagatgctcaacatatccccggcctgccacctagacctaacgggagagtggttatgatctcgggaggaccccacatcggagggaccacccgcaaggagctgaagcggtacgcaggggccgtgaaacacaatgaggtttgggaagttactcaactcctagctcaaaggccccgactgatggatcaacccattacattcacggaagaagatgctaaggcggtgcgttttgctcaccatgacccgttggtcatagagacccccatcgccaataaggtggtggccagggtcctaatcgacaacaggagttccgtgaatttgttgtttaaagaggccttcaccgtaataggcctgacggaccgagacctctcaccaagtggttcccaactcacggggttcaacggaac

SEQ ID NO: 372216 - DNA, 764 bp, Cannabis indica
ctgtgaaaggagtaaggagtttcttgggacatgctggtttctaccgaagatttattaaggacttctcaaagatctccaaaccattgtccagtttacttgttaatggcgttccattgggtttgagaagatgtttgaaggcattccaggttctaaaagaaaaattgatttcagcaccaatagtcacttcaccaaattgggagttgcctttcgagttgatgtgcgatggaagtgattatgcaatcggagcggtcttgggtcaaagggttgacagggtgtttcgcacaatctactatgctagaagaaccttgaatgatgctcaactaaattatgccactacagagaaagagatgctggcaattgtgtttgcttgtgataagttctgaccctatctaattgggaataaggttattgtctatacagatcactcagtgattaaataccttatgaccaagaaggatgcaaagccaagattgattcggtgggtacttctacttcaggagtttgacttagagataatggacaaaaagggcactgagaatctggtaggagatcatttgtcaagactagagctagaagagtgccagaatacgaaagaggtacagataaatgagtaatttcctgatgaacaactctttagtgtgagggaaaacctgatgttaccgtggtatgctgatgttggaaattattttaccaggatctagatttactaacaagtatgtttattaaaaacctaatatgaattctaaaacaatgaaaataaagac

SEQ ID NO: 372217 - DNA, 599 bp, Cannabis indica
gttttttaaaaaagttaaaaataagaatatatatttgcagtgaagcttggttagacacaactcaacttattttaactataattattctaactatttttaatgaagtccgttatagattgatgcatgatttagttttttcttgtagtgagaaaaaacaaaatagataaaaataataattttttgtttaataatattcatctatacgatcatgatagataaaaaaaaataataaatgaaaggaaaaaaatagtgtaaaagtattaattgatggatttttttgctaaaaattaattgacaatattatgagtatattcacaattagtatttatagccatggcatagatatttattttaaaattatatatgaagatcttttcaataacttaatatttataaaattttatataataaaaatagaaaataattaaaaaaaaaaagagaaaatagataaatagggtttaacaatttgtctaccacacctagtaataaattacacatttttatttgttttgaaaaaataaatgaaactgaaatttaaaatatctattaaaacaggaagagaatagataaattattctctttttttagttaaaaaaaat

SEQ ID NO: 372218 - DNA, 623 bp, Cannabis indica
tatttataattgtgctccaatgtcaaaatgttataaaagagaaatgctaaagggcaccgcggtgcttagcaccctcttatatgtcaatatcactattggtgcaattaagtatcgggtcccatataatttaatataataacttttaaggagtatcgctagccaatcgcaacgcaacatgtcgaaaaggtgttaggcacaactggtgcctaatagcaatgccccgaaaaaaaatgtataattatattgatcattattattattgtattgaaaatatacaaacatcattattttttatttttttattgcttaaataatggtaatatagtaaataaagaagataaaattatgtaaaaatgaatgaatcataataattagtgacattatagtaaataaagggaaatttacataaatactgctttttgaccaaaagttttcaaatatactgggacacggctaacataacttttttactgtccaagcccgttttctttctttatactgcccaagcccaataacttacttttatactgtaaacagtaaaaaacacaaaaacggacctcctcctggttggagacggccggaatcggagataaccaggaaaaaccaattaaataccggcgaag

SEQ ID NO: 372219 - DNA, 494 bp, Cannabis indica
gataaaaatatggttcaattggaaatttttaataatattgttctaattccaattttgtaaaaaaaaataggctgatccgcagacgggggagcttcccagtgctgtggatacatttgcaaagttccactgcaagaacaataagtggcgcgacgagcacacacaacaactgcatgtaagtaactttatatttttaataaattagttttataatttaaatttctttcactctaacagtttcattatgaaattttttgcaggccaaaatggttgagattcgtgacactcaaccaacgccagctgatgccccccgccagtacaatgtcgaccccacccaatttcctgcagatacgcatattatgacacaggtattgggtgagcggtcacgccacttgagaggagtcggcccgttgccaagacttaaggagggggcaaaaagagcaactcccaggccaggtgcatccgggcagaccagtgtcactcaagaggaatatgag

SEQ ID NO: 372220 - DNA, 553 bp, Cannabis indica
atatcacacataccattaatgtatttaaaaaatcacatacacatatgtaccaaatctatttaaattatcatttatgtgacatttgattaaagaacacaggagacatttttttgttttatttttattttcgtaaaaagtatatccttcatacatataaattgaatctttgtctctatttattcaaattttcactattttgtattcttttattttttttattaaaatgatggaattgatttctaaaatcatcaaagattttggagagttaagaaatatttctgaaggagtttttttattaaaatatcaactttcatctttagctcgacacgaaaggattctaaaattaaaattcaagagattcgtcttgcatgatgacttacctaatattcaaaagactatttgcaaacatgcaagatcgaaacgaaaaattgacattatccaaaataagtacaaatatgatttagatataagaatattttattttgggaaatatatttctatttaaggaaataaatttctttttaaggaaataaaataaataattgattttctg

SEQ ID NO: 372221 - DNA, 508 bp, Cannabis indica
gacatgatctaatgattactacagacgataaaaccacttatggtgaaatggtggataagtcactgcgagctgagggcgcagttggatgcatgacagagtctgttgggactccagtggttggcggggatcctacccctcctgcatcaggttttagcaagggaggtagcggatcggccatggatcagaaaaagaaaagcttccactgcaaccggtggctcaggtcagaacaagaggttccgggggaaccagggacgaggcaatcaccagggtagttctggaacccgatacacttacccagaaagccccagttgtaaaaggcaccatctgggagagtgtagcggacaagggtgctttcagtgtggcatgtcagggcactacaagggggattgccctcaactcaaaactgaagcaccaaaggctccaacgaaacccaatccagcaagggtcttcgccataactcaggctgatgcagaagtaagtcctcagtggtaacaggtcagctctcggt

SEQ ID NO: 372222 - DNA, 876 bp, Cannabis indica
gtacttagtgtaaactattactagattcatgaatgtcctgatcgtgaccttaagaaaagctagaactgttaactaaagtttacatgtttgatagctattctaggtgattaggggtgtcctattttgagcctaatttttccacctcttattctttgttaaaaataaaatatatatttatccttgattatgagccatgaacttaaataaattatcattaccttattttgtaccataaacataggttattgtgtacaaaatgaaaaatatgatgtaagtgagatgaaattttttttttgagaattgtgtttggaaaagatgtaggtgcatagagagttatgatccaagtatatttcgtggaacaattctcttgttatataaaaaaaaagtcatattgagaaaaaaaaattctataataccaatagataaatttgataggattataactttaattgtgtgaacaaggagacatcgaatgaaaaattattgtcgggagaaaatgaaatttatgatgattttttttttatttttgtattagatttgtaagtttctggtgtgaaactactctaaataatgacattcttatccactatatacttaagcctaacattacaagcctataaagtcattttgatctatatgactttggtttacattagtggagataaatttgttatataagcctatggttatcttgaatattttgtggtaagggaagtctttatgcacatagattatatgtatatagagttagtagaattgatatatacacattttaaataaaaaaatacaatattagaagttaagcttaaatagtttgaaattctagtcctttgtttgaagtgcatattgaataatagaaagagagtttatattttg

SEQ ID NO: 372223 - DNA, 656 bp, Cannabis indica
aacatatataaatgggagaaactacccattctactaaaaaatgtcatcactttaaccaaaaaaaaaagatccttacttttcaatctttattttccacaaataaaaaaatgtactattacttttttcctgacgtacgaaatggtttaattcattaaacaaggttggtaaaggcccattcatataagcccaacaattttaaatgttaccaccaacccatacaactcaacaaaatttctaaaccctaaactcatacaataaccttactttccaattaatttattcaaaagtaaatttaattgtactatttcactgttctaaagtatgaggacagtggaatagagtttccaattttgcaaaggcccattaatatcagctcaacagacttaaatgtattactctacaatctgaagcattcaatctcataaaatctaatttcactcgactcaccactatctttcccttactcttcatctcaaattcttggatatcaataacaatcaaacactctactccagtacattaacgtcgaaggaacaattgattacttatcagtaagtccttttttttggatctttctcgacaaccattccttacctattaactttatcatttaaattgttaattgaaacagatacaatatggaggtcgagtctcaa

SEQ ID NO: 372224 - DNA, 666 bp, Cannabis indica
tcagtaatttttgaatttcttttgagttaatgcaatgcgttgttaattaattaatttacgtattaatatgaagttgttatctagttattttattttttcatatataattgttcaatcaagagaaaaatagtttatgttttagtttttcatggttcatactttttgttgtttgttggtttctttcatattttatacactattagttgatgtacaattgatttttatgttaaaatagaattgttattgtgttgtttattcgttgctattaggttgtttaacaaaaagaaaaatgagtatatatttatttttttaatgtgtagatatatttttaagttggtgtacaagtgttatgtagttgtttttaaatttattttatagattatttgtgtatttttttcttagatctaatgtaatttatgaagttgttttcatgcctatttaacttgcatattatagtaagttgttatgcagttatttatttgttgttatttagttattcaaccaaataaaaatgaatatatacacatgtttattttattttatacattagtgatgttttttacttttttagagttatttttatgcctatgtaatttgcatattgtagtggagtttatgcagttatttttttgttgttatttagttgtttaactaagagaaataaat

SEQ ID NO: 372225 - DNA, 831 bp, Cannabis indica
acccttacataagagaatcacatgaagagtatcttgaagtgacaggggtaaaattggtacaatgttaaaaaaagaggtaaaaatgatagattttaaaaagaaggtaaaaataaaagaggacaatataaaaagggtatagagtgtaatttcctcatagaaaaattaccaaacttgaataaggtcttacacctttgtccgaaagcttatttctccctacaacaagcacttagggaaaagaaaataatgaaaataactttttagatttatcaagcctaaagtatttccagcaatgtgctttcttgatagaaacttgttgtcttacaaaatgaacccaagatctctatttatagtgttttgaagatcacatatggaaatcaaaatctttttaccacatggttgttaccagcactttaagtggtgtttaatgagataaaaatgttggattagagagctggaaacatgttcaattaatatatgtacatttatggatattttcaaaaaattgattttaagtgttcaaaaaacaactataaaataacataataataaccataaaattactgtttttcagaaaactcaatatttagtttttgtaactctcctttctgagtcaaatctctcttcaatgtctcactacctatttaaatgatataattgcgtattgtaacagtttctaacagctagaaacttacctcattgattttataactgtcatatgtaataactcacttaattatatattatcaattgtgatccttaagttataatatatttttcagatttgtaactcctaatatgttacaacttttatgtgtattattatactatata

SEQ ID NO: 372226 - DNA, 585 bp, Cannabis indica
ataatgtagaaaggttatcagatctaaagaagtggttagttcacaaattctaaatgaaagatttgggagaaataagctatgttctcgggatcaaatctataaagatagaaagaggaggatattagtattttctcaagcaacttatatcgataaagtgctagaaagattctcaatctagaattccaagaaaggacaactactgtctacacatggaattactctatgcttggatcaatgtccaaaaactcctcaagaggaaaaggacatgaaaaattacccttatgcatcagtagttgggagcttaatgtatgcaatattgtgtacaaggtgtgacatacgctacgttgtagagattgttagtcgttatcaatcaaattcaagtttagaacactagattgcagtaaagcacattctcaagtatctttagagaatgagagatctcatgcttgtatcttctggtggagagttaaatcctactagatatactgattttgattttcaatcagacaaagatagtcgaaagttgacatttgggtgagtatttactcttagtggaggggctgtagtctggagaagcattaagca

SEQ ID NO: 372227 - DNA, 500 bp, Cannabis indica
atatacctggtaacaaacatacaaatgtaaaaaataatagaaaaatctataagattgcgtgtatcacaaaatatttaaatcttatttttaataatataaattattcaaattttttcaaattttttagagataactctaaataactacaattatactaaaaaaactttcataaatactaaaataaataaataaaaaaaaggctaattaagatttttgcccccaaactttaacatgtaccaaatgatgcccactgaacttttaaggtcgttaaaaatgcctcataaattatcgagatggttggatttaatgacttttgtctaattttaataaaaaaaactaatatgaatgaaagttcaggggacatgatttagtacatgtcaaagttcgagagacataatttagtagatatcaaaatttgtggagtatagtttagtacataaacaatcactaaaatagtaaaattgaataaaattagacaaaaatcattaaatctaacaatt

SEQ ID NO: 372228 - DNA, 752 bp, Cannabis indica
attaatgtgtttgaatatgaatttgtttccgtttcaaaaaaaaaaaaaaatatgaatttgtttgttaaaacaaaatagtcatattaagaatttgtatatataaacatataattaatgacttataaaggaagaaagtgatatatataaaaggataaatattaaactaagaggtaaactaaagttgtttttattaaataaacgtatctagtgtgtaaataaggtattatagttataattatgatgcataacatcatgatcttgcatattataacatttggaaattgtatagtataactcttaaaatagatgtatcaatgcatatctcttttgtgtttttcaactttcaagaattttcaaagatattctataaacttcaagaaattcaaatagttattgcatacacttacattttttaatttatatgcacgtgaaataaattatttaaattttattttttaaatagtaaattattattgatttttttaaaaaatttacataatatattaaatactacaatataaatcaattagaaaaaatagaatactaagcaccctatataacatattataagtaataaagcacactttaaattttaattacttattaaataaaaagaatatataataattttaattatgatatgaattactcaaatatcattgaacacatattgattatcattagtgtcccatcctctataactatgtatagggtaaatagcggcaaaactcccaatactttcgttttggttt

SEQ ID NO: 372229 - DNA, 117 bp, Cannabis indica
aaaccttacattgattgcaggcgaatataatgactccttccattcatgaacttgtatctctttctctccttcgggtttggtcaccacagtcttactcactatgattgagtacttgac

SEQ ID NO: 372230 - DNA, 868 bp, Cannabis indica
taagctcggtataaatagtatacactggcacgtatttttcatgcttcttctgtttctttttatccttcgacggttccttaactccgtcctttctctttgaaccagaagtccccaagttatcaattctcgtggaaatagttcttgttgaaacattgctgggtttgcctcccgagcttgttttcaatgattcatttcctttcaggcttcttccttccgaacgaacacttgagccctttcgttgaactcagtgatgcttctcactgggcgtccttgtaatccatcccacaactagccccctgcggtcaatggataagtagagatccccgcctgaagggctgtaagttgcgtggtgtcattcaaattcctaactctagctgcagccgtgctaaaatgacttaagtacgccttaagtatttcgctgggctgctgctttatattggttaccaaggccacttcgagtcgcctatctctagcagcctgaaattgtttcttgaaatccctagacagctgctcccaggaggttattgaatgatgagtaaacttgttaaaccagctactcgccgctccaacaagcgaggtggggaacaaaatacagtgtaaatggttcatcacattacttgctcgcattattgtgttaaagttgttcaaatgtgataccagattagtggttccatcatatgacaagacatgcgggttcttgaatcccgaaggaaaaggggtattcattatgtctggattatacggctcaagctccttgtcaaagtcgtatccagataatttccctaattcccccacttgatatctcctgacttgtcctccagctcgtttatccacaattggattggatcctcttgctttggaccaagtg

SEQ ID NO: 372231 - DNA, 831 bp, Cannabis indica
atacatagactcatagattttataatagtgtgtaagatttgaactgtagtaaaaataatgcaccatataatttctataagattttgtaattaaaaataattattatgaaaagtaattatattttaaaaataataaaacaaatcattataatttttaattattttatataggtaataatattatacatatttaactaaaatttatagtataaaataaaaaatttaaaaaatatttattttttattgataattataggtttaattattttatatacataatatactatatattttcaacaaaaattaataatttaaaataaaaatctaaaaaaatatatattttttttatttgttaaaatactttaagaatattttgtttgaaatatgtgacaaagatttaaaaaaataaaaaaaaatatgtgtaaataaataatgttaatcacccattcactaattgaggaagattttgtttatcaatcacccacatataaaataaataatactaattttgaataaacaatagtaaataaatattttataagtttaatattcacaatagtctcatatcactaaaagtatatatgaaaaatatatagttaaggagtcttattattcttaatttctttttttttattttttttttgtaaaagagtaagccttattattctaataaaatatgacatcaataaattactatatttttaattatttaaatacaaattaacacaaagaattataaaaaaatagtttttataagaaaaaatattaaatgcttttttatattatttcaaacttgataagattgaaaaatacaaaatataatttaattcta

SEQ ID NO: 372232 - DNA, 537 bp, Cannabis indica
attttacctttgatgtgattttaattaccaaaataccacttacactatcactatacacaatcaaacgatagttgcagggtggttgttgcgtggttgcgcggtagttgtatcagacaaaagtttcaatcaaacgatggttacagagtggttgcgcgatggttgcattagacgaaggtttcaatcaaacgaaagtttctgggtggttgctaggtggttagccgaaggatgcatcagacaaagattttaatcagacgaaataactgttagcaaaatatttatgcaactgtaatgcaacagtaatgcaactattgtgaaacattaaaaattagaagaatattttcacgtacgtaactctatctacatgtctctttatgatttaatatgaacttattcaccattagaaatttggaaaacaaagaataaatacaccaagataaacattttactatagtattgatgtaattttttttggattatacttgagttggattgtttaggaactccagttcaattttttgagatctgcctttcatggat

SEQ ID NO: 372233 - DNA, 617 bp, Cannabis indica
aatcatactcaaagaatagttttgattaagaaattctactgcatgacattatgatttggtttacttatttccttgttacaatgtatgattttcgttcgggctcaaaaacaacttgcaagagaatgagaaatattatttagttaaaatcaaaaaaaatatttaaaattattttattcggatacaatcataaaatatttattattaccattgtaattaattattagattccacgtattttaatttaataaatattataaaaaaaatcattaattcttcataaggtgttactttcaagtagtcttagaccatctttaataagtgcacaattttagtatatatatatattttctaatttagtgccctagcgtgtttagcatttctcaaattttacattaatttggtggaatggtttaagttagaaagaaaaagatgagtgctaattacaattttttaatcaacttctacgcttgaaataacatgtatttgttatagttacagtatcatccatttaaatttttgatacagtactaaaaacagaatttctgatatttaatttaccacgtgtgttaaaaaaatttcaaacgttattgtaaattattttaaaattttacaaaaaa

SEQ ID NO: 372234 - DNA, 494 bp, Cannabis indica
caatgttgtcaaaggaataaattgtatgattaatgtctatttctatgagttgatattagatttagggtcgaaaacagtcgaatctgagctttgggcaaaaaactagtttttttgccaggcccgatggtggtccgacagtggcccgatgctacttataaatgtaggatatggtccgatgatagtttgatagcggtttgatggtggcaggatgcctttctgacgaacttaatgaatggagtttaacatctataaatgtagaatatggtctaatggtggcctggtgctaccatttttttatgtacaaaaatatataaaaataaaatgagtagcatcgtgccaccatcggacttccatcggaccactgtcggtgtggatgggaatggagagtatggatggtgaagatagaagagaaaggagaagggagaatggtattatgggtattaatataaagtgtgcccatttttttaaattttagtaagcttgtgttcaaaaat

SEQ ID NO: 372235 - DNA, 886 bp, Cannabis indica
cgattcgaggaggaaggcgaggaccaatgcgcgcctccagcatggcgtcaagcttcttcttcttctcccggaatttggcaatcatctccgcaggttttgggtagaagtcgagcttgatactctggccatttgttgaccaggccatgtagacgccatcatcgaagcgcttgatgcaacggctgcaggagataggagaaaggagctcatctttcttagccttcttcaaggcttggtctttaaagtccttaagctccttcagctccacggccaagttagccctggactccaagtccgcctggtgcaattcctctaaggacttcaccttggcagccatttcgtctaaggcctccctagcctcccggagctcgcgtttggccttggcaacagcctcgccctccgccctcagtgcttcccggtgctttgcctccagcctatccctccgaaggacctcctctcggatcatcgcctccgcttgggcttccctttgcttagcctcttcctcgaacttggccttagcaagggcctcccgccgcgcagcctcctcttggaacgcccgcctttcagcagacaggtcctgcaggatcttcacgacttcgtctatgcccccaaattcggacaagacgaagccgtgattaactatgtttttggaaaggcggccggcctctgcagcaagctggaaaaggaagcaagagtgagtaaaggccttaagaaaaataatgagaaaagaagtaaatcacagaatacttaccgcggccaaggagtggctgagatcctgagcttgaaagacggagttcaaggatgcacaagcagcgtaccgcttaggcgcgcaccgggttagctgagagacgtactcgccggtcatctccgcgacaaaaaggagccaagg

SEQ ID NO: 372236 - DNA, 516 bp, Cannabis indica
cgagctttccataacgcccaacaaaccattgctattttgcacatgtctttagtggtagcagaagaaaaaatttgttcgagccatgaagcaaaggtggcagagggatttttatagagcacaccaagctgatgccaacaagcagcaaccaaagagcaatataataagagcattggaagtgttttcaggttaggaaagacacatagggtagaggatagaaatgtttacattttagtgataaggtttacaatttatcaagacttgccacaacatagagtagatttacccatactgtattaattaaaacaaaatatgggtaaaaaagtggaaaaaaaaataaaatattaattaaaataataataaaaaaaagtactaaaaaataaaatatttacacaaaatacttaattttctccaaactttacatttatactttacatttaaattgagtttttccttctctctttctatttcacttttttttaatttttttttctaaattctagagtctctctctctctc

SEQ ID NO: 372237 - DNA, 564 bp, Cannabis indica
tatctttatatattaaaagtggctatctaacggcaattcttggtttaacgatgttgttttgtttcctccgttaactttaacagaatattcccaattaatttatattatttttttaacaaaaatttattcaaaaaaaatacacattccgttaacataacattattttattaaaaaaacacttacattccgttaacatccaaaaaataaccaattatactaaaaattaggaagagagaatgaaacaaattgttagacttattagttaaagataaagataaagataaaagagtgaacgaatcatacataattatcacttttcagaattacatgattcatttattgattaacaaacgaaccttccccgtaattatgctaatggttttggttgcagattgacactgtggaagtgccagaagtacacatgggagcagtggttgagcttcttggaaaaaggcgaggtcagatgtttgatatgcaaggggttgggtaagaaatcgtcttcttcacttctctttataccgagtttgttttagtgttacatatgagctgataatgtgatctttc

SEQ ID NO: 372238 - DNA, 641 bp, Cannabis indica
gatacaaataaaaataaaataaaatatattttcgaaaattattctaattttaagttgtctagaaattaaaaattttccaagtttaaatataatttttctaatctaattaaataattttagaaaataactaatatttaagtgtactagataaaaaacctacttaaatatatttaattttcaatttaattatatttattaaatataagaaataaataattaagtatcttgaataaaataaacttaattattaattctaatttaatattagaaaaaatattctaatttaagttgacccaaaattaattaaagtaattaattttcaacttaaagatatttttctaattaattaaatattagaaaatataattagttactagaaataactatctagaatatatctcattaactaagtatttttctaaaattaagtttaaaataatctaatgaaaattaaatttcatatattttaaaactaattatgttgctaattcaattttaaaataacttaatacaattatttaattaaggcaaatgtgccttcaaaattggggttgttcgtgtgatggaaggctgggttcagtatgtcgtacccactactaatggccccctaactctcacacaagacccaaaagagaagaatt

SEQ ID NO: 372239 - DNA, 673 bp, Cannabis indica
gtactccccagacttggatatctaccaaatcatgcccctcaaactttgatatgtactaaatcatgcccattgaactttcatcatgttagaattttttttactaaaattagataagagtgcttaaatctaacaatctcaatagttcagggggaatttttaacggccaaaaaagtttaggggcatgatttggtacatgtcaaagtttggaggaaaaaaaaaatactaattagcctataatataatttttcattaatacataattaatttagttatgattgctaattcggttcttaaaccttaaggtattatgtcacctctaaaagtaaaattcagaaattcatagattatattttttgtcgcccataattacaggtgacttttttatcgtcccaaatcatatttttagacgcaaattattaaaagcgactttttaaggacaacttaatacagtggtatttatattgttacagattcaatgaaactaaagactaactaaaactaacaacttataacaagctcaacagctggaaatggaaatgtggccaacagcaaagctgacggcgcaatcggcaagcaaagtaagaaaatgaggaaccgaattggagatgtattttttagaaggggggtcaaccgacaatccaaaatgcatgtaagagcatctccaatgctaata

SEQ ID NO: 372240 - DNA, 522 bp, Cannabis indica
tggaataaaaacacgaatcaataaacttacaatctaaaaaaaaccaattataataaatgttagattatgttttaccataatctagatttacttacaagtatgtttcattaacatcctaatatgaatttctaaaacaatgaaattaaacacatataaagtttagaaaccttacattgggtgcagcagaaaaatatgtctccttccactcagatctctaaccattgtatcctttctgtcgcagagtatcaccaagatgtgagcccgaatgtccttgtcttcagtttggattcttcacaatcttccagactatgattgagatgctacttgatgtgtgtgggcactcactttatcactcaggtttcgaaaaattaaagaagaaaagagggagaagaggttcggctatagtctatgggataggaggctcaatttttcgaaaggccaaatttttgattttcaatcttttgttaagtgtgagccatcactatctatttataggtaactactaggtttaggttaggaatt

SEQ ID NO: 372241 - DNA, 505 bp, Cannabis indica
gtggatagttagataattatagtttttataattaattataaattaaaaattatataacgtagaataaaatcaagaaaagaaaaagataataaataaatactttaaggatatttaaagatattttttgctattttttataatagatatttagattaaataatttaattaaaaaattataataaaagaaagtgaaaaaaaaagtgtgaggaatggtttagaaaaaaataagtagctaattatgaaaactagaaaacatatcgcgcttcgcgtgcggttgtttataaaattttaaattatacataaaaagtttattattttatttgataagaattgtgtaatatattttatgaaattataatttaataatttgtataaacatattttgttaataaataagtaattattctactaaattaatgcttatttttttattaacttaataacttattaaaattttgtattttttttctttcacacaattacaatagacttaatatcatccata

SEQ ID NO: 372242 - DNA, 518 bp, Cannabis indica
taaggccttgcctcagctggacatccccgaatgtggaaatgttttagactaggcatgagctgtccgaagctcataaggtgtctttgcaactactttagttggtactctattcagaatgtaagttgttatctttaatgcttctccccagaaagactcatgtaaggtagaatgagtgatcatgctccataccatattcttaagagtcctattttgtcttttggcaacaccattcatgctaggtgatcctggcatggtgtactgtgggacaataccacattcctctaggaatttagcaaatggtcctggacgttgttcacttgagccatcatatctaccgtagtactcaccaccacgatcagatttgacattcttaatccttttgttgagttgattcttaactttaactttaaaagctttaaacatgtccacagattaagatttttcatgaatgaggtataggtacccataacgtgaataatcgtctatgaatgatagaaaatagtgttgaccattccaag

SEQ ID NO: 372243 - DNA, 604 bp, Cannabis indica
aaagtatatatttctattgttgttttttttaacaataaaatacaaaaaaaaatgtttatgttttttaaaaaatcactgttgtaacattgttactttttgcggttaccaaaaaaatatcttattattattataaaaaaataaaaaaaagtgtataatagtttttaaaaataataaaaagaattataaaattaaaaatattataactaaagtaaaattataattaacaataaattttgatattattatgtttttttttattataagtatgacttaaattacatatttttaattaaaaatgatgttgtttattaaataacattcttaaaaaaactaaatatacaactaagaatatacaccatcaaaataaaaactaaatacacatgcattgcatgtaatattaatctaatatatatatatatatatatatatatagaatacttctcaatgggcattacttattgataggtactaaataaatttaactataaatattaatttaaaatattaagcattagattttgattcgatgacgaataataaaagagaaatttaaatttctatgcttaaattagctacttaattaaaaaaatatacaaaaaaaata

SEQ ID NO: 372244 - DNA, 469 bp, Cannabis indica
aatccgcacaagtgcggattttaaatttttcaatccaatccaatccgcacaagtgcggatatccgcattttgcggattggattggattggatcgtgcggattggattggatcggatactttgtgaacacccctaatcactctgataataaaattgaacggaattagacagaagtcattgaatctaacaatctaagtagtttgggggacgacttggtacatgtccaatttcaagagacaaaaaatcataattagcctctacttttttatatatatttttttatctagttttagcttaaatgttgaattcacatataaaataaataagaggctaattaagatttttgtcccccgaactttgacatgtactaaattatgtcccctaaacttttaaagtcgttaaaaatacccctgaactattgagattgttgaatatgaggacttttgtccaattttagtaaaaaaagtcta

SEQ ID NO: 372245 - DNA, 872 bp, Cannabis indica
tgttaacaaaatcagcaacacaacaacacctaaccaaacaatggtatgcaacaatacgatgatggcatcatatgaaaacaactcagcacaagcagatttgcagcaacctggaaacaacccggcaacaacttccaaggaacaactatctgcgcacacaattggatcagttcaagaagatacattttttttctagaaacagggacggtgagatcagagtcaaccatacaacaaccagaaaacaacagagaaaaaactacagcagtagatgaatatttcgacttcaccgactacgcaaagcttgtggctgcagaaatggtacaataacttgaaaataacaaggaaaaagaagaagaagtcgacaacacaaaaatgattatcatcactgacaaacgacatgaaacaatagaaaagggaaaagcataaatgaattgtaaaaaaaacataaaaaaagacaccttagaaggatttttttgggtaagttaaagtcgtcaaacttctctgagctcttagcatggacctgaaagaggaaaaaaaaaaaaaacataagcaacaaatgtgaacaactaaataaatacattgcaagcaacaactaaaaggcaaaacaaaaaataaagcaaactaggaaaaaaccaaaaaataaaccaaaaaaaaaaacccaaatatgctcaatcctaaaagatgaacaacttcaaagcaatatattaacaacaatatgcagaaaatgaaattaaaatagtaattgtcaactgagaaattaaattaaacaacctaaaaacaactgaaaacaaactaaaaaactaataatgctataaactgtttaatagtagaaacaaaaccgaaaaataactaaagaacaacacaaaaacaacatc

SEQ ID NO: 372246 - DNA, 639 bp, Cannabis indica
tggttctggggaaaagaccgactattcactctttatctctttcacatatcttttctgggtgttattgctctcccctgcgatatgtggccctcccgaaataactaggatgtcctccccttcaatacgaagaggttgtaacccctgattgtttgggttattgggccgactgggctggttgtatccatggccctgtattttcacgtactgctcaaagtgacctcgagggatgagactttccatcttatctttcaattggtgacattcgtcgatcgtatgcccaatatccttattgaatttataatacctgttaggatctcttctgcccttcgcattcctcatgggctcgggcttatcgaaggcaaccttatgctcatgtgtaacaccctaactagcataggcgtattacgtgatttttaaacatactgtgcagctcgttgttaatcaacgaggtttatggaaatcgtgattaattaaaatttttgcttttaattaaacttataaaatattttatacaaaatacttgggatcccgattacaaaacactttacaaaagttttactgtctaatacaaaatacttgtcacctagcgactaattacaaaaaacactgctgtacccgaggatcgttacgctccaggcc

SEQ ID NO: 372247 - DNA, 689 bp, Cannabis indica
aatagtactcgcattattcaactatgttcactcttgtacttatacttagatatttttcatacaaaaaaaaatcctaagtatagggggatatatatatgtactattgattatataaaggaaattgattcatgattgttaaattttatcaaacttgaaaatatttctactggttacaccgagctgtaattaaagtcgcaaatatatatatattgaaaacgctagtacccgtgtactgcgaaaatgttaaaaggataattatccccgcgaggatataaatctgtccaaaatagaaggaaatttgtctaagtacaaagcgcgagtacccctgtaaagcatatataaaaaaaacagagaagtaaaagtaaaaagcataacatagaggaaaatcaagcatctggaacaacaggagcagtctcatccgcaactttgctgatgacctcgttctcgacttcttcagcatccccaccctcgacctcttcaggaaggtcccctccaccaccttaggtctgagaaggcaacatagcacgaaaagcctcggccatctcagcggcttctgctccgaggagagagaagtcgaagtctggaactttggaaagagtggtgtaaatgtaatcagacactgcctgatcatattgtttcttcccattctctttctcagcctccaaatcacgagtcatctcctcgatctt

SEQ ID NO: 372248 - DNA, 598 bp, Cannabis indica
ttaatacaattgtatttgcttgcatttttattcacaatgtaaacgactatattttgatcaaatatacaacacttttgggtttctccattgctcgtaatcttttagtttaaatagttattaatctaccaaactttataatttttgagtggttgtcagttctgccttgtaattgtagttataatctgccttaagcaaacttaaatatactttaaagattttatcacttcgtatatttttaattcgctcgtatggatagttatattatctatccattttctaggtttaagtacttttatcaaggcgtcctgatgcctcgtttagtactttcctagctcgcgagaaccgttagtattcaattttatacgcgagttataacttttgattttcctctcccgtcagataggttataaataaaaaattatagttgtttgatcccttcttcgtcaaaaaggtttgatcaaggtgttataacgattcgacccctttctcgtcaaaaaggtttggtcagggagttataacagttcgactccactttcgtcaaagaggtttagtcgagaacctttgaatttcaaaaaattttgaaatggcaggttcgcat

SEQ ID NO: 372249 - DNA, 1247 bp, Cannabis indica
gtatgtgttgttttattatttttatgtcatttttagttgcttttaagtagttttcacaatattttttatggtgtatatttttagtttagtcctgataattttttttgttgtatgtgtgttactttttagacgtaaatacatacatttagtttattttttgacactatttttttttttataaatacaatgataatttttttaaaaaaaaaattgatacaatgtacaataatagatattgacatattaattatatattactcattatattatatactctattttaaaatcataagattttatttatttctattattaatgtaactatttattaaacttttaaaatataaattgtcattttaattgtcactaactcgaaaaggaagagagagatgaaaaatattgaaagtaagttgtaaacaacgaatttcatgaagaaaaaaaaaactaatgtaagtaatacaaaaaagataaaatcaaattgtcaatattaagtaaaaaaaatattataatacaaaaacatggtgaggggtttgatgttgttttgtataatacaattaggtctaaatgttttatatttttctgttgttttgtagttgtctttttgttgtttatagttgtttgtaaagttcttcttaaatttgttttttttttttttttttttttaactgtaaactattaacatttttgtaattttaaagttttaatacattatttttgaaaacttggtataataaaaatgtaaaaaaaaaaatatgacagtaaaaatataaaaattgtaaataaacatgggtatttttgtaagatctatttgtttacaataccctatgaaatttggtgggacattatagatcacactaaaactaacttttcatttattcattattttttttctttatatataacagaataattagtaattttgccccataaacttttgacaatactgattttgccctgtaaaatatacgacttattaagaattcccctgaacttttacatttacagaaatttagtcattccgttagattctctcccattattctatttaaaatgatgacatatctttgtaaaattagtaactttgtctcctaaactttgacactatcaaattgtactcactcaaaataaaaataagaaatatttcaatattttttttagtaaatcttaaaaaaataaatttagatcttaagaaaaaatcattttgaatgattaagaaaattaaaaaataaattaaaattttaaaacta

SEQ ID NO: 372250 - DNA, 446 bp, Cannabis indica
caggacgtggctcatctttctttgaaggaaacaatccaggatgctcaatggggggacccggacgaggttaaggaggccatcacagtcattactgctaaagaggctctgaaggtagtgaaggctgacgagaatggctggcggattggaggagacaattaccaaaaggcctaagcgaggttgaagaactcactatccgcttcaaggaggtagtgcgtaatgagggtgctcaaggagcgagcacctctggtagcagtgagacacccttccatataattagtgttgggaatattttatcaggatctagatttactaacaagtatgttgaattaacatcctaaatatgaattctctaaaacaatgaaaataaaaacataagggtttaagagaaccttacattggttgcagcggaatataatgactccttccgttcaagatctctagccctt

SEQ ID NO: 372251 - DNA, 810 bp, Cannabis indica
gaaaataaggctaaacatgtctaattattactcaaaaataattttttatatattttttaaacaattttaattatgatgcaaaaaatgtattatagttctccagactaccattaattactaacggtggaagaataattgcctaaaaattaaaattaagagatcaacttaacgaaaaaaaaaaaaataagagaccaacttatcataaacatacagtgaagggatgtgccatatataaataatcttattattatcatatcacattacatacctagctttataccatgcaatccgtaacaacgcgtataaatttagagaaatgttagtaaatagccttatttttctctctagtaaaagttaatgtctccttatttttagaataataaagcaaatattcttttttattttttgctaccttaaatacccttgactatacataaggtgttatcatattgtggtacatcagtttatttttcaattatagttggagtatgttatatactgtaatggatgtgtatatatattctattgaatgaatttggttgttcactttttatcaacaagtgttgatatacaaaaactaaaaaactagttattgtatatatatgaatatgaattatatatttcatactaacttagagagagaaaagttatgatatatcaattattgtactaagataaaaaaaaattgatggaatattaatttttagtttgtggtatatacattttaattatagtatatacattttgtgtacaaaaatttaacattcagcaaaataaaataataaatttagattgtataaaaatataccc

SEQ ID NO: 372252 - DNA, 561 bp, Cannabis indica
aatctttcttatttttattttaaaggaatatgatttgatagttgtcaaagtttagaagttaaaattactaatttacaaagatatgttagtatttaaacagaataatgagatgaaacctaatagaatgagtaaattaatctaaatgtacaaatttagaaaatatttttaacaagctatttatttaagagcatctccaatggtaaaactttaaaaaatgtttggtgaggtagatatattatatagcaaaatattgagatgctatactattggagagaaaaaaaatattattctagaaatttgcatgaatgctattttgtggcattaatgctattaatttctttttaataaaaaattaaagctaaaaagttattgtagctaaaaattaagataaatattaaataataatatgtgagattataattataatatttttaaagaatgttatatattggaatatttttagaaataaaaacacaaaaaataatgtaaaaataaaataaaataaaatatcatattttttggtaagtacatttggtacctcgtgtttgtcaaagttaacta

SEQ ID NO: 372253 - DNA, 710 bp, Cannabis indica
ttttttttaatatttttaatggcgactaaagtcgtcagttatgggctgttcactgacgatgtggcagtccatcattgacaactttatcgccagtgttttttttttttgagggaaaattcccgcctgttccaacgaatctttttaaaaaaaataaaaaaattcctgacgacatgttcttatttttaaaatttgattatttaacctaattttaaaaatttgattattttatcttatttttaaattcaaggtcagatattttaaattttaaattatttaattattttttaataaaatgaccttatttgaaatttaaaataagattattttaatcaagaaattttaaattgtaacaagatattttgctaactttcaaatttggttattttatttaaattaaattataaaattagataaatgatatttatttatcattttattttattgaataattattttattttaataacatgaaatttgaaaagtttttagtatttttttttgtatagatatttaggtttgttaaaaacctaatttttcaaatttataggtttaattttaaaattaattatttaatttaatttgaatattttcgaaataatattttattatttaaaattttcaaaattaattaaattatttaattaatttaaattaaataaatcctatattttattatttgcatgtgtgtgttttatattatttattattaa

SEQ ID NO: 372254 - DNA, 584 bp, Cannabis indica
agcaaaatcggaattttttggatattactttgtggaaggcatgggcaccacttatactcggtttcaacagatccctatatattaccgtccacccctcacactggctcttagggacagagctcaggggattgttcaactgctggatgatgcctgaaatatcaccttgttgatctcagaggccaacgttgtggagtacgggctttatccaacagatttcgtacctcagccttgaacgaaaagaagaggaagtccagtgccggctgggctgagggagctgagcaagagaaggaagtcattcaactcaagcgtgaggttaagttaaagggaggggccagagccaagcagtatgctcaggagcattctaagcaggagaatgagctcattcaacttaagcgtgaggctaagttgaagggaggagccaaggctgaacaacatgctcaagaatattctgagcaggaggatgaggctgaggaagagcaggaaagaccgctcaaaaggaagaagaaacttctaaccgggcagaggcccatcgaacatacaatccagatcagggagcccagtctacctactcggccatccacccc

SEQ ID NO: 372255 - DNA, 571 bp, Cannabis indica
cacttaacactcaaaaatggacggaaagggctaagtgctaacagaacttgagtttagggagttttactgcaaaaagtttagaattgggggttagttacaaaaatccccctcctttagggggttttgccgcaaataacagatgcttttatcatccaatttgatttaataaaattctatttttattagaaaaaaaaaataatgggaaatttgaatttccatacttacaataccttataattttttccttaaatgcatgattattaaaattggtcatatatgaccattttactaatttctcaaaactacccctcacatttcaaatcctaatctcagcttctctcttcctctctctcggtgagcctcctcaacccacaaaaacccgaagttgtgctcatggtgacggtgcacggcgcaggcaacttcaacccaacccatcgacgacgagcccacccatggtgacccagccaatcgacgatgagcccacccacgccgaaccgaaaccatgttcttcattttttattttttttgttttttaaaaaaggttagatttattgtgtttgtgattttgttt

SEQ ID NO: 372256 - DNA, 459 bp, Cannabis indica
tcctaaagaaagaggatcaacctagttcatcctctacacctaaaccagccacaaaaactacaatccctcaaggaaaaatagtccttatttcatctcattctagtgagaaagtgtttcaaatgtcaggggcaatgacacatagctagccaatgtccaaataagagagttatggtgatttgtgaaaatggcgaggtagatttggaagatgaagaagagtttgttgatatgccaccattggaagatgcttctataaaagatgaagagtatgggctagaataaggtgacatgcctgtactaataaccgggcaggcattaaattcgcaagcaaaagaagaggaagaaaggtacaacgtgagaacatttttcatactcgttgttaggtaaaagataaggtatgtagtgtttgttggaaattattttaccaggatcttagatctctcacaagtatgttgattaaca

SEQ ID NO: 372257 - DNA, 795 bp, Cannabis indica
tcttgcattggaatggtacttttttttatttaaaatggaataatattaccaccaaaatgattagaagatcattctatcagaatggtattctgatagttttaaatgacaaccaaataaagaaatgaaatgaaaattgtttcctttctattccatccgtttcaccaaccaaacgccacctaacatttaggctccaaaccatgccaagtttctggctttcatcgccatttccatgatcataacaaccgttatggcttctaaaggcaatgaaggttatcacaataacaagaaaggatatggaccaggaaactagtcgcaagagttaccaaaaagagttgcctcacttcctattagatatttacatattttgtttatacatagtatatatattttttttttgcatgtactgtattctgtgatcgtgatataatcatatttataaagctccttgtatattatatatatgaaatagaatacatagatactgggggaaaataaatcatattaataccataaaataatgtcaaataatttccatctagaccctaattaagggtttagctactcatgtttatgaaagcaaaatcacacatattaattaagaaaagagaaaaaaatagagaagaaaagaatgttgaaaaaccctctgaagaatgcctccagtattgcagttgatctctgaaattcgtatatgtattctctgtttatttctttctgaattgcttgactcaaatcaactccagttcaccctttatataggctttcagggactaaaaagatataaaaacgcacatgtta

SEQ ID NO: 372258 - DNA, 560 bp, Cannabis indica
aatttactttacagagcatgagtttatatttttcgactattggtaatactttcggaggtgatcagcgttctaggccttaggcaccatggttccgtccattattttgagcttgtaagtcccagagccgatttcgtcctcaatttcatgtgctccttcccaattaggcccaagtacccccactccgtgttcatgagtggctgggaagacccgtcttaggaccagatcaccaatagtaaattttctatttttaaccttcgagttaaagtgtttagccaccttattttgataagctgccattcgtattctagactcatctcggagtttttcaatctgatccaacgcttcttgtaataaagacttgtttgttgttggatcataagtcgttctcctttgggatgggagtagcgtttctaccgggaccattgcctcacagccgtatgccattgaaaatggcgagtggccggttgtggttcttggggttgtttggttggcccataacactcttggcaattcttcagccaattatttttgcaggccaacaactttttctttagggtgac

SEQ ID NO: 372259 - DNA, 527 bp, Cannabis indica
gcaacacgtggcaatttggctaagtgtttagggagggagcaacacttggtcatttggctaagtgttgggagagggagcaacacttggtactaagtattgggagagggagcaacacttggtattttagctaagtgttgggagaggaagcaacacttggtaatttggttaggcgttgggagaggtagaaacacttggtattttggctaagtgttgggaaagtgaaggagcaaaagagcatgacgagagctctgttgtcgagtgaatttcgcaacaccaaattatattgtattattaataacaagaagaattttatgtgtaaagacaagtgcgagtattcaatctagaatggcgagtactcgaccggggatgggaaacaatcaacgaaggctggaaaataacaataagacggaaaattatagtggttcagtcagattatgatctgcttagtccactgtagcaagggattcgtaggtgccatttcatggtggatcacccctttatatacaaagcaggtgtccaatcggtta

SEQ ID NO: 372260 - DNA, 794 bp, Cannabis indica
cctataactgagtataggcgacggtttataaccgtggttatactataggcgacggtttataaccgtggctatactataggcgacggtttataaccgtggctatactataggcgacggtttgaaaccaaaccgtaatatttatatatatacacataaattatcattgttgtaattaaatatatttttacattttagttacaatacttgttgtaactaatactaaattagtaacaacttgtattcaaatattatgttttagtcacaaataatattttattgtaactaaaagtcacatttaagaaatcatcaaaaaaaaaggtcacatttagtcataaaaaattttatattgtgattaaaaaattgtcacgtagatttttggttttttatagtgatatactaggttgatgttacgtgcaatgcaaatataattagttttttttttaattaggttcaattaggtgatttaagtgtaatacacgtatgtttattttttttaattaggcaatgtatgtttttaatttactatatctatattcttaatcaaaactcaaataatcaaatttgagtgtgtatataatggctggattcgtaaatttgatataaaggttttttattcccaaattttacaaaaaatatgatgtgtgaataggtttaccataattaaaagcaatcaatttcttattacaaccattttaatttaagatataaaataaataataataaagttaaaaatatagttaaaaatatttataatattttaaatttaaatatctttatataccatatttacataa

SEQ ID NO: 372261 - DNA, 1308 bp, Cannabis indica
actacccaaatggcgtcatgctactttgtagttttaggtaacccaatcacaaaatccatagaaatctcttcccacttccattcagggaattttagtggctgtagtaattctgctggtctttgatgctctactttaacttgttgacaggttaaacatttggccacaaattcaactacattctttttcataccaggccaccaatacaatattttcaggtcatgatacattttagtggtcctgggatgaactaaataaggtgtagtatgagcttctaccaatatccccttcttgagctcatcattatcgggcacataaattcgtcccttgaaccgaattaatcccgtgtctgatatttcataatctttggcgttactattcaaaatttcttgctttagttcactgagcttttgatctgtcgtctgcccctccttaattctttctaacaaagtggattgaagtgtgacctttgcaagttgccctgtaataaactctataccagctcgttccatgtcttccactaattcccttgatactccttgtaaagtggaaactagtccgggacctctacggctgagtgcatccgctaccacattggctttaccgggatggtacattatctcgcagtcgtagtctttgactaactccaaccatctcctctgcctcatgtttaactccctctgggtgaaaaagtactttaaactcttatgatcggtgtagatttcacatttcactccatagagataatgacgccaaatttttagtgcaaaaaccactgcggctaacttaggtcatgtgtcgggtatctctgttcgtattcttttaattgccttgaagcgtaagcaattaccttcccttcttgcattagaacacaacccaacccttgtttagatgcatcacaatataccgcaaattgtccctcttctgttggtaaactgaggattggtgctgaaataagtctattcttcaactcttggaagctttgctcacacttgtctgaccaggaaaattttagattcttcctagttaattctgttaagggtgtggctatctttgagaacccctcaacaaccttctgtaaaagctgactaaacttaaaagttgctaacctctgaggcagtctttggtctaggccattctttcactggagcaaccttggcagggtctactttattcccccgtagtgacaatgtggcccaaaaatgcaacctcgaacaccagaactcacattttttgtacttgacatacaactgacgttcctcaatcgtgcaggttagcgtaggtgtcctcatgttcctcctctgtcttaga

SEQ ID NO: 372262 - DNA, 722 bp, Cannabis indica
cacacccggagcctgatctggacctagactgaaatcttaacccgaatcgaaattcggaccaagactcaaaccctgacccgaactcgaacccaaactcgaactcagaatcacaactagaactggaatagaagtaggacaaggacaaggaccaggacctaatctcgaacctaaacccagataaaaacccagttgagacccaaacctgaaccaagactaggactcaaacctgaacctagactaggacccaaacccagaccagaactggcacctggacccagaatcgcgatatcgacgtaagcaacaaaactaggactgcgacctagtaaccggccccaaactcagcttgaacctaggacctagctcgtcacccgacacccaaaatggaatcaaactaggacctagacacaaactcgaacccaaactcgaactcgaaatcacaactagaactggaataaaactaggacaaggacaaggaccaggacctaatctcgaacccgaaccaagataaaaacccagactggacccaaaccctaaccaagactaggactgaaacctgaacctagactaggacccaaacccaaaccagaattcggacaaggactcgaaccctggcctgaactcaaacccaaactcaaacttggaatcacaacatgaactggaatagaactaggataaggataaggacacggacctaatcccgaacccgaacccagataaaaacc

SEQ ID NO: 372263 - DNA, 660 bp, Cannabis indica
aataatttccaacaggtaaaccaataagtgtctatcccaaaacactacttaatattcacataagacaatataaggttttttacaaaatctcgtgatataaataccctaaaattaaacttatattttggctctaaaacataaaccatattgtagagctcattgcaagcttaaaagaggtatatcaaacgtctaaaacggacacccgagtaaaaagttatggccaaaatacgattgttaatcctattgacaataacagaaacggttagcaattttgtcgtagggacaaaaaaccaattttctgttgggttttatgccctaaataaaactcatttcaatataatcagttttacttattaatatagatcagaaataacatttaatgttgcatggttcacatgatttatttcatgattatatgtacataatgtataaattcatctgaaacccttttcacatacttgatcctgtttattgtgttgtcaacacatttggaaagtaaacatgactatgtgaataaagtttcctagatttatcagacatagggttttactgatatgataatctacaacagagtttacttgcatttggagaagtgctatgttctttccagagcattggttaaagtaaagctcaagttggatgcatggagtatgcatcgga

SEQ ID NO: 372264 - DNA, 525 bp, Cannabis indica
aaaacaaaaattttactttcattttgtgattaaaaaattaaaaaacaaaagtgttaccaaacggcacctaaatagtttctctaaaatttttatgtagaattctgtaaatatatatataaaaaaactaatttaaagtgtaaaaataaaaatacttttattttttattgtatccattaccatttccctaaactaaaatttagaagtattgtgtaacaagatttatgagtggtgaattttaataagtgaaccaccacaagtacgtgaattttactatgttaaatgaaaattaataacatagtaatcaaaaaggacggtggttggtgaagatattttagccttgtgtttcttatagtaataataagcttctgccacttatttattttgtcctacagttttagttgtaagaatagatagaagttttcgtctttaattaataaatgacttctgttttcaatattaatctttcgaaaggagtaaatgagtatttttatgcttcaaaaaaaaaaacaaaaaaaataaaaataa

SEQ ID NO: 372265 - DNA, 557 bp, Cannabis indica
ccgactgttggtatgttcaaggccccgttacccgaatcgcgtgtcaagatctagacaataactacgggttttgtccaagcactgggtcaagattcgggtcccaatctcagctacttgtctcgttctgtttctgctgccgggtcacgagctgggttctaggataaagttcgggtctgggtcgggtactaggtcgcggtcctagttctgtttcaaagctccctatactgattcttggtccaggtccgggttattgtgtgggtttgggtcttggtctacgttcgtgttcgagtcctagtctctgttcgggtttaggtctctgtctgggttttgatatgggttcgggtttttgtttacgtcttggtactggtcctggttctagttcggttatagttccatttgcgattctgtgttcgagtttgggtttgagttcgggtcggagttcgagtcctgttctgagtttgggttcgggtccagatttaagtctagttccaaattaggcaccgggtgtgggtcgtgtcctgggtcttgttctaggttgggtccgagtcccaagttcc

SEQ ID NO: 372266 - DNA, 812 bp, Cannabis indica
aacagtgctggtccttcgtgatgaacattaagttccttcaagatagaaatcagccaaacaacttcacatgtcgtattcgccattgctctgtactctgcctctgctcaagatctcaaaactgtatgttgtttcttgcttctccaggatatgatatagtctcctatgaaaatgcagaatcccgttgtcgaccttcttgtgtcaggacaagctgcccagtctgaatccgtgtaggctctcaactgaacttcagatgatgcaggaaagtaaattccctgtccaggtgtggcttttatgtactgtaggactctaacagctgcattcatgtgactaacttgtgggggacagcaaggaactgactcagcttatttactgagtaagaaatgtctggtctcgttatggtcaagtactgcaactttccaactattcttctgtatagtgtcagatctgccaacttttctttatcattttgtccaagcttgagatttgcttccataggtgtgttcataggcttgcatccaaggtgtccccagtcttcaaggagctgtaaaccatatggcctttgtgatacgaaaatgcccttttgtgatctagctatttcaagccccaagaagtcttaagatttcccaaatcttttagcttgaatcgggcatttaatctgacttttaaggcttccaattcttgtagatcattgctgacaagtattacatcatcaacatagaccaacaagaatatgaaatgactccaaaatgcttaatgaacaatgaatggtcggtagccgagtgattaaatccctcatcaaacaatgcagtgga

SEQ ID NO: 372267 - DNA, 541 bp, Cannabis indica
atatatacagcactggtattttcacatgcagaatgacaagtaagaatagatgtgagagtataacaattatcaacagatctaacccttgtaaaatgcattatttattactgttaagaacaaagcaatgatcacaaatctgactaatgctaattaaattagcttttagtccctcaacaagcataatatttttcaaccttggtaacccatcaaaattgagagttctcacaccaatgacatttcgtgttaaaccattgccagaagtgacctcaccacattgcattggtctgatatcttatcctttttgaacttactggagactttgcttctacagaagacatttttgtagcagaagatcttaaatttgcagcagtaggcaagttcgctggaacactagattttacaaattttgtttttccaaaactttcagtatcatttgatccaagaccagcaaagcttctttgacctgcattatgaactttctcaaaaataaaagattcagggttaagcatttgaatatttttcttgaaattttcaagttcct

SEQ ID NO: 372268 - DNA, 995 bp, Cannabis indica
aaaaatattatttttattattatagtatttattgatatataagatatttactcagacaaaaaattatttaatattaatatttatcaaatctaatatattatttataggggtatcatacatcaatctttattatagcctattgttagcacttaataaatgattcattaagacatagaatctttcatttttttttagtgaaataatcaactttatttaactatatattaaattgtgtaaccaaagaaagaagcaactcaattgaaatattccccaaactaaaaatacaatccgtatataaaataaaaaaaatctaacaagactatgagctaccataatcgctaatcatgtaacaaaaacatttgtcaaatcatgtaacaaaaacttacaatcacggataacgattccaaacaaagaaattatatttgcaagactgcttattgtttgtaacacccttagacaattaatttttaaaaaacctgctcttcagccaactcaaggcttctccaactattatatacaatattgcataatattatatttatataagtaaatactattttggatcatgtgttttttaaaagttacagattagaccatctgttaaatgactaaatgtaccctgattttctaaaatagtaaaaattggatcctgagcttaatttttgataaattttttttaaggtaaccaacttgaagataattcctgacgcgaacagatacagaaaatgtaaacagttttgttataacacatttagattgaattattattaaattttgacaaaaaatcagttcaggatcttatttgtactattttagaaaatacaaggtctattttgttatttaacaaaactaattggtaacttttacaaaacacaaggtccaaaatagtatttacctatttatattagtattgtgtcagtataatattaaaaataaatattaacaatttatttatatttatatgtaatttaattattattaattatttttttaat

SEQ ID NO: 372269 - DNA, 913 bp, Cannabis indica
gatagtataaaaataatttgaagttataataaagaaataaacaattagcactaaaaaattaaatagtgtttactcgatattccaaggaataaagaatatttggttgttgttattcatcgatgataaccaagtagccaatcatcttgccacattgtcaaaagactgacttttctcttcatcgttaattaaataatttgttacataaatagtcattaaattattaccttcccaacatttgagtaatttgttcgggaacttggtgatcacgtatagtgtttaccagatattccaaggaataaagaatatttggtggttgttattcatcgatgataaccaagtagtcaatcgttttgccgcattgtcaaaagactgacttttctcttcatcgtgtaccattcactgggagaagctctaggtcgtaaaacttgaaattttttctcaaatcgttgatgctctcccaaatgtgcctgcattaaattgttaagtattagtgtcttataataatttgactagaatttgatatataaggttaattagattaaagaagagtatacatcattccaaacaatatttcctggttgccgatgaagtcacacaatgcaacctggtacaaatcctctccacataacgtgatctgggtacgcggtgctatgaatcctcagggcaccgaaattgtgattatatcacgtttatatttgattcttagaaattcctcaaccatccattttagcaacttagggattaaagccatgacctttggggagaataattcatcttcttcatcatgaccgcctcgtggagaaggcatgggagctttcccccttcgatacatcctgtctagatggtagttgagcgagtggaccctatacaaaacacaccataatatattaaatttgatcctaattctatcgaa

SEQ ID NO: 372270 - DNA, 871 bp, Cannabis indica
gctaaatgcattccatctcaaagatttaaggagtgtatggggaattgtgacatgactgacttgaagttttcacgctcttttcacatggaataataaacaaaaaccagaggattaggattttctctaaaaattgacagagccatggtgaactcacatttagtgtatgtctttctcggattctgaagcagtttttttaccaaaattgtctttcgatcacaaccccttattggtatctatataccaaagtaggagttcaggaaagaaaccgtttagatattataacatgtggaagatggctccaaactttgatacacaggtgagtacaagctggaatgaagaggctcattgcttgcacatgtacagaataatcactaaactcagaagattaaagttagtattgtaaaagatcaatagagaaggtttttctgagattcacaaggctgatatggttgcaaaagctgatttaataacagcccgagaagaattgagaaagaatccacattgttcaaccttgatggaaattgaacaggaagcaagcaagaagtatactgaagtccataaagcctattccatgttcttatctcaaaaagcaaaaatcagctgggctacttttggagatgaaaattctgcctattttcatgcttctctgaaatctaggaggatccacaaccagattttcttgatagaggatgagcatgggacttggcatgattctccagaaggcgttcaagaagctttctttggatactatgaagcattattgggtaccagtatgcagatagagaaggtgtaagtcagtgtgaacttgggccaaggattacagaggcacacaaagtcaatttttttggctgagtaaacagaggaagaggtg

SEQ ID NO: 372271 - DNA, 744 bp, Cannabis indica
aatctgttaattgggcaggttgaaaataggtccaacccgcccaattaaatcgaataacccgaccaactcgactttagattttttttttactttttagtttttattatatataacataaatgattaaatatataataatataaaattatatacttaattgttagtttcaaagtcatatatattgtgttgtgctttggtggaatttgatatttttaatttattttttaaaatttttattgactttgactttgaaacaaaaaaaaaattggccggtttgggcgggttaactcgaccaaatcgcgcaaatcgttggtcggtttacagattttttttttaaattgggtaggttgcacttaaattttagcaacccgaagtttagattgggttagaaaatatataggataaactgcccaaaccgaccgatgtacaaccctaccaggtgctctaggtgctcaaaaatgaacttgctccgaatctggtttcaatgcttcaaacatgttcgtggtatgcctatttgatgtcccaatgaaaagtttgacccattttcactaagacggtcccagaaattgaaaccctagttgaggatgtcaacgtgggtgctaggtgcccaagttgaatcgcaaaccggctagccgggttttggcagggttccccgaacctttcattttctcaatttttgccttttcgatgcctcggatgggtgtttccctatttccagagttagaataacccattaggagtatag

SEQ ID NO: 372272 - DNA, 616 bp, Cannabis indica
atctcaagttgccattaaagctcaaagctttgaactcaaagttcaaagttgcataaaaccaacaacacccattaaaaccagctactaggagtggaaatcaacttaaaagaaccctaaaattcgaaccctaagcatatgaaaacttaacagccactaaacctagaaatctcacattcaatcacccatgaatttcaagaaataaagagggatatgactagagcttaccttagcttcaaagaccccttgaattgcttgctaaaactcaaaaatcaatagccctttccccttgttcttgctggcttcgaagagagagagagaaaaagagagcttttccttctaattttggtattttctaattcccctttcctaactaagtaaattaattacttacccttggctgaaaaaagggttgcaaggtgtcaccaagctagggtagccacctatcccaccattaaatcaaatgactataatgcccttacacataaaactaggatattccaaaagctaggggtaaaatggtcaaattccatccccgctcaatcccgatattttatttcctcaaaaatattctccactaagaaataaggttctaaacttacccatgtgatcaatctag

SEQ ID NO: 372273 - DNA, 539 bp, Cannabis indica
atacattgttatacctgaaaaaaaaaatttaccagaattgtaagcattaacaaaggtaagggcaaatttaataataataataattgctataaaatatttcaattttcgaaatttttttgatcattaattttagattatgtagtaattataatataaggtgtgtacttttataatatgactgtttatataaaattaaaactttatacatactgtaataatatttatttataatatatttatataaaaaataaaatcatataaataattaaaaaatataaatttttaatttaaattattatttttttaaaaaattaattaaaaatatttttatacaagtatttattttccaaaaataatttcagttacaaattttgctattaaaatttttatactaatagttaactataataaaattaaatatttaaatatttttgtgaccaatttgtttacataaatagctctaccatacttagttttttaaaaaattaattttctttattattttttttttcaagaaagataatttttattaatcaaac

SEQ ID NO: 372274 - DNA, 506 bp, Cannabis indica
ttcttcttcattttgttatttcacagcgaccttaatattagagaactcataaaaaaataataataatgaaatttgtttctcctagtgtagcttaattatttataatatatattgattgattatagaagttttgtaaacccaaatccacatgcaaaaaatatcaaaacaacattatgcttacgaaccagataaaaagaaaaacttacagataagagataacaaacaaaagcctccaatgaaagagatcgaatcaaatcactcaatctcctctctcactttgttaaccctatttaaatttaatttttttaagtaaaataagattaaagattcaatgtgatgaggcacacaaaaaatagtggacatacatattacaaccaattaccctttaatatttagggtgtctactgataggcctaattttagggtgtctattgtagaattaccatatctcatatatcaaaacgtaagatcttgaatttttttttattattattggaaaattctac

SEQ ID NO: 372275 - DNA, 801 bp, Cannabis indica
acttgttcgggacccttcctgcttagagcattggccaccacattggccttccccaggatggtaaaggatctcacagtcataatccttaaccaactctagccaacgtctctgcctcatattcaaatctttttttagaaagaaatatttgaggcttttatggtcagtataaatttcacatctctccccgtagagataatgccgccaaatctttaaagcaaacactattgcagcaagttctaagtcatgagtcggctaccgctattcatattctttcaactgacgggaagcataggcaataacccgatcgtcttgcatcagtacacacctcagaccctgtttggatgcatcacaatacaccacgaacttctctttgtcagaaggtagggctaacaatggagctgtgattaatctctattttagctccagaaagcttgttttgcacttatctatccatacaaaacgctgattctttttagtgagcacagttaagggtgttgaaattttagagaacccttctacgaaccaacaataatatccagccagacctaagaagcttctaacttttgtcgctattttcaaactcggccaatccctgacggattctatctttcctggatccaccttgaacccgtctttgctaacaatgtgcccaaggaaggacacctgagatagccaaaattcgcacttcttgaatttggcatataacttatgttctcgaagccgttgtagaaccatccagagatgttgctcatgctcctcttctgattgagagtacacaaggatgtcgtcgataaacacaat

SEQ ID NO: 372276 - DNA, 854 bp, Cannabis indica
ccaaacccgccaacggcggtttggccaaccaatttttcaaaaaaaaatattattttgtatactaaattcatgttatgcacccctttcacttaattttttgtgttttatttagctattttacttaaaataaactagaattcttattttaagtattagaatcaatgtttataatgtatttgttaattctaccacaatgaaaattgcaatactaatttccttttatatctcttctaaaatttaaataaaatttatagtagcaaatttatacaaatattgtgttttggtatattggtaaagacttattaatttatctttttggtcacaagttcaaatcccaatagacccttttttgtagtttttttatagcttactatatctatccttagcattcaacaatatctatcctatgtattacatcaatattattctaaaattactctaagtatttaaggattatctaaatatatataaaaaaacattcttataaaggtaggttaaagaaagcataccttataccagaaattatgtacttgtcttccgataaaatcctaacaaccaagtttaagagaaattaaaatcaaatattatcttaattctactgaaattttgacagcataacggctataattgaatgtttccaaaaaattcaaacatattaataacaacaaaacacaattcaaaccaatataaaataatcacaacaacatttagcaatataaaaatttactacccatttgactgcagtacatgtattcacagaacctacttcactacggatgaatatttaagatattcaaactcgtctaacatgcatattattccacccatcgatccggcgcagtacaatatattac

SEQ ID NO: 372277 - DNA, 516 bp, Cannabis indica
aggcccaaatcatgacctaggacacaccttgagacttgggatccgggactcgatgcttggacctgacccgtagtcagtgtttggatctgggaattagaacagaacccgaacacaaactcgaactcaaaccaagacccggacacatacccagaccccgacccacactcgggaaccaaaactgaaacttggtctggaaccggactgcgatctttgaaagggaccggggcttcgacccagatcagaaccgaaaaccgtacccaacctctgaccctaaccgagaccgaaatacggacctaaacctgcccccgaacccaaatcaagactcgaacccagactcagacccaaactcgacccaaacttgtaccctgtgacttgaaactggaactgaaaccagaagcaggacccaaacccagaccctgaccaaaattcgggacccgaaactagaaactgaaaaagaactgaaagaccaggacccgaacccaaacctagaacaaaactcagacctagccccagacc

SEQ ID NO: 372278 - DNA, 534 bp, Cannabis indica
ggtttttgtttttctcatttttgccataacttttgattccaaactccgttttggacgttcttcataccattggaaagctcgttttgagctctatgtgttaatttatcattggatttcaaattattcatatgtggaaaaataaatttgggattaaccttatttgtgaattctcgagaatgtgtgagtaggattaccgatgctttcttaggaacaaccggggacttggaatctccacatacttggattattaggtaagacaaaaaactatcacatagagattagcatagtggcgctcatgtatgttattttgtatatgctatgcgagaaactgagattagggttattccctaaaaattcagctatatgggatatagggctatactctgaaattaagtgatatgaatgaaatatgtgttgtatatattgatataaagaattatgtgctcaatgcataattaggttagactcggtaatcagaaccgagataaaccattctaatgccttattgtaagtagacttgtgagcgtaacacgt

SEQ ID NO: 372279 - DNA, 680 bp, Cannabis indica
cacggagagaggggggctatgggggccggtgcgccgtgcgccgtcaccgtcggttgaggcttcggggttgaggcttggcgacggagagagggggctgggtgggttaagccttcgggtccgagagagacgaagagagagagggggctgggtgggttgaggcttcgggtccgacaaagggggctgggtggtccttgtcgtcgttgttggaggtggtgcaggaggtagtggaggtgttttggccgagagagagacaattgctttggttcaaatgtgaggggtattataggaataaagcaaaagtagtcatatattacctatggtataatatttagatttagggatataattttaagattttttaagcatagaaaatcaaatttccctagttatttaagacatcctgcaaaattttaagaaatttggaaaagtttaacgtgccgaaaattatgttcaaacagtgtgttgcacgcgtgactattttattttatacgcgtgtaaaatagactgtttgaatgttgttttctatattgtaaatcattctgaatttttcaaaattttgtaggatatcttaaatagctataacgtacatgaatatgaaaaaaaattagactaaattttttttctagatgccgaaacaagttaagggtgcaccagtacatccctttaagggggtgcattgt

SEQ ID NO: 372280 - DNA, 679 bp, Cannabis indica
agtgagtttgacaagctgccattgcttagtttaattaggaaaaacaaaattatattaataaaactaagaaataaggaaagaggtgtgagtagggaactttgaagctccattctctctctctttttcgtgcaacccaaagaccagcaaggagagggattttgttggtggaattatagtgttttaaccagaataagaagattcaattttaaggaattgaatcctagcttcttccctttgattttattaagcataacttacgttttgaagcttgattttaggaagtttggtactgtggttatagttgttgtttgaatagaagttctgaaggttaattgagtttaattgagttgttttatgctatttttattaattgtagtgaggtattggcaaactcaaaccttgacctctaatggtgtttttgaaattgatgtgaattgttgaattctgttggttgggatttgtttggtatagtgtacgcaggtactctggaaagttgtggaaagtttgggattgaattgaggtgaggggatcggttttgaggttcccagctatgaaccggtcgaccggttctgggaagcctctagcaactggtcgaccggttggtacccaagaactggggttccggtcgggaaccggtctgctggttggggctttttcccgagccctagtttttcccatt

SEQ ID NO: 372281 - DNA, 724 bp, Cannabis indica
aaggaattaaaaagttttgcaaagctttaagagcaattcaaagcttatttatttttcttttaattttgaaaacctactaattagttgtactataacctatactatccactcacaacctataaaccacaaagagattgtttttttttttttaaaaaaaataataataataaagaaaaagttacaaaaacaaataatgaaaaggaattgtagaactcaaatcaaaagaaaaaaattaatggtacaactaatctattaaaaaaaaaattattatcgtaatataattaaaataactacaaaataataatgatatattatttttttatttatctaaatataatagagacataacattaataagaattattgaaaagaaagagcatacctctaatttttcttctagttctatagcagcgcttgcaagacttcagagtatgagtttgaaaattctaaattaatatgaggtataataaatttatattaaaaaaataatattttaataaggttctagatttgaaaaaaaaaaaaaaactaaattttagtacaaaaagaaaaaaagaaaactaattagttcagccaaaaaacagccaaaaaaaaaggaaaactaattgaaaaaaagaaaactttagtagttaatggaattagctccgttagttttagtggagtaaagtttaactaaaaataaattaaaataaatagtgtcatcatcatattggttagtacataa

SEQ ID NO: 372282 - DNA, 879 bp, Cannabis indica
ttttttattctgattttttaggactagacttgtaaatataactactactgcatttggtgttaagaatgtgcagaagattgttagtttttttaatcctttttttccttttgttttgtttgatttgttttagtgttgttttacagttgttttgccatgattatatattttacgttgatttcaatgcttttgctcaatctcgtcggaattaatggttgtttttcagctatcctggtgttgcagcggatcgtggttgttctgtatgtgggtgtggaagatggaggccccctatttttttttttgttgttgtttacagtataaaaagaagaaaaaaaaggaaggggggggggggggggagggcaggacagtataaatgtaatttctgccgtgtgatagtcactacaacaattatgattattagaggcggaccactccgctggtaataatcccattttccgccgctaaagagtaataccggcggggtccgccggtaataatccgctggtaatacctggtcgctaataactattattagtggcggactgacacacccgccgctaataatagtgtcagatcattaaactcacactattattagcagcggatcaatccgccggtaatacttttaaatataaatttataatttttttctttaaaataataaatataaatttaatattaaatatatttatgttttttaccattttacttatcaagaatactcaagagctaatattatataaaatatttatctttaaacatttatgtatactaacatttaaaaaattacatacaatataaaaaatgtatacattcaaacttttccataacagataaataataggagaatttgattttctataagaaagttatcttttcaaa

SEQ ID NO: 372283 - DNA, 874 bp, Cannabis indica
aaatccctacagcctataatcttgaatatatcaaaaggctctattggttctaaatcccaactcacgtctatatgacttgccctatcttccatagtgtcgtattgcttagctataccgtaatatgactcgtgacagtttatcaggacgtggaatctagggtaccagttgtcaaacttatgagcaattcggtctacgagaagggaatcccaaatataaaaattaaggtgggagtcttggaaggtgactaatgtgctacgttcaaccctaagtactgtggtagacctaccacattgattaccccaggatgctccttcaccaggttcctgagggacagtattttgaagaaactgtgctcgagccacgcgatcccaggccttatcctcatctggaaggtaatctactgccatgaagaatatttgggaaacttataatcataagtatactccttatcagcgagaaggcccgccgatctcaggttggcttcgttcaaaagatgtcacatgaccgaaggccataaggaagagtcattaggcgcctatgccgactgaccagtctcggggggtaaggatggggcctcgtcaagagagctaataaaaaaacaaacaaaagattggtcaaaaaatggagagacaaggaataatgtacctgagcaagaggaaaacaattacttacgaagtctgcaaatggtggttgtgccaattggggaaagactagaagtccagaagaaattgtctttgaaagacactttgttttgcaagtccacaatgattttaggctcgctagaatgagtaccaagatagtgaaagccccctgcggcattctacctcgcaggaacggccttaaccgaataaagatactcgatttctactggtgt

SEQ ID NO: 372284 - DNA, 538 bp, Cannabis indica
caaatatctacctattctttaggagaaattaagtggttattttctgtatatttaaatatgtgaaaaagagataatatctcctcattttaagggatattagcctattttgaactagatcttttgtaagctctaacctatataaagagcattaggccagatcaaaaacctaagttatatgttctaagctctcatctcgaaaccctagttctctctctactacacgccacctgcggtatacaagaaagtaagtctgtttctcacgtcacttatttgagatctgtcttacattgttctcactattatgacattcatagagagccacactagaaattacagggtaacatcctgtaatttgtgtggtattatctctcaaataaatacaactaagaggggagtaggtcattacccgctaatcaagaggatcaaacctctataaatagttgtgtctattttattactttttttatcatttacacgtggtgattcaatcataaataaggctctgctgcccgttgatcaaatctgaggtcaacaattt

SEQ ID NO: 372285 - DNA, 578 bp, Cannabis indica
aattagcatccacttctcaatacgatgatgacagaacgttctgatgagatccttgaacctctcccaagcctcatggagagattcatcatccagctgacagaaattattaatttctcctcgcagcttagcagactttgctagaggaaagaacttggacaagaactttgttgccaaatcggtccatgttgcaatagatttcagtggcaaggagatcaacaaacttttggctcgctccctcagtgagaatgggaatagtctcaagcggatggcatcatcactgattccattgactttgaaagtgtgacataactccatgaaattggacaagtgcagattggggtcttcagagggcagtccaccaaactggactgaagactgcaccatttgaagtatggcaggttttatttcgaagttattagcatccactgctagtggtctgatgcatgactggacccccgtaagagttgggagaatataatctatcaagttgcggccattttcttgatcatcaacggcacctccatgaatagcgttgttgcctccattattagcaacattagcgttttcagccatgattt

SEQ ID NO: 372286 - DNA, 1232 bp, Cannabis indica
gagaactatggttaaaacccttcatatggaacaaccaaaagttttctattacatggacaaaaaaggaaatttttgttagtaggtccattcaatagacttaacaagacttcctgttcctagtattaaaggtttgagattatctaaacctatagcttgtggtatgcctcgtaatttacttactctagtgcaagaaatttactttagtaagttgctagaatgtgtttatatgaccactcagtcactagccccgtacaagaagcccgcacccatgaaaaaagatgtcagcaagagagacatgaccaagttttgtcaatttcatggagactacggccacgacaccaatgaatgcaacaatctgaagcgggaaatcaaattcttgataaggaaaaataacccacacgtacagaagtatgtcaaggccgatcaaaattagatgggcgataacaagcaagacttgctaccaccaacaatagatggacatttgcaagtcattattgaagtcccgcacatagctggagattcaggcaaagcctgggagaggtatgcccgaacagtacaacacgagcaagaagaagtagtcctggtcgtagaagagaggaagccaaaaatcccataggcaggagagcccaccataacatacaatgatgaggacgactgtcaatataggtttccgacacaacgacccgttggtcgtggaagtccaaatatccaacaagattgtggccagaactatgatacataatggagcctcttcctacatcttaatcaagaccacatatgaaaagatgaggctccaactcaaagatctaacccctgtcttttgcccgtatatggtttctccggcaaaggagtcgcacctctaaggcaaattggcctacccatcactgttgggaaacctccgacgagcataactataatggcacaatttttggtattggacgttctatcagcctttaacgtcatgttaggccgaccagccttatatgacttaaaggctgttacgtcgatattccattcatgcctgaagtttctaacaaagaatggggtagggtgtccaagaggaaaccagcagattggtcgggaatgttttaaccttgtcgtggccaaagctaaaaaggaagtatcccctagccagagcacggacaagggaaaaaacatttctaagtagggaacttcccaaggcggggatgaagatgtgaatcctcgacttggggacccaagcagcaatgttg

SEQ ID NO: 372287 - DNA, 653 bp, Cannabis indica
acctcttgagcaggagcccagtcgttgatgaggaaaatgcgcttggtcataatcgaggtggtagcaaaaccgtcgaactagagaaaggaacgtgtatcaaagcgggctgtgctggaactatcagagctggaaatgcaaataatcgaacgacgatgaatgtgaaggaatgtcgagttgaccgaatagtcgagcagtgaggaacaacgagctaaatgaatgcgctcgtcgcagggtttggcctctgtcgttgttgtttacgatcgggcggtcggtatggcctggtcgcagaggcggtctcaggccttctttaagtttcgcggaaccttgatttgggcccgttcctgtcgttggtcgttcggtgttgggtggcaacggtacacgaagcaaacaactcaaaaagaaaaaaaaggacggaggtttcagaggtgttttagtactcgttatacgctctgtgctgatcccaacagaaaagcagaaaaagaacaacagaaaaggagtaaaaaaggaatggagatggatgtgaggaggaagagcaggctctgagaaaaaccgttgcgattagcaatccggtaaagtcggcgaagacaggggggcttgaattaaaggcgaactgaactgcactgaagggatctggaaaacagggggtccctggt

SEQ ID NO: 372288 - DNA, 688 bp, Cannabis indica
aaatattttccatccttagtattaattttttcaataaatataatgaaaattatttaatttaagttggtccaaaaattaattaaattcgttttcaaatcaaatttaattttctataaatatatacgacagaattgaaaatccaatgtatataaaatacattttcaaaatctctttaaaataaaataaaataaaattagaaaaattattctaatttatgttggtctaaaattaaataaattaattttcaacataaatataatttttctatttaattaaatatcttaagaaaaatatcaaatatttaagtgtctagaacaaatcaacttaaatattaattttctatttaattaaatatatctagaaaaatacaaaaaagtctacctagaaaatatctatctagataattcataaactaattacttattttctaattaaaagaaatatattttagtctatttattttaaataaatcattaatgaaagttaagttgatctaaagttaattaataaattaattttcaattttaatctaattttcaaaattgaaaaaaatttctaaatatctacattaaattaatgcaattcaaaatttaagtggtattatgattattaaaataaaataaaatatatttcgaaaataattcttgtaaagtccttttttggcaagttaggtgacaaaataattttt

SEQ ID NO: 372289 - DNA, 537 bp, Cannabis indica
gatacctcaatcatagtgaggaagatcgtgaagaaagacattcaacaagaaggagtttcagcactaaagaaggagagaaagagatccaggttcagatcttgataatactctgcgacagaaaggatacaagggttagagatctgaacggaaggagacattttattccgctgcacccaatgtaaggtttctcatactttatatgtgtttatttcataatcgtttagaagttcatatttagggtgttaatcaacatacttgtgagtagatctaagatcctggtaaaataatttccaataattaccccaaccaaattctcatcttgtcctctaccttttgtagatgaatcctagtgagttctagggaggcaaacatcatatcggccaggatctgcttcaactcttgtacggggatcatcttcggctctatgctactatatcctcgtcaagtgataatctttctaattctagttttgaagactaggaagtaagaagcgaacacacgccttcccctagaactcgatgttgggttttatgccct

SEQ ID NO: 372290 - DNA, 403 bp, Cannabis indica
tgacacgtggaatcgactccacggatttgctcccaagacacaagccgaacaggacacctcatacattcgctcggacgaagtcctctagaccaagcagtgggcaatccgtgcaaaatgccaacaattagcaaattctgctttcagagatcatattgcagagatatggcaagctgtccaaatcccatgatcaatgtattatgtatttactatgcaatctttctgcttatatcaattgtaacgagaaggaaaatacttcctgtcaaagcttatagccctataaatagtgattcatattcactaggaaatgggtcgaaagattttatctaagaattcatattcagagatactgttgtaagagctctaagaaaagggactattcaactttgttcttaagtcaatacaa

SEQ ID NO: 372291 - DNA, 508 bp, Cannabis indica
cgagtttggacccaatctcatggtgggtctgtgttcgtgttcagcacctggtcctgttacagttttaggtttgggtgcaggtcctagtccaagtcctgttccatgttcaatactagtacttgtctcgggtctgggtcacggttcggctctcaagtccaaagtccgagtattgggtcctacttcgggtcctgggtctttgtcccaatcctagtctaggttctagtcccagtccaggttcaggtctcgatcctactccctgtctaggtcctagtcctaatctcggtcttggttcgagtcccacgtttgagttctggtacgagtccgggtctgggtccaggtctgttgccgggtctgggtctgtgtttcagttcatgtctgggtcagggtccttgtctgggtctaggtctgggtccaggttctagtacgggtccaggttctagtccagttctcggtcacgagtcctgggttctgggttctgggttgcaagtctgggtccgggttcgggtct

SEQ ID NO: 372292 - DNA, 1388 bp, Cannabis indica
tataattgtggagcatgtggacagtcaggacataattcgcaaacatgtccacaagtgccatcagatggtagaagcacaactcatgtgtgatttattattatttagttctctaaattatatatttaatgtttcttgtgtttgatatatgcaaacttttatttatatctatctgtaaaatttatgctaattaaagtacttattatggatcttgtacgactctgtgcgactatgtgcgaccaagtatatttcaaagtatatcctaatatgtgtttatgcgaccctgtgcgaccatgtgcgaccatagtatatttaaaactgtattctaatattggtctgtgcgaccctgtcgaccatgtgcgaccatagtatatttaaaactttattctgatattggtctatgcgaccatgtgcgactatatgcgaccataatatatttcaaaatatatcctaatattggtctatgcgaccctgtgcgaccatgtgcgactatgtgcgaccatagtatatttcaaaatatatcctaatattggtctatgcgaccctgtgcgaccatgtgcgactatgtacgaccatagtatatttcaaaatatatcataatattggtctatgtgtgcgaccatagtatatttcaatataatcatttaatacattatatatatgacaataaattatttaactatattttctaagttatttcattaagtatgtatgtgtataatcatttagtataatttataaattataattaaagtatgttatataattgtataagtctatgtgattatttaattacattatatatatatatgagattcaatatataaattaaattattttataaaatatgtatgtataaccatttaagtataatctatagattataaataaagtatattttataattgtatagtgattcaccattaaagtacattgtataagtctagatgactatttaattacattatatatatgagattcaatatataaataaaattattttataaaatatgtatgtataaccatttaagtataatctatagattataattaaagtatattttataattgtatagggatttcaccattaaagtacattgtataagtcttggtgactatatagttacatattttaaataactcaatcattgaattacatggtataagttaatttttaactatttaaagaattagagtacacaatatacaagtataaattcaaggttgttcatggtcgttaagagcaaagttatgtttttatcgaagaacataaaaaaccatgatggtcgcatagtataaattcaaggtcgtttatggtcgttcagagcaaattcaagttctttaaagttgttgaagaacataaaaaccataatggtcgcatagtgtaaatt

SEQ ID NO: 372293 - DNA, 520 bp, Cannabis indica
aataagcctgaaagtaggcggtaagcttgggggaataagtttggatggcgcgaggctgacaaatacaagcaaatctataaagtaatcttgaaggggaagcatgaccccagccatcaactgcgtctaactccaggctccgaagcccccgtagttatgattgggcatctccgcatcccggggcagccggtggtaggtcccggacgtcgcaggcttgatacctgccaccaccacgatgtgttccaactggtgcgggcaagtcagggtagagtgaagctcggtcgcttcccaccccttagcacgggacttgtacccttcctgggccactggacccttcataacttcctccagggtggccaaaagtttccctcctttctgtgaagatttggaaccagatgcagacatcttagttctgaaaaagattaaaaattccagcagtcaggcgccaaaccaaaccctaagtcaaaaaaggggaatgggggtcccctaaccgctggaaagaggccccctccggacacttgtc

SEQ ID NO: 372294 - DNA, 721 bp, Cannabis indica
atagtgagaagatgggtcggaaaccaaacccgaggagggaaagagatccaggtgagatcttgataatgctctgctacaagaaaggaatcaatggctagagatcgttgaacggaaggagtcattatattccgctgcaatcaatgtaaggttttcttaaacccttgtgtgtttatttcattattttagagaattcatatttaggatgataatttaacatacttgtaagtaaatctagatcctggtaaaatattcccaacaatcctagtcaccatttgttgggttttgccctaaataaaacccatttcaatataatcagatttactaattaataaagatcagaattcattttatgttgcatggttcgcataatttaattcgtgattatgtttaatgtatcaattttattaagtccagaacatatataaatatgtatatatttgttcatgattatagtgtcgtcagcacagtgaaatataatcatgattatatgttcacaagtttaattctcatgatttttcagttcactgtatttagaatagcatgataatcagcaataaggtatacttacaccttggataagtgttgtatcctttccaaggcattggcaagttttaccagtatcggatgtatggagtatacattgaaagggaccgatattgatcttggataagatatcataaactaaccgttatatctttctaagtcaatatcaatggttgat

SEQ ID NO: 372295 - DNA, 675 bp, Cannabis indica
accaccacactcttcttttcaaaacatgatttcagattgagattgagagatagagagagaaaagattgagaggtaagagatgcagagaaaagagagagattggatttgagttttgtaataagaatcttctgtaaatgaaaaagattcttggaaagagtatgagagtggaaacatgtttgagagagaactcaacggagaatctttcttgactgtactgtactcgttcttgtttaatcaataaagaggatttggtggtgttccagaactggagtagagtcatagatcacataaatttattgaacttgaaccagtatatatacttggtgttgagtttttttttttttgacttaattgtttactggtttgttcatacttgtttttctctgattactatttgtgatttgttaattttgtcactgttaattgtttgattaattaaaatttaattattttgattctgcacctttagttgtaattttcctcaaaaaattagtgaaccaaaaagatatcccaaatttgtagtgtttatcaaaaattaaccatctctttaacagttgtttttaatttttacaagacatggccacatttccctgattactatatatagataactagtgaaataataggtgaattagccttacaaaattaaaaaaaaaatatagatgaaaataaatt

SEQ ID NO: 372296 - DNA, 540 bp, Cannabis indica
aaactcattttttgtgccaaatttagcataaattttaaatctcccactggagatggtctttagtaatcaaaataatttgtgtgatcacttttgttatttcaaaatctatgggtgaattgcttacaatcatttgtctaacaaaactatcctctctttctatttataaccttcacactagggttaaattagatgtgataaacttaaaataaagacaattggactttaaatctaacccatggttgaattccattatgggttgtagagttaaatttttgccactttattttaactattgaaactaatgtgtcttttctaattttaccacttatctcatctaaatatttaaataacacttttaatttaataaatataaataattatcaaataaaatacaatttaaatatatttatgttatacccagttttcgcaaaaaaaaaaataaaataaaatggctactcttgcacaaagtcccacatgccaagagtacatttgtaatgacctcattttagaatatggattagtaaaggcaattaacattaa

SEQ ID NO: 372297 - DNA, 578 bp, Cannabis indica
ggaaactcaatttctatatcttctggatgataaacttctgaaccagattgggacattactgtaagaagaaggcaatcccaatccttagaaagaattttatcaaaccagaaggtggtgaattggaggttctgtaagacttacgtattgtctaaaccctaatatttgcccaaatacagttcaaccctaaaaattactaaaaccatatgagatggcaatgaaatatacaaacaaggtagcaaataacacccaaaaatgcagcataacaaacgtataagatattaagaagaaaaaccacttactcttcggagttagggtttgaggacaactcttcggtctacggatccttggatgcagtgagggtctcttcgagcgtgtgaagtcagaatttaagtcggaggaaactcaacaaaaaaaaaatatcagggacagagatggcatgcaaattctcaagcaaattcagtgctggtttttcagtaaaggagcttgagagtttttcaaaatttctaaaatggaagaaataatgcaaaggtagttcctttttcttattttatactcttgaaatcattttcgtcggatca

SEQ ID NO: 372298 - DNA, 664 bp, Cannabis indica
ctggacctagaccgaacccggaaccagacccaccctcaaaccctaactgtgaccgaaacccagacctgaacctcgccccagacccaaatcaggacccgaacccaaacttgcacccaaactcgacccgaacttgtaccccttgacttgaaattggaaccgaaattagaagtggatcgggacccaagaacaggaccaggaccaggaatttaaaaaccttagcgctctgataccaaactataacgccctaagaaataggcacactacccaaggtgattaagaacccctaatccccaaaattggattactaaaaagataagcgcgggtaatttaaaatttaattgaaaacagagtgaaaataaaagttgtaataaacttaactttacaatcaaaaattacatgtctcgagatctcaaaaatattttacaaaatattacaaggcttttcactagctgacctaagcagcaaaatcagagtttcaaaagttcatcactggtagaccccaatccgcttggtctagtgtggctcgaacatgtacatacatcgcccaactcttgcactcatggatgatctgagacagatttctcctttcgtgcacagtacatcacccgtgagccaagcccagcaagacagtataaaatatcaataatcataattatcacatcac

SEQ ID NO: 372299 - DNA, 578 bp, Cannabis indica
actgtatttataattattattttcaataatttacaatataaataattaactttaactctgatttattaataaatagaattaactaaagagcattgtcatcaaacattatcagtggtgtctagtacttttaaaacgtgttgtcttacgattagctagcaatacttcctaaaaattattatattaaactatataaaattcgatacttaattagaccaatagtcatatagagtgttttgtaccattggtgccttttagcacttctcttaagtaaattgtcacatgacaatcttttataagttcaggtcacaaatttttatttttttaaaaattaatttaaatataccaataagaaaatatcaaatagataatgatttacatttactacaattttaaaaatataatttagtattattatcgttaaaaattaaatttaaatatttatttacaactaaaaattaaatttaattaaatatttataccacaaattacttttattattttattgacaatgagtgaagatagtgactgagcagaaaacaaacaattatgtaccgaccaaaatttgtaatggaaaaaac

SEQ ID NO: 372300 - DNA, 1302 bp, Cannabis indica
atctttttggatatttttatggctaagtatgtagtaagaggaaaaaaaaaacatataatagtattttagtcatgtgtgtttttgtattttttacttatatttggactcttaatttaaaaaaaaaaaagttattatttgtatcttttataaaaaaaaatcttacttttacttttagtataacagtttgtaactaattataaattattatttttattttgtgattaaaatattaactataaaattataatttgttgtgattaaatgtatttttagttacaatatttattgtaattaaaattaaattaataacaatttatatttaaatattatgttttagtcacaactttttattataactaaaagttacatttaattactaaaatttatgttgtgatgctaaaaagttatcactactttttgagctcattttggttaaaatgttttctaatgtaatcagatataagaaacctgtcaaaaaaataaaaaaaaaaaagaaaaagaagaattatgtgtatgtaaaatgatacaaattagaatatttttaaactatttacacaaacaaataaccatgttctaaatttaattatctatagatttatatataaggacaaaattatctcatgaatttgcatcaataataatgctgaagttttatttttatcttattatttaatgtgatcctctaagagacttattttttctatccttttaaatgcattattattattattattattattattattatttaaaaaaatattttttttttcattttgcatactgatttttataataatatattgtatatcatcttatctatttctgttcatataattatttaaataattcattttctacactgtagaaataaaaaaaaaaaagaaaaatacaatctgatggaatctttcttctaaaatataaaaatatatatttttaaaatctccatccccatccccgcttatttttcatctgggacggggtggggactctcttaatataaattaaaataaaatttattttaaaaatttaaatatataaaaatattaaattacataaaaattaaaatactacatattatttattattcaatatactaattattatacaatacacaacttaaaaaattatattaatatactaaaaaatacaaacttataaaatataaaatattaataaaaagataactaatatactaagcagctccccgtcggggcggacaatattatccacatattcccacctcgctccccattagggacaggtccccacggagcccatcccatagagaaaattttcatcctt

SEQ ID NO: 372301 - DNA, 681 bp, Cannabis indica
ccctcttctgaactcccaataatagattcagattcttgcactaattgattcaagtctgaagttacaacccaaggcgaccaaacaaatggtccctaaaaacttctttgtacaaatgcaactatacaactctgagattcatttcactacagcaggctccactcaaacaacaacaaacacttcctctgcttctctctcttactacaatctagggtagggtccgagaactcttctctcttgtgtcacttagcttgttatttataaataggctaactagttttacatatagaataaagggtttgatggattgttaattgttatattattttataatataataataaagtagattaaaatgtgataaatatatgtgaataatatatattaagtgtatggtaaataaatgtgtaacctatgattttataacctacacttttgtaacctacatgttgtaacttggagaggagttacaatttgttgtcacttgtaactcatgtgttgatcacacattattagtgtaataaaagggttgttacacaatttgatgataggattcaaatggtatgaaatatagttgttacaaactatattaatactcatttatatgagagaaatgagtgttgtgtattttgaattctaagtgatcacctatacattataaaaggaggtctttggtgctcattt

SEQ ID NO: 372302 - DNA, 572 bp, Cannabis indica
agattacattgaaatatagtttatttagaacacaaagtccaacaaactcccacttgcactaacataaaacaagcagtacatttcaattaatcctagattcaatctgtgcttttcaaatgtagttacaatcaaaattttggtgaatagatcagttaagttgtcttcagtatcaactttctccaccagtatgtcctctcttgccacatattccctaatgatgtggtattttctctctatgtgtttgcttctattgtggttacgaggctgtttattattggctatagcaccagtgttatcacaaagtaaaaccagtggtttttcctttccaggaacaacaccaagtcctatgaagaactttcttagctagactagttccttagtagcctcagtggtagctatgtattcggcttccatggtagagtctgatgttgcgatttggttatcgcttctccaaataactgctccacccccaacagtaaataccatcccagatgtagacttcctgtcatcaagacaagcctaaaaatctgagtcggtatagcctacgagattcaaagcaccacccttgtaga

SEQ ID NO: 372303 - DNA, 520 bp, Cannabis indica
acttgatagtgtaaaaagttcaagagacaaaaatatttattattctaaattattttgtctgatagaaaagtgtaaaaaagtacataaaagtattaaatttttattgaaaaagtatataaaaatcatattaattatacaaataaaatataaaaagttaattattacactaatgagtggcaaaagtaaataaaaaactgatatgtattgttgtgtaaaatgtggcccatagtacattttgtgaaaaaattagcataacttttaacatacgttgaccccaaaaaattactaagtttaaattttggagtcattagtgttatgctcgaaagttcgccaagtataaatcccaaaattaatacacccatgggaatttgttggtacaatgaggagcaaaggcatgcacccaactcccccctacagcacccacctccaccagtgcccaacctacaatgcccagctccccccaccccccagcctcgcacgtgcccacgctcccacgctccccctcgctcagcctgcagcg

SEQ ID NO: 372304 - DNA, 487 bp, Cannabis indica
tttgtttaattttgttactagtagttttagttgtgaaaaaaaatatttttttcataaatattaaataatttaatattaaaaagtaatcaatccaaaataatcgatccaatccgcacttttgcggattggatttgagccattgtgcagattggattggatccaaaaaataaaatccgcacttagtgcggatcgaatgcactatgaacaaaatagtgcggattggattggatgaacacccataaaccaagccacgaccccgactccagaattagaccttacaccagacctgacccaacccagacaatgacttgaccttgaccaagccccagacctgaacctcaactctaacccggacctaggacctagacatggaccccaaaattggccccgacctaagatctcaaagcttgcctcggtcctagaccttgaccctaaacttgaacccccaaccccagactcggacatggacctaaggacccaaacccca

SEQ ID NO: 372305 - DNA, 716 bp, Cannabis indica
ataaaaaatgtaaaaaagaaaaaaaaaagtgcaactttaaatactttatgtaaaaattccaaaattatatgaaaacattgtgaaggaataacaataaaaatttactaaaataaggtaaaaaatattaaaaaagaagaaagaagccgataatttaagctgtaaaaatattaagtggaaaacaactaccttcattagacaacaatttggtcaacccatgccttttttttttttttttttttttctaatttatcatcttttatgctataaatgcattatatgatccttgttagattattcgcgaatttatcagtatcttctcaatcgtataatatatatttgactcgacaatattaaaatacatcagttcataaacattatgagatttgttaaatgagattgttaagagataaaatgttaatcgtgttactagttaattagaaatacaactacttacaattgttaattagttaattatactctactactactctcactaattatgtaactacttgtaacaaactctcaattaataaaaattcataattctcctatttatattttaaaatatggtattagagtaattgttttctctaatttttcattgatcgattcttgaatttttttcgaccgatcatgtcatcttcgtctattgctttgactcaggcaacaactatcgcttcagcttcgatcacgtttcttattcttaaatgctcaat

SEQ ID NO: 372306 - DNA, 682 bp, Cannabis indica
aaaacccagtactattagcgagatgtccatcgctatagggaggcacgcttctggtaccttcactattagcttcaaacatctttcaatgagattcatagtctcgtcgagtcagttttctcggatagaagctgacattcaaatgatgttggctgttgaaatttagcttgtcgccagagttgtggttgttagatgaatcattatgtcttcaagcgcaaaatcgacaagacttatatgattaacctcgaaaaatatgtgggaatgttctagctcgctaccaaggttattgatgttgtgttcccatcgagacatcccagaacgttatgatttacaacgtgtataatacacgattaccatgacctggtaaaagcggacttaccacgactgtgtgatattcaaatattaaccacatttatattacatggtatgtaatcaaaccccacgatttcaagggataatcattgtaaagatatcagtcaactatgtaattagctgtctgactatgtaattataaatggaggcatgttacactaaacaaggggggataagagaaaaaggccctaaaattgtattaaaaatctaaaaagattgactcgtagactatgcagaattttaactacaaaatcacgtaaaaaacccgtgttcttacttttttctttactgtttctattttttgtacaagttt

SEQ ID NO: 372307 - DNA, 625 bp, Cannabis indica
acagtcagtagtcccgtgatttggaaggagaaataccgggtaagttgtgcaatctcacactgcctagggaaggtcaagtgtgatgattatgagattgtgtaggtatgggactacacagttgaaaatggcttaaatggattgattggtactacctatatcaacaagatgcatcttcttttctagtagcccatcacaaaaaaacttcacagttaagcgtgcttggcctagtataatttcaagatgggtgacctcttgggaagttttcccaagaagcgggcaaatgaggacaaagcacgctgaaaagactcatgttggtctgtagggccaatcgccaacccacgaagcagccagagtgacatactcgtgtataagagtcttaaattcgtaagggaaggcccaatggaggcttgaaacgaggatattacaaatggtatcagatccttgacctagctagaagtgtggtcgatgaggacgtcgaacccctaagagggtgattgtgatagtcagtagtctcgtgatccttaaggagacacactgggtaagttgtgcaatcccacactgcttggggaaggtcaagtgtgatgattctgagactattgtaggtatgagactacacagttgaaga

SEQ ID NO: 372308 - DNA, 529 bp, Cannabis indica
agcaagacctcgggtctttccattaattttgccaaatctcaagtttactttggtgggatttctcaaccaattcctctcgctcaaaagataaatctttctatcggtgagttttctcttaagttccttgggatccctctaagactaataaaatggaggctagatgattgtgggttggttttgaaaaaaatgaaacgtagactctattcttgggctaataagcatctttcgtatgctggtcgagttcaattaatccaatctacattgattggattaaggaattattggatgagagtcttccttcttcctcaaagtgtgataaaagagattaagaaattatgtagggttttctttgggggttcaaagataatcgaactagaactcacttgataagttgggagagggtgtgcctcccaaaagcctttggaggtcttgggttcaaggatggatcaaagtggaacaaagcttcgttagctagatttttatgggacttgatgaataaaaaagatttgctttgggttaagtggattaa

SEQ ID NO: 372309 - DNA, 1009 bp, Cannabis indica
aaacggtatatagaatgtccaaaacggacacccgagtaaaaagttatgaccaaaatatgatttctgatatccgaggaatttctaaaaactatgaaactcgaaaatcccaattttcacactcaccgaaacactatcaaaacttatccaaatcactccaaacttcccaaggcacatatataccataaatattaccattcttacgtaacagaaataaaaatcaggcctttaaatgaaaaacgccattaacgttcggactaagctttaaaaagtttcaaactcgattctaacccaaaatcacctcaaattaaataagtaaatatcggtactagtcccataggtgccaaaaagcaattctacaaagtcagaatctccataactattctaattcacgaaacctctatatgaaaccaattatttttaaacttaaaacgaaattaaaccataccttaagctttccctcttcaagaatttgctatcctgctactaccggagcttatatcactaagtttcggattgaaaaatcgaaaaaaatagatataaaggaagaaggttttgtcgaagggagagagcgagggtttttggcgttctttcgttcgttctgtttcactgataagttaatatatatataaacttaaattaacttacgttaacttatatatttaaataatattataataatatattaataataatataatattaataattatataataatatatattaataataataatataataatattaatataaactttattattaatagttatcttattatttattagccattaagaaatctctatttttagggtatttgaccaacttcgagtaccccaaaatacctcgatatttctaaaatcaaattatcccaataatctcatcaatatttctaactaaaactattgtgacattttttggcctccgatctggtctccagggttaccgaacttgaaaatatttttatttcacaaataactcatattatatccacgtatttcaaataa

SEQ ID NO: 372310 - DNA, 544 bp, Cannabis indica
acacaccgatacttcctcgacatttccatatctacaattttttcggatcccacgcggggatctaactcattttcttccgccattcctggctcaataacttaccggaccatcagtatgggcaggtgggcagcaacattgtaacactgcctggccttccactggtttcccctcacggtccctatcccagcttcttgagtggggaactttagacacaagtgcctaattgacgcgactgcgccgaaatcaaccagggccgaccgaccgaggattgcattataagctgttgggcagttcaccactacaaacgtgcagtatttaaaagtgctttggggtgtgtgactgggagcctcacttttcccatcgggataagcgttgtcccattaaaccccgtgagctgggaaccactcggcgagagatcttggtccgcgaggccgattgccgtgaaggcttctttgaataataaattcacagaactcccattgtcaattaggattatggccataattttgttggcgatgggagtctctatgaccagagggtcatg

SEQ ID NO: 372311 - DNA, 580 bp, Cannabis indica
tatataccactattatacatatcaaaataaaaataaatatcatctaagaataataatataccatacaacaaaatagaaatacaccgtacaacaaaatctatataccaacagcccacaacaactcaaaaaaaattaaaaatatcgacataatttttaaataattttttttaacaaaactaatataaatatataataatctttaaataatttgcttctaatttaaaaaaaatgaaaaaaaaaattaatgatttttttttatgtgacaaaaggcagtataaatagtaaatagtttaaaatgatcatttctctacaagttttgaaatgaggatatttgctaacataatcctataattaatggctatttgttatgattttttgaaatgaagacatatactaatatagtgttatgatttagagctatttgctataatttctcttaattaaagagaaagtcaataataacccgtatatctttatatattaaaagtgcctatctaacggcaattcttggtttaacagaatatacttaaaaataaaagaatattctgttaaatttaacgattaggtttgatctcccgtt

SEQ ID NO: 372312 - DNA, 667 bp, Cannabis indica
acggtggcggaccggtgatgagaacctcgcgacgtacagttttgtgggtttagagcgagagagagagatgggcgagggaaagttggggttcttggcctgggatcacgacggtgtcacctgctcggattatcgccagccgaaggtggctggccctggcttactttcttcagcgccgcacaccaagaaagagagtgagagtgagagagagagtaatcgtgtatgggagaggagaatatagggttttcagtttcaaactttactatattattatgattatgtatttgtattagtttttttaaaagtaatatttttgttaaatatatttataaagtattatatttatgatgatagaaattatgtattatagtaaatattaaagtaatttatagtataaatattaagagcccgtttggcagagcttttggaaaagttataagctgttttttaaaaaagttgtgacgaaaaggtatttggtaaacagttaaaaaacagtttattgaagaatttatggaaaagctaccgctaaaagttaaagctggtgcaacccaactttagaaaaagctattttgattaaaagactttataataaattatttttactaaaattttatttaattatttattatatattataaaaaaataaaaatatttttaaatgaaaaaatat

SEQ ID NO: 372313 - DNA, 699 bp, Cannabis indica
ccgtaccctgtgacccaaaattagaaccaaaaccgaaagttgaccgggattggaactaggacttggacttggaatcataacagaaattggacctagatcctgaactgtaaccggaccaggacccggactccgaatatgacctagaccgaaattgggagccggacccagatcccaaccaaaacctggactcaggacccgaacccgaacctcattcagacacaaacgtgggacaggacctagaaccgcaccccaagtctcgatcgcgaacccgaactcaaaaatggggcctaagacctgaaccagaacaagaccgagacccgtgacagtgatccagatcttgactcgggattcgcggaacggggactggaacagaccagtagtcggtgtctagatctgggactcagactagtactagaacccaaacctagacatgggacccaaaattagaacctgaacaagaatcgccaaaccaggaccctagaacaagactaggaccgtgaccaagacccggacccagacctagaactgaacacagaccttgcctcagacccaaattgagactggaactcgggcccggacacggtcgtgtaccaagaccagaacggagaccctgacctggacctaaatctgggacccgatccctaacacagactgggacctagatagggatccggatacgaacctggactcggaccaaga

SEQ ID NO: 372314 - DNA, 545 bp, Cannabis indica
aaatattttaatataaaaaaaatgatgaatgtgtgaaaggagagaaagagtgacttgatgtatgcaaagtgaaaaaataaaatcacattaaagtataccagcaaagtgattgggacttagaggagagagaaatctctaactgtatatatacaaaaagtattaattttgtattattatttcatacaataaaataagctggcatatttttgaaaataatttgatatttaagttggaatgcgtaattttctcttttatttttcaaatgtaactcatattatgatgtttgagataagatttatgtcttatatttttttatctagaaatctatcaaaattgttctacctacaaaaagcgtagctgatttaaaatactatgtggtaacatttaaaaaaaaaataactctttagtgatctacgatcaacaaccacttatcaatatatatatatatatatatatataatataaaggagagttttagtggagttgacgtggcactttatatatcatttcttttcaatctctcttctctcaattttctaaattta

SEQ ID NO: 372315 - DNA, 668 bp, Cannabis indica
gtatgttattttttgtgttgtttgaatgttatttttatgtagtttgttttgttattttcgtattatttttataaaatactgtaaaaaaagttaaaaaaaatacttcaaacgtgaaaatgtaaaatttttacaaaaaatagtgtattatgtaattattccagtatacatttattttgggatatttggtaggtttgggttcttagaaatgggaatgagaatgtaaaactaaacttttatgtttgatattcttaaaaaaaaaaaaaattaaaacaaacttatgtttgatagtggagagcttataatttaagagtgatccgcttttaagtttattttttttttatgtaattttaaactcttaacaggtgtttggttggattggttagaggtaataaaatagaatgaaattgaaatgaaataatttttattttattcttttgtttggttatattttaaaatattgaaatatcattttaatataatactctttctgccattttagtagaatgactatcctatttttaaaatggaaagaaatactattctaaataatgtaaacatgagaaaaaaattttcaatttttttttttaaaatattttttattgcattttaaattttaatatattctattctatttctattcttattctcattttcatttctatttctat

SEQ ID NO: 372316 - DNA, 645 bp, Cannabis indica
tcacattttatttaaacacgtgtgaataataattgataaccgcataactacttatcattcttatcttcaaggcggttgatgcttatttggacagtgatatctcgcttttactatagatgaccaatgatgacttggttagtcatatgtcttccagcaatggtatgagcaccagtgtattgagcaaacttaagagctgctctttgaccataaggcctcgcagactagataatcatgtcctgcatatttccaagttgatacactaagttattataatgtggaaaatatgctaattgtttaacaattgattttcctcgccagtattctcttatgtatagcaaggtggatgtctcactatatattgtccgtggttgattcggattacttcccttattcttttgaatcctgtcgttgaatatgcatcttccgaggctggatggtgcctcatcaatacaggaattaatagtttgtgtatccttttctcgcctatgactatacagtcagcaagttatgaatatactctattaattctatatttagtaagttatttcttctttcgttaaatgatataattattattatatttggtggtttatattccacttatttacacgtgtcactctctgaagtgtagccaaattttgagta

SEQ ID NO: 372317 - DNA, 826 bp, Cannabis indica
taactcccagttgtaaataaatatctaagtgaatttttggcggtaataataccttagttataattttagaacttctgtaggcacctgcctgttaagtgttaagtaaattgccacgtggcaattggtcaagtcattaaatttttatttttttaaaaaaaaattagtttaaatatactaataaaaaaatagcacgtggataatggcttaatatttaatggttaggtacatatagagttccagaaatataacttgggtattattgccgccaaaaattaaacatgatatttatttacaactaagagttaaacttaggaatttatgccgcaaattactatttttttaatatattatctatgtaataaaagtaagatgattagattttaggattttttttatttttaatatattattgttattcccaagattcggctatgcatcagaagctgacacgtgtcttacaaaaagaatatgaatcaattcaaggaatataataatgacattgtgttattaaatgcaattaaaataactcgttctaattagatagaaatattaaaactcatggattgcttagtttaatgtaagacaagaataataattattaaattagaattgacaagacacatgttcgtctcgatataaaaagaacagtaaaatatacgagacgagatattcaaagacctcgtgaatcattgactctcccatgagaacaaagtgaaatttatgacactcaatcacctcgcgttttgcacaataaagaagtcatctcgcaacataaacacaaataaatttaaaatacataaaaaaatgataaaaatcattaaatttt

SEQ ID NO: 372318 - DNA, 886 bp, Cannabis indica
acttaaaaataaacaactaatagaatagattaaaggaaacttaatttattatattttttttcagaaataaagaaacttaatttcaataaaacttaaaaataaacaaataaaaaaaaattaaaaaataaaagatactgaaaaacaaaaaagattttcttaacacaaaaataaattatgaaaaataaaactataaacaaaaaatctaataacaagaaaaatcaaaaaatgaaaaaactagcttcatttgataagaaatattaccaagggagcacgaagcgtagatgcatcaacaggactctgactcttcttcttgctaagtgatttcaaaacatgtttctttttatctttgctaatgatattaatcaatttctcatcatcaacaagttttgattcacaaatattttcctaacaataaaaaacgaaagactaccaatgaaagacaaattctataaaaatttataaaaacaaacatagagttttatatttatacaaaaagaacaaaacttaatacaacaagacaacacacatatcaaccaaatatatatatatatatatataaagacatactaaattagaatctgtatcaggggccttagttctactcttctttgacacactagcatcctcactaaccgacttccctttttttttggttggtaatagctttcgagataatcttttcgatcttaaaatcatcaaaatcatctgcttgacgcacattagaagccttcttgctctcctcttactatgatgtttattaagaataaaattaggatcatcgacttttagcttttttttttatctatcttgaaaaaatatacaaaataaaatagaacaacttagtaaatcacaatcaaacacaataacaaaagaaaaaatattacat

SEQ ID NO: 372319 - DNA, 798 bp, Cannabis indica
atactgctcgaatagatattttttaaaaatttcaagtgggggattgttggaactttgtgaaatgttaaaaaaaaatgatgtgtgtgagtaggagtcccacatgggatagaaacacttcatttgaagtgtataactagtgcaagtttgagatatgggtttgggccccaaggggtacccagttttgcgcgcatgggtgaggactcacacaccggaccaccacacacgcgcgcgcgcgccgccgccgtccgaccgtaccgtgccgagccgagccgagcgggcgggtgtggtgtcaccttattttttggagaaaatttatttcttaaattattatttatttaattaattaaaacagttttcttttttaaataaaaacgtgtttgattaattagtaaacagagatgcttcctgatttatagcatcttcctgattttttgcatcgtttacacgatcccatgttccaacgttctcatccagtaacgtatttcttcccgttactactatcagcgcattgcctatataatgcgactgaacagtgggagaaaaacacaacttttcattctgaaaaattatacgatatatacacactacatattttatatttatattttcgcttcgagcaatagtcagtttttgggtgtgtaatttcgacggttctctatcgtgcaataaagttccaataaagtgtgttcgactaggctgttttatcctggggacgacgaggctgatagtctgcttgcacaaatctgggcagtgccgcgaacgtcttaaagagagcgacctagtctgcaactcaaccca

SEQ ID NO: 372320 - DNA, 630 bp, Cannabis indica
tatcataacacgcacttatagacaacatgtcaacgactacactgacacgacttacctaaatgtgtcttctaagaagtcatttcttgtttggattattggagctaaagctgtgtttggtcagtgggagtcattgttttcatgtatgatagacatgttaaggattattatttgttgttgagtacatgcatattctggataactcttatgatatgttgtgtctacacacttgtggtgcaagccagtgacttactcttagtgctatgtttgactggatccagatcagtagttatcatcatgttttataaatctcagatgtctcattatgtattatatttgtatcctgtcgatacaatatgatgcataattagttttatagacattagtggttcttgagatttctgtctgttgatactattgtatagttgagagcacatatatgtgtaattatgtagttcaagtggaagaatgttagaatattttatgtggagtgacataactaagtgtcgctcactcagtgtcgtattagcatataatgataactatatataatcggtaatgcatggtatttttatcaggccataatggtatggacataacgtactacacgctcggggcccatggacacactct

SEQ ID NO: 372321 - DNA, 935 bp, Cannabis indica
acctccccttgttcttttctatttccatttctggattattatatgatgatttttgaactttccatatatagaaagagataaactagaaacgacatctcttatctcaatgacaccaaagggatcttaaatgaatggaattgggatgtggatggaatataatgaaatagagccactttgaggttccctatgaaatgaggcatggaacggagccacgaagaagaagttccgagagttacaaaggaaacttcgagctcatatgggtcatgtgttgagaacgggaattgaactttatgagatctaacctcctgttgttcctcagtagctcagtggtagagcggtcggctgttaaccgattggtcgtaggttcgaatcctacttggggagatttgattcattccgaattctttaattcggaatgaaaggattcactttgaccgttaagagagtaggtaacccgttccctgtgtctttgtttctattgcattctatctcatcgtatcaaattctgttctgcgatatttgagaatcgccgtcaatccctcggcgtaggtccgggataatcctttgttccacagtctggggctatttacaactatccaattaagaccgcgacctgggacctaaaccaagatcgggacctagatatagacctaaaccaagacccaaaaaccagggccgaaccaaggacccaagaactaactcagacctaggacccgaaactcgaaccagactgggactgggacccaaactcggacccgaacccaaaccaagatttggactcggactggacccgtacccaaacccgaaacgaactggacccggatgggacctaggaaccgaacatagatgggggacccagacctgggaacttgggcccccaaactaggaccagaacttgggcctcagaacttggatagggatctgagacccgaccc

SEQ ID NO: 372322 - DNA, 567 bp, Cannabis indica
acgaaatatcaggatttgaatgcacacacgtgcgcgcggacgctcggacagcaccctgtctgaagggcagctcgcgcccaagtcccacggtcaaatgaggctgcttgcagcctctttcctaggccaatcccttgcatccgcgcgcgcaggggtatgcaatgcatacccctgtgcctcaaacttgttttcgtcataacttttgattcaaaaatcgtttttcattgaaacaaaagccaatttttggtagaattttgtgtagaatctaaattttcaattaaaaatctaattttcagaataaaattaatttttattaatttttttaattaattaaaattagtttctgatattagtaggctttgaattttgaaaatttgatttctcacaaaggagccttatggttatttttgaaattttagattattttatttattttaattataagatcagatattatttttaattaaattttaaatgatcttactttgatattaaaatattatcttttaaaataatcttgtactaatttcaaaatttgctaaccatatcatatttttttttttttttcaa

SEQ ID NO: 372323 - DNA, 599 bp, Cannabis indica
atcttataattaaaataataaaatattaaaatttcaaaattaaccataaggctatttttgtagaaaaacaaatttttaaattcaaagcctactaatatcaaaaattaattttaattaattaaaaattaataaaaatgaattttattctggtaattagatttttaattaaaaatttagattctacacaaaatgctaccaaaatttgaatttgtttcaatgtattatttttgaatcaaaaaatatgacaaaagctagtttggtgcataggggtatgcattgcatacccctgcacgtgcagaagtggggtgtctgaccgagacagaagctgcacgcagcctcaatggccgaggctgcgtgacacggtttcagaaagctcttgtccgagtttcctcggtcaggctgtctttaaacgcgtgatggtgccgagtgtctcccttggtgcgcgggcgtgtgtacttcagcttcagatattttcatccaaattcaaaaaaatcataactaactaataaaaaattcaaattgagttttgtaaaagcctaaattcattaatatttcgtgtactttccagtaaaatatttccaaaacgtaaataaaaatat

SEQ ID NO: 372324 - DNA, 600 bp, Cannabis indica
ataaaaatacatcaaaaaattatattttatgcaaataaaattgtaaaaatcgtaagaatatttaaattccctagaagtatattttcataaattttttttgttatttttatattttttaaataatactttttttattatactattttttttatataaaatcacactaaatataacatttattcaattattttaattctatctagaaattaaagcttagtagctactaaataaaaaagtaaaaaccacaaattattcacacattcaaaatatagaaccattcagaacaaaaaatagcatcttatttataattatagcccctttttaagttttcactttgttgtttattaggtttaataggtttcctttttctctaataatgtgtatacaataacatattttacataagtgctactatcaatatcatattttaatctcctccttaatttttgtatttaaaaatacatgttagaattatttttttttcttaatttttttaatagtaatatatgttatagttaaaatatcaaatctttattttttttttgaaaaaaaaaaactctaaatagtttctagtacgaacaaaaaaatttattcaaattt

SEQ ID NO: 372325 - DNA, 581 bp, Cannabis indica
cgggacagcaaggctgattttgtaactggtcgttagacgacctttatttttatgtaacagttaaacagttaaactttttgtaaatatttttataatcgggatcccgagtcttttgtaatactgttttataagtttaattaaaaagcaaaattttaattaatcacgtttttccataaacctcgttgattagcaacgagctgcacaatacgtttaaaaatcacgtaatacgcctaagttagttagggtgttacagcaatcatgtaatttcaaacccattagtttcaattcagcctcatttaccaagtttttgaggttagatgagtaaccatcagggactttcatatttgtaattgatttgcaaactatttgtttttcctttttggataaagtgaaacacgcagaggcaaatataatcgttcacctttcttctcagatgccagagattgtcatttaaccattttaacgagatctaaacgattatttagaccatcctaagttttgcctggaatatcatgtaaggtatcgataatactttcacacacatttttttcaatatgtatgacatccaaacaatgtcgaac

SEQ ID NO: 372326 - DNA, 653 bp, Cannabis indica
tcataggcctatataaaggcaacgatagactaaggttgagacggctcaataaggacctttgaccgacctttgatcatattctagatcttgaagctctttatagtgcctagaacacatcatccctagagaccttctctcttcacgttttccttcagttatttatattggtacgacaccaagcttccatacaattacgattaacatacacacttaccaaaagttaaagaccattctctaatctcgcttccattggtgtattgttcccatgaacattaacaccaccattattattaagtttatggtattgggtctcccatgagccttttattcatgagcttcgatcgatatagattttgcctagaaatctctttttgttactattatccacacactcttgagaacataaatctggtgtgctagaactgaataataaaaaataaagtagacgtagccacattaccatcgcgacatgggggtgaactactataaattcctagtatccttttttatttattgcgatttttttttagcaaaattaatttagcgcagtcctattatttttttttttggatcttcttagatcagttgataaaaaactgcgtcaacatttttattgcttatataatggtaatgtagtaaataaagaagataaa

SEQ ID NO: 372327 - DNA, 1576 bp, Cannabis indica
tgtcccccacaagtgttcgattatagcactttataacgctttaatgtgagctttcattatcctttaattttttcacctggcaagaaattctgaaaccgagcatttatctctaccatctcaacttcttaacttggcacttcgacttgctttttcaattgatgcattttagatcacgttcatcttctatattatgcataataatacctagtcattatatcatgtaaaaatgttttattccaaatacatgtcgatctagcaataattgcaaatctagactgcaataatcctaatgcacgttcaacatctttctacatgcttcttgtttcattgctaaataattttttttttggacctatatggatcattggatagtttgaacaagagtatactattttagatatctaccgtcagctaaataataatccatattgtattctttattttaataacataattagctaggtgaagcaataccttaaacaagatttgcaaaaagatgggatgcctccaacacattagtatcattattagatccttgtaagccaaaatatgcatgtcatttccagagataatatttattagaaaattaatactaaggatggaaaataaactttattttctaaattttcttagggtataattttataaatattaaattaaaatttatatttaaaattatctaaactagtaattttagttaaataaatagattaaaatatatatcaaaagaaaatacaactctttaaaataatgagctttagttataagaatattcgatcttcattgtcggttctacatagttcttgttttagtgatattcatccctaatagatattcattcattagcaatttaatgtcatagaatctcgaaagataactattgttgtaagtcttttattcttagtaacgtccatctgaatagtggttgctaagagtagggcttacaaagtaagaaaaaacggtaaaagctcatgaaataggaatgaccttgactctcacataaaacgaagcaacgtcggattctcttttcgatcgaataaaaggttgctagaatggtttctgttttagatgagttgactactctattcaatgaatgatatctttgactctcgtctaatacgggacactgtatcagtttgttagaaaccttggaaattatttaagatatgatagtttttgtattttcacatgtctttattacgtgttaaatatttgataatttctgaatgtgtatgaatttatattgaatcatgttgttttctattattaatgttatagtataattttgaatcttcattgttggtcgaacttagcttgttgtttttaatgggacaaattttaaaggattatcatctgttagacaaacaaaatagtgttagatctcaacagataaatatttgtagatgcgacatctaattgtacatccaaagatgacaacttagactagtgtttacaatatgaaacaatcaagaaattttataaattaagaataacttcaactcttgcctaaacgggacatcgttggattcttattttattcgaaatgatctttctcctcttagctttttcattatga

SEQ ID NO: 372328 - DNA, 889 bp, Cannabis indica
gtatatatataatcaaatgttactagaaaaagtaaggtaaaaatttcataaacatacaaaacaacataatataatactaaaaataaacacgtaattttaaaagtaactaaacaaaaagataaccaaatgtatataaaattatttttatcttaaaagatgatgttttcacgaaaaaataacttattttttcgaacaaaaatgaaattataacttattttatcctgatcaaaagaactaaaatgttgcatttttatagaaaaaaaaaacaaaaagtaaaagtagatatttttataaaaagtaactcattgatatcttatcggcttaataagcaactaattattatattaatatgtttataaatttttcttataaactatgtagtaagttttctatcttttaataatttattaaagttaatctataaaacagacttatttaaaaattatattgtaacttttagatctaaaataataaaatacttcttaataacttttgaaactatttggtataatatattttgtttaaagctatttagttactctttccatatctagtaaagaaaaaagttactctttttttatattaagccaaaaaaaaaatactatttagttagctaaatataaaagaattaataatactttcattttttttattatatgcctctcatatattaaaatgatcttcttaaaaaataaattacaacggtattttttctaagcgaaaataattagcagcataattagattttttttttaaaattatctattaagagagagaaattaatatttttctttaaaggaaaagaaaaaggaatacacctgattttgttaaaaaaaaaaaagaacgttcaagggctgtacttgtttttttaaagtttgactttcaacta

SEQ ID NO: 372329 - DNA, 803 bp, Cannabis indica
ccatgactaattctattttttcatgtgatagaaaaatatatacaattactttactatattatttagtttggagtttgttagaaagccgctgggaattggaattagatataagtgaagataattatatagtttgcataattggaagtaattcactattaattatataattaaaggtctcaattactctctaattctaattatattgtgttattatttaccaaaaataattttaattatttaattaatatagtaattatttgatatgatttagttcttcatttttactttcttctctaatacataattttattttttgtctttgtgtataatgttgttttataatatttttttagcgtggtttttcttatattatttataaataaaaaaaatatatatatacaaatatataaaatttgatttttttttataaatcacaaaattgttttactaactgttgaccgaggttttcggcaaccaataaaatatgagtataataatgagctgtacgaaagcgagatgaagactttttacgtggttggggcgttaatgagccttagtccacgagccactgatatttatggatgtctttaatacagatcttacacttgggagaatgtttctctctttaatacaaggaatgttcttggtgagttttttctctgtttgctcttaagcagccaagatttttccgaccccattaaatgagctttgagggggtatttatagtgttttagtggggcaatccctagaattgtacttacacatgtgtctgtaagtatccataaagttgggcatttccgatg

SEQ ID NO: 372330 - DNA, 534 bp, Cannabis indica
tgttaagctctccggatggctctcatcacttactaacctggtggagttaactttgaaagattgtgcaaaatgtgagtatctcgttccattgaatcaattcaagtgtctcaagcatttgaaactaatagtgtcagggaagacttggttggtatgtttagagtacatatcgaacactaatagtgtcagggaagacttggttggttcaacaacaacattactgccatttctagagacacttgagttgtgggatttgcctaatctaaagggatggtggagagagattgaagttgatcattcttgttttgatgcaaatgcaaatgaagataatcacacttccttgccttattatctctttcaaaattaagtgtacgtgattgtcctaagttgacttgcatgccactttacccacatttggaaggagatttgaagctgaggaagactagttggaagccattagaagagacattaagaatgaggatgatgatgagcaataacgttggatctgtattcccaacaactccttctttctcacct

SEQ ID NO: 372331 - DNA, 619 bp, Cannabis indica
ttatattttataaaggaatgcaatgatattttatttaaattctcaagtaccaagttactttagaaagcaggataaaagacaaaaagacaaaaacaaaaaaacatgttacttttgcattaaaaccagtcaaaatataacacactaaacctaatttaatatttcaggttccaggttactttagcaaacatcaggttacttttgatttgtcaataggttacatgtgtaagaaatataacacatcaaccaaatttaatatttcaggtatcgaattattttaaaaaatattgggttactttttgatgttgcgaataggttacatatgtgtaaaaaatgtagcacatcaacaaaatttcatattttaggtatcaaattactctagaaagcaaaataaaagacaaaagataaaaaattatgttactaacaaaattcaatattccaggtaccaagttactttagaaaatatcaggttactttttgatgttattaataggttacatgtgtaaaaaatatatagaataacaagaaaatttaatatttcaagtaccgagttactttcaaaaatataataaaagacaaaaaggaaaaaaaaaaatgttatgtttgcattaaaatcagtcaa

SEQ ID NO: 372332 - DNA, 373 bp, Cannabis indica
agattcatgagatgtcctctgtacaatgtaagtttgcatatgttgtatgttttttctttttcgataaaaaaatatgttattaaaactaaaactgtctaaacattttagatatcttctgttaaccccaatactcagttaatcccaatactttggaaggttgaaacgtttgggtaatgataatgttaaaaatcaaagtaattatgttttatttctatatgtagtaccaactcaagctatataactatgtgttattattaattatatatatgtaaacacagaattactcacttataagcattagcaaggtaggttttagtcgtagtcgcaaatatggaaatttgaatgagaaaaagtcaaaagcattaagaataaa

SEQ ID NO: 372333 - DNA, 513 bp, Cannabis indica
caaaactatttatttaataattacaattaattatcaaatataattgccatttataatatttattaattagactatgaaaagtctcttaattaattaattgattccaaaatatattttcttcacaattaagcccttaattaaaagatcaatatattttgtttttccaaattataatttttgtaaaattcttaactctcaattgatgtttattttatagaatacttgaaggttgtagtcaaaagctctaaataattacagtttgagaaagaaattattttagtttttcatatgtccattattttaatattttttatgttttaaattattttattactttgggaaatttgcggcaaaagtcctcaaaaagttcagtttaatacagataagtccccagcctccagaaatagcggcaatagtcctcaaggtcatgttttttcatttgtccgttggtctccaagttagcagatccgttaaacccaattcaaatgccacgtatcgaaatattattggtcc

SEQ ID NO: 372334 - DNA, 543 bp, Cannabis indica
aaatcgctctttattcgacactcaaccgccaacacgatggtccaaactcgtagaggcctgtctgacctagcgaattcacagacgctggatccggcactataggacccagggagttcaagggtttcgcctgctgttaatcccggacagacgggaagcgtggtgaatggtggaacagctcctatcactggaatcgcgcctggtgtgcaagagactggaaataacagttccccacccaaccagggcatccataatacgactgttccgcctggaaccaacgcccaaacgaccatcagagacgcaaccgaattgcaaaatctctgtgacatgcttggactcatgcagggtcataacaaccctctgtatcatgattaggatgaactgcatgttgcagtaaatctcgcatttgacgaacaaagacgtatgtttgctggatggagagataaagagatggaggcattaagggctcaccatgcagagatcgaagatcgtagtcggcaagccaccgtgctaatacgaagagcctaccaaactgtaggtcagtaa

SEQ ID NO: 372335 - DNA, 524 bp, Cannabis indica
ttttttttgcaatcatcaagatctgtgtatagatatccatatttgggtattattgtgttatttgttttcagatatgagaaaagataattattgtggggaaaataaatttagggttttcaaatttgagttttgagactgagattttgtgtatatatttgtgtgtgtttatttgtttgttggatttgaatttgtttaaatttagtttaagtttggttttagtatttaatttttttgtgtgatggatttgaaaaataagttgtggtggtagtttcggcagtggtgggtggtggtgtttatgatggttatggatggtggtggtttcggtagtgctgggtggtgatgtttacggtggctacggataaaggtgatttcagttgtggtggtggtggtgtttacagtgactttggatggtggtggtggactgaagaagaagaataaaagaaaaatattaatatttttatttcaaaaaaatatgttatggttgaaaaaaaaatatatgtctttttttatttttaattttaatt

SEQ ID NO: 372336 - DNA, 538 bp, Cannabis indica
ttatttcctttccattccattccatttcattacctccaaccaaacgctaccttaattcctatactttctctctttctatttcttttattgtttatgaaaccttaattattaattttttatgttcattacctataatttaaatttagcagtaattatccattaaaaatgcctcacttgaatagtttcatctaaaactatgcttatcatttattttgaatatattagtgaagtttcaaatttgtaatgaaatgctatattacaatattttaaaatatttttttttacaaaaaaaaaaatagctttctctaatatattaagttgttaatggctaaattgaacacattcttttttttttttttttttgctaaaaacaacacaaaaagatttgatatacttattctaaatacaatattattattaagtatttttagtttattatttaatattaatatagttaactttaatttcttctatatcttacccaaaaaaaataaagttttcactactacaaaaacaccctttagaggcggtttttaag

SEQ ID NO: 372337 - DNA, 644 bp, Cannabis indica
tttataaaaatgtaaaaagtagaaagatgtgcaaaaataaaaacttatattttaagtcatttttgttggtgtaatcctgagacacagaagagatcatttgtctttttggtgagtggagatggcagaagcaagagcaacaggcatgagacagtcagaggcctaatttgctttgaagaaattgcagaatggctttgaggactccatcaccttcactagctctcctctccttcgaacaacacgatttcatcatatgggaaaacaacctcacctaatgttattcagatcgtttcatcaatcaaaacaaaagaaaaagaaaagtatatcatttgttatgaagcaattaataagtaagtattaatggggtttaacaagaccatacctcagcctgaccatctgtgatgctaagaacctgacaataagagtcatttttaaccaaataaatggttatgaatagcatattgttcattccccttgcattgcataccaaggcctccaattccatgttagccccatatcaggagacattaatgaagagacagcctcaaaagatggatgaggaattggagaaatggtttaaactcttatccaattaaacactgtaaacagatatatggttcaagacaagagtattggattgcatatct

SEQ ID NO: 372338 - DNA, 514 bp, Cannabis indica
ttcatcttgattcagggggtgtctcattttccccgggttgttcttcccgggccttttccagtctcctggttcgtgaaccatgaggtctgcctcatggtcttctcgctctaggttcaggttgggtctgagcattcgtcccctgcaccaccctggccgaggctgcctctcgttctagctcagtgtttcatcgttgcgcctcttccagacagcgtctcaggtgacggctttctgtctcataagctctttctcccacagattgggcaccttcacgattgagctcttcatccctcgtcctgggattctaaccattcccacgctgagttctctttgagcgcgttgtctgcgtactaggaccaacgtcaggttgagttctctggggacgtgtggttcgagcactaggaccatcctaaggttgaattctcttggaacgggtggtccttctggactgtggattggtagatctcctagagcccatgggctcttttctagaacgatggttagtttcctcatgtgg

SEQ ID NO: 372339 - DNA, 462 bp, Cannabis indica
tagaagcattttccttttggcttttctccgggattagcagcctttttctttttaactgttttcacagcttgaacaggcttcttgctattcttccacttcttcttgtagttgggtttcgaggcaaaggcaatgtttgcctcagctttagccgcaccattagaattcccaaaattaggagctttagctcctcctttctgtggtcctccaatcaaattttcaaatgtatgaaggttgttgattaactcatggaagtcaagctctctaagtatttagaagtgaaacgatgatttcctttaagcttggcttaatagagataatgttggattatagttttaccaggatctagatttactaccatgtatgttgtttcacatcctaaatatgaatttttgaaacaatgtaatttaaacacatataaagtttgagaaaccttacattggttgtagcggaattaaatgactc

SEQ ID NO: 372340 - DNA, 600 bp, Cannabis indica
atgacaatacactacatttatagttttccattagagatgttcttagtctctaattaatttttcattcattttccactaagattgtaggagtacgtgcaacgcacgtgccctacactagtctataatatatggctacaaagactcccctaccatcgggacaaaatcagtgtacttactatagaaataacctataaatatcaattgccatgacaattaaatactaatttaatttaaacatacgaatttgattaaatattatataatcaacctatttattatgtaaatgaaaaaaacaatcagaaattagtacaaaaggaaatatattattttaaatgcagtactcattatagaagggaaatttcattaattgaccctaataaaataccccatttcaaaatatataccctccactaatttatacaaattaattccactattactcatttctacccaaaatacccctcaaatttaattttcctattctctctctctttccgtctttccctctttcactctctctttctctctctgtcgtttgctattccctctctttccctctctctttctctctctgtcgtttacaactttcgaacgctgccc

SEQ ID NO: 372341 - DNA, 517 bp, Cannabis indica
aaataaaaaaaaattagaaaaaactgaaaatcgcttgcttttggcgtcggttgataaagctcctatggcgtcggttcatataaaccctttagcgtcgccctgatcagcgtcggtagcgaatttcgcgaaaaccgacgctgaaagggcttaaaaaccgcctctaaaggatgtttttgtagtagtgattagaagctgactcgtttataattcattacaaaaactatgtaccatgtatagattgatcatcccaaaaatgaatcgtacatgcatagcaagagatctatgttaatgtctatcaatattaaaagtgtattttatatttatatttataaaaacatagaatattactccatatatacttaattataattaattaattttgagatgaaagttactatattgttttcaataattataattaatacatttttggtgtcaaaatagaaattaatatagagaataacaccatctatatattctgaaattttgcgtcttccagcaggaattaatattgaag

SEQ ID NO: 372342 - DNA, 617 bp, Cannabis indica
taccctaaactagtagggaattaaccaactagaaacctgaaactaacacgaatcaacaagctgaatttttcgagattcccagctgcaaaaatcggttaacaagttttataggcacctgtaaaaccggttacccagttttcccaagaaaacaaacaaaaatttgaagcttcaccaaaacgattccaaactcaaccaaactttccagaccaacatattataccccaataaaccatttccaaacaataaaacaactacccaagcttagaattgaaaaacacaattaaagcttcaagttttagttctaaaactcaaaacttgataaacctactaacaaccataaaatcatgctcaaaacaacctatcaaaacataatttaactcctggaaacaatatcaaacaactacaaccataacagtagccaaaatcatcaattcatgcaagaaccccttttcttatacttcaagaaaacaaagaggaggatactagagacttacctagagcttgagaccacctaatccttgctgtaactagcttcaaatggaaaaaattcagaccaaaccctaacgttggttctagggatttagagagagagagagagagagagagtagttagtaag

SEQ ID NO: 372343 - DNA, 570 bp, Cannabis indica
tatgtggaatgtccttattgtcttttgactgacgtgactcttcacagtatagccgtcaatatacttaagtgatcattacttcgcagctgcagattggggtttgtgccgtcagactttattgtgtgtagcagtccaaacacgtttcctcccatgcggcattaaatccgaaattactgctcaggggaagtttgacgcctcgcggagatgctttgatgttaattaggcttccgggagcatacggggctccgtatgccttctccaggaggcatgtcccgaatgttgccttctttcataagacttagcaaatagttcatgtatcaggatgtttttatccacgtgtccctgtccggttggtccacgtatattgggcaaaatcaggggcaacatttacccccaagccttgtttatttgaaaaataaaacaaggcttgttcaagtgcctccggttgactcctcagtttcctggcacaagcctagagcgcgtgagggcacatttaatgatgacatttaatgcagcgattcgctttttgcagaggtgtctccggccgactcctcggtttcccggcacgag

SEQ ID NO: 372344 - DNA, 537 bp, Cannabis indica
gtaccattgcacctattttaatgaggtgcattatagaagcacctcttagttcattgagtaaaaataacacaggttacatggttacccctatggttaccataaggtaccagattgattttatcctatttttttaatttttcttcaatttttccacaaaataacttttttgaaaaaaaaaagaagccatatttttgtacaaaaagtataaaaaaccatataagatgtaagtaatttacaataacacagtaaatgtaaatactaaggcacgttacagtactttttaaattacagtgctatctttgctaatcaaagatttttctcgaaaaacgtgtcaaattaaaacttttatcataaatattaaacttaagggtaaatggcggcaaaaccccccaatactttggttttagtttcactaaacccccacaacccaaatttctgcgggtaaacccccaaaaccactatctgttagcaaaacacactccgttgaaatttagctgttaactgccagattggattggagcgaggacacgtggcaca

SEQ ID NO: 372345 - DNA, 1179 bp, Cannabis indica
aatatatctactcctatatatttatatgcacaaaaaacacacaagagatataacttattaaaatttgaagtgcttatatatataactaattatttattttatttaatatcaattataattttcattatataggtggattaataggaggcagcaggcatgatagtatcaaataataataataagggaagcccaaaaaaacaagaagtgagtagagagaataaagatcagaagatcataatgagtagtagtagtggtagtaggccgacaagcccgaggttgaagctgtcaaaacacttgaagagaatctacccaattgggcttcagaaaagctcatcttctctttccctctcctcatccttgtccttgtctctatcggaagacaactccaacgacagctcttctcttaatgattttcggttctcccattgatcacaagatttctttggctctccggctcctcgctcctccttatggcccggagaagagtaattagttccatctcccaaaaaatgttcatgaacataatcatgctgatatggacccatccgagtggaagaggtgcaactggattcaagaacagcggtatatataattactatatatatttctagttactattttaatgatgatgatgatgatatgtgcatgttttactatgaataaactctcacatacatatcatggttaattatgccccttattctttttttctatatttaacttattgataaaattactctttaatttttgttgtcgtggatatgcatattgatgagctctttttgtctaagtaaaaacaaaaatagtaagtcattattataaattaggaaaaatgttattaaatatataaattacatatatatatatatgtttagcaacatgtttatcttttaagtaatgctagccacagtacactttttacattgttttttttggtctaaataaaaaggcacccattgtatattcctatataaacagctcataattaactaactaattaacaaaactcatatatttaggttgcctacctagttcattttaatttatatatattttgataattatggttataattaaatatttaactatgatagttatatttatttttagtcattgtattattattaaaggttgatattaaattaaaaattaattaaaaataattaataaattatttgt

SEQ ID NO: 372346 - DNA, 654 bp, Cannabis indica
gtaaactacggaatacttaccacagtcaaggaatggctgagatcctgaacttgaaagacagagttcaaggatgcacaagcagcgaaccgtttaggcgcgcaccgggttagctgggagatgaactcaccagtcatctccgcggcaaaaggagccaaggtaggcccgaggaaacaattgaaccagtccgtcatggggtccaggtttagatctcacgggttctggtagttctaatcattaagggtattttgcatttcatctcgcaaaaccctcctcaaggcctccacctcagcatgcccccgggagtactcatccatggcgtaattgtgcttggctatccgaagctcctgcctcgcctcatctccgggaaccggagtcagcactatgttgggaggcactgtaaattcctccgcctcgggagggatcccggaatcatggctcgaggccggagtgtccgctctccgcggccgcttagatgtctcctcagctaccatcttgcctttgcgtttgcggatcagagcaacctcttgctcttcttcactttcttcaacttcctcaggaagagcccattgctcttcttgaccttctttagcttcctcaggaagtacctcctcctcatccactaagtcaatagtgtctggaagggcactggaagaa

SEQ ID NO: 372347 - DNA, 643 bp, Cannabis indica
attttcatataatatttttgattgattaaataaatattacaaaatttacaagtttattactaatgagataatgtttaatctagtggaggattgttatattatttataaataatataatatatagattaaatatatgtaataaattaataatatgtaacatatgacaatatatattagttgtcattatttcataacatatgggagagttacttgatactatgagtaactttcataattatcaccaatattaagtgtgcaaaaaggtattacatatcttaatttgaaattcttaatgctataggagttctagtgtgtgcataatttacttttgagtccataacatccatgggattatgaatttgaatttcaaatggtgatatcttaaacattatataaagaagtctaaggtactcatattgagaagaattaagttttttatcaaaaaaatatattgctaaaaaatccaaaaaggcttgataattcccaaaagctatttctatatgagagttcccttagtgctaagagataggaaaaataagcttttggacaaaggtgtaataccttgttcaagttatgatgatcctcactaatctacactcaaggttgtgagtgagtgatcttattttcttcttcatattatata

SEQ ID NO: 372348 - DNA, 274 bp, Cannabis indica
tattatttatttggtgcttatctaatttttgttggatgactgtaataattttgagtctgttagatgattgtaaactttgtgagtggttaagaactactatggctatgactcgcctgtatcagtaattatttgttttggttttcttaagtctaatctgtccatgatgataattctaaggcttgtttctcaaaacattcgcagtggccgccaaagagctttcgccttcgccaggcttgagagctaatgcagctttatccttccttggatgtctgag

SEQ ID NO: 372349 - DNA, 722 bp, Cannabis indica
aataataaataaataaataagcaaaaattgaatggaataacagagttgaagcatgaagtttgagcaataatttataagataagcttatcactaagctcatttgaaaagactcttcctttatttcccatccacttattattaaaacatctttattaattcaatttttgttataaaaatgaaattttgaaaaataccatattttcacttcaataattttgatgagtgccaaaatacctaatatagaatatagtaactaaaaaaaaaaaaaaacaaactaccattgaaaaaagctttatatatatatatcttcggattgtggccttaaagcttatcatatatacagttgtgtcgtttttagggaaaccaaatatgataaatatatataaatatatatataatctcccacgtaaagactcaccttcactttacaactataaatttactgagttttacttattcgaaacagtcaatctgtgccgtggtccgtggaccatattgggaggtcaaaggattcaggtagcactaaaaaaaatatgaactgaagtaagacatgatatgttgctgtaaattgatatgacatgatataaaaaaataaacttaaatgtaatacgatacggtattatgaattggtactagggctgaacattttgaacgggtttgacccgaacccgagcaacccgcccgaacccgaactagtgaacccgcaaaaaaaaatttaaaaa

SEQ ID NO: 372350 - DNA, 542 bp, Cannabis indica
atgaaaaatcgaagaaaatgaaaaaaaattgtaagtggtacagacagtatgcaaatactgtccacacacacgaagaggggggcttgaccgagtggacacggcgcaggaggctgcaagcagcctctccacgcacctagtggtcttcagacatcccagcacgtgcagaccgaggtttcttggtcatgtgcttgtctgagcgcgtgcagccgagaaaaatagggccatctacgcgcgtgaatggggtgatgacaccatgatttttttcgattatcaaaaattcataactatttcaaataaaattgaaattaagttctgtaaaaaaattgaattgcttaattttttccaaagtatctaataaaataatttcagaattgaaaattcaattatttttcacaaaatctcacaaacatcaatcaatcatcatataacacacagatcaacatgaaaccatccaaatcacacacaaatcgttttaagttcaaatttcttgcaagaaaatcaattaccatggatctgaactagttgttagaatttattttacc

SEQ ID NO: 372351 - DNA, 553 bp, Cannabis indica
gtttagttattttgtgttacttgtttttattcattatgttatagaaccatttttattttaattataaacggtttgagttatttcgtgttatttatttttattcattataacactgttatagaaccaattctattttaattataattgctttgagttattttgtgttatttgttttaattcataatgttatagaactagatctactttaattataactggtttgagttattttgtgttatttatttttattcattattttgtagaaccagttttattttaatttagatctgagacacctaactccgatgacttttttaacgacgatgaaaactccggtgacttttctgacgatgatgacaactctagtgacttttctggtgacttggcaaattttcctatgacggtgacttttccggcagtaaaaacttttccaacgacttttcggtgataattataattagaagttttatcaaatttatttatggttttttttacttcccatatttaaacttcaattattttttaattttatatctttttgcattatttattt

SEQ ID NO: 372352 - DNA, 550 bp, Cannabis indica
aaaaataatatttattttaatccaagctaaataagagattaatgagaattaaccaattattatttattgacaaaataatagtaaatcttatttgtggtaaaattgaaaaatcaatttcagactttaaaatatgacccacacgtgtatagtgaaatataaagatccatgataattttgtttgattattttattattaaaataaatcaaatcaaattaattaattatcttttaattgttgaattaaatatattactagataatttattaattaaaagataataataaaataaaggatataactgatttctattatcaagtatatgatatttatatttgaattataaattatgaatttgatttaaattaaatattatattttattttaaaggattaaataaagagtttgtttataaccttgtatctatgttacatatatcagaataacagacaaccaatagaagtgaattgagggatactttcagagaaaaattagggttgaaaaataatatatttttttcactttctctcctcctaatatctctctctctct

SEQ ID NO: 372353 - DNA, 627 bp, Cannabis indica
cccctagctcgatcagtgttggacgacccaacagtatgttgtaagccgaaggcaagtcgacaaccaagaagtcttgcataacagtagcagttaaaggtgcctcgcctacagttaatgcgagctcgattatgccaaggctagcaatgctatccccggtgaatccgcaaagattcaccatacaaggccttaacttagccttttcgagccccattttctttagagtctccttataaatgatatttactgagcttccattgtctattaacactctcttgatcctcttattggcgagtcgaatagttatgaccagcggatcgacgtgaggatatctcacgttcttctcgtcttcctctgtgaatgtaatgggaggttcctcgattttcaccttcttggaaggttctggggcaaagaccgactgcttgttctggatctccttcacgtatctcttctaagcgttattgttttccctacaatttgcagtccttctgaaataaccaagatgtcctctccttccacaggaataggttgtaacccctggttatttgggttatcaggctgacggggcttgctgtatccctggccttgtcttctcacatacagtttaaaatggcctcgagcgataagact

SEQ ID NO: 372354 - DNA, 492 bp, Cannabis indica
aaatatagggtctattttatcatttaacaaaataaaagatctaattggtaacttttacaaaacacagaatccaaaatagtattaaatgaatattatttttgaaaatttaattaaataaatataacacatataagtgaaagaataaaaaaaaaaaatactagttggtggtttaggaaattttatctcattagtttttaatgttttaaaaaatatacgagtatatgtgcagttccatttcattcagaccacacaaatgtaaataacatgttaaaatcacatgctgccattatattttgagttggaataccctttctaccaatgaatagaatttgtttgtccatcggtagcgatgcaaaaatataagtctcatcaatagctccaagacaatcttaaagtataatagtacattaaataaaatttgaaaaacaaaataatttataaatttaggtgccgtttggtaaaaaacttttgttttttaattttttaatcaca

SEQ ID NO: 372355 - DNA, 507 bp, Cannabis indica
catattaaaaagaaaaaaaaaatgcgtgcataaagttggttgaatcatgttttcagcatgataaattatttaaaagttcttaatttcaaaaaattaaaagagaagaagttcttacaaatttatgtggttttttcatataaaaataatatatatattttttttttgggttgcgattttgaataaatgatagaaaagacggcaactccttccaacatagcattatttgatgggtatttataaggataaataccatttttgatcttgagttttgtaaaagttactaaatggattttctgttttgttaaatgacaaaatagactttatattttctaaaatgataaaaataaaaccttagaacttaatttttaactaattttatttttgtaaaaaaaaacaaatttaaagataatttttaactacgaacagatatagaacatgtaaccagttttgttataacatctttagattagattattattaagttttattttgtacaaaaaaacagtt

SEQ ID NO: 372356 - DNA, 1011 bp, Cannabis indica
gaagtcattaagggtagacactgttatttgtgagaagcagcttggcttgaattgtctagtttagttaatatccccttagtgagtttaatgttgttaccttcaaccacgattactttttcaccaggaaacttggatttaaaattatggctacaaaggctcgcaaatttaagaccccatagaaccctactgttacctttgaggttaagttgatagagtccagggtcaggttaattgggctttatgttggggatgttctaagatcgtgtgacattaggaatgagaaaggatgtcgtattcgataagtggctcaaagagaattcaattgttacccacctaaacgtctgcttcaagataaaggttgtagcaccagcgagcccactagaattggtgcatggagcgttgatcacataagggttggagttgttctccccctcacagtttacttcaaagaattctacaactaccttggtattgctccatttcaactcgcacccaattcttataggatccttgcctttttgaaatctctctaccatattctgaagtgggagtgtccaacacccctggaattttttatttttattccgtcaaaccctatcttgtgaggaagcatggagaaatgctaggctgcgtattttggagaatgtaaaagaccactcaagttatttcgtgacaataattcagcaatgctatattccaataacaattcgagctcatccaagtgaaagtatattgacataaagttcctagttgtgaaagaaagagtacaaagtggacaaatatccacgagcacattggggcaaactccatgatagcggatccactcacaaaaagattaccacacaaggtctttcatgggcacactgatcatatgggtgttttcttgtttgaggatatcatgatttagtaagagtttgtattttgtttgcttttatgtttgtataaggcatttatgtatttggttattttcttgatcataaatgaagtttttagtttatttcactctctttc

SEQ ID NO: 372357 - DNA, 749 bp, Cannabis indica
attttttaataaaaaaaaaaactgaaaagaaatggaaaataaaaggaaaaagaagaaaaaaagaaagggaaatgatgaatggttgattgattgatagtaggattgattgatagtggtcactcacatgtttgatgcatgggaagagtgtgcatgtggtaaaatagtaaataaaaaaaatatgaaggatataaatgtttagtttaccgtgtagtgatatttggataataaagttatcattttatattttgatgtaaaaattttgttattttataaataaatattatatatttatatagaaataccaatatttattagtataaatagaatattctgtattttttttttgaatgtaaatagaatattctaattttaaaaaaacttcacactaaaataaaatctcaactttaaaaccaccgcatataattaatttttagtatattatacatttacacatatcattaaaaatgaaatcacatataattaatttttagttatattttagttgattaatctcctaaattttattgcttcatgcatgtttaagtgatttgaatatttctattttaaaagacttagctctaatagttgaacataataatttagtttcgatacaatggtgacatatgctgaggaaaaaaaacttcaaaagataagttttcttgttaaaataataattgaatttgatcttaattaaattaacatatatcgtgtatgagtgctaatccacattctatatctatttatttttg

SEQ ID NO: 372358 - DNA, 558 bp, Cannabis indica
atctcggaaatgtgattagtctatagtgcaagaagagggtaagcaccagtagcctatttactacgcaattaaaaggttactaggggcagaatctaggtatccccctctagaaaaattcgcgttattcctagtccacgtgtctcacaagctacgaccatacttctaggctcaccccataaaagtgttaaccgatcagcccttgaaacaagttttatcaaaaccagatgcttctggaagtttgataaaatggtcgattaacttggggcagtttgacataacataccatcctcgaacatccattaggggttaagctttggctgacttcttgatggaaggtgtactgttagaagaaatcccatctaatcagcgagatgcggaaacctgaaagttatatgtggatggtgcttccaacgagcaaggttcgggtgtaggggtgatattaatatcgccggtaggctttaagtttcactatgctctgagattctaatgtgacgcatctaataatgaggctaagtatgatgccttgatcgccggcttaaagatagtagaggccttaaa

SEQ ID NO: 372359 - DNA, 483 bp, Cannabis indica
aaactttcgatatctaccacatcactgcccctcgaactttgacatgtactaatcatagccctggactttcatccatgttagtactttttactaaattaggaaaaaaatccttaaatccaacaatctcaatagttcaggggcatttttaacgactttaaaagtttaggggcatgatttgatacatgtcaaaattcaggggcaaaaaatcctaattagctttcaaaacaagatagctagagagaatgaggggaacaaaaaatgaaagaaatatttttggtaaaatgtgaattagggttgtacacaaatttttgtaaactgcccaatccgaacaaccagattaaatcaaactgagataaactgatgaaaaatgcaaactaaaaaacctgacaaaaatataactcgcctaatctttttatattgggcgggttgaaaataataccaacccacgattaagaggatttttctatatatatatatatatat

SEQ ID NO: 372360 - DNA, 888 bp, Cannabis indica
cactcttagaatcttacccctcaaagcaggtttctcatcttctaaatccacttttaccaccttgcctgcaagtttgcctaagaggttaccattctctgtggaaaagtactcttgtagtaggttatggatttgcatccatatcctcaaatgatgaaataccaccggctcagtcgtcctcggagcccaaaccttcaacacaagattatacccacgaaaacaccatggtccattctgaaggacccaatctctgtcttcagcagcatcaaacccgaactcatagcaattagaagtctttgcattctcagccaaggccataacagtgaccttcttcttccagtgtttaaccacaaaatcagccaaaactccttcatccacgaacattggagccaccagtttgccatataagcacaaagtggacagggctttcagagaagatgcacatggggccaatgaaacagtggtctcaaggcacgtaaaacgtttgcctttaagaagtgggttggtagcaataactggttccataactatccgacaataaatgacaccgagaaaagagagaatcaaccccaaagtcaaccccacaccacagaaaacagtagagaaaaagacacaagaaaaggagacacgagaggacaagccacgcaccaaagatactacccactcacacaaagcctcaaccaactagaacaggacacagaaaaaggataaagagactctcacaaactagggcagacagagacaaagggagagaacaaaaggaataaatgccaacaaaggaactacaaagaaaaagaaccacagaagaaaagacacaacaagaggggagagggtagaagattcacattaagaaatgcaaaagacaccaaggaagaagggatgaaaatttag

SEQ ID NO: 372361 - DNA, 544 bp, Cannabis indica
ctctgccttaacacgcaaatgaaaagcaaaagcgaaatgtaccaggaaaacttacatgaaggtaatgaactagaagttgacgatggccgacggtagaatgcagactggcagcggcggagaaacagcagcaagaaatctatggtttctaaaattttctcaaaggggtttcttgggtcgaaatagcgaagtagcgaaagtaacccaatgaagaaaaaatgctggcttttatagaccagaaagggtgcaaggcagctgtgatcaggcaccatcgcacggtgggaatcgtaatcgatttgcattctacgaatgcaacgggtgagataaatgggtgccagggcggttgaaaacgtttgagtacttttctgacactcgaattaaatgcatcggtttctcaatagacgtgaagcgaatcgttacctgcaaaaagaataaatattaatgatgaccatcataaatgcagcccacgcgcttaaggcacgtgccgttataccaacaagctagccggaggcatcaagcaagcctcatttacccttcactaaacgag

SEQ ID NO: 372362 - DNA, 530 bp, Cannabis indica
attctaacattaatcaacaacatccaatcaaagctccaaagcttgagcaaaatcaacaaaattaaacctcacaccttgaatcatcaaatcccaaaacacaaactcaagaacaacactaaaattagacctgaaaactcaatcaataactcgtaaattctgacctaaactcacattccatgctcaataaacatatatcacaactaaattatgcttcaactcacacaagaacactaacacgcaacatcacaatatcatcaatttattccatgcttttctaaccaacaatatcagcaaccacaaaaaaaatcaaaagctgtaaaaactacctcaatttccaattccaagctatgcataattaattccccaagaactaagctccaaccaagcaatctctcacaaattgaaaaagatgaaattcaagagagggtttgagagagagaggggttggggaggaaggaaacaaaggccagaaaattcatttgttttcctcaaaaatcatcttttattaaagtaaatcaataaaggtcaaa

SEQ ID NO: 372363 - DNA, 889 bp, Cannabis indica
gatacaaaaaggggtacgaaaaaactcttatacaagaggccctaaaaaatatagtcagaaatctgaataagattgacttgtggattatgcagaattttaactacaaaaccacgtaaaaaacccggtgttcatattttatttttctatagtttttattatttctgtgttgaatcacaatcgtgagactcaaatttggttaacgaaaatttgtgttaacagtttggtgctttcattgagagcctctgtgaaaaagctcagaaaaaagcctcctgacataaaagtgatggatgacaccaccagtaatagtcctcaagaaggaatcaatcatcatcccgaaaaagaaccattgagtcctgagggatctggtaaatcatcgcatgaacagactgcaagccccaagaagacccagtattagggcccctagcttgacggaccttggaagagcaacaatcggtcactccctaatcaggttgataaggatggcgcttatgacccaccagatacatatcgatcatggtattagaaaattgccatcttaggcgtcgattggaggaagcgaactggcgtaatgccgagttggagcatgaaatagctgccgtaaaggccacgctgggagattgtaaccaaaaacaacctgaccttgagaaaaaagatttacgaggcaaacctcgtggctcacaagtcaaggggcaggagataacccagggatatgctcagagctctcaggagatgcaacctgaggaaactgaggaaaacctaagggtacagcctgggatacgtagaacatcgaacgaaaatcgccaacccactattcaggcccataagaatgaaactcgtgcaaacccttgtaggaagaaaaatgtaacgccctaatgctaaggcacgctac

SEQ ID NO: 372364 - DNA, 647 bp, Cannabis indica
aaaatatccattcaacatgctccaacccaccaaataattacacccataccatatctacctcaaaaatactcattcattatgtctatataaccggttctattttagttataaccggtttgagttattttgtgttatttgtttttattaattataacattattataaaactggttcattataacactgttatagaaccaattctattttaattataacaagtttaagttattttgtattatttatttttattcactatgttaaagaaccagttatattttaattataaccggtttgcgttattttgtggtatttatttttattcattatgttatagaaccagttctatttttaaattataaccagtttctgagttattctgtgttatttgtttttagtcattttgttgtggaaccgagtctattttaatttatgtcatctaatttttgatttaataaattcaaaaattaattcttgaattatttattttagaaactagttttttatttagttatttcgagaactgattttttatttagctaacttaaggaaccagttttttatgattttgttttatttaactagtttttgtgtatgagtttttaccttagttgatttatgaaactaatttttttttctcaaatttttaa

SEQ ID NO: 372365 - DNA, 799 bp, Cannabis indica
attgatatattgatttttacaaaaatgcacatataaaactcatttagcaactaacagagaaacttaaattgtaaccaaaatttacatagcaacccacataaaaactaccggagcaacccaaatagtaaattaaaaaaaaaagttaaaaaatgatatataaagtaatctctataattataaatgttggtcgattaaataattattatataaaaattaagatttataatatcaaactaatttaaatttaataattatgaataattatcaaataaaatatagtttaaatatatttattaaatagacttacaaattgtcataattaacaaataaaagtttatctctattttattctagactcagaattacacttcttattttataaaatactctatatacataatatagatatgcaataaattatttattatttcaatcaaattaatcatgatcctttatagacattctacaatgagtatagactaaaattactattttaaccctcaatgaagtttaactgcatcagttggattaaaattgagtgagttatgatttttttactgaaggcaatacatgacccaatgcccaagttggcatcccagtgtccaggttgacatacgaggtcaacctggatgatgtgtaagtgtaaagatatccaaggggtacactttaagatgcctaagtgatattttggcatcacttagtcagattccgtgttctgtcgaagctggtcatcaattcttggagatgttcttgtcttgtggaaatgagagactcaaaactcttcattttcgagtgagcc

SEQ ID NO: 372366 - DNA, 594 bp, Cannabis indica
aaatttcagggaaagagtgtgagattctggttgaaagaatgacagctagaataaggacgtggagttcaaggaacttatcttttgcgggaagaatcacattaattaactctgtgcttattgcaatacaagcatattggagtcagattgtgattatgccaaaaagaattttgaaatccattgaagatgtttgcagggcttttttgtggaaagggcaggctgttttccatggagcaggggctgtttcttgggacaatatttgtcaaactaaaacttcaggtggattgggaatcaaaaaactagagctatggaacaaggctgcaatgtccaagtacatttgggctattgcaaataaccaagaaagcttatggcttagatgggtgaatagtgtatacataagagatcaagattggtggggttacaacgcttctatacactctagttggtattggaagaagttggttaacctcaagaattgcctcagttctgtcactgatgttgctgagtttcaaagctgcaaatataccatagctgctgggtataaaatgttcagcaacccacaaccaaagaaaccttggtgtaatgaggtatgggctc

SEQ ID NO: 372367 - DNA, 580 bp, Cannabis indica
gctgaaaggaaaacatattgtgcctactgataatgaaaggaatagtttgttggtccttactggattggagtttattggtcgagaacaatcagaagatgaatttgatgatattccattgtcgaagtttaatgttgatagagttgaatcttctggtgtacagaagaagtttactggtgggtttgatgtcgatggtgtgatgcgtaagatgaaggattttatttctaggcaaaagaagactgatgagtctattgaagtattgaataaggtgttggagggtagattcaaggagttgcagttaagtcttcagtcgtatattgactcaaagatcagtgaaggcttggttttttttttatggaattgaagtttaatgagttgaaggaagctattgaaaatgcaaaaatttctaaagatggaaatgatagtcctgatgagagcgatggcaaggttggttttttgaatgtgttcatttatttttagtttattttatgttctttgtttatatatgtttttttgttattttttttttcaagaatgatgatttaaatgatgttgaagtgattggtgtgaaaaatcaagatgc

SEQ ID NO: 372368 - DNA, 893 bp, Cannabis indica
gtcttgtccattgttgttccaaaccagaaatgtaaacaactacttcctttttgtgatgcctgtcaattaggcaaattacaccatttttcctttaaaccttctatgaataatactacaatgccttttgaatgtgaaggctacaaatattacttaagatttgttgatgattttaccaagtttgtatggttttttcccataaaaaccaaatctgaaaccaccaatctgtttttacagtttaatgcctttgttgaaaggcactttcaaaccaaaataaaaagtattcaaattgatattggcaaagaatatgaacccctataccaaaccctcaaaaacatgggcattttaaaaagaaactcttgtccccatactcaccaacaacaagggagagttgaaaggaaacataggcatgttgtcgacatgggccttaccctccttgcccaagccaacatgcccttaaccttttggtgggaagcctttacttctgctgcctatctcataaataggcttcctacaccaacaaacaacctactctctccctatgaaaagttgtttcaatacaaaccagattataacatgcttaaagtgtttggttgctcttgttttcccttactaagaccatatgaaaaccacaaagtgtcctttaggtcctccaagtgcttgtttataggatatagcatctcttctaaagggtatcgttgtctacatccaagtggtaggatatatgttgcttgaagtgtcactttcttgagtgatagagtgagtgcccacacacatcaagtggtatctcaatcatagtctgaaagattgtgaagaatccaaactgaagagaaggacattcgggttcagatcttggtgatactctgcgacagacaagatacaagggttagagatct

SEQ ID NO: 372369 - DNA, 573 bp, Cannabis indica
ataacttctatgtcatgatattgtgcttcttgtttctaagttctttttttttgttttttttttttttttttgtaggtaaactgatttataacattaatgaagaaaagttaggttacaaaatcagatgaaggagcaattgaaactattacaattccaaactaaatctctatccgttcctagagcctttttagcaagagtgtgtgcaattacattgttttcttgtggaatgtaacaaatcttagcactaggaaaagaagataaagattcattgattttcccaatcatgtctgataataaagatctatccttccagtgattctttattttatttactaaagccaagcagtctgtatgtatggaatgcaaaggaagtttaacagcattgcaccattggagagcttgaagaagagcatgagcctcagctagaaatggagaaagagcacatatttttgaagaacatatagcagatgtagtctgacccttccaatcctaaacaacagccccaaatcccattgttgaattcgacatagaaagggttgcatcagtgtaaagagtataactgcctaatggtgg

SEQ ID NO: 372370 - DNA, 677 bp, Cannabis indica
aaacacctttgaacactttgcaaatttcccagtccaccttcgttcactactgtcaatctaccttatctttgtttgatatgcagcagaacccccagtctcaacacttcactgtaagtttctcgcatcccgtgctttactattaatgtacatggcatgctttacttatctgtttgttgtttttctaggtttgatatttgaagtttttgggaaggcattcttttgggtttttcacgtaacaggtctagattcaccatttctggtgttagggctgctcttgtcacgtatttgctgttatttttacaaaggactatacgccttttgtgtactggcctttctagggcatagagaagactttgtttttctcgattttctgccctttctttttcttttaagcacaatgttgtcttctgcgagtttattgcacccgacttttgtccaggaaatccttctagggttttctgattgacagatgtccggagggggcccctttacagcggttaggggacccccattccctttttcttggtttagggttgggcctaactgctggaatcttaactcttttttcagaatcaaaacatgtctgcatccggttcaaggtcgtcgaagaagagcggtaagcgtgtggctacccttgaagatgtctcactgggtcgtgttgcccaggaggggtataa

SEQ ID NO: 372371 - DNA, 511 bp, Cannabis indica
atcaaattttaaaataagataactaattaagcccaaaaatagatttttacctattttcaagttcaaatttcactaatatcttaaattaattttaaaaaataattaatttaattctaataattagatttgaaatatgaaaaataaaaatcaaaatacaaaattacacaaaaatttcaaattaatgaaaaagcatgaaaaaatgaagaaaaggaaaaaaaaattaggtttgatgcagatggtatgcagagcataccatccgcgcgcgcacactaaggggactggctgagaaacctcagccaaggaggctgcatgcagcctgtcccgcacgcgcatggccccatcttcagacaaatcaggtccttcagaccgagaaaactcaaacgggaccttgtccgaggcacgtgtgaccgaccgagtgaacactcggatccgagcgcgcatggggtgacaccacccctatccttttttaaaaactcaaaaaaatcataactaagtcaaattaaatcgaaat

SEQ ID NO: 372372 - DNA, 520 bp, Cannabis indica
tgtctctctccttctctcttgttcggttgtgcctaagaaccaggaagaatttagctttcaaatcttaaattctagggtttgtaacaagatttcaagaggtgtgatcttaaggtaagctttaaccctaatttttctttaattttagtatgttttagttgggttagacatgcatatttgtgttttagttgctgtttaggttagatatgttttgctgtaaatttttgaggttattttgaggttgtttaagcttattgggttgtatttaggtgtttttttgtggatttcaccaagtttgagctcatgaactcaaacttgattcaacaatggtgattttagaatttttgagtgttctgaggtttcattgcttcgaatggtttattatggcatgtataggtgttttggacctttatggaagttttggggaagttttaggtcgatttggagagtttttggttttttgtagtgaaaaaccacacgccgtttctatagaaatggcctaccatttttactagtgtagaac

SEQ ID NO: 372373 - DNA, 551 bp, Cannabis indica
ttgctactggaaaaatacgcactaccggagaccacctcctctgtacaaggatagctcccggagggaccccaacaaaagatgcgagtatcataacgacattgggcacagcaccaatgaatgcaaaaatctcaaagatgagatcgaaaacctaatccaattggggcacctctacaaatggattaagaatcggctccctcacctcaatctaggtcaggcgacaggagctttgccacagggaacaccagggggtgcaacaggagtattggctccagttgctcccaccggagatgcccagcatatccctggcctgccacccagacctaatgggagagtggccatgatctcacgaggaccccataacggtggaactacccgcaaagaattgaagcggtatgcgggggccatgaagaacaatgaggtttgggaggttactcaactcctagctcaaaggccccgactgatggatcaacccataacgttcacggaagaagacgccaagacggtgcgttttcctcaccacgacccgctggtcatagagacccccatcgcca

SEQ ID NO: 372374 - DNA, 472 bp, Cannabis indica
gaattaaaacgatgatatgtgttatttggatggcttcatgtggtttatgtgttatttgatgaatgtatgtgctgtacagaatttttttcccatgaaaaattatttttttttaatttttagaaaattattttatttagtattccttagtaaaaaattaaacaattttcttttttcgaaactcgattccaataaaattgcaaaagttattaatttttgaaatttgggttccatggctgtcgagtgggtgcatcgagtgcactaggcactcgaaaaaaccaagcacacgcgcgcggaaaacagaggatgctgcctgtctgaaggcgtgtcacgcccttgtcttcagacacgagatgctgcaatctgcccaaacgaagcctgcatccgccgagctatctcgcacgttccctccattccgcgggcgtaatgggattttgcagtctcctgggctgctgcatgcagcctgtctcctggg

SEQ ID NO: 372375 - DNA, 1377 bp, Cannabis indica
attttttatctcttttgtacttttttttatatatataaattctcttttttatagtttacctaatgcaataattaatatagattaacaaataatgatgtaagactaaccaccccaaaaattacaaactcttaaaattttcatttaatacaagaattacttaattataaaaataagtaagaaaaaaaaattgttttcgtatcttataaaacaaaattaattataatattattatagaaacttaaatttctaaaatttaaactaaaaaattataagaaaaatatgttattacaatataggctaaataattaattataattaatatttttttatattgataaattattatgtattttataatatatgttatgccttttcaaaaaaatatatatattttagaatggaaatatttgttgtagtgaggtttaaaggtgtaattaagtttttaaattaccataattaaattgtaaagtattaatgtattaatgtatatatggaatgaggacaaaaatagaaagaatggatataaaaaatgacttccatgtcatcaggtaataggttaaaataaaaaatatttaatttaaaattttaattaatagctataaatatcaaccattagatttgatccaatggctaataatagaatatccattcataggtaatacccattaagagcatgcccatatatatatatatattagtaatgggtgactactcaatggttacatttttattgtaaccatgattgtttcatttttgttgacctttaatagcaagttaccaacatgtaaaaattcttgttttagaataaatttaaccatgattaaccattgcgtaaaataattaatttttaatttcaatattttaataagatgtttcttggtaattaatattaataatcttatttttatattttaagtctctattgaaattttttttaacagttaaaccattaattataatatttacaataaaactctattattttataaaaattaaatttttacctattccaaaatatatttttgaataattaatcactaagtttgagaatagtgcgaaatactagaatatgagaattcttatacatcatatctaaactccaatttcatctgtatatcttcaagttgcatgttttagacataacttgaaaacaaccaacaacttcatatatgtatatttttatcaataacacatattcgagatcaataaacaataaattatatactagctttgctgacaatacataatcaaaatcaataattagtaataatcaataacatcggttgttaagtttatcaagaacacatgttcaagattcataaccaataataattaataacttttaaatcttcaataatacatattcaagatcaataa

SEQ ID NO: 372376 - DNA, 615 bp, Cannabis indica
ttattttatttaaattaaattgtaaaattagaaaaatgatatttatttatctttttttttatttaatatttaattttattttaataacatgaaatttgaaaagctgttagcatcattttgaaattgatatttaggttagttgaaaacataagttttttcaaatttaatagatttaatttttgaaattaattattcaatttaattttgaaattttcgaaaataatattttaatatttaaatatttttgaaattaattaaattaaataaatcctatatctaactatccaatgtattacatgtgtgtgttttatattgtttattattaaaacaagttttataaaacctattattgtttgatctaaatttccatggttaacttattgacagatataatgatctgatttaaactaatggttcaattgtcaataggtcaaataaataatttgtaacaggtaaattttacaatattctttcatttgtgtataaacctagtaacatgataggatccgcccacatcagtgtgcctatgtcaacctatatgtttgctttgggcttagatgcatataggtagcccatttaattttttgtaattaaaatggactaggttgctaaata

SEQ ID NO: 372377 - DNA, 896 bp, Cannabis indica
actctcatggtggtttttttattttgtgcatgtggtagtgttttgttgccttggatatgttctctaggttgcataaaataggtctggaaagtttggtttgaattggggttgatttggttgagttgtggaatttttggtcattcttgcgctgaaccggaattccggttggtccccaggaaaccccatagaatcagaattctggtaggggaaccgggttatcggttggggcagttttgggaaccctagttttttcccatttttgagttatttagggtattgccatgtgatatatcgatagggaaacttttagtttcaagtttaagtccccagaaagtgatttagcgtgtcacttaccagtgctgtgattgaagtgatttaggagcctgtaattcgtcgagcagttgttctactcagtttggccggcacacctgaattcggaatcaaggtaagattagtataatgtcattcatatgtttatacatgtttagcatacatgttagttgccgtcagaataacatatcagatatatgttaggcaaatctatagccatcagattagcatatcagggcaacagtgaggtatacatagagttgcaccgagatgccatcagatatatgctaggctatcagatagtatgagttaactgttcacatcagtacgattagagtattgagtataggctgggttcgtggttggtcatactttgtcaagaacgttcctgatttagttaaggttatggttagtcgtatgggggcctgattataattcgggatattagtatgtttattatgttatgcttttcttactgagtctgtcgactcacagtgttattgctatgtgtaggtaagggcaaagctaaagttgaggagccgtgagagcgagcagatgaagattgt

SEQ ID NO: 372378 - DNA, 713 bp, Cannabis indica
aataaaatagaaactaattaaatattattttaaaaaatatatcacaaaatatataaaaataataattaaatatatgaagcatgctaataaaatcatatacatatattaaaatatttatattatgtaaacaaaattatatactactattatacatagcaaaataatttgaataataatatactatataccaaaataaaatatactttcataatgtagatagcacttcagaatagattgaggacaagagacaggctactgggatttggaaccattgatgattttgtctgcttattgtgtaacagccaagaaatctaattcacacctatttattttattgttctttctcactttcctacctactgaaaatcaaagaatggctgtattggtcaacattttcaaattcaacaacaaaattggtgtggtgaatgaaagatcaaagtacagtaaatttaagaaaaaagtgttagacatttatatgtataaactgaaatatatatgtttaagtataaagtgcggaattaatcaaacatatatgcactataatttaaggatcgaaatacctccagccattgattcttgagcttcaaacccacataagctttgatctgcaaaggaaattgactaccatgggtaatcgggcttcctcgctctctcaactctctttagatggaatttgctgttacgaacagaatgagtgaggagctcggggaccg

SEQ ID NO: 372379 - DNA, 928 bp, Cannabis indica
tggttggttgttggctggaggaatgaagagtgagaatgtttgtgaagctctttcaattctcaaacctgatggagttgatgttagtagtggcatttgtggctctgatggcattcacaaggatccattacaaatttcttcctttattaatgctatagatctatgttgttataaataatatatttatgaatattcccattcacattatttaaaaataaataaataaattaaacatatatgttggatttttttttgtatgaattttaccattcctttaatttaaaaatagatgaataaataaattatgtatatttattatttatgttagtgagattttcaagagtatttctaatttgtgttgattatgattaattgtgtatgctctttagttgaatgaacaacttgtttggctagatgaatatttatatttttttgtaggatatatagtattacacatatatatatatactaatacacatacacaacatcatattatataaaatattgccccgatctttaatacttataattttgtccttgaattagtttctaataaaagtggcctttaaactttaggaataatttcaaattcacccctttggttgcatttggcttattttttgagacaatttattgatgtagttataaaccagtcatataattacattataagtatctattatactaacttaaactagttagaactaagtacaatgacattaaacattcaaacattaattctaaaattatagatatatagctctaaattttatcattaaagtattatttatacaattattttttttgcatggattctcaaatgagatttttacacctcatgtcaaaattgacatcttttttacatttttatcaatacacggttttttaaacttttttaacttttacatttttcaattttacttttctaaaa

SEQ ID NO: 372380 - DNA, 552 bp, Cannabis indica
ttatattaatcttttattactatgtgtcttctctcaatctctacctgccacaattttttttattattattttctatactcttcatgattgttattattcattctctttttcttagatagcatcaaataatctttttacattcacaaataattacataatttgtaggtacatgtttaatttcataaccaaatattatatagcaatctctctctctctctcctaccgagtcctagcataatctatagcggaaaaacctttcgacaaataattgaatgaattggaacaattatcttagtttcataaaactttcatgtttttaatttcaccacttttttcttttatttaacaaactcgttgtatctttaaattttctttaaatgatatatttgaagtattatatcaatgatatatttcatatgattttttaattgttattttaattaaatattaaatttaaaattttaattttttttattattaatttttaatttgtttcctaataaattataaaaaaataaaatgttactatgttagatttatacagtgtagtga

SEQ ID NO: 372381 - DNA, 802 bp, Cannabis indica
caccccaacagtcaaaaaccaggggtaaaaatgtctttctccctttgtacggatcacaagggaatattcccttttcaaaaaccagatattccttttcaaagccctactgccttttatggcagtataaaagcctcccctttttttgttgatgaaaaccctagcaacaaaatcactcttcttcaaagctagtagccgaaaacacttcagcctccctctccatcttgttttcttctttcttaaaaaccctagcagccgcccctcatcttctcctccttcaagctttgtattgcagcagcctccttcttttcttcctcctttcttcttcaagctacagcagtagcttcaatggtcgacttcttgtttcccttcaaacctgcaacacacatacaaaaccgagagacaaaatagtagcaacaaagatctaaaatgatctttgttggttttagaagataaaagccgaaaaaacacaacagaaaaataaagaagaacactacagatttgatttcggagttccccttaaaatcaagggtacatctccgtcaagcttccctcaaagacgcttgaatctccactatgaatgtcaaagccggattacaagttcatggagattccatgctacaaaccagcaggtaatctcaacatttttcctctcctttcttcactttatttctcttggtttatcttacaatatctctcactaactctctctatttttctctcttgtttctgagggtgattacaaaagaaaacactgctgcctttttctctctacaggagccgaataccacacttgtgaaagtgg

SEQ ID NO: 372382 - DNA, 721 bp, Cannabis indica
tatacggccgtaataaatcaattgacttcattcattatgtcttccatgtgtactaatactttaaagcattttatttttacttaattctggaaattattatttaaatcataaaaccgtaggtatatttgtttttaatataaaaatgtcacatcacatagtactttcccgatattgcttagattttgtttgtgggatttgattgaccttctccttgtattaaaattggttaactaataaatgggtaaattgggatttctcagattgtcgtaagtggatattaccattgtgaaaatttattaactattaaatggttaaattgggaaaaaaaatccattattattacatgaacccaatcacgtgtacatcaacccaccaaaccactatataagtaaaggttaggttatccaaacaaagcatttttttcaaaccccgttttactattacctaaatcaaatggacccttaccaaaacttcaacccttttgaaacaagtcctcaaaaatccccaccgcatcctttttcttccacaagacccgtaggtacaccgtcacggagtccaagactccgttcagcctccatttcaggatgtcctaactgtgcaaggctcgagactgttctccacgaacacgaaaaacttataaggaaggcacatttaagagccacggaggccaagcaggagtcatacaaactggcggaacacctctaccattcagcccatgcca

SEQ ID NO: 372383 - DNA, 739 bp, Cannabis indica
gcaagtttgagacactgccgacatcactagtagttgattgacaaaacaaatagctatcgtctgcaaagaacatatgagtgataggtggtgccccatgagccaccttgcatccttgtaaaagtcgttgagattcaaacttcttgataagtgaagaaagaccttcggcacagatgatgaaaagatatgtcgaaagagggtcaccctgccaacctctcgaaggaatgattggacccatagtatggcttccatgaataacagtataactgaccaaagagacacatgccataattagattaatccacctctcaacgaaacccatacgagccataacgagcctaagataatcccactccacacggtcataggccttactcatatctagcttgagagccataaaaccttttttgcctttagtcttcctcttaagataatgcatcacttcaaacgccaccataacattatctgaaatgagacgtccaggaatgaaagcgctttgggtgtcagaaataacaaggtctataaggcttctcatacggttagcaagaacttttgaaagcaccttataagcaacattacaaagagcaattggtcgtagatcacccatggaggtgaaattcttcttcttagggatcaaaacaaggtttgtttcattcaactcccgcgaaaaacagccggtatcaaagaaatcggtaacaagcttaaccaaatctgctctcacaatgtcccaatgtttctgaaa

SEQ ID NO: 372384 - DNA, 507 bp, Cannabis indica
gcataaaacccaacactatgtatctctccactcgataaacatacgcctttgttcttcgaatgcgagatttaccgcagcgcggacttcttcctgatcatgatatagggtattgttatgaccctgcatgagtccaagagcgtctcggagattttgtaactcagtagcatctccgatggtcgttttggtgttggttctaggcagaacggttatgttatcaatgcccttgttgggtggagaactgttattcccagtctcttgcacaccaggcgcgatttcacctataggagtcgttacaccgtgacccacgtttgctggctgtccagggttaacagctggcagaacccttgcatttcctgggttctgcaatgcaggattcactgtctatgaatttgctggatcggccaggcccctacgagtctgcaccattgtatttgtggttaaattttgaatgaagagcgattctagattttgctctcaatgaaagcaccaaaatgttgaccttgcttt

SEQ ID NO: 372385 - DNA, 545 bp, Cannabis indica
ttagacaaaaataatagtgttagatctcgatagataaatattgtaaatgcaacatctggttgttcatcaatagattacaccttagacaagtatttacaatatgaaacaagaattttataaaaataagaataactttgactctcgctaatcgaacatcgttggattcttattttaaattcaaaattatcctttattcctcttagcttattcatttagaattagcttaaataacatattagtggatgaatggtttataaatcaaatattgtcattctttattttctcttaagaaattgaatgacgcatttgattatattcccgacattctatcccgaaatgatgtaaatcctcaatcttagaatctcctacttgtgtatgtttactttaggcaaatcagacttaaagttagattagtagtggtggtccaagaaagaagaattactcatgtatatttggtaaaaatttaagtctttgactttgaattttagattccaaatagagattttatatttctatttcctattaatacaatacagttacacttt

SEQ ID NO: 372386 - DNA, 689 bp, Cannabis indica
gtgggcacttcctcaacaactccttgaacctttcccatgcatcactagtagtctcatcttccaactgttgaaaggacatgatctcgcttcgaaactttgcatttcttgttggaggaaagtactttctcaagaatttttcagccaagtcattccaattagtcaccgaatcgggaggaagagtgttaagccatgctctagcccgatccctcaaggaaaatgggaacaacttcaatcttaaagcctcttcacttactccttgtagcttgaaagaatcactcacctccaaaaatgagcgaatatggaggtgaggatcttccgttggcgacccaccaaattgaccaaccgtttggagcatttgaaacatgacgggcttgagctcaaagtgaggtgcttggatttcgggtctcacaatacccggatttagctcattgaacataggggctgcatactctcttattgctcgggctctatcatcggccaaagcaataggattggcttcattatgagcacccccaatttcaaacccatcggccatattgcagcgttttttagccttttgttccttcctcctttgtctaaaagtgcgttcaatttcggggtcaataggagcaagttcaaggtcttcttcttgctcgttcatacactagattacacctgaaaaagaaaaattcagcgcaccaaaataggat

SEQ ID NO: 372387 - DNA, 771 bp, Cannabis indica
gcgtccgagagacttctcaaatgggccatggaattaaaccagtttgatctacattacataccacgcacttccataaaaggacaagcgctagcagacttcataacggagttccatgaggcagaggctagcgcaagcgtgcccacaccacaaaccccagcgtggaaagtctttgtggacggtgcctccaacgaaaatggatccggagcgggggtagcaatgatatcccctaatggactttgactccaggcggccctacgtttcgaattcacagcttctaataatgaggccgaatacgaagccttgattgcaaggctgaggttagcaaaagtcgtgggggccacagagtagaagtcttcagtgattcacgaactggtagtaaaccaagtgtccggggaatatcaaacgcgtggagaaaaatggccgcgtatgtagaaattgttcgggagctgctccatgagttcacggactacaaactgaaaagaatccccagagaaaagaacgctcatgcagtctgtttggctaagttagcatcagacagcgaaattgagaaactgggggtggtgcccgttgaacgcctctcgaaagcaagcattaaagccaaaagtattgcgacagttgaacaagagctcaactggatgatccccatcatcgaatacataaccaaaggcgagttgccccaagaaaaggcactatccagaaggatacagtaaaggccctggagagagaggtggacaaactactaacaagtggcatgatccgggatgtgtatta

SEQ ID NO: 372388 - DNA, 596 bp, Cannabis indica
aaactacaagaacttaaataaaattaatatttacgtggcttgccacgtaactctatctagtgagaatatatgtatgaatatgtattcatcacttttattatatttcaaacaattctgtgatgaatattatattgtataatattcaagatatatatgcaagattttatcaaaggtacataatctttaagatatatgcattatttatatatattttctcttatatcataggcacaagttatataaaatatattataaataataagaacgcataatatgtatatggatgatgtttcaatggttacattaaatatatagggcccgtttggcacaatttttggaaaagctaaaagctgcttttcaaaaaagctgtgacaaaaaggtgtttggtaagccgttaaaaaacagcttattgaagaatttatggaaaagctacagctaaaagctaaagctggtacaacccaacttttagaaaaagctgttttgattaaaagactataataaattatttttactaaaaatttatttaattatttcttatatattataaaaataaaaatattttttaaatgaaaaaatatttaaaaataaataatatt

SEQ ID NO: 372389 - DNA, 630 bp, Cannabis indica
gtaaaataatttccaacagagccctcatatcgaactctaactcccaggtggcttccttcaccttactgtttctccaaagtactttgaccaaaactatggtcttatttcgaatgaccttattgttagggtttatgttctaaaagtaagtatttaatggataatatattatagaatatatgaaatacaattataagataaataaatatattaattatagaagtttaattaataaatgtatgaaaatttcatatttatatagagaaggtatgatcttgtaaagtaatataagagaattaagatcatacaatatgaataaaacaagtcggtagtgtattaaagtgttaaatctttaatacagaattaccaagtacaatttactatgcgctatactagtgtgtgtgtgattttgattcggatcacatatgtggatatacatatggtaaaagtactgtgtataatttgattatacatgactcgactgatataaaataacatttttcattaacatatcgtttatcatgaaagagttattcatatcataacgatagtcattagtaaatcagtctgaatcctaagtatacatgaactcccatttatgttcattgagttttttgattcattcgttaaagt

SEQ ID NO: 372390 - DNA, 509 bp, Cannabis indica
ggagcatcaaaatcaaaatcatactcttcaacgatcgggcgtttaccctttgatttgttagccaaagtttcttgcccatttttgatttttgattctgaactgaggaaggagatgaggatgaacgagtgatggccattttataaagaaatttgaaacaagaggaaactgagagggaaaaacaattgagtaatcgtgggttgagtgggagttgaaatttttcggaagaacaaaaaacaagagggaaaaaaccgtgatgaataatgggtggttaagcttatcaatggaggttattgatcttccaaacaacaaaaaaactgaaggaaaatcgaaaatcaattaaaagaaaaggaaaaagaagaggaagagagtgggatttgattgatgtgtgatggggatggcacacgtgtctgtgcatgggaatgatgagtaagtggtatttttgtaataaaacaaagatggttaagtaaaaaagttttttttttttttgaactaaaggaactttataattc

SEQ ID NO: 372391 - DNA, 518 bp, Cannabis indica
cacatgattagacacattttattagtatcttgcatttatgactttatttcatacacaatttcatgttcttatatggcatgttggccttttacttttgaacactacttatttttggccttagggctttcatattcttgcttttggcctatatgcactctattttggaatactactattatttagccttaaagccttttatcatagatatgtgaccaaccaagcagtctttaatcctgactatcttcttattactttgaaatataagtattcaaatttactttttttaatgtaaagctgaagtatgcctacatttgacttagaggcatgtttagtagctcatactaagcattgcacggtgtgggtgccccccacgtgatcacacagacttacggtttcttggtcacttacaattcaccaagtttcatagaccttgattgggaattttcatggggtgctacctagtgtacacatgtggaactaaaaagaataactttaagaagttaatcttgttagcaagt

SEQ ID NO: 372392 - DNA, 558 bp, Cannabis indica
gtttccccatttccagagttagaataacccattgagagtataacagaacctaggggttttgttttggccttccagggattaaggttttaatcatgtaacgtacccggttttaaaatgtgaatagggcatccatctagcacaagatttctgttcaggtcggccagcacacttgaattcggaaatcaggtaagaactgaatataatgtgtgatatgattatctgaatgtatgtatatgtgtgtgtatatgcatgcttagattgttatttgcactaccaacacttgtacgggtatgatacagagtgcattggtatagtgagtgttgtttgtgagtacagtacagtgataccaacacaagtacgggaaagtgctgaggtgtgtggtatatcactcagtggtactcagggtacgagataaaccctaccaacactcgtacagtgaggtatgttgtgtatgttgtatagtggttgtaccctggtattgaacgctcacgctcatctattaagccatgtaaatatgtgtatgggcacctaattacaggtcggaaattatatgatatg

SEQ ID NO: 372393 - DNA, 539 bp, Cannabis indica
actatttctccacccctatcagttcgcaagatctataaccacttaccttaatggtttctcaccattgctagaaattcatgaaatttttcaaacatttcaaatttttcacctttgtgtgtaactatagaagaaacaaaataacactactacaaaatatcatttttgtaatggaataaaagtatccattactatgtttactttatcatttttgttgtaaatataatcttctcccattgtaatccttaatacattggcaatctttctaatactctttcttttatttttgaaggtatactacaattttgattttgattgatctttggtgtttgaagaacgtaaatcaactttattggattagttaggtattattctacaattttaaaattctctattttatatattattaatattagaagagtttgaatatcttagatattcatccgtagtgaagtaggttctgcaattatttatatactgcggtcggatgggtgattattttttaatagttttttgttctttagagtaagtggttttttgtt

SEQ ID NO: 372394 - DNA, 639 bp, Cannabis indica
gttcaggtagtttagccgccaaaaattgagttttggtggttaactgtcacaaacccaaaagtttgggggggtttagccgccaatatccctttatataattaatatttatgaaactaataaaaaactaaaaaaaaaataataaaaattaaggaaaagcacaattaatactaattaatagatttttaaagtgccatgtcaccgaaaaaataaataaaaatatatattttatgtaattaatattacaaagctaatacaaaaattaaaaaaaatataattttttattgatatgtattctttctaaatgaaaaaattagaataatatttttttttgaattgtatataaatatttaaaaatttattaaaaaaaatagagaaaattaaagataaaatcaataattgtattttaaatgattttaccctaataaaaaaaatttaaaagtgaaagaattaaggagagaataattaaaagtgtttggagtgatttatatctctcctttatatatatactagcaaaaactacgtgcgaggcacgtatactaaattttatgctagtttttttttacgttatttgaaagtgatacaattaaaaattaaagaaaaaaatattattagttattaggtgagattattattatgtgt

SEQ ID NO: 372395 - DNA, 871 bp, Cannabis indica
cttttcttttattattttagtttcttattttagtgacaaaaatgagtaaactagagtagtaatattggtgaggttagagtgtagcttttgtacttcttatttctattattgatattgattcttttgtgcttcatctccatatctcatttattaaattgttcttcatcttctaatttttcttccaaagttaatagtatcttttatataagttcagtcatgcttttcttatgtaagttaggctattaattattttggtatatttattatattatatgtcgtttactgcattctgccaacagtggtattttgtcgatttatgatatataatatgatatgctgttaagttagaggtgagattcaatttatgcaagattatttaatttgtgctcataacatatatatcttccggttgtaattaatggtgtagaattacaactgcgttctgaattaatatcaatattagaataggatttgcataactacatctctaccttactaagctctttatctgatcatcccctttcactcaccattttattatttagttcatttacatttatatcattttctatttatactaatctttagtggtaatttacctccctgtggatacgacatataacccgtttactattgcgaccgcagtgtaactaattgagtggcgtcaatactccatacattcgatactggtaaactttaccaatgccctacaaaggacataacactaatccaaggtgtaagtatacattatcgctgattatcatgctaatctaaatccagtgaactgacaaatcataggaattaaacttttgaaggtgtaagtataccttattgctggacttattataatttatacattaaacataatcat

SEQ ID NO: 372396 - DNA, 500 bp, Cannabis indica
acttgggaagcgcagtactcgagatacatgtctttggcctcacccaagtaatcaaaatttgcctaagggttaaccttccaaaaatcataaaagaggtcgagatcggctgtctctaaggcatgaactttctcttccagcctcgccacctcagttgtaagctcctcctccttatacttcttctcctcttctagccaacggaagacagctcgaagggccatcctttcatcttgaaggctattcacttctacagataaggtgccgatggtctcttcaagtcggtcagaagcctcgagatccatagtcaacttggctattttcttctgagtggcaaaaagcttcttattgacttcaccctactctagtcggacaactctgagctccaccctggcgtcatcaacatccttcttggccaagtccacctctgccctcatggtcttggacaaagccgcgttccaagaagcaacagacttagctcgggagtatgtgtaacccaacttcag

SEQ ID NO: 372397 - DNA, 612 bp, Cannabis indica
aagtagttaaattaagcataaaaattcaaatttctcttttattattcgttattagatcaaaatttgatgatttaatatttttaaaattaatatttatagctaaatttatttaataatcatttatgagtaatacccatcaagaaatgatctatatatatataaatatatataaaaaataaaaaaatatatatatacgtaggggtgaggacgtttcaatggttatattaaatatataatcatgatatagttacatttatttttagtccattgatcattattagatagttgtgattgatttaaaaatttactaaaaataattaataaattacttataacctaatacaaatctaatttaaaaattataaatattaatttatgtaaaggttttatcaaatattttaattaaaaattaatttattttatatatataattaacttaagtctaaaaataaaaatttcacctgttagtgacctgctataacagatcataaaaaaaaaccattagggttacatttttactgtaactattgaatactcactcatgtatatatatatggaggaggttctaatggttacatttttattgtaaccatcatggttacattttttgta

SEQ ID NO: 372398 - DNA, 569 bp, Cannabis indica
acaactcgcctcaatctcttcaaataattcgtcgcgccattgatttgcatctggattatcatccatttcgaatgacggctgaaggaagtcatccactatcggaatcatctcgtcaatttcaggatcatcatcagcggcatcatggtcattcattgcattagtggcactagattctgcttccccgtggtaagtccacttctcgtaaccagtaaaaaaaccccaatcgaatatgtgtgctttcacaacaggtaaagtttgaagcctattgttcacacatcttacacaagggcacctaatcctaccatcacaatctttacatttcgaggccatctctaaaaatgcatttagaccatcccaatattgtggacatctacgatttcgcaaagtggtccaagacttgtcgattgtcatctaaaattttatgaagacataagatttaaaagtataaagaaaaattgaatcataaaattttatgctattttatgatattttatgctattttatgatatcttatgatattttatgctattttatgatattttattaaaaaaaattacattattatttta

SEQ ID NO: 372399 - DNA, 554 bp, Cannabis indica
aagtcagtgttcatggaaatctcccatttgctcatcttctcttgtcggtgttcatggaggccctccattagattttacatgttgaaatgatagtgtgatgtaaacaactcataacgaactttacaacaacataaaaataacttagtttaacatagtattttcaagttgaacatgaaatgttgcaaaaacaacgcaaacaaagcttcacaacaatatgaaaataacttatttactcctttaaaatattttgtaatttttatttattttttttttcaactttttagtttttcattttctttttcaatgttgaattgtggaaagatggatcctactagtgaatgaacaattttatcattttttagatgagatgagtcaagatgttgttgatgatacaaatattctttttttcctcgtggtcaacacatttatctctttatttcattttttattattctaaatgaaaaagtcacactcctcattgtatttgtatttgttattgtgtaccttgtataatttttattctgcgattatggacaacaaccaaaagcaaacat

SEQ ID NO: 372400 - DNA, 551 bp, Cannabis indica
aattaaaaataaaaaaatatattgaacttatgaccttatagttgatgtaagataattttactaattatattatgattatattattgattatattgattattttagaattaaatatgttaaatattttgtactcttttagctataattattgttgaatagaaaataaattaatatacaaatgcaaaaataaaaataattaattaaaattataaaaagttgtaacgtaactaagtaagtaaaattataagtttagagttagctttagagtattgttagttagatctaattattaatatttaaattattaattatgttgtagttttcaagaattaattttaattatttagttaaatcaattactataaattatatctaaaaggggaattaccttatatactattttttttttcaaatttacgatttgggtttctaaagtggttgcagcactagttgcaataggggtttctgtaggatttttttgttgcaatttaggttgcagtgctagttgcaataggaatttctatgcagaatttcgtaaaaaatgcaaaaaa

SEQ ID NO: 372401 - DNA, 514 bp, Cannabis indica
taatgctaaggcacactacagtgattttacaattgcagtgttatctttgttaatcaaagaactttctggatatcgtgtcaaattaaaacttttaacattaattatgaaactttataaactttacatgattatttacaaaaccgggatcccgtttctaaacctttttacaaagtattccaaaatacatatgtcaagtcgcacagcgactacaaaatggaaaccccagatgtcccgagacgaacactccaggtcacgccgccatgacatgtaaaatcccatcctagctcaaacacactcatgttcagcgttcgcctttcctttacctgcacgtgaaagtagaactgtgagtcgacagactcagtaagaaaagcatgtaacatattacataataacgacttgtatctaggcgcccatacacctatttacaatgcttaatagatgagtaagaacattccatactagagtacaaccattgtaccacatacatattggaattttattttacctaggatct

SEQ ID NO: 372402 - DNA, 646 bp, Cannabis indica
ttatatattgtctttcatatacttgtattttttaaaaaataaatatatatttctataataaaaaatatatacactataaattagagtaatgtcctaatcaattataaaataagtggtatttaaaaattattaaatatatatttttaaaaatattttccatttgtaccgggtagtgcctagaagtgggcttagcccgccttagccaggtagttagacaaacatgacaatttgtttttcactaagtaataatagtgcacttaagaaggcgtgggcctgacaaggaggccgtgggccttctactgagtccaaaagaaggcgtcaacatgaaggggttggtgggcctgactatgttgatatggaagcggaggatagtgctgatatggatgttaatggactctcaaaaaacgagttcgaggtgggttctggtttccaggcccaccgggcattatgagtacattaagttggaattgtcgtgggatgggcaacccacgggcgatacaattcctatatgatactgtagcccataggaaaccagattatatctttttatgtgaaactttgtgtcgtaaggatgtgttggagcgagttcgagctaagttgaagtttgaaggtatgtttgcggttgatgcatgtggtaggagtgggg

SEQ ID NO: 372403 - DNA, 509 bp, Cannabis indica
aaactttaaatacaaaatagtttcactaataaatataatttatgtaatatattatttgcactttattaaaaaatatattaatcgatttaattcggtttattcgggttaattgggctgtttagaataatttgtaaaccatccaatatatttattgggccgtttggatttatattgtattattacgagttgtattttttgtcgatttattcggtttggtttaggcggtttattcgggttgggcggtttgtaaattttgttgaacacccctagttgactataggagtcatctatgtaggagagctgtctatcatctctacatcttccatttcacatatacttggcttgcctagcatctccactgaaactaagttaacttcatccaagtcttttggcgaggccagttttgccaaggcatcagcgttggagttttgttctcttggaatttgctcaattttaaagtaatcgaatctttccaagttcttgcgaaccttctctaaatactttgccat

SEQ ID NO: 372404 - DNA, 660 bp, Cannabis indica
cgggtttggggtagaaggtaagcttgatgttctggtcatttgtagaccaggccatgaagacgccatcatcaaaacgcttggcgcatcggctgcaggagacaggagaaagaagctcatctctttttgcctgctttaaggcttggtctttgaagtctttgagctccttcagctccgcggccaggttggccttggattccaagtttgctcggtgagtttcctctaaggacttcaccttggcagccatttcatccaaggtttccctggcctcccgaagctttcgcttggccttagcagcggcttcgccctccgccctcagctcctcttggtgcctggcctccagcctatctctccgaagggcctcctcctggatcattgcctccgcctgcgcttccctccgcttggcctcttcctcactggctttggcaagggcctcccgacgctcagctccctcctgataaagctgcctttcagcagtaagatcctgaaggatcttcttaacttcgtccatgtccccaaaatcggacaggacgaagccgtgattaattatgttcttggaaaggcggccggcctcagcagcaagctgggaaaggatacaagtataagtaagaatctccaagaaaaaataataagggaaaaagcaaactacaaaatacttaccac

SEQ ID NO: 372405 - DNA, 696 bp, Cannabis indica
ctgtggagacaaagaaaaaaggttaatggagcaacaaaaaacatataaaattaatgatgtgtataatctcactcaaaccaccattcataagggatgatactcaccctcaaggatcacttgtgaggatctcccatagcgggctatggggttcccctggtttggattggtccaaagctcctcagccttggaatccatcgtttccagttccaattgaggcttaaagttcttgggaacgaatggaaaatagttggtgcattctggtattatgaatttgggagggtgaatttctgaactaagaaaggacattctagcaagaaagagatgatccattctgaaaatggatctgaccaaaaagccagaagtttgtgaaaaatgacaagcttgagctgcccttttatacacaaaatccagtgacaagaaagccaaagattgggaaatctaatggttgggagtagagcagaatatgaagagacaattcataatgaccctcaaaaccgtacaatagccaaaatcaaaggacgcgttttttccaagaagggtttttgacaaaaatgccctctataattattaaaaagcactttttactaaaaaggaactttttaagggccaattgttatacccaaaatttggctaccatctcaatggaggacacgtgtccagataaaaggaatgtgaatcgatgcaatcgctttttat

SEQ ID NO: 372406 - DNA, 514 bp, Cannabis indica
ccagtcacgggtacctagcttttgggagatacccaccagccggagcttatccataccctcctgaagctgggtacgcgcctcctcctcctcaatactgtttctatatatgtatattttaaatatattctgaaaacacgctcttccatcaaaatctttatccaaaataagtaattgtgaaagtagtattactggccatgccaatgttttattccttcaggagctgaccaagcatattgaagggcacacaatctgagctttgggtgatgctactgcttggcctgtgcaaggtcttattaggcattttaggccggagctcgagagaacagagagggaattcctggaggctactgcttagatgtctttcaggtactagttcttcctttatctgtattcagttcctgcaaaggtttaaattaaattgatagcaatttggattctcttagttgtcatgaaagacacaatctgtttgatattttcttgtaaaaatggtgataaaaagtcgtagtttggatga

SEQ ID NO: 372407 - DNA, 529 bp, Cannabis indica
tcttgttgattttatgttgttttcgttttatttttggaaaactgtaaaaatgtaaaaaaaatattctttgaacgtaaaaatgtaaatattttacaaaaaatagtgccttatgtaattattactttttttaaaaaggaaaaaaaaaaaaaaaagtatatttccattgacatttatgccttgtatatgtttgaattagaagaagaaaaccaaattaaagaaataaattaatcaaataaagggatcaaattaagacatgaaaattttgcaagtgatgagtgtacatgaaaagacaaaagattaaaatataaataaaataaatgggtcccaagtaaaagttagaggagacagtttactcatctttcgagtttggaacgtataaaagggcccaatgtaaaaacaatatgcatggcctaatcacatatcaacaaaaacttctaacattaataattctaataaaactgcctacttctctccctctctctctcccctctcctctcaatctggtagtttctctctctatgaatagttg

SEQ ID NO: 372408 - DNA, 553 bp, Cannabis indica
aacatgcatggtcgagcactgccattacgtcatggcagtgctcgcaattggcacaagataacataaactgtcttcagtaaaacgggcagaactctcttaatttttatccaaatgacctagtttaacttgcattggaaatatatttttaacacggatctaagtttctcttatagtaatagtcaaattctgaagttatcgagtccaaaattggcttacaagccagactagtacattttactactcgggaattgagtagtgtagttaagtgaggagtgttgacacaacccatgtagcattatatgtgaagactgacatcccgaaacacatgttttcagcactcatcactattatcatgaagtccaagccgagaggtgacatcctttgtcaccccatttcaaattggtgaatctccaattgaaaataactattttctcaatgtttgtgggattttagcctataaacaaggagattttcatagatatttattttcttgtaattttttattcattaaaaaagatgatatacgggatttgttagtgagacaccccgacat

SEQ ID NO: 372409 - DNA, 577 bp, Cannabis indica
agtatcaaatgaaaatacaacttcttaaaagaacttagttataaggatattcgattttcattgttcatccaacatgaataaatgttttcaatataaccttgagacgctagactttgtccccctaatggctggttatttgttgaagcatttaacaccgtaacgatctcttatgataagtattttgtaagttttcgtctttattagactctcccctacggtgactacttagagataaatttacgaagtatgaaactgtttggttttgtgctctaaataaaacccatttcaatataattagatttcctaattaacaaagatcagaaactgcattttatattgcatggttcacattatttatttcatgattgtttaatgtataaattttgttatccgaatttttgcaccctgacgtggcatcacacgatggtgaaacgtggaatcaactcctggtatctgctcgaggcagagaaatcagcaatccacgtagagtgacaaacacttagcgaattcagctttcgcatagtgagtcatcaaggaaatccctataacttggggatcagcatagtggaatataatc

SEQ ID NO: 372410 - DNA, 656 bp, Cannabis indica
taaaaaaaaaaaaaaaataacaattaaattacagaaaccagttatattagataaattgaaacataaaaactagttcttagaaaaaaaaaaaataacaatcaaactgcagaaaccagttacattagatagctaattaaacaaaactaacaattaatatagaaacaaaaacataagaagcctaaaacaataaaatgatatattgaaacacgaaatagctaattaattaaaaaaattaaaacataccacaagataattcttaacatataaataaatttaaattattgaaactagttatgttaaacaaccaattaaaaagtgacacagaaaaattagttacataaagtaagtacattacgtaaatctgacacagtaaaaccagttttctaaaataacaaaagaaaaaatgaaacttaaacctcaattacgtaaaataacataccaacaattaaacacagaaatcaattatttagtacaaccaactaaaaaattgaacattcacgagaagataaattaaaacaaattaatatattttaaaaaaaaatgcataccaaagatgaatccttaaaatttggatcatattcttttttttttttcttgtgaataaccttcctaagaattttaattttaattagaggaagtttctgttgggttttatg

SEQ ID NO: 372411 - DNA, 656 bp, Cannabis indica
tgtaaaagattgtctattttcgtttaaaaaaatcccaaaaagctggtttgtggtactcttatggtggtttgtccaaataattcataatctatcttcgtttcaatatttatttaattgtttgtcctaatattgtcatatccattcgagtgctcacttttcaatttccaactccatgagtgaaatctttagccatgaataaatattttcaatgacctgtgaggctaatggagttgagactttcacttggtacatttttcgaaagtatttatgtgctatgctttgtggtaagaaggttcaggtttggtgcacacactcacaactctagatttattcaaggtagttttgtaaagtttttattggcttgttactaacattttatttgaatattggtgtaattttaaaaatttttgacctgaaaatatcatgttgacattatttttctttgcttgaattgctagagactagcaataagctagttgggggttatgattagagctcaaatttatcatttgacacctttaattatgtttataaaattaatttaactaaatattttcattgtttcaattataagttatttcaattagatatatttaacttaatttaattttgtattatttttaagagttgaggtacaaatcaaatgtcatttttga

SEQ ID NO: 372412 - DNA, 477 bp, Cannabis indica
agtgaattactgtatatgtcatttgcagtcaaaatcacagttattattacttatatttgttcaattaattagtctttaaaaaatattattttaatctttttttaatatataacatgatatttattttgaattacttaatcaaagtatattttgtatattgttacatgacttagttattattttattacttttattactaaacaattttaagttatcaagttatttgagttataaagttattgatgttattagagttataataattatttaaataattgaatgaatgctcgtcgatctactacagagactaattgcatttaacaagataagtcattttcatattttctttttagtttttttcggttgggaaatattttttaatagtaactattgttagtaatttctataattgttatctattgatgcttattttggttagttgtagtaaaataaagattaaatttacaataatattta

SEQ ID NO: 372413 - DNA, 576 bp, Cannabis indica
taataaaatatatctaaaacaataaatattttagaaattgatatttatagttaacaattaaaaattatctagattatccttaaattttattgttattttaatgtcaaaataagatcatttcatattttattaattaaatatgtaagtatttgattttataattaaaattaataaataacacaaaaaataatcaaaattcaaaataaccaaaatagttaagttttttgagaaatttaatttttcaaatttaaagcctactaatatataaaatcaatttaaattaataataaaattaattttagtttgataattagatttttaatttaaaaaaaataacatttacacaaaattctaccaaaatttgaattttatttcattggaaaataatttttagaagttaagaaattgaaaaaaaaaaaaaaaaagtcaaatcttaggagtatgcaatgcatactcccccgcgtgcgcatgggtgtcatgactgagctttggaggttacatgcagggtcctcgtgcaggatttctcgattaactgcacctttggatagcctcatgtccgtgaaaactcgaacaagg

SEQ ID NO: 372414 - DNA, 542 bp, Cannabis indica
aattttatttatgctagacaacttcctttcttgtacaagaataagtccacttttgaagctctctttaatactactatctatacaattcgtacactttcttatttatacacaaattttggtctagccaaatgttatatattgcacctcctaacacattcttatgaacataatataatttttatgatacattctaatatatttttaattcatttttaaaaattatgtgtttttttttaacatatttttttttccataataaaaaaaattaaaataacaaaactcattaactcaaagccaaaaaaaaaaaaaaaaactccaattcatgtatacagacacaacacatatatttctttccctttttttaaacaatttttttataaagcagacgcttttttttaaccaacaaaaaaaaagtccattcatgctttttaatattaaggttaatctcaaattcattttcacacgtatacataatttgaactccaattatagattaacacatagagcccaaaatgagctttccaataatatcaagaacttcc

SEQ ID NO: 372415 - DNA, 433 bp, Cannabis indica
cacgtcagttttgtcgccgacaaagtgtaaatttgtcccccgattgctcttgacgcgtcctttaaattggggaagctttccacagtgcttaggacctcaaaacgatcaagaactacccaacataacaactccaatgcgtcagatcggagtcattttctccaactccggtgtacaatcaataatggagccaaaaatggcaattttcgtatggggccttaaagcttcgatttttcatgtcaaaaatgaacctttaggtcccataagcttaaatacaacgttttgtaaatccataaatgattcaaacacgttcaaatttaagatcgctcaagaacatgtatgaacatgcatgaaaatggtagatttcgaaacctgctgtcgtagcgcgtttcgtcatgaccattagcttccttagatcgtgtagaagctattcaaa

SEQ ID NO: 372416 - DNA, 783 bp, Cannabis indica
agtttttcttttattaaatttatatactttttttttggtgcttaataataaatttagggaaatttacatggtatactaacttttgccatttttttacaaaaatactaccaggcggtattttttacttatttactgtgtttttttataagtttcatactgcagtatactgcgttaagttttcactggtattttactggtgttttactgatgttctactgttgttttgagctgttctgctttgtgttttactagtgctttataaaaacacagtatttttgaaaagatttccgtgtgacaatatttttgtaaaaattaatccaaattctagtatttttttataagttttctaaatttatatagttatatactatacatatcaccgactcctaaaatatataatatactatgatttgataaattaaatatttttccacataaaagcaaagatttaaaatttaatcaaagctcatcatgtgctgtactctctttttttttctttttcttttttttttttctttttttttgtttaaaaatggctatatatatgtttcaactttggggagccaaaaaactatatcaacaaaactaaattagttaaataattaacaataattatatcatagttcaattttattatttaaaaaaattaattactcaaagcgataattttttagtcacaatatattttttttttgtgatcataataaaaggttacttgtgactaaaacagaatatttagatacaaattgtcactaatttagttttagtcacaacaagtattgt

SEQ ID NO: 372417 - DNA, 386 bp, Cannabis indica
gacctagactcagacccaaacccgaacccagacactaaatcgaaatcgaaactaggactaggacccaaacccgaacatggacccagaccgagacctaggactcggaccttgaattgggccttggaaacctgtcgtagatcagaactcaggactcagacccatacctggagctggacttaaaccgagatttggacccaagccaagatcggaactctgacccagactcgaaccaagacttgaaccccgatcgggtcctggactcagaccgggacctaggactcgaacctggattggggacttggacctaggacacgagcatcagaattgggactgagacccagaatccgaccccaaagccggaccaggacctgggaaccgaagtggaa

SEQ ID NO: 372418 - DNA, 511 bp, Cannabis indica
aaagatcattaaaaatggattaaaactgagggagttatgattgttttactgaaactatttctgagaaggaatatggagtaacgaattatacgacttagcgaaaatacaaacttttggcattgaaaggttcagaactagaagataatatcttcatgaaagttttaggaaattaaattccctttccaatgataccaaaatctttgaaattggaattatattcagagagatattgtaattttactaaaacagatttgcaagaacattattcaagaaacgaagcaaatgatacagaaggaaaataacttttcgacatagtataactccgaattaacgaaatgtttcttcatgaaacttatgggaaatcgaataagctttgaaaccatatatagatcattaaaaatggatgagaattgagagagttatggtattttaagtgaaagtactttttttttctgggaatatgaaaaaacgatttacaacaacatcagaaagatgataatttcgaacctag

SEQ ID NO: 372419 - DNA, 762 bp, Cannabis indica
tttagttttttttttttgtttgtatagtcatatgaaataagttaaataaccaaataaaaagataatgttgactctctctatctctctctagatctagtctatgttttaaagcctactttttcttcaacaaatgtttattcttaattatgttttatatgaattaattcaagatcacattatgatttgtcacaatctcaaactttaaaaaagaaaattggtagtttccatttttttgcccctaatacccattttgtgtaattgattacacaattctttacttttttatcattatgtatatatttttaaaaataattaataatgataataagaaacctctcaagttgttaaaaaaagacttggattcatataataataaaaagtctactatatattttgaacatgttgggatttgtttaaccatttttattattatttcatcatgactcaacctaaggacccttttttcctttcaaagaaatagagtctagtctaagaaaacctatatttatttatctaataggttaaagctatttccattcaatttatctttaaaaaaaagatttgttttcacaaccacaaaggtggtggtcaattctgaaattgataaaataaaaatatgatttttttttgtttaaaaattggtaagaaaaacttgttgtccaatccgttttttgttgttataagacaatgtcagttccttagcccattagaattttgaagacacgtatgtgagtttatgtcatgattaaattattaacaact

SEQ ID NO: 372420 - DNA, 637 bp, Cannabis indica
tagaaaataacactaaaactaattaaaaataagcaaaataaacacattttcattactctcctcacaatactttagtttaaaagcatcaaaattaactctataccatagagttatcaataattagggtattgtcatgctattcatcgatagagaaatttttagttccaagtttaggtccccgacaagtagtttagcgtgtcactcaccagttttacgaataatgtgattttatgagcctgtatttcgtcgagcatctattccactcaagttggccggcacacctgaatttagaaacaaggtaagattactataatgatattcttacatgtttacatatttagcgtacatattatttatgcctgttagattatattgatagtggtattagtatacatagagttatattgaatattgatagatgtatgtatggctcagattctgatcgatgttgtcacatcagtatggctggagtatgaccagcatactgagtatagggtgacattatgatcaatagtattgtcgtaggaatgttattgactcagcaacatgttggacacaaggatagggttatgattgggtctatcgctgcctgattataatgtgggtttatgctatattattgtttatgcttttctta

SEQ ID NO: 372421 - DNA, 752 bp, Cannabis indica
atcattatcatcagtcaatgtgttgtttaaacacaaaacgttttctttttcctgtaaaatacttgttaaagcaacaattttattttcactattttcagaatcatcatcacttcaagtaacatttaaaacctttttattttttttcaaggtattggcacattcagattgaatatgaccatacactttgcattcaatgcattgaatactcttttgactattgggaacaaaagatttagatgcatcgttaccttttggagtttttgagaaattcttttatttccaaaaattttcatgtaatttagaaaatttcttcttaacaaagccatttcatcatcactctcattgtcagatatatctttttcaaaaactttaaaggcaattcctttacttttctcaaccgaagagtttggcttaatctttttcttgatttgttgatttaactcaaatgttcttaaagagcccatgagctcttcaaccttcattttgctagcaattttttgtcaaacatgtcaaaaagcacacgaataatttttcgaaccaaaacaaattcatctaatttttctcccaaagcaaaaaaatcattagaaatgtcaaacaatctttcataaaattcagataaagtttcagtttctgacattcttaatttatcaaatcttgtttgcaacatggtaaaatgtgatctctttacatcagcagtacccttaaactgagtttgaaggatttctcacgcgtcctttgcggattcacaagat

SEQ ID NO: 372422 - DNA, 787 bp, Cannabis indica
atttaatatctatagatgtaagttggattgaatctaagttttaattagattttgggaatgacataccaataacagatccaaatctaattaaatactaactttaacctccaatccaatcttatttataattgcacatctctaacgttttttataattggattgaattagattggttcggttcaattagattggattgaatgttgctcaccctactattttaattgggataagttgataaatacattttttatatataccatcatattatattttattaaaatataccaactttattgagtgcgttacctaatatactctcactctctacttaagtctagcttataatttacattaaactaaggggtctaatggagatattatctataaaagttggtatatcttaaagaatatgaaaataaaggtaaaaattaaaacaagtaaaataaagtggatataaaatataagttttttttattttaattagtatgaataataaaactgagctatgatgagggtcctgttactcttaaggtatatggggttcgcaaaattaaattttgggccgtatataaatatatactaattattattaagataataattccaacattttagtgtgtaataaaaaaaaaatggataaattgcggcataaataataatgtttcaaattttatacatttaggtgccgtttggtaatacttttgttttctaattttataattacaaaatgatagtaaaatttttgtttttaaaaattttgcttttgaaaaacaaaaatgcgttctgt

SEQ ID NO: 372423 - DNA, 1047 bp, Cannabis indica
taaaaattattaactataaagtctaagttttaaattaaatactaaaatgtctaaactttaaatacaaaatagtttaactaataaatgtaattaatgtgatataatatatacacttctataaaaatatataaatcggtttaattcggtttattcgggttaattgggcggtttagaataatttgtaaaccacccaatatattcattgggcggtttggattttcattgtattatttcgggttgtattttttatcggtttattcggtttggtttgggcggcttattcgggttgggcggtttgtaaattttgttaaacatccctactacctagtaatatttttacactttttttttgtctttacactattgtctttttaatttttattttttatttttttcctaagaaactaaatttaatggttattttattttattttttagtacacttaattagtaatttttattttttcatattcttcgaaaaatatttttttcttagtatgttactttcaaaatatatttattttaatatgcttgttaaggattaaccgtttttaaaatatattttctaaagattatattttatgtctttcttaaatttattttcttttataaatttaattagtacaataattcattataaaatataaattaatatgtatatatcaacgcatatttaaataagcatagaattaagtaactcatatttaaattaatgtatcgtgttcgtgttgtgctgaagtcttaaatttattaaaaagttgctggcacgaacacaacacgtgacacgaaaaaattaaaaaatacagacacgaacacaactcgaataagttcgtgtcgtgtcgaacccttaaaattgcatatcgtgttggcgggttataaactaaattgttaattttaatgtcatcatggtgttatgttaaattttgaaatttattttagatgacagacacgaacacaacccgtaacataagaaattgataaaagacaaatacaagtagcaaaatttccgtatcgtcgtgtctgttggaatttattttaccaggatct

SEQ ID NO: 372424 - DNA, 1143 bp, Cannabis indica
atgtactaaacaataaaaaggccatgcaagtagccacaaaaaccttttgaaacaacataacaacatctaacactaactaactactatctttacacattagtttgttccatactctgcaaattgatgactttttatatattttatttatatttaaaatttgagttatctcatgtctagtaaattggtttatttcatattactgctgaaaacagagtatctttttttattgcaaatctgatctgagagccagcctgtgtgttgaatgaatgaaagatcaattgagaagaagccaaagggagagagttggagagtgataaacaaagagaagagattatctgattttgcacatgctgttgattcctaggccaattttgatttgatatacacttgtcatgatggaggaccaaaagaacaaaaaattatcttatggggccaaaaatataatttataaaatatatgtataattatatatgttaattacatttttaaatttaatacattaatttctatttttttcagttgtgttaacctgattctatatgagttttcctaattagttttatcagagtttttttatgaagaaatccaaattaagactttcctttttataaaagaaaaatcgcacttatgtttcaagattttgtaagtacacaagcaaaaattttttgggctgattgaagatcattttttagagaagtttcttgtgagctatggtctcgtttagactgtgtatgagctgtcaataaggtgtatattgattataaatacaccttatagcagttaggttcagtatctctttcacatctttatatttcattgatatcttgtaagaaaaagtgtctttgttgtgtagatgagagggtgttcatctcttccgccgtgtttatgtattttgtattgtattgagtttgtaatcaagtctacaaaagaagaaaaacaacagtgctaccttcgggataaggttctacaggctttcagaggatagcttttcaagtcttgcctcgcgaggaagcaagcactcttcaaggagatcaaaaggagttcgagcacttgaagtttcatcaagattcagttagaaggtggtatacatcaagcttgtggcatacaataagagggattctatttatgcataagtcaattact

SEQ ID NO: 372425 - DNA, 516 bp, Cannabis indica
caatcgctagcaccaaaagccaccaacacaaagcttgaatccaagcaattcacaatcaaaattcaaggattagaaaggactttagagagagggagagggtcagctaatagggatgacgaaacaatgcagaaaataaaactttattttacttaaaatttccttttgttacaaataacaaattagtagaaaattccaagaatgcccttagggccatacacacatataagtacaaattcaaggcaaaagagtcattcccatcacaaatatactcaaataaattcagattatccacacataaataaaattccaataattcattacagaattgtatttcggccccgaatccagttcgacttgaaatactcggtggtgactgtaccgcgctgacttctcagaacacacctaaaaaaaacaaaacagatatactatataataatatagtctacaagcacgtaattaatttaaattcatagttttacccttctcggatcaaaattacaaaaatgcccctagctc

SEQ ID NO: 372426 - DNA, 969 bp, Cannabis indica
tgggaggtcaagatgtgatgaaggctgagcagtggcttacagtgattgagcgaattcttaattttatgggggtggttggaaatgatcgggtgacctgcgccacatttcagttccaagaggacgctctcgtgtggtgggagttgataaccctcactcgggatgtcactgttatgacctgggaagagtttcgagagctatttaattgcaaatattacaaggaagtcgtccgcagtgctaagcggaaagagttcactgaactagtacaaactgaggggatgtcaattacagaatatactacaaagtttgatcgattggcaagctcactgtgggtattgtgccaatagatttcagcaagaaagaaaagtacttggccggtttgaatgtgaacattagacatgatctggtgatcactactaacgaagcaactacttatgcaaaaatggtagagaaagccctgcgagccgagggtgcagtaaaattccttcaggagcctcgagtgactcaaagtattggtgggtcccccacccttcctactcgtgtttatggtagggatggtggttattccaccactgatcagaagaggaaagttaccccgacatctagtggctcgaggcagagcaagcggtttcgtgggaaccaaggtagaggtggacgccagggttattcttaccctgagtgccatgttgtaagaaacatcatccgggagagtgcaagcggaagacatgtattctgtgcggcatggtggggcatttcaagaaagatttccctcaggcaaagaaggaagaaccgaaagcagaggcaaaaccctatacctgcttgggtgttttgctatcacccaagctgatgctgcagccagtctttccgtggtgacaggtcagcttcttgtcaacaactcctcgtatctgtattattttagttcgggagctacacgttcatatgtggcgtacaagagtgattgatcttttgggt

SEQ ID NO: 372427 - DNA, 585 bp, Cannabis indica
aaaatcaacttaattgttaattctaatttaatatctaagaaaaatattttaatttaagttgatctaaaataaattaattttcaacttaaatatactttctaatgaattaaatttcttgaaatagaaataaataattaagtatctttaataaaatcaacttaattattaattctagtttaagttctaagaaaaataatataatttaagttggtctaaaattaattaacagattaattttcatcttaaatatatttttctacttaatcaaatattagaaaatataaattagttactaaaaatcactatctagaatcttttctttaaactaagtgtgtttttctaaattaattttaaaatagtccaataaaaaactaaatttcatttatttcaaatataattatgttgctaattcaattttaataaggttaagctagtataattagcctgatataattatttaaataaggcaaatgagctttcaaaattggggttgttcatgtgagagaggactgggtccagttgttgtacccactactaatgggcccctaactctcacacaagcccaaatgagagaaatttaacctt

SEQ ID NO: 372428 - DNA, 877 bp, Cannabis indica
tagtgcctccgcactagaatatctcttcccccaacatgaactccttcgagtccatcacaaagtccctccagtcaaccaagtagcccttgcaacactgaccctgaagctaccatatcctctgattgtagctcacacgccaatcgtccaatgcatactccttttgacaaggactaagtatggtgcacccctcggggtgaggttcgcaaaccaaccgttcccaatggcacctacagaacacgcttccactgaagccaagtccctctggacacttcacacgccaactctatggcgcaccatcctcctgatggcaatcgagaaagacacactcatcgcaggataacgtttggtgcatcccacctggacgtggctcgcaagccaactgtacccaatgcagcaccaagtgcactcttgcacctaatttcttcgcgaagttctcaacattggccctccggccctaccgcacacccaatgcaaaaggcccaactgacccactgcatacttgctccttcgagctcctacttgtgtcggctcccaaaactgtgtcacaagctcatctcccaaaatcaaccctgcatcctatgatgactcgttaacctttgacaaacttgatgacacccagtcttactcttaagacttgaagtcatcccaatccgctatctcccatcggcatatgctctctgaaccattcggcttacagtgttccatacaacactagtgtccccataaacacaaaatatgcccataacatgccgcaaactagcttagtcttgacctcagtctacaccattgcatattgtctatctgcagcttgcagcaatcatgcaagtctttacactgaacaacccatctgttgtagtgtttccctctggattcacac

SEQ ID NO: 372429 - DNA, 548 bp, Cannabis indica
acatttgagtatccgtctgacacacattaatgtgccgtatcaatcaataggcatgaaacgaatcaacgcccgcaaaaagtgaatcgctgcattaatggcgatcattaaatacaccctcacgcgcccaaagcacgtgccaggaaattgatgagtcacccggaggcacttgaacaagccttgattcatttttcaaataaacaaggcttggggggtaaatgttgcccctaattttgcccaatatacgtggaccaaccggacagggacacatggaccaaaagatcttaatacttaagttaattgctaaagtattgatgaagaaaggggtcttccaggacctgcctcccggagaaggcatccggagtcctctatactcctggaggcctaagtaacattaaagcctctccgcgaggtgtcaggtttcccctgaacagtcacctcgcatttaatatcgcatgggaggaaacgtgttgagactgccacacgcaataaagtctgacgacacaactcctaatctgcacctacgaagctatgatcacttaagtctattg

SEQ ID NO: 372430 - DNA, 522 bp, Cannabis indica
gaatgtcaattgggccgggccgggctcgacctgccacaaacccggcctggcccgacatcactttggttcggcccgattcgacccaaccccttcttttggcctagcgggtcaagctcgacccgagataatcgggccgggttaagcccaacccgtattttttttttttttaaaaaaaaaatcagttaatttattttaaaagaaaaatatttatggaacttggaaattattataatcttcatttgctccccactttaggccaaaacttgtctaatacaaatttttctaaagcacgagagggaggaagccatgtaagctagttccctttctatgtgtcctatgagagacaagatgataagaaaacaaggaaaagggaagtagtgcagtcaatgatatgtaattcattctcttcattttgggttaggcatattgtagtttaaaaagtcttgttgtgaatgaattaatgaagaagaaaaaaaatgtaaggaatagaagagaaatattactataattgttattgatgtt

SEQ ID NO: 372431 - DNA, 866 bp, Cannabis indica
ttgtgcggaaatctaatcttgacagcatcttcatcgttgaaagttatagttggttctcctgctcgtggaactttgggcttcctttcttccacggccaggatgacttcttcttgctcgtgctgagttgttcgggcatacctctcccgagctttgcccggatctccaataatgtacgggcctccaataatgacttgtaaatgtccatcgacgggtggagttaccagatcctgctttttttgaccttggatggtcttgacatacttctgcaagttcggattgtttttctttattagaaattcaatttctcgctttagattgtaacattcgttcgtgtcgtggccgtagtctccgtggaactgacaaaatttcgtcatgttccttttgtttgtatctttcttcatgggctcgggcttcttgtacggaattaacgactgagttgccatatacacactctctatatcttcagttagaatagtgaatgtagtgtgtttggcatgatcacggggagtctatccggatttattggtgaactttcctttctttcccatttccttgtttgtggttattgcttgaacgcttgccacttgaattgttggaataattgggaagttgggcggatgttctagtggaaggagccttcgttttgcccggcttttgctcaccttctgctcgttgaatggcttcttcgagattgatgaagccttcagctcggtcaaggaaatcactcattgagtctaccggcccgttcttccttatgtccttccatagttcaccaaggacttcaatgccccccagtatcgcggataactttccatcctcggttacccgcgaaactttggtcgcttccgtcatgaatctgctgatgt

SEQ ID NO: 372432 - DNA, 523 bp, Cannabis indica
gggagtgtacccccttttttgtcgcttttcctccatccgggtgctgcctttggaggaccttttactcctcgagccctgggaaggaacggctaggctagtagttggagcggagagcgagggggcttgtccatttatcgccgagggattttcaaaatgggacgatgcgggggccaaggcctggccctggctatatccaggagaagcaaagaattgtatgccgctcatcggtgaagctgctgtcggaacagtgcccgacgaatggggtccgggcacataccctgctatcccggtgggataatatcctccataggccactatttgggcctcttcaagattgatgtacttttggactctcttctggaaatcctgaaggtttgcagctccttcctgttgtagttcgttccagaatggagtccctgtacggatgcctgcctggagaagggcaagctgttgtccgtcttcaactttcttggtcttagaggcttcctcctggaacctccttatataattctttagggtctcc

SEQ ID NO: 372433 - DNA, 583 bp, Cannabis indica
acttttccttatctgaaggaagagttaatactaggcggtaatcaagcgttgcttttattttcagaaaacttttctcacatcgatcagtccaaacaaacttcaagttctttcgagtcagctccgttaagggtaccgcaatctttgaaaaaccctcaacgaatcgacgataatacccagctaaacccagaaaacttctaacctcagtagccgattttggtgatggctaatcccgaacaacttaaattttggccggatccaccatgatcccattctttatccactatgtgccccaagaagaagacacgagataaccagaattcacacttttgaatttagcataaaacttatggtctcgtaatcgtcgcaaaaccgatctgagatgcaactcatgttctttatctgattcagattacaccaagatgtcattgataaaacgatcacacatctattcaggtaatcctggaacgtccgattcatataatctatatcaaatatactacatagccttggcccatcattcaccctgatggtgattcttgcatttcggacattcaagatatgacttgaaagaggatccgtgatc

SEQ ID NO: 372434 - DNA, 529 bp, Cannabis indica
ttatgtggaggaagtcatcacttttcagagtgtcaagaagatgtggatgattttccaatggatgaagctaaagccattggaaatttttcgcagaataacaacaacaattttgggttcaaccagggtaataaccgaagaaacagggggttatatcagcaacgaaatcaaaaccagaatcagaaccaacagtttaatcagcaacaaacctctggtggaaattctagtttgcaaacagatttactgctttaattcatgactgaaaaggaattaccctgagaagcggtaaaaattatgatggtcctgaactgccacaaccagcggatggagaaaaggagaatgaagctcaaccaatgccaaccccaacaccaacatcagagaaggctactgatagcccaacacaaccacaacagtctccaccaattaacattgatcaccatgtgaaaataccctaccctcaaaggcttagaaagtcaagcgtagacaagcagttcaccaaattcctagaagtcttcaaaagacttcacattaa

SEQ ID NO: 372435 - DNA, 497 bp, Cannabis indica
agacacattaaattctaaaataaaataagatatatatgtaaatagtacatcatcaatctataaataggatatacatgtcattatgtaaatggtacatcatcaatcaaaggatatatatgtcaataaaactatcacttcattaagacacttttataatagtatgaaattaacaccgattttcattaactaataaatgagcttagattttataaatatacttcaaaatataaaataataataataatagagacaagaagatttttacattattttgaattaattatttatagtctacgagtccatcttattattagaattttgatgaatttacagagtatacaatattgatgtatcttttttttgtgattctcaatttggcccttcttgaatttgggaatattttcttgtttcacgcccaaaatgtgacttccactagcggtggttgtagtataaatcgggcggtcgaatccacagggaggtgattatggacaaaagcg

SEQ ID NO: 372436 - DNA, 588 bp, Cannabis indica
ttttttatataaataaaaaatcaggcaattttttttttttaaatatacattatagtgaagagaattagaaactaaatatttcttacacaaaatagagatttaaaacagaaaaaaaaataataaatttatagaaaattcatcatataattttaaaacaacaatcatcaccgtatctcatttatagtcaccactgtatttaaagttgatgtcatcattaatattctttctaataagtttgctttgtacacaaaactaaattaaacaaatgatcggtaagtacttacttttattatgtgagggaacagaagatgataaacataataaattttgaattttgatatttttggcatattagttaataattttttttaataaattaaattagttaatattaactatatctctctctgaaaaaaaaaattatatgtagatttaatttttaaatacatatatatatttatttattagtttatacacaatatataatttgttttttttttaatttaattcattagtgatctctaattaaataaagcagaaataaaaaaattaaaaaatgagagaattaaggagagaatagaatagata

SEQ ID NO: 372437 - DNA, 801 bp, Cannabis indica
ttactgtttcagtgattgtttatgtactaaccatgcttcccagactttaatatctactatatcatacccctcaaactttgatatgtactaaatcatgccctttgaactttcatccatgttagaacttttttactaaaatagacaaaattccttaaatttaacaatctcaatagttaaggggaaatttttaaaggccaaaaaaattcaggggcacaatttagtacatgtcaaagttcagggggaaaaattactaattagccatttaattttaacgaaatttgaattttttttaaaaaaaataatctaatttattctaaaatcaaatgcaagattactttcaacatatccctatccaatcattttcaatccaatccaatcatgagttccaaatgagcccctaagaccatctccaatggttacaccaattcggggtagaatctacaccaatttggtgcaaaatttttttacttttttacaacaactccaataattgacactaaatattctaccaaataaatatattttacttcaaagttctcacattttgtattatttacagtaataacccaaaatacctaattttaatataattatatcatgcctagtaagaatttaaaattttaaaataatttagtaaaataaaatattcattaaatcaattattcattaagttatttttttagtaaaaaaaaaaaaaaaaaacttaattagaatatttacaaattacagttgatcctttaataatgcgatcattttcaaaatgaccgacaataatatgcaaaaaagaactacaccaataat

SEQ ID NO: 372438 - DNA, 146 bp, Cannabis indica
cctgagtttgggtttgtgtccggatttcagtctaggtccagatcaagcaccaggtgtaggttcccgtcctgggtcttgctctaggtggggttcgagtcccaagttctaatcccgatctgagtctagattcagttccgggtctaagt

SEQ ID NO: 372439 - DNA, 667 bp, Cannabis indica
tcaacttaaattagaatatttttgaaatcaataattaagtagaattttctagaaaattagttattcagatattctttaaatattttttaagttgaaaatttgttaattttggatcagcttaaatggaatatttttcaaattaaggtgattagttcaagatacttaatttgatatttaattaaattttagaaaataataagttgaaaattttgttgatttagaacaacttaaataacatatttttcaagtatttattttattatattttaatcattttcaaaattttatatatttatataatggattttcgaaaattaattagaaaattaaattaaagttgaaaattaatttttgattaatttgggatcaacttaaattaagtaattttcagtattaaaatatatagactaaaataagaaattaaataaaaatatattttaaataatgagctttaatcaaagaacattcgatctccattgttggttctacatagttcttgttttagtgagtaatcatccctaatggatgtacgttcattagcaatttaacaccgttgaatctcaaaagataagtattatttgtaagtgttttatccttagtaatatccaccctaatggtggatgctaagagtaagacttcaaaaagtatgaaataatggtggaagctc

SEQ ID NO: 372440 - DNA, 724 bp, Cannabis indica
ttctttagttcgtcaagctgggcctgtacggctgggctgacttcatgggaattctggtcgggttgggctacgtcagcgtctttctgagcggggatttgagtatgggctccggactgcacattcgttgtagtattctgctcgtctgctccccttcttctgttcaggtcatcccgtaggtcacggggtgttcccaacctttcgaacacagaagaacctggctgccttagcgattggttcgcttggttggcaggtggaatggctccattattttgagtggatccatcgagcatgactcctcctgatgaattcccggacaaggtctgtccgcctacctcttggcccacgagtggaactcgtgaccggggattggacggctgaccgttgtttgtctgggaagcattcaccgttgggtcatcctcggcttctccaaggggaatgacgctcggcgcctgctggcctacagtctgataggctctccgtatcagcacagtagcttgccgactacgatcttcgatttctgcatggtgagcccttaatgcctccatctctttatctctccactcggcgaacatacccctctgttcgtcaaacgcgaggtttactgcggcacgtaactcctcctgatcgtgatgcagggtattgttttggccctgcatgagtccaagcgcaacacggtaatttcgcaattcggttgcatctctgatggttgtctaggcgctgatgc

SEQ ID NO: 372441 - DNA, 610 bp, Cannabis indica
tctaggtccgagtctgggtctgggtttgagtccgggtatgggtcccagatccaaacactgactatgagtcaggtccaagccccgggtcccagtctagttccacttcgggtcccaggtccaactccgagtccaaggtcagggtccgggtctgggattgggtcttgggtctctgtcccagttctgatgcccgtttctcgagtctaggtccctcatctgggtccaggtcctaggtcccgatcagagtctaagagccggtcggggttaaactcctggcccgagtcttggttcaggttccgatatcgatctatgtcctgatttgggttcgagtcttggtccaggttcgggtttaagtctcgagttctgatctgggtctgggttccgaggcgtaggtccaggtccgggtcctaggtctcagtctgggttcatgtttgggtttgggtcctagtcccagtttcgattttgattcagtgtttgggtttaggtttgggtctcggtcttggtcggcgtctgagtcctggtttgagtctgggtctgggtctgggtccaggcccggatcccggtctgggtctttgtttgggtccaggtccgagtttgggtcccgggtgttggt

SEQ ID NO: 372442 - DNA, 633 bp, Cannabis indica
agaataaaatttaaataaataaaaaaaaattaggaataaatcaaaaaattaagagggcaaagaattaaatcaaaaattaagagggtaaagattaggaaatgtggacaattaaattgccacatggaatgttttaaacctttctttatatattgatgatgatagctgattaatattgatattgatttatatatatataatacccatttagaattgtttcaaatatatatatattgtataatgaatatctatctatatatttatataatactattgttaggctaggtgacatggcactctaacttttgaagaagcttatttttcaattttctcattgtttcaaatttttattattttttctaattattttatcattcaatgcttattcatgttaatattacattttataacttttggtattctaaaaaaatctttgactcttttatatttcttctcatcaatcatcaatattaattaatatatgaatgtataataaaaacctctaattttattcaaagtattatcctgtatataagtgcactcttaatgggttaatatttaaaaaaaaatctctcattttttttattatatggactgaagttgttcccttgactgaaaagaaaataataataataa

SEQ ID NO: 372443 - DNA, 938 bp, Cannabis indica
agtcattttccatttattcctgcagacttcaagcctcaaccggagccagaaacgatggattctaaggctgaggagcttccgactaatccaaaccaggggagccctatagcctgccatggccgatcctcacaagtgatcccaaagggtatacatctgtgagcgatctcaaagatcctcctcagactgatgaagaattccagaggaagattggcatggttttaggtggatctgggaaggaagttagcgtggtttctatcagagaatccagccaacccaagaccctaacctgtgccaggagatctttgcgtcagcctctctccaatgttgagaaatttcataaggctgggaaagagatctcgacttcaggaaatgagatctgatgatgaggagaatatggtctgtgcagagatcaaggctctctacgtgcaaagggtctttctcgtctatgtgtagccgatctttctcgaagctatgtgtagacggtctttctctcccatcctcaacttaggagaatgacttaatggttttcccctagtggtatttttataaagacaagtttgtaatatttttcttatcttaaatgccttgtactgttttcattcaaacttagtacaattgtattttcttgcatttttattcacaatgtaaacaactatattttgatcaaatatacaacacttttgggtttctccattgctcgtaatcttcttgtttaagtagttagtaatctatcaaacttaatgatttttgagaggttgtcaattctgcctctcaattgcagttataatctgccttaagcaaacttaaatatactttaaggattttatcactgtgtatatttttaatttgctcgtatgaatagttatattatctatccattttcttaggtttgagtacttttatcaaggcgtcgtgatgcctcgtttagtactttccta

SEQ ID NO: 372444 - DNA, 696 bp, Cannabis indica
tcctcatagtgagatggtcatcttgcatacttgttcttcgagtcgatccaacttttacacttagtttgcttattgcaagctaaggtatgtgtcacttttctctggtgcctcactattcacctttagcgacatatagtttctcattaatacactaagtgccggtttgtacattgattcctcgcctgagaccttacagtcagtgggttacaaatatactctgatacttacgtaattaatgagttattccataaaaatatattacaccgattcacatttcctttatcttgacacttgtcctccagacgaattttgggcataacatctaccatggtgtgtgatgggtgatcttaacaatgtattatctcatgatgaaaaaagggcggtaataggtactctgattttttaatccaaggttttcaatagccttggttgatagtggacttcaagacatggagttatgtggttatttgtttacttgggggcgtgggagggggactaatcattggatcgaagtgtgtttggatagggggctagataatcttgcttgggtgaacatgttcacttctgctaagctagataatcttgaaatttcaatctcagaccatactccgattcttatggtatggttcctgctgctggccacaattttgtgaagcggtttcagtttgaaaatgcgtggttgagggaacctctttg

SEQ ID NO: 372445 - DNA, 1095 bp, Cannabis indica
atatatataataaaatatgttgttaaattctttttaaaattcatcataattctttttcaataattcttaatagttataaaattttaaatatggatattttttatttaaatattaaataaatataaatttaaataactaataaaatgacaaaatagaattaaaaaaatattacaactatatatagtgaattttttctgaaaaattattattattgttttgacttcttgaagggattattatatcattgttggcttatgtttttttttttttatttatttttggttaattaattgtatttttacttattgggttaatacaaatataaatataataggtgttgtatttaattctcattctattagtataaattattttgaatgacctttggtttttataatacttattgatattaattggacacataatttctcttttacaaacttaattaagttattattgttattattactaatctataaattattatgatgtaattgaatgaaaaagtaatttaaaaactaaataaaagtgaaaaatggagatagcaaagaattagaaaaaaacttcatataagatgccacctagaatgctttgtgcattcctttatatttatatatagatttgatatacatcgtggttaccttttaaaacttacatgtatacactttaataatcaattaattatttagattatattaatacatttttgagtaatttttaagtttatttttgaaaataatgagttgtcatccagtataatactattttactaaactgtattttaagaaatatatatcataaatgtttaagtcgcacatatttttttaaatgtaaattaatatatgtattttgattagttaaataaagaataaaattacaagtaactttttaaatcattacaaatacgatatttttttttggaccaattaattatgacttcgataagatgtcaattggttactttgataaaatcatcaattttaaaataaaaaagatgataatcataccaaatatagtataatcagatatgactttactcatatatgtcaaataaatttattaatatattttggcatattaaaacaaattttcatt

SEQ ID NO: 372446 - DNA, 770 bp, Cannabis indica
atattttattaaaacataaattaataaattaatattttactattattttaataaatcaattaaaaacttaaatatctaactttaaatcttctctaatttttaaaaaacatataactctaaacctataaatatatattatacacagggccggccctgactcttagtgggccatagaaaaaaaaaattattttgggcccttatttaaaaaaaatatggtatttttcaaaatcagtaaaaaaaatggtataattttaaaagataaatatttttttttgggcccctgggataggtgggccctaggcacaggcctagcccgcctatgcccagggccgggcctgattatacatatatctctttctctctctcacgttttctcttcttcttcttctttctttttttttttttttatttttttaatttgaaattaattttattttaatttttaaattttttaaataatttttacgtggaccaataaaattgtgccacgtgtacactatgtcaagtccaacatggaacttaacacctaaaatggacggaaatgttaatttgccaacagatcgtagttttgggggttttactgcccaaatttgggttttaggggttaagtgaaaccaaaatgaaagttttgggagttttgccgctatttacccaagttaataaaatggtgcaaatgagtattattgtaaattaataatgtaaactaggaatttgaaatgtcataatcctttttctaaagtacttatggtttgattctctaattaattaac

SEQ ID NO: 372447 - DNA, 769 bp, Cannabis indica
aaatatctttcttggagtgtcaataaaaaaagggaaaaatattgaaataaaactgttaaaagataattattaatttaataatattgaaatgatgaaatgaatatatttatattttataaacttttttttttttttagtgatgatgaacagtaacaggggaaggcagctagccccactggatttggaagaacattataaactaaacaaaaaggctttcctcgtgacttcgagcacactcttcgctgtccacttgatcaatcttcatgtgctgcggaagatgcacgctgagcatcctcctccaacagtactgccattaattatatttttcccattataaatatccataaataatatacgaactatcatgaaatccattaattagtttaattaaacaaatatatctatttgtatatatacgcccgacaacgatcttactcaacaatactaacactgtgtttggtaggggaagaggatcagaggaaagacgtacgccattttcaatctctcctaaaaatagaagaataacataaaaatctatattaaatgtgtttttttacccttactactatataatcgtagtagaaatgataaaataataattgatgataaaataatttttgtataatatttaaatgtcatataattagaaaataaaaatgtgaaagagagtaatagagactgtaggggtgtttattaaaatatttttttaagagataatacagtacccactaatataaatattatcttttaaaaaattaaatataatttt

SEQ ID NO: 372448 - DNA, 656 bp, Cannabis indica
aaagaagatgcaaatacattttaggtttagattattaattcttacttatattaaaataaaataataattacatagatagatttataagttgttttagattgaatgtattttagttttaaaagttataaattttaaaatctttattattattaattaatagtttaaaaaaagtatgaaataaaaattaaaaaaaataagaaaataaatagatgtgtttagaagaattgtagaccgccacgtcaccgcttcatactttacttttatatatattgattgattttttacttttttttttttggtaaggaaaggtattaatttataagcgagtaattacgacacctcttcaaagatttcaaattttaacctcattctctaatttataatgaaattaggaaacaaatcacgcttctcgtgcggttgtatttattttagcgacaattaatttttaaaacttacattaaatatcaaattttgatatttttttttcatataatatatatgaaaaaaataagatttaaaaaattactaataaatttatagaaaactcataataattttcaaaatcgttgttctcactgtatctcacttgtagttgctactacatatatttaaaaccgatgttatcactatatctcacttgtaatcactactatatt

SEQ ID NO: 372449 - DNA, 693 bp, Cannabis indica
acgatatgaattgtaaataaatatgttctgtaaattaaaatcttaaaagcgataattaaaaatgtttaaaatttcatacttttgtaattttttctggtgtatttttgaaatagttccttaaaaaatctcttatttttacattataagtgctagatttattccatctgcggaaagaaataataatagtaaaaattgagtctaacttaaatattttttatataatatatttttgatataaaaagatatagttttttataatttttttttattaagtgttgactgagaaatctggactagacttctaaaccacaccgttgctagattggtgagaatgaataagtagttaagtttatataagagagacacaacaaatttatagcagttcactccctatatcgtaacagtaatggtgcgacgtctacttcaaatttttatttcttacgagatgataatgacaacaatagactaagtgtcagaagctctaaattctataaatagaaaatctagagagagaagctcatgtgggtagttttctaaatgttaaaaatgagctaaaggtaaaagcttgtatgaacaacattaatggtgcaaagcaccaagaacacaaacagagagaaaagaaaatgagcaaatatatatgtatatatatatatattctggacttgatagaatttatacattaaacataatcat

SEQ ID NO: 372450 - DNA, 531 bp, Cannabis indica
atttatctgccctcttcatcctctacgcttaacatgagtggggtactccctctcctcacgaagtttcctggttctttgatttgaggtccaccccaagaaaggcaggtctgggtacttttacttctctcaaccaggcttcaagtggttgaccggcacgaacgacaaggccatcagcaagatagggcattttattgatgagtacttcatggtggatggaacgagcattactcggactcgattccagcagattctgacatatcaccgttctcccctcactcttgctcttagggatagagctcgaaaacttgcccgcctgccggggcaagaccagaatattatccagttgacctccgaggataactttgtgaggtacaggctctatcccgaggactttactcctaagtctgtggcagggaagaagaggaaatcaggttctagccggaccgaatgagctcatcaagagaatgaactcattcaacttaagcgcgaagctaagttgaagggaggtgcaagggccaagcagtatgctca

SEQ ID NO: 372451 - DNA, 665 bp, Cannabis indica
caccgaagacagaatagacatgaaatttgaccgaaaatgctcaccaaccgcttgtctaccttcaatccactccgcatcattcaatcgaacagcatttataaaattcctctttcgtttgatcacggtagcagcatggaaaaacttagagttcatatccccatctcgataccatagttccctggatttctgcttccaaatctccgcataccgggtttccacctcatctagttcaagtaagatgtccgcttccaatttcaaattgtcttccgaaggtacccttcgttgcacttccaccaagaaattgttgtattttgctgttttttatgttatgaaagcataaaatttagaaaaactgtttaaattgacttgctgaatattgttggaatctaaactgacggaaacgaaaaccaaaaaatcgtggttaaaattgtcagttgaacggtcgctttcttttcggtaataaaccgactgaaaaatcgaaatcaaatcttatacatatatactaatttaataagttttttttttttagctctttaagtattttagctactaataatatattattattttattaatattaaagttaaaattaattaatttttgtaactaattaatttctatgtttgtagttgtaaaatatataataatgtatttatagaataaat

SEQ ID NO: 372452 - DNA, 423 bp, Cannabis indica
ttttttttttctgccaataaaatgaatgttgaacactactttacggaatgaccgtagatattaattaattaactaactacatactagtaccattaatataataaaatagtttattactataggatttaagttttcgggctttaaatcaaagtgttcataaaattagtttttttttttaaatactattttggaccttgtctttaataaaaataattagttggaccctttattttgttaataacaaaatggactttgtattttctaaaatagaacagatattgaactgattttttgtcaaaatacaatttaataataatccgatctaaatgtgttatgacaaaactgtttagtgcatgtttgacatcatatttaaaaaactgttttttgtttttaaaaacaaaaatttattttttagtaaaacaa

SEQ ID NO: 372453 - DNA, 682 bp, Cannabis indica
ataataccacatcatcaatacaaacagtaatttttaaacaaaataaacagaaggtactaaatgtatgcatataaaattatacaaggactatttgtaacaagctgaatagattaaggggcataatagtatagtgtcataagtacaggggcaaaaaagataattattctatataataactaataaatttaaatttgtgattgaacaaatcacaatataacattttaaataatattagtactctttaataattttctttttatttgcttaagatacttttatctcctttgattgtttgtctataacatatgattgttagttataattacttatgtataggaggaagaatgttatactagtcaataatcatgtatgatatttaatgtgcaaattaatattaaatattggaattttattggagcactaatgttgccaataaaatctttatcaaactgtcccaatgatgatatatttaagtattaatggtgtttagtagcacttaaaagatcacgttttataaatagttagtaatattttataataattattaaattaaattatgtcagacctaatatttaattacaccaatagtgaaacaccatctttaaatagtaataagtaccactagtgcttttaagatttctaatgttatattattggtaatttaataatataatattacttt

SEQ ID NO: 372454 - DNA, 534 bp, Cannabis indica
ggtgagctcgtttcaacttatgaaaaacgagccagtactcctgacgctggacctgttgaggagattgaagtgagagtactcaatgaagtacttggtgaaaggcgtggtcttaatcgatgagtggggagaaaactaaagggacaatcttcgtcgcgacgcacacaacctactcccactcaagatatgcctatggatcccagagttgagcgtcaacttaaaaaattgacaagaacaatgttgtggatgtctcaaaggttgggacctgatgttcgtctacctactgaagaggagttgttcgcaatgccaatgcctccaacacagacgttccaacctcaaactgtctggaggtgggtctgcttcaccttcactagcccaggacttctcaatctcatcaagcgcagcagagtcctattccatttatgtattcttcgtcatcagctcaacaaactgtccccgtttccttgggtgtcctcgccaatgtcacagctgcaagtaaatatatgcaaacaaacactgcaaaatgcaagcagactc

SEQ ID NO: 372455 - DNA, 565 bp, Cannabis indica
tagataaataaattttaaaagcttatattaatttttagtattaattatttaaacaaataaatatcactactacaatacaagcctttagagttcactttttttttaactgattaataaattaacaaccaatgtcatagggtatggccgaaatgaaattttaataaaaacacatacgtcgtcggttattttgtaataactaacaccataggatgataattttttaattttaacgaaaaaatacatatggcgttagttattttgtaataccagatgccatatgtatttatataattctctatcgtcttcctcaaaccctgaaataaccagaacccacaaaaatctcacctaaccacccatttcttcatttttatccattttacctatttttgtttttaaatcttgcatttttcatatccaaaaatatattcctggagtttgatcgtcttttgtttagttttttaaggtaaaccaagctcagaggtggtggttgtgctggttcatgtagcttcggcatgcacttttggtggaaaaattattgaatctcaacgtccattaaagtataaat

SEQ ID NO: 372456 - DNA, 656 bp, Cannabis indica
attagcctgaatgttataatcatgccttgaacatatatgttaaagatcatgtggaattgggtatagaagacattctaggaagttaactgctacggtactttaataaaatgctataaaaacgttaataatttattttttgtaacataaaagtgtaaaaatatatagtataaaaaaaattacagaaaaaagtagtttgtgtcattttttttttttttgtgaagatatctcttaaatcttattcttatgttcattcttttcgaaattcaaattttagtctttcaccgacaaagtcactgtgttattactagggttgttttctgatttgattagggaaattgacattgtttataaattgcattttaatcttattttaattttccttttgagaaagtataaataaaacaaaactaacaagttacagaatctttttttagccaaattagtccattgtatttaacagttttcatatagtacatttaacaattagactatagtacatataatgaaatgatgttatataggaagagatgcttacctgttattggaaacatacaggaaaataagtgaagggatgtcatgaatacactaaaattttagacgattgcaatgaattattcaaagaatttgtcttccaacattttagtgttttgaatgtt

SEQ ID NO: 372457 - DNA, 272 bp, Cannabis indica
attgtgtatataaaaataaatttataatgattatttatatgttgtagtgattttgtaaattattctacgaaagtttcaattgaaatacaaattatggtgaaccttgtaactttatgaattgaacttgttttaatatgataaattatatgcagtaaattgtaaaataatttgattaaattttgttgaagaatcaaaagattcttcccattgttaatttatcatgctcaaagaagaatgtgcatgtattttgcacatagaaaagtaaaagtata

SEQ ID NO: 372458 - DNA, 888 bp, Cannabis indica
agaatagaaagaagtatctagagtaatttcaaagtcacatgtcactgctttatctcttttatatggatatatagatatagattattatcatatatagatttgagctataaagaagaagtatgaggcactgacacggtattctaaaatacatcattctaaaattatttttctcttctctctttaattctctcaattttaatattttattaaaacataaatttacaaattgatattttactattattttaataattattctataaaaagtataaatttacaaattaatattttacttattatttaaattttttataaaatataaactattttaaaaaatgataagaaaataaaaaatacattccaaaaaatattaaaacttaaatcaaatatattaatcgtaactttacgtttatataaatacataaaataatcactcaatatataatataaatctaaacttactatatataaagcagagacataaagtggtgacatggtacgattggttgccttttaaccatttctcgataactaaaataatcatattttttatatatttttattaattaagatatttaaaaaataataattaatttttttaaaatatattaattaataaataacaaaacaaactaataaattttctctaatgtcttaaaaatatttaaaaaaaaaattaaaattcgagatgaaatttaagattaaaatatagatttggaaaatataatagtgatgactaaattacgataatgataaaaaatatgataaagtgatgataacgggtaagatacggtaataaaaattagtaagataaacaacaaatgagatataatagtaataatatttataataaactattatatttttaagtaattatttattataata

SEQ ID NO: 372459 - DNA, 299 bp, Cannabis indica
tactcctacccggacttcctaattcgaccctagcaaaggcatgaaaaaaaattacggcgtttctcataatgcattattttcatatctcgatcattcaaaactattattgttattattgtatctcacttgttatctcattgtatctcacttatttttatcactgtatctcacctgttgtcatcactaaatcgcatcccatgtcattacttatataacagaatttttggtttatgagaaattattgggtaactttttactttaaataaaaaaaataacaaattattagatgttgccaaagg

SEQ ID NO: 372460 - DNA, 671 bp, Cannabis indica
gggcccatgaagaaagataccaaaaaaagggacatgacaaaattttgtcggttccacggagactacggccacgacaccaacgaatgttacaatctaaagcgggaaattgaatttctaataaagaaaaacaatccgcacctgcagaagtatgtcaagaccaaccaaggtcaaaacaaccaggatctgctacctccacccgtagatggacacttacaagtcattattggaggcccgcacatcgctggagattcgggcaaagctcgggagaggtatgcccggacagctcagcacgagcaagaagaagtcatcctggccgtggaagaaaggaagcccaaagttccacgagcaggagagccaaccataactttcaacgatgaagatgctgtcaagattagatttccgcacaacgacccgctggtcgtggaagtccagatagcaaataaaatggtggctagaaccatgatcgataatggagcttcttcaaacattttgttcaagactgcttacgagaagatggggctccaactcaaggatctaactccatgcctccagcctgtctatggtttctccggtcaaggagttgcacctctaggacaaatccggctacccctcactattggacaagctctgacgagcataactatcattgcacagttcctaatattggatgt

SEQ ID NO: 372461 - DNA, 663 bp, Cannabis indica
catgtggggtcatttgccccccttttaattttttgtttatataaattctgtgtataaatttgtaggtattttacattctgccctataacaatatttttttttatttacgtcttttacatatttttatatttgtccccataaaatttatatatatatatatttttttatttttatcccacatatttcatttgtatccttttaaaatttatatttttcatttttattctcacatatattaaggggtgtccataaattaatccaatctgataacaaccgaccgccaaatattggatatccaattgtgatcggatcagattgaatattattttttaatatccaatcggatcagatcaaatgttggatgaggtgtccaaaaattcaatacatccaacatacaatcaaactattaatatttttatttaatttgaatgagtaattaaatttaaggttgttatacgtaaaaatatatatatatataaaaattaatattaaaattttactttttttttggatttagatatgtccaattcaatctaatagatattagatctaaaatattagattgatccaatatgattcaataaatactaggttctgggaaatttacaaaaatactgaaatttgagtgaatttttataaaaatactgtcacacgaattttttt

SEQ ID NO: 372462 - DNA, 550 bp, Cannabis indica
ctccacccctatcagtttgcaaacacttaccttaatagttttcaccattgcttgaaattcatgaaaattttcaaacattttaaatttatctactcaagatatattctagagagatcgtctaagaatttaacaataactcatatccattcctgaatgcacatccatatgttcgtatacagatgatcctacttccaagtggatattggcttattactctttacagagaatgatcttgtcaaaactactatgaaaatacaaatgccatagaaatattactgtggttgtggtcttttgatgatttctaggtttagttacaacaaagagttcttagaatagttcaagtggattctggtcacagaatacaaaactcataatccatacatttaacatacaatttggatccaataatagaaaatagatattaacaacttgtgaaagttataccgtaatatttaatgtattctagaaactaaactttaatttttatttagaatctaaaatttaaagtcaaaaatttaaattgggcttttttcattaatgtacaacaaaa

SEQ ID NO: 372463 - DNA, 501 bp, Cannabis indica
aaaatagatttttggtgtaaaaatttctattatttataccgcaataaaataatagattatatttctaaatagaaaaaatcaagatacattaccttttcaaatgatgatataatatctcattttgtggaggatatttgtgatttctggggcatcttagtctactatcctttttaaatggaaactttaataatgttatcacagataagacaatggggtccataagaaaagaggttgcatgattaggataactttgtatagtggtgagttatcatcaaaaatactttgtataataatggttaattcctttctctcgtcttaatttgtttggacgttcccaacccctataccatactcttcttcatatctcaaatggacacaagtttcaaagctcctacttttttatgtgagcttttgataagttttttatttgaatttcaataataaaaaaagactgtttgtttagttggaggtaataaaataaagtaaaatgaaaaaaaatta

SEQ ID NO: 372464 - DNA, 241 bp, Cannabis indica
ggcttttacacaactcaatttggattttttatgaattagttatgattttttgaattcgaatgaaaatatctgaaaccaagcacacacatgcgtgcacggatggggatgctcgctcggacaagatgccttcagacaaggtgatatttgaattttcccctcctgactgaggttttcccctaatacaggctgcttgcagcctctccctcacccatttgcaacctcatgtgcgcacggggagtat

SEQ ID NO: 372465 - DNA, 1023 bp, Cannabis indica
aaaaaaaaaacaaatattattcccaaggacattgtcgttgggattaatttttattcccaacgacttaaaaagtcgttgttaataatcgtttttcccaacgaagtattcccaacgactttttaccaacgaaatgtcctcattaatgcgcaatactgacgaaaacaggggtttttaccaacgaaatttgtcctcagtaatgctcatttttcttgtagtgtgaattgaaatgagttagaattcatgtgagagttttaaaaaataaagagaactaaatgcctcatgttaatgggtacataatgataaagtactcttcttttatttgatctcttagtaagatctgtttttctctttcaattcaatgaaagtatttatttttattcaaaaaatattgcgtttgatttttttggtttttaagaaaaaaaaattattgtacaatttaaataaaaattgagaaaaatactctttgtacaaaaaaaaaattactggctaaaaaaaaaaattatacttctctgctctaatacacgtgataaataaaatgcacatcactctttgaccaataaaatgttaaaaaaaatacccctactagtgagagcaaagtgatgctctcggcttgagataaggcaaggtgtgcgatttgatatctgtaacgttcatggtctcaaaattgtgaagaaaatatattattttagtccacaaagaaaattttgaataataagatagtattttaaattctggaagaagaagatgcagcatttccaagttgcaaataattaagtacttcgtattgaattaatcaacaagccgataaaactataattcttctttggatgttccgttgtccagagagccattggatcaaatcttccaaaaaaagacctcatagtgggattcgacctttacacaaaaaaatggcttagaagttagaatactcccgtaaaggttatcttgtagtggaaattctagtattttgttttgttgttcaataatgaaatctgaatataggatttatattatgttagacaa

SEQ ID NO: 372466 - DNA, 522 bp, Cannabis indica
tggacacgtgtctcgcttttattagctaagagtggagcaaatttgacttatggtatgttgtcggggtgccggactgaaggagagctagctgcgtggctggcgagtggagcaaacaaaaggcccaggaggggccgtgcgctccacgcgcgcgtgaggaagagagagggaacaaccccctggcgcacctgcggagcaaatgggaggaggccacatggcctctttgtcttctagaatgagaaaatgggctgccttcttgggccaattttgggccttttttccttagacttttggcttttaaaaatgtcattttcatgtactttgggcttcattttatcatcttttttaattcttttccattcttttcacaaagctatttcttcttcaaacacaaacaaaaaaattttcaacataaaatatatcacaataattttaatgaaaaatatttatttaaaatttcattaatttgtaatttctttaaataaaaataatgcattttctttttattattttttttttctatta

SEQ ID NO: 372467 - DNA, 751 bp, Cannabis indica
cttgacattattactttatttgtaatattactctttaaagtttttgtattttttttttttggactttttaattttacattttaagatagttttttttatatttttaaggaattacacataaaaattcctatagcggagcaatttaaaaaacaatcaaaatctatatatatatagcaacccacataaaaattaccgaaaaatcactgaacaaatctatatatttttttttttctatgcacaagttgtaatatttctttcatcaaactattctaagtactaattttacatctaattatcagcttttgcttaaattgtgatgttattagattgatctatttatagtgataatgtactcactgttttaaggcagccaaattttcggcgggtaccattaaccactaatctcttttcaatcagttttctttaaagaaagtcaacgcatcgaatgaaggtttgaacaagatctacagtcaataatttaagttcattgtctagttatgtacttagccaaataatccatgtgtaaatattaaaataatatacatgacatagcacattatatagatatggctccaaaactttacacaaaaaaaaaatcacacccaaattcattaagatatatctatagtcaactatacataaattgatcttcatatatatatatatatagcgccccatgaaccaatcaacttgaaatcaactctattaagtcttatatttctcgaccactgttatacatatatatatatat

SEQ ID NO: 372468 - DNA, 452 bp, Cannabis indica
aaaactcaccaatttgctcaaaacttgtccaattgccaccaaactttccagaggtacttaaaaaattatatacacgtattccaactagaaaatcacagaaaaactcaatgaaactcaactagccattaaagaccaaagctttgagttcaaaactcaaatttgcataaatctaaccccatacactaaaaccagctgcaaggagcttaaaccaactcaaatgaactttaaaattcgaaccgtaaacatttctaaccctaacagccatcaattcacaaaatcacatactcaaacaaaagaaaaagcttcaaaatacatattcatgggttctagggtttacctccacttcaagaacacttaatccttagcttaattccagaaaactgagaagaaaaagctggcctttcctttggttttgtctcagctgagagagagagagagaggagagagagaga

SEQ ID NO: 372469 - DNA, 576 bp, Cannabis indica
ataaaattcctgtgtctttatatagctttactatatatcaatcattataaactacttatcgcttactaaattagactcattgtcgttggctaaaagcaaagtcaacattttggtgctttcattgagagcagaatcaagaatcgctcttcattcaaaatctaaccacaagtacgatggtggtacaaactcgtaggggtatggttgatccggcaaatccacaggcggtggatcttgcattgcagaacccaggaaacacaagggttccgacagctattaatcctaaacagccgtcgaacgtaggttatggtgtgacgactcctgtggatgaaatcgcacctggtgtgcaacagactcagaataccagtttagcacccagctagggcattcataacacagccgttccgcctgccaccaacgttcgaacgaccattggagatgatactgagatccaaaacctttgcgctgctcttggaatcatgcatggtcataccaacactctacattatcatcacgaggaactccgcgctgcggtaaatcttgcattcgaggaaaccaaattgttaggaaaattatttt

SEQ ID NO: 372470 - DNA, 857 bp, Cannabis indica
agagttgatgagtttattaaactagaagaggttgaatggaacgccaaaggcctcaaccaagctaagggaaataagaacggagcaagcactagtggccaaggctcccatggttaggagagtaataataaaaatggctttaacaatggaaagaggaccaacaacgattatggtggaaacaactttattaacaacaaaaagccaaacaaagcatcctcatgaatgaatatgtccttctaattgatacaatcttcagccacgtgcgacattcctcttgtccttagctatgggtatgataacccatcatcctgccaaagggtgacttaccactgagtatggagtatttgggatcatcccacctggaatatacaagttagcatgttacggtgccaacacaaagctagtactagtgtgttaccattaaaatgcagagcacctgcaaaagtactaccaatataagttgcttttcagcaatgacttaggctggttggtgtacccgcaaagtgatttccatagctggtcgtcatacctacgaacaaagtttgataatgtaaaggcacaaattgcccacttttgatgtaataaggcatatttgcccattttattcatcaagaaaaaattgcaagttatttttcatataatggcgcagcttgtatgattgttattgaatcaaattgcaagccgaactaaggtcaagagtctatgaaattatagtggcaaacccgtgacaataacagttcctatgtgaaagccctgattacttaacaagtgatcaagaggtgaacctacttagtcacttgggcggcaaccatgctcaatcatggagtgtaaagcataaaacacactcacttaaatagatt

SEQ ID NO: 372471 - DNA, 144 bp, Cannabis indica
tctctctctctcctctctctcataagaaaaaataagagcactcatcctatatctttctctctttgatatgattaataaaaataatactttttttttttatgttttgtagtttattcggagttaatttacgaatgatttgcatat

SEQ ID NO: 372472 - DNA, 520 bp, Cannabis indica
tattgagtaccttaaggaaaaaattaaaaattctaatcgaagttaataaagatatgtacatattattaacaaaaatattaaatcacattaaggtgccatgcaccacaaaaagtagcataccgttattcgtgcattttaatatcagctcccacaaattttaatttaataaatgatttagaaataggtaccacattggtatgatattgaacaccttaaagtaccacatagcaataataatacaaaaaattatttaaaaaaaaaaaaaaatacaaatatcatttttcaaaaaaaaaaaaacaaaaaaaagtcgttttgtttattttgtggtgaacatcaattctttaattgatgttattaaaaaaaaaacaaaagtcaaaatcgttttgtttgttttgtagtgaagattaactcttctagggctcgtttggtacgccgtataaggggcgtattgtattaaataataaattacattatgtttaaagcaatgtattgtattaattattacgaccaaaatttttaa

SEQ ID NO: 372473 - DNA, 722 bp, Cannabis indica
agggaacttacctaaagggatgtgcttccattgtcctagcaccttcaccgtttagaaccacaacgagtgactaagtgtgaactattctcgtcgaaagatggcaacgctcctctacttttgttctgctcgtttgggcttctgtgttgcttcctttacattaggtttgttttgtttttttttttttttatttttgtctttagttttttttaactcttttaatattgtgcattttatgtttttaatggcgttggtgttaaattatttttagggagtttgtctctttagatgttcttgtgtgagctttgagcttattagtcattacaaatcggagtgagtggccgagagttgtcatcaaaattgtggtttttccactagatttgtaggacgcttgctctttgatcgaatgaagttctcatttaaaaaagaaaatgaaaatgttatttaaaaaagagggaaagaaactttcaatttagataaattaattaaagtctttttatattaaaaaaaaaaattaaagtctttttaataaaaagaaaaaagaaaaagaaaattgcaaagagttttgagattcccaagtataatttaagtagtgtgtgtgtgagttggatgcagttacacatgtcttcaaggtaatactgtaattaatactaaagcaaagcaacctccactacaccttcacacccatctacccttttcttctctcacactctctctctctctct

SEQ ID NO: 372474 - DNA, 662 bp, Cannabis indica
gctaggagttagttgagtctatttatagacaaaccaacttaactaacttaaccataaaaccggtaaggtagttgggaaagtcctaagagtatttatctaaggctaagtttctaggccactttacaacaattccaccttggcatagatacatagacttagagaacaagagcagtaaaggctgaacattaaagggaagttggaaactcatccaatttccttgatgttgaccaagttcagacaatgtctaaacttggtttgagtgacactttttgtaaaaatgtctgcagggttgtggtcagtgcagattttcttcacttgaacctccccattggcaatgatctctctgatgaagtgaagtttgatgtcgatatgctttgatctatcatggaacatgggatttttcattaagtgcaaagcactttggttgtcacaatggacagtcatgtcctcagagttaaacccgagttcctttgataaaccttttagccacagtgcctcttttattgcctcagttgcagccatgtactcggcctctgtggatgacagggctacaactttctgcaggttggacttccagctaatgcatccacctaaagctgtgaagatataacctgtcaatgatctccttgtgtcaatgcatccagcataatcagagtcgacaa

SEQ ID NO: 372475 - DNA, 639 bp, Cannabis indica
aattttgtgcttcaattcctgcaatttcaagcacctctaagtgtttttcaagccatggtaagctcctagcaacttcctccttgattttcttgagttttaagaaataagttttgcatgaaatggtgattctagcttttgttgttgttgttgttgtttggttttgttttcagaattttatgtatgcttggatatgttgatttaagcttattttaattgttgttagttagtttaaccaagtgttgagttttagaactcaaacttagagctttaatggtgattttggattttgagcttgggtaactattttattccttgaaaatggtttattggggtataatatgcaggtttggaaagtttggttgagtttggaatcgttttggtgaagctttgaatttttgtttgttttctggggaaaattgggtaaccggttttacaagtacctctaaaaccggttagccagtttttgcagcaaggaatctcgaaaaattcagcttgttgattcgcgttagtttcaggtttttagttggttgattccctgctagtttagggtattgccatattaagttgcagtagataggtttttggtaaatacctaagtcccggatgtgatttagcgtgtcacttatttgtgttgttatc

SEQ ID NO: 372476 - DNA, 607 bp, Cannabis indica
tggtgaaattttgatcctcttgcaggctggttttgttggtttcacacacgaaggggagaagaagaagaagctcgattttcgatttccttgccttgcaagctaatcctttaaataaggtttttattttttttacttttctttaaaaagtcagcccaaacaataaaagtatagatacctattctaaagaatgacaaaattaccctccaaagaaacataaattttaaaaatagcctagggacatttcggtaattttactaatccacaaaaccgacattctaaaattctaaactagtccaaaatatcctcaaaataattctcccattagtgtcgtgacatttctaaccacattgctaaatttcacaattgccgggcccgataaaatatttttatttcaataattgtatcttcgatacccacatctctcaatataatcttcgtaattaataaagtacgctttatatatcattagctaaattctcagtagttacccaaagtaagatcataatcttacttcattaccaaaataatgacatatttaataaaatgtatatttaaatattattttatttttcgggatattacatattagcgccccaaccacgtaaaa

SEQ ID NO: 372477 - DNA, 775 bp, Cannabis indica
aatttatagtgtatatatacactatatatatacattatatatactatatataccgaatatatatctatagataaaggttgggttcgggattagggtcgtccaccatagcctcaccgtgggttggcaactcgtggggagccaccatggccatggtggttatggtcagccacggaggggagcagccatgatagctgtgggtcacgaaggacctgcgatgacccagtcgggtctaaaaatgcatggaggacgtctcacgtccatgcatgcaacgtcccgatcaacaaattagggacctcaaggtccactgtccgtcgtctggtggtctgtccaccgtaccgttgacgatcaacagcaaggagggcgcggaacccaaagcccaaatgggctgctatcatcaagggaacacggtcaaggtcacccacgatccgggctcacgtgcatggtgtcctttaattgtgcatggccaggtttcaatatcgaaactaagctcacatgcttttgagcattacataggtgtataaatttgacatataaattaattttcataaaattaaaaactgtttaaaaaaaatatttaaagcgcaacacacaaacgcacgcacgcacgcacccacacatgcacgcacagttggattggattggatgctaaaagttggattctaattggattggatcagttattggatgtcaatctcaaaatccaattaaaaactaatccgatccaatccaattacatttatatatattaaaaaattatatatgtaataaaaaatat

SEQ ID NO: 372478 - DNA, 558 bp, Cannabis indica
actatgggaatcacagataatttgtcaccaccagttgtttcatccgataaaagcaacttaatgatttcttctttctcatgatcccttccataaatatcagattcttctagagatggagcacataccctctctggaatcttatgatttttcacacgttccaaaccaagatctttattgtctagaagaagcttcaatttctcaagtgtctcttctatctcagcttttatggtcttatcaaaggaatttaaaggaattgatgagatgagtctcatgagtgcctgacaagcattatgcaatagaataatttgtaattgatagagaatgagggagcaattatgttatattctcatacaataataattaaataattttataattttataaatatgatatcttttggactactagagccttcattatttttcactcactttttgatttgaaaagctcattgctctcaagtttttctttgtatatctctaaaattttatatttttggtttattgacacaacaaatcctcatgtcatcttttttcttttatggtgttgatataattt

SEQ ID NO: 372479 - DNA, 600 bp, Cannabis indica
ctgggtcttgagtcccgagttcgagtccaggtccgaggtccggggttcgggtctgggttcgggtcccggtctgggtccggggtccgtgctcgggcctgcgtccgcatcccggtccgggttcgcatgccgggttcggatctaggtccgagttcggggttcaagtcttgggttcgggtttggggtctgggtctgggtctggggttcgggtcggagtttgggtctgaatccgggttcgggtccaagtccgggtccgggtcccgagtcctaagtcctgggcccgggtcggagattggtgttgaccccgaatcttttgcaaatattataatacaagctaatacggactatttgttatgtattaaataatacaacatacattatattaaaatttttagttgtaataattaatacaatacattgctttatccaaacatagtgttatttaatatttaatacaatacgacccttatacggcataccaaacgagcccttaatgtataaaacgatagtaatttaaaattttaatacatatgacacaaataaattttaaaacaataaattaaatttatattctattttaatgtataaagaaaatatactcta

SEQ ID NO: 372480 - DNA, 512 bp, Cannabis indica
gtatatagtgtagtcatttattcaccttgtttacaaataaacaatagatatacaaaataaattaaatataactaagctcatattaaaatcaatctcacctttcaatatagtaaaggtttttaaattgattcattctcacttaataataattgtgacagaaataacgaataataataatattatgttacctaataacaaaataggaatccaccaaacaacattatgaaaatttattccaggtataattatataaatctattactcattgaagtctataagaaactctctaaaaagctcacaatacgaaatttcacatcaaaaatctaaaaaatgatcaactatgtagcaggaataataatacaataaccaaaattgcctagtcatatacagtcttaaaacttaaaagagtggcattattcattcaagtttcgactaagtgtttctgagtttgagttataatattgtgtcatgtgtttatgtccaaatattatgtgtctctggctaatctagtg

SEQ ID NO: 372481 - DNA, 704 bp, Cannabis indica
tttaagatacaaaataataataataataataaaataatcattcaaaacataaatatctctttacttatcatattttgactatatttttagaatatgtttaagagcacgtgtctttcgtatttagtggactcagatcgtcatggccacacgaggggagccaatcgggtccctttcgtgccaatcaagtcgttgaggtaatttggtagctgatgagctctttgtgccttagcaattgatgcagcagggaggttagtgcacctaatgtgctccattggtaggaggtgtaatgtgccaaagtgctctattggtcggaggtacaatgtgccaaagtgctctattggtaggggtggaatgtgccaaagtaggtggaatgcaccaaaatgttctattggttagacttccatatctaaaacaaaaattcatgcataattatcttagattttttgaagaataacacttgttattaatttgagatcccattatttctttctatttttgacaatgataaggttattataaatttttaatatacgaagtttgatgtgattttttgataaaagtagggaaaaattttcaacatatgatgtaaaatatagtaattgttttctataaaaactataactaattattatataataaaataaatgtaaatgaaaaatagccccacatgctaataatactaatataacatcaaaacaaactcg

SEQ ID NO: 372482 - DNA, 400 bp, Cannabis indica
atagtggggtcgcaaatgttctacgttctattagttctttattagcgagccatcaagtctagccaatttatagactccaactccaactactacttcgatgacatatggaccctcccagttcgggttgaccactcctgccgatgcatctctcgtatttgcaaacaatcatcttaacaccaagtctccaacattgaatagtcttttcttgaatcttttgttaaagtatcttatgactcggtgttggtaagcggcattggtgatttgcgactcagttcgttattcctcaagtagatccaaggacaaatttaaaagttcctggttttcttcttgattataaaactctcttttgtgagtcgatatgttcacttaaacaggcgacattgcttctgagccaaatgct

SEQ ID NO: 372483 - DNA, 559 bp, Cannabis indica
ttttttaaaattagaaaaatattacttaaagattatgttatatctatattagttttaactaaattattttttatttaaagttatggtcgattttttaatttttataagttattgtgaattgctggtatataatttttggtgtacaatatatttatgttttattgtattatatattattattcttaaaagtttattttttattttgctatgtataatagaaatatacaattttattaccataatacaaatattttaatatatgtatataattatattgacatactacatatatttaattattattttaattgtatgatatattatttattttaaataatatttaattagtttctattttattatatacaatagtagtatataatttttttgtcatggtatatatattttaattgtgatatataatttgattagtatagtacatatatatattagtaatatatttttattattattattgttagtgttgaccaaggttttcggcaactagtaaaatatgattataataatgagctgtaagaaagcgagatgaagacttttt

SEQ ID NO: 372484 - DNA, 477 bp, Cannabis indica
ttaagaaattaaggactgacaatggcctggaattttgtgatgatcagttgaagaatttttgtaaacaagttgggattatgagacaccatactgtagtaaagaccccccaacaaaatgaacttgcagaaaggatgaatagaactatcatggagagggttagatgcatgctcatctatttaggattgcccaagaatttctaggcagaagttgttcttacagcatgtcatttaataaacagatgtccctcttcagctacaaattttcaaactcctatggaaaggtggtctggacatcatgcaaactaccaaaatttgaaaatgtttggttgtattgcttatgtccatgacagaaaagggaagttggatccaagagccttgaagtgtgtattcataggctatcgagatggagttaaagggtacaaactttggagccttgaactagggaaccaaacaggttcattatcagcagagatgtgat

SEQ ID NO: 372485 - DNA, 506 bp, Cannabis indica
tttccggggttgagattgcatgaggtggatgaagagccccaaaagctttatcgatgtgaactgaaccaagtggctcgcgcttggatgttttttgtaagtgctaggcttatgcctagtaagcatttgtcggattttccgttggatagactccgaattgttcatgcaataatgaagggaatctatgtgccagttggaggtataattttgcagagtttcgataacatggtcaaagccactgcacatacaggaattggcctagcaggaattataactgagttgtgtgttgcgaatggtgtgccacaatatccttatgataatcaagtacaaccacaacggaatattgattggacaatggtgcgcaacctaaagccccctcatccatatggtcaaccgcctcctcctcgtcgtaaccaacagccagaagttcatatccccgaggaagaggacaatccaaatgaagaaatgcctcaagcggttcccacatccactcctcttgatgcggggat

SEQ ID NO: 372486 - DNA, 737 bp, Cannabis indica
cccgagtcttcgcttgtttgtatgttgataaaagatattttgccgaggaccgacttctggaaggagttacaagctcgaaggctagaatcggtagtcgaattcttcgccatggccgaaccccataagagaattgagaattctctggcagagttggagaagggcaaggataagcgcaaatcaccaataccgcaatcaagatctcgcagtccccgacggaagaattgtaggggccgaagcccgtgaagacgcagcccacggagacagcgaagtccaaagttggccaaatctcctcccaagaaggagtcctcactgaagaggaagggtggatcgcgttttgttaactataccgaactcgcagtgccccgagaccacatctatgcaattgaagaaaggaatggagtcttcaagaagccgccccccatcagaggaaactgcgacagaagagaccccaaaaagttctgtaagtaccataaagatattggtcataccaccttagaatgttgggtctagcaggacgaaattgaggagctgattcagagaggaaaattcgataagtattaagaagagcgaggaaagtcatccccgagtagatgacaaggaagaaaccaaaatgcgaggttcgagaatgcctcacaatattttaactatcattggagggccccatatcgcaggagactccgcaggtcgcaagaacgatatgccaaagaagccaaggagaagccgctcactaatgtaaa

SEQ ID NO: 372487 - DNA, 533 bp, Cannabis indica
taatacctccaagctcaaagatcacctgccatggaatataaagaagaaacaagatgaaagaaacgtaatccctaatctccgattaaaaagttcgtcagcataatacccagaaatcgtatttctacccagctaaaccaagaaacctgaaatagacagttgttgtcatctgaacaattaaaacctaaaatatctttgctgacgtggactaacactaacagtacgaactcaagacaaaacactccgagtcccagacgcaactggaatgccactggacataatttgtcactacagaattaatggttcttacaaatagtactcgcattgtctaatttgtattcgccttgtacttatacttagtcattttttatatataaaaaaaatcctaagtatagggggtatataccataatgtactattaattatataccataacgtactattaattatataaagaaaattcttggaaattcttcaaaaaaaaaaactaaaaagaaatagagtttaacacaggcaaatattaaaggaaaagtcaa

SEQ ID NO: 372488 - DNA, 579 bp, Cannabis indica
gataaactctgcccggtggtgtggtttccacaaaatcagtcgtgcacttcagacaaaattcgtgcagcttcttcttgggtaacatatctaaacaatggcatggagaatcctcgtctgtacataattccctctactatgatgtaccgtgcagccttccttctcatctttcgagattcatttcgattatctgaagttccccagtgttgaggtatggttctattggcgtcatcaagtttggggaagtatcaatcatttcaatctcttctgtgccagtgatgctaggttcttcgaggaacggatagaaaccaaattcgctctatcacttacattactactcgtaagccaagctaatgcgtcagcaatcgtgttttcttcccttggaatttgtctgagagcgtagcttctgaagtgtgcgagcaaatcgtgtattttgctcaaatatgctatcatcttttctccccgagcctcgtattctccaaatacgtgatttactaccacctgtgaatcactgcagatttcaatatgttcggccttcatctcccgggctagttttagtccagcgatgaaagcttcatattc

SEQ ID NO: 372489 - DNA, 415 bp, Cannabis indica
gtctgacccagcaaactcacagacgctggatccgactttgaaggacccagtgagttcaatgtttccacccgctgtcaatcctggacagacgggaagcatggtgaatggtgggacaactcctattactgaaactgcgcctggtgtgcaagagactgggaataacagttccgcacacagccagggcgttcacaacacgactattccaccaagaatcaacgcccaaacgaccatcagagacgcaaccgaattttaaaatctccgtgctacgctcggactcatgtagggtcatagcaacactctgcatcatgatcaggaggaactgcgtgccgcagtgaatctcgagtttgatgaacagaggcgtgttggaaatattttaccaggatctagatttactaccaagtatgtttcattaaca

SEQ ID NO: 372490 - DNA, 979 bp, Cannabis indica
attagctatatagcctatataggcctagctaatttaatgagctaggtgatgacgatcgttaagtgtgcaagcaaaatctaacaaagtagtattttttttcaagttaatattaaactctaaactttattaattagtactgttaatttttttaatttgaaaataaaataaaatacaggatctttggttaagttgagggccatgaaaggaatccattgtccacatttgagtgagaattattagaacaaatgtataggtagtgttatattatgtatgcaaagatatttcatgcataaataataatatgagatattataattaataagcataatcaactggtatttttaattttctttttaaaaaacaatactttttatttcatgcaacattattctaatttaagtaataaaagtgtgtaaatgttatagtacatttactcttcatatttatgaaaaccagaatctacttttttaaaaagtattgttaatgttatagtacatattttgagtttatatattattactcttctatttttatatttttttttatctagtactacaaaaaagttactctatatacatctatatagtaacattttagttataatatagatctttttgtgactaaaagattttttagtcaaaataaaaatgatacttgtaaactaaaaaaaagtatttaaatccaaattgttattaatctaattttagtcacaaaaactaatttgttgtattaaaatacatttagttaataaatttagttataataaattgtaattttttatttatttatttttgcattttagagtattctatgcaaacacaagattcaaccagaaaatcacatgaaagtaacatcaaaacaatatcgaaacaacatcagaacaacattaaaataatatataaataacatcaaaatactgtatcttttgtaaataaaatctaaaaaccataaaaatatttaaaattctgtatttttgtat

SEQ ID NO: 372491 - DNA, 572 bp, Cannabis indica
tttatagaataccctctaggtttaggttagaattgtatggcattaaaataatggaaactacaaatggtaattcctagtgcatgtggcaggccatacaaagggatttgggcctcactttgcaactttcccattttgttattctgttgcccctgattttgcccaatatacgtgggccaaccagacaaggacacgtggatacaaaggtcttaacactcaaattaatagctaagtctttataaagaaaggccttatccgggatctacctcccggagaaggcatacgaagtcctctatgctcccggaggccaaggtggcatcaaagcatctccgggagatgtcaggcttcctctgagcagtcatctcgcatttaatgccgcatgggaggaggcgtgttggaactgccacacgcaataaagtctgacgacacaaccccgacctgcacctacgaggctatgatcacttaagtctagcgacggctactctgtgaagaatcacatcaatcaaaagacaataaggacaatcctcataaaacccctacgccacctagggatttgaccatgcattacccatggt

SEQ ID NO: 372492 - DNA, 704 bp, Cannabis indica
gagtatcaccccacactttcacattttactatcaagataatatcttgattttaaaatatagaagaccactttgtctctatatctcttttaattaatttccttcttgaaattatttttcactaaactttgacactaaatatgtcaatattttcacttatgcacatagccaaacttgatttagaatttgaattcaaaatcaaataaattaatcaacaatgtctcaacacattttgattaaatttgtggctcacccccacatttctagcataaagtgtatataaaatatcacttttgtgtatttcctcttgaaatgactttttaaggtcaccttaaaaaatatcatttgacatttttagttttctcacaaaactaaaatatcaaactcacattactactcacaaaataatgtgattatttttacccattattttgaagttatctcctcaatgagattaacccaaatattacactaaagttaacaaaattctcaacaattttgttcactagattcaaaattgctaatctcaaattttgttatctcttttcacaatttttgaatccagattgattcactttatttttgagtctaaaattgctcttccaatttatgactcatttcacaagtttaaatctactatgatcttaattgttcttgcttatacaatgcaagtccaataaaagtgtaactctcatagtccattttt

SEQ ID NO: 372493 - DNA, 564 bp, Cannabis indica
acaagaatcgccgaaccaggaccctagacaagactaggaccgtgaccaggacccggaaccagacctagaacaaaacacagacctagcctcagacccaaactgagactcgaactcgggcccggacacagtcgtgttcccacaccggaactcagaccctgacctggacctaaatctgcgacccgatcccaaacacagacttggacctagatagggatccggatacgaaactggactcgaaccaagaaccaaactgggatcgaaatgctgcaaaaagatctggaccgagaacccgacccagacccaaagttggacccgcactcgggacccgaacttggacctggacccgaacgtagacccagaaaggggtcaagacctggagacaaacctggacacagactcggacccaaactcaaaaacccacacctagaatcataccaaaagctagacccggacacggacccggccccaactcgaacccagaccaggatcagtaccaaggacttagacccagaactgaatccagactcagatcgggattggaacttgggactcggacccaaccta

SEQ ID NO: 372494 - DNA, 659 bp, Cannabis indica
tgtctaaaaatctaatacatccaacatccaatcgaactaattaatattttcatttagttggatgaataattagattttatattgttgtacgtaaaatatatatgtatatataaaaattaatcttaaaattttactcctttgatttggattggatggatccaatccaatccaatacatattggatggatctgatccgatccaaaaaataataggtctaaaatattgaataaaccaaaattaaactaacaaatatatatgaaatacaactgatccaatccaacatccaatagatgttgaatcaatggatgactgaaattaataggattggattggatggtaaaatttaacatccaatatataattggatcgtatcgaaataagccaaaaacattaggtgtgatccaataaatacccagggccggccctgggcctaggcagactaggcccgtgcctagggcccactccaacctagggcccaaaaccagccatataatacctttaaaaaaaaaaaataataaaagagaggcccaacatcactttgttttcggcccagtccattccagcccaccacccaccaacaaaccctccctccattcttcacgtgtagaaaaaaaaaaaaaaaaaaacctgaaagtacactcatgactctctctctctct

SEQ ID NO: 372495 - DNA, 1225 bp, Cannabis indica
aatttaattataatccgatctaaaagtgttatgacaaaattgtttacattttctgtatctgtttgtattaggaattattttcaagttgattatattaaaaaaaaagttgtcaaaaattaagctcatggtcgcttttttattattttggaaaatacaaggtacattttgtcatttaacaaaacacatggtccaatcggtaatttttacaaaacacaaggtccaaaatggtatttatccttttaattttttatattagaaaagaggaaaagtctttcaaatataggtttagtttttttgttgtttttctcttcttttctctaaaaaaacaaaaatgtattaatttgtaattaatttggtacccatatatatgctgacacggctgccttgtacatgttccaacaaagtccgtaaagtatcctctcttaataagtattgatattggatactaataatatctagcaactttatatatgtcgtattgtaattggttagcgatattttctaaaagttattatattaaactacacttgatacttaattagattaataataatattaatacataagagctaaataagtgatgcaaatataaaatatacttcactttgttaaaagtttactccaataatgtgctaaattatgatgcaaaaatttcacataatcaaaagtgatctaaatttacatcacaataaatactatgcttttatatttattattatgtcatttttaatattttattattaaattttagttaacatactcatttgtattaaatgacttgcattattattattttataattaaattttacatttaactttgcattattattattttatatttttaataaattattaaataggcattaaataacatattaaattttacatcaagatttaaaattattcattggagcacaatattaaaagttgatataaaagtatcacaaattaaactactttttgtacaatatataactcaacttttacatctcccattgaaaagtactagtacagtacactattagtgcattatagcatttcgctttcttaattctcggtccaaaacactttcaatacacttttattgatgttattgatgattttttttttaatattggctaccacatattttaatataaagaatagctaaaagtcactattagtatctagcaccttcttcggtatcatattgttattaatgttattaagtattgggtctcata

SEQ ID NO: 372496 - DNA, 465 bp, Cannabis indica
ccaggttgacctttcttgcggcgacaaactgtctccggaaattggtctgtaacttgttccaacagcccacggatcctggttccagtttcttgaaccattcctccgcggacccacttagagtaagtgggaagcacagacattttgcgtcattgctgactctcatgaccgtcatgacacggttgaaccgtgacaagtggtcgcttggatcagagttcccggtataagctgccatttcgggcatcttaaagttcttggggagctccgcctccaggatgtgcttagcacatggctcccggtcctcgcaatctgagtcggagtcatcccctttttgccttcgggagactcgggcaatgtcttttcgaagtatggcgagttctgccataattccttcattcaacgtacccgtggagaccgcgggcccgtatcttttttggtcaaggtgatcccggaggtcaccttgattcc

SEQ ID NO: 372497 - DNA, 425 bp, Cannabis indica
ttatatatagatatagattattagggtaattttgttcaagatgtaaagtcaagaagactcaggacacagacagtgccaattatttagggtaaaagtctgcacgactcaagtactaagataacaccatgacaatgttggcctaaggtgaaagtcaggaggactaatgtactaaggcaacatagaaatgtcgaggggcgaagagttagaatgactgaggtattagtttagcatcttaatcaaagtgacatttggaatggagggaccgtatgtgaatgcggttagcttgcgagctataccttgaggggtattcctctaagagagaagttcttcccaagttgaagtgggggagcccactaattcatatgtttgaagaatcagggtacttgttcagttttggtgtgtgaatcttgttgggttttgtgccc

SEQ ID NO: 372498 - DNA, 587 bp, Cannabis indica
accattcctaaaacaaaattcaacaatacgaaattaaaaaggaaggaagaaagaaattgttgtaggaatgaatccgggtcgccactttgctcctccagtcgctcttgactgctttacaggtctgaaaatcgcttcaccctttcttcttttcgcagttttctttttattcttcattttaggattcaaaagacaaatttgggctcaatttgcacggaatctcaccgcagccatggcttccctcgccgcagcgagtgctgacttggccgcgacggtggagtagctcgtcgcggctactaaccccagctcgaaagcaacctctctgccaaatcttggccgcggccgtaaataaatctgccacagccagaagtgaaccaactcctgatttttttcatttttcttggctcaacttgacttttgttgcacttttgaagccctgagcatccacagcttcgggatacctgaaaacatagaaaacaagcgtaatctgtcctaaaacatcaaaaacgactctaattgtgacctgaaacgttggctaaaaatagcctaacaattcccccaaactgaatctttactcgccctcaagtaaa

SEQ ID NO: 372499 - DNA, 507 bp, Cannabis indica
cccgaacccaaactcagaccaggactcgaactccgaccctaacacaaacccaaactcgaactcataatcgcaaatggaactagaactgaactaggactaggaccaggacctaaacccaaatccgaacccatatcaaaaaccaaaaagacacctaaagccgaaccaagactaggtttcgaacccgaatttagaccggggcctaaacccacacaataaccgggacctagacccagaatcaggataaggattttggaaaaaaaggacccggacctgtattcgaccgagacccgaacttgaacctaggacccagctcgtgactcggcaccacaaatagaaccagactgggacccgagcttgggatacggatctggagcaagggcttggacagaacctgtagtcggtgtctggatttgggacccaactctggagccgaaccctgagatggacccgaacccacaactggacctgaaccaagtccaaaacccaaaagtggacccgaacccgtac

SEQ ID NO: 372500 - DNA, 677 bp, Cannabis indica
tttttttatataaataaattatgaattttatgaataatatctatggttttatgtatataattatgttaatagtgtgaatttctttttgtgttataacttgtttaattgtgtgttaataaaggtgtcaatttcgagtttatgtcgggtaacttgttaagaaattgtgttgttaagaaattgtgtcgtgtttatatttgagtattgacacgattaataatcttagtatgttagtgtttaatataaatgtgtcgatatgaataagatacaataaaaagaattgtgtcgatatgaaaagtagaaattacaatgtatacctattttattttatttattttaatttttacccttatttctatattctttaagatatacccacttttatagatgatgtcccaattatactccttaggtttatgtaaattatgtgctatacttaactggatggtgaaagtatattaggcaactcactcataagagtggatacattttaatgaaatataatatgaggatatttttgattattagatacaaaaaaaaggtatttcccaatttatctctctagaagactacactaacacaaccctctttaagcttttcaaaccatatatttttatttatttatttattaagctaaatgaccttaaaaagttttctattaactaagtaaccttaatttt

SEQ ID NO: 372501 - DNA, 558 bp, Cannabis indica
tttacgattttgttgcagtcatatatttttttagttgttaagtgtcgattaagcccgttaagtgctagctcaaaaatatgtgactacatatttctttaacttatttaataggaatttttcaatattatacctaaaattaattttatttacaaaaacacctttaagaaaattatttacacaaatatcggtgttccatatcagcatagataccgaaaatagtaaaaattagaaaattctcgtttccaaaaattgagttttgataaaagtaaccatttaattacttttgatgtgaataagatatcaattacttacttttctattaaaaaatttattttaagattttacacatacataaataataaaataactattttaatatgtgagaaatatatatttttctatctctaaaaaggacgactaatattaaaagaaacttttctgttttttttttatatatatatatatattttaaggctatattatgttattttattgtttaagataaattgaggttactttttttaatgtaatacatatgatgttttagatactattcaa

SEQ ID NO: 372502 - DNA, 595 bp, Cannabis indica
ctctaaggttctggagttcagaactaaactccaaaatctcaagaaaggcacactgtcattagatgagtatctcttgaaagtaaagcaacatgtggacttacttgcttctgttggagaaacattatctgctcgagatcatattgcagcaatttttaaaggattgccgagtgattatgacacattcataatctcatctaatactcggattgaagagaattctgttcctgagatagaagccttgctcttagcttcagaatcaagaatcgaaaaatccgataaggacatggatctgaatgttaatcttgctgttactgagtcaacaccaagatctgttgataatatgctgcaactcgaagcaaatgttggtcacttcaacaggaacttcaaatatcctgctcctcaaagaggtcagtattactccacttatccaaatttctccccttctaacttctcgaattactcttctaatcgtgccccttatcctggcaatttttatcgaggttcatcctcttccatgaatatgggaagaggatcaaatgctagaaccagaggaggaaaaccatctcagcaacaacacaggcttcaatgccagctt

SEQ ID NO: 372503 - DNA, 554 bp, Cannabis indica
gttaatcaaacatacttggtagtaaatctagatactgataaaatatttccaacaattcttcataatggagccatcactggcccctttgattatcatgtaatcactgtaaacgaggcttacgttgtttgacatgtcctcttatcggcattccgagacgttttccccatgctgcattaaatgcgaagggattgttcgtgtatgtcctctcctcctcccagagatgctttatcatatgtctagctcctagagaagaagggcatgctttttgtacttctccgggggctcactacacttgttcgtctgtatatgtctcagctaattctcgggtgaggtgaccttttggtccacgtgtcatacatagtcttggccacgtattttgggaaaaatccagaacaacatatgtgttatacataactatacttactttaatatttatatataattctctttactttcaaattcataaatctacatgaatagtataattttttttattaatacttatatttttattataattaacaatcatagttatattttttttacctgtaata

SEQ ID NO: 372504 - DNA, 501 bp, Cannabis indica
cgaagcgtttggtgcaatgctggcaggtaacgggggtcaagagatcatctcttttcgccttctttaaggcttgatccttgaagtccctgagctccttcacctcaaggattaggttggctgtcgtctgaaagtcagcctgatgcagctcctctagggacttcagcttggcagtcaaatcttcaactgcctccttggcctccctaagctcgtgccttaccttggccatggcctcatcccgggctttcagggcgtcatccttagccttcacctcctcagccttggccttcagcgccccatgatgcctccgcaccgcctgagcctccctctattgggcctccttccagaaggccttcctctcagccgccaagtctggtagactcttcatggcttcgtccatgcccccaaactcggacatgacgtacccatgatcaattaaagtctttgagaggcgaccggtctctacagtaatctggcaatacaagaaaaaggagtaagtacggg

SEQ ID NO: 372505 - DNA, 156 bp, Cannabis indica
tcacttagggttatgattgaattatttagataaaaaaatgataaaataatagcaaaaataggacatagtggccggcccctatgtgggtccatcactagttagatttttgccaattttctcaatcatttatctatttttcacaaataccactttttg

SEQ ID NO: 372506 - DNA, 729 bp, Cannabis indica
gcgccaggagccccagtgttcggcacctgaatcgaaggctccggcctgggagccctcctctcagctgagtccccaatgcgaaggggcttcccagcgatcgcctggcttctcctctcgaccgggctccccacgcgaagtggcctcccggaagcggcctgggccttggaataagccttctcctgggccttccggtagagatattcctggtacttcttctcggcggtggcaatgagttcatcccggaaggtcttctccgcggcgggcaccctcacatttggacagataaccttagaaaggttagagtcctccactgattggtgcggcaggatgagcttggccttccggcaattctccgtcgtgacaaggcccccgacgtcaaggtccgcccggtcataagttgcaaagacctgggccctccggagaaagacctgagtaggcgcggtccgctcataggggggaatcctgacccactctgtgagaagctccgggtgctccactgctcggaacccagaggagaagaagaaacggtggcgatactccttaacatgagtttgcctattataagggaccaccccatcattggaagggtgggcccggaatccgtaaaagccgtctttaaatttgtcccccttcttggggacagaaacaagttcataaaatacaaaatctccgccggactgggagagccccatccccgggcggagtaaaaaataaataagcctgagagca

SEQ ID NO: 372507 - DNA, 500 bp, Cannabis indica
ggtatatataataaaattgaattttcactacctatgctccttcgagtgcatgaatggattgtactacaatggagcctcgttacttctttcaagtttgcttgataatatatatatatatatatatatatatttatattatataaatttttgattaaggaacacctatattgaaaatcagcagcttcacaacagaagctaaaaaccactgatttaagtggagacaagaggctccccatccccttggtcggctctgagagtaggcgagctaggtgtgcgcttcggccccgaacgcttaaagtctagaaattgtaaaaaaaaaaaattattcatatatagataaaatactaaaagctaattagtaatttttctcaccgaactttgacatgtactaaatcgagccccctgaacttttttgatcgttaaaaattctccccgaactattgagattgctaaatttaaggacttttgtctaattttagtaaaaaaattctaacatggat

SEQ ID NO: 372508 - DNA, 430 bp, Cannabis indica
atgtaattattcttatatagaggtatactttagtaatacgggacttaaaaaatgtataactaattacaatttagaggttattcttatttataactggcccaaattgggacttgatttttttataaaaaattagaggttattcttgaatatagtgttcttaaatagagattttactgtatcaattactaattattggtaaaattatatcattctaggtactttttcatattcaaatttttcttcctcctcggttctaagagcaactccaaagagccttcaaattaaggttgcagtgggtaatcttctctaacgtcggtagcagcatatttacatcatatatgcagttttttgctgcagtgcactgcatatatgcagtagcactgtagcaactgcataattttttttaattatttattattaatatttaata

SEQ ID NO: 372509 - DNA, 687 bp, Cannabis indica
gaggcatgaaaagtagtatatgtgttttttttataacatttcataattagtaactttttctccacacaatattaatttagaagtgatattaaatattgtagaattataatcacttactgatttaaattcttgcaacctcaggtgcaaccaatcattcttagcctttggcaatatgacagttttctgatggtcatatctttctttcaagttttttcaaagcacaagaggatcttttacggttaaatattcagattttaacccctcatggagatgatagcgaaggaaaatcatagcattggccttattttattttgttgcagtattttaatctttgatggtgtctccaagacccatagcatctaaatagatttcatcatcaagaattcatgataaataatttttttcgaaaatatcaagtgccacaaagtcaagttttgaaagatttgccatgaagaaaacttggtcagaggctcgtgctaataacgtattatataatattataatttagagaaagaaaatagagacgagatgagaattttcttagtgttttattccaatgagtgatctcctatttatacacatataagaatcaaatattaagaaactaagaaaaaaggaatattgattacaattattaatattaataaaagaaagatttggagattcacataattattaatatttata

SEQ ID NO: 372510 - DNA, 631 bp, Cannabis indica
attaattaaaaaaattgtttaaaaaaatttaaagtgattattttttgtttttaaaatttagattcttaattaaaaaattaaaaagtaaaaacagtttttagaaaaaaaaattcactttttttaattttaaaaacaaaaaattaattaagaaaatattaccaaatgcacccagtaaatttttattaaaaaaatctaatttcttttggctttcttaaacatgctctaaaattaacgaatacattagtatacctacttttgagatgtaatatataatttctctattttaaagaaaggcagcattaatagagtttttagaagtaataagataattactgttgctcaaaaaaataaaagataattactaggaagtgtaattaataaagtaataattacacagtctagtaattatactatattttaaaatacaaaatgtgtttggatataagatgttgattacaaatgaattttaaatattatatttgacaaaatagataataattacacagtaaaataatattttttagtagtttatatgtaatatttataataattacatagtataattataatcaatatagatgtacccttacttattttggcatctagaaaaaatttttagtctatttttttt

SEQ ID NO: 372511 - DNA, 586 bp, Cannabis indica
tggtagtggtgaagttgtggccgatggtgattgaggtggttacgttattttagttttaattaattaattaatttttttaaaaaagaaataaaaactaaaattaaattttaatatgtgactagaccaacgtatttatttatttatttatttttattatttttcttaaaattttaatgtgtaaaagctaaataagttgggataacttttttttttgtagcattgttattggacactagtggtacttaacacattctaggtgtgacattttacagttggctagcaatactgcttaaaagttattacattaaactatatgagacccgatacttttattgactaatagcgatattgacacgtagaggtcgttaggcagcactggtgtctttcaacatttctctctctttttttttttaaatattgagagagagggattcgaacttggaacattctttgtgaagtatgaactcactatgctatgcctaggactacagtcagggtcggccttgaaatttagtgagccataaaaaaaaaaaatatttttaggccctcatttaaaaaagatatagtatttttcaaaattgataaa

SEQ ID NO: 372512 - DNA, 570 bp, Cannabis indica
ttatcatcctttctattttatttcgttttcactttgtatttatgttttttaactgatggaacgagttactgaaactggttcagtcattggcagtaaaagaaaatcttctcgtaatattggtggtatatcaaaaaaggataaaacaaagaaaaatatggtatgtttatacattttacatcatgttatgtgtttgtattattgtattgaaattgtttttttttttaatttgaatatgtttcattattatttacattattttttttgttaatgtttaggcaaagttgtctgattccatagatgatggttctgagcatgttgttgattttataagtaaagaaagaaaagaaaaccctgttgaagtctgtgacaagaagaaaccgagtggttcttctattcctgctgcccctacggtaattataacatgaaactggtttctttttgtcaattgtatattttgttgtaagttagttttattgttgtgaaaccgggtttttatcccttataatatttatttataggttatatatttcattgttaaactggttttatgtagatcaaagttgttttgat

SEQ ID NO: 372513 - DNA, 631 bp, Cannabis indica
ttaaacaacatacttgtgagtagatctaagatcctggtaaaataaattccaacagtattcagccagtatcgattacaagcggaaaatggtaacttttcagccatagcgtgaggatccatttgtttatgtgggatcggtttaggggtctcagatcgcaattatctcagtgttaaggactagagatttactacacaatggatgtgtaggattttttgtagttgtgattgactccaacagacacaaaacatttgggctaagggtagtcagggttgttaaatattttcttgacgtatttcctgaggagttgctgggattactgccacagcaagaaatagacattgtgatcgatttggcacctggagcagaacctatttcaaaagctatgtatagcatggctctagcaaaactcaaggagctaaagttgcaccttcaggggatgcttgatttagggtttacccgacccagtgtatcgccctggggagctccagttctatttgtgaaaaaacaaggatggttccatcaaaatgtgtattgattatcgggaactgaataaactgacgattaaaaacaaatatccgttgcctagaatcaatgatttgttcgatcagcttcagggaaagactgtgttttc

SEQ ID NO: 372514 - DNA, 532 bp, Cannabis indica
caaaaaaaaaaaaaaaaaaaaaaaaaaaaaaaactagttttagaagtgtaaaaaatgaaaaaagctcctaaatttaaatatgtcatctctagctaaaagggtcaatattattttgaatcttatattattcaaaatagtataaaataatattttaaactcaattttcatcaaaataaaacttaataataacttgacttgaagatgcatgttatgaccacattatagttacatttattaatttgcatatgtgtaattcgtggtagaaactaacttcaagttagttaggtgaaaaataaaaattaaaaaaattggacttaagatactattttgtacgaattttaaaaaatatagactccaacttgtcatttaacaaaataaatagcttaattaataatttttacaaaacacataatttaaaataatatttacccgttattaaataacacaaataacactactacaaaaatggtttttctcgacatttttaaacagtcatttagagtattcccatcggtttctataactgttgcct

SEQ ID NO: 372515 - DNA, 661 bp, Cannabis indica
gtagttagatttattaacttgttaatacttggactaattttacaatatttgtgtaatatttagttacttctatgaaatgaaattaagtattttggccaattctaaaattaatttaaataatatttaatttaccttttaaaaaataaatatgtaatttaaatttaaattaaataaaataatatataaattaataaatatataatttaaataaattaaataaaattaaaaaaataaaaattcaggtatatatggtgtcggttcctatgccatatgtaacgtcggttattagctaagaactgacgccatatatacccatatggtgtcggttcctagctaataaacgacgccatagaagtatatatggcgtcggttaaattaaactctacaatattgccttgatcagcgtcggtagtgaattttaccaaaactgacgctaaaagtcctaaaaaattagcctttaaaagtaatttatgtagtagtgctgaatataatatataactatatttttacgatttcataatatataattatattttataaaattgtaaatttataaaattatatgtttcaataattaataatatattagtactacgtatggcgctttaatatatttttggaaacatatatttatattatattaattcctagtaacaaaatc

SEQ ID NO: 372516 - DNA, 331 bp, Cannabis indica
actataattatgatctcacaaattattatttaatatatattctaatttttaactataataactttttagcttaaattttttataaaaaaataaatagcatcaatgctacaacatagtatctcaatagtatccatgtaaatttctagaatacattatttattctctaatagtatagcatctcaatattttatcacataataagtccatctcaccaagtatcttttaaaattttactattaaagatgcttttattagttaaaaaaatgtaagataatgattactgttataaatattaataattatgtagatctccaaatcttttatttattac

SEQ ID NO: 372517 - DNA, 666 bp, Cannabis indica
gtttacagtattagagcatggccattgctaaaggtatatatttaaataatatgtttataagattcatgttatttaagtatgtatgtaaatagtgtgtttataagattcacattatttaaactagttatgttgtttggataatggacggtacaatggattcgcattatttaaacaatgatatgattatggtatgattatgatatgattatgatatagttatgatatgattattatgtagttatgatatggttatgatatgattatgacttaattatgataggatttatgatatgctatttaaataatgtatagtagttaaacattatttaaattagatttattgtagattatgtgacatggtttgaccgagaagataatggttaaatacttgactgttgggtctatatggtagatagggggccatctagtagtgggtacgattttactgaacccagccctccgccatttagtctaatagttcgagtttatttgccaaagtcgaactccggcataaccattattatgtgacttagcttagaaactagtgattagttaatagtgataagattaagcttatatgtattgctatttgtctaaatatgtgcatctaagttttagttatatgtttttcttttattttatgtgactacgtgacaagcatttcct

SEQ ID NO: 372518 - DNA, 673 bp, Cannabis indica
ccttaaatgtcatatgggaaatatgccacctaccgatccaacagttagatttcatcccaacgctgatctatccaaggcagcacatgcaaagaagttggcctataaatacccccaaaaaagcacaagaaggggagaccttttttcggatggaagactcattcttcatcatcccaagcatgcatattttgcaaccttattatcaactcccgaatattcctactaagatttctcttcttcaagaggaacacaatgtaaaagagttatagtccattgtatacctatttttataaacaattgaccggccgatgagcctaataaaatagatttgtagactaaggatagttaacgcatgaaccttgtaaaaatctcttatttgttatttttctatttattctatctttactttcctaagctcaaaaaatatttagttttcaaaaaattttgcaaacacattggtacccctgaaatgcttaaggatggagcttggcatactaagagtggggttagtaatcatgtcacttctgatgctagcaacatgaattaaaagagcaaatacaatgtctatgtaacaccctactagtttaggcgtgttaacgtaatttttaacttaattgtgcagctcgttgcttatcaacgagtttatcaaaaatcgtgaataattaaaattttattt

SEQ ID NO: 372519 - DNA, 501 bp, Cannabis indica
gtttgcaccaggtttccccaaataatccaaaacctgcaaaaaatgtgtccaaacctcaccaaactttccaaaacacctataataacatcaaccaccattatacaagcaatgaaaacaaaaaattcacacaaaatcaaaaagtgccatggatgaaccaagctcaagttttctaactcaaacttgtgcatccaccacaccacaaccctaaaccagctgcaggaattcaattctaacttaaattgaacttagaaactgaatcataaacaaatctaaccctaacagtcccaaattcacaaatttgcatattcaaaccaaaatcaaagctttaataacacaaggattagagttctagggttacctttgcttaaaaccactaaaattcagctaacatttcatcaatttacaccaaaaaaatcccaggtcttgcctggttcttgtggtgttcgagcaaggaagaaagagaaagggaatttcttgattttctattttcttccaaaatga

SEQ ID NO: 372520 - DNA, 501 bp, Cannabis indica
caaaaccgagtccaacgacatataatatggctatatttaaaatttgaggttccaaagcctcacctaagcagtgcacattaacatcggtggcgataaaaattagtgtaccggaaatattgccaaaaataggggtagtatatatcaaaacgactacctcgacgagtagatcgcactcatgccgaatgtttgtcaaaattgtacacgatgtcaccaaaaattcaccggataggggcggagcttcaaaaatatcatcgaaaaaagtagtgagctaggtgaaatagtttagtgtaggctgttctcctcgacgagctgagtttagtagtgaagacaactcgtcaaatggacaccggaggtgaccataaaatttgttcaaagtttgaaccaccaaattttgacttgcgatcccgagctaacgatggcaaaaggagcggtgccgcttaggggctgaggtggctggcactagggggttcgagtggtctggtgcgtggggctggtcggtgg

SEQ ID NO: 372521 - DNA, 896 bp, Cannabis indica
aataaaataaattaaacacttatctaataaattgaaggataaaaatcagaataaaatatctaactaaagtccactaaaggacaacgaaggccaaaagaccattctaccctcatttatgcttcaaagtccaaagtcacctaggggtattttggacatttactacatcgaataatttccgactttcccaatgtctaactatattaccccgctatactaaaaatactaaaatatgattctaatggccaaacgccgcattccaatattgtcgggcacaaaacatgcaaaaatatgaaattctatatatgacatatataatgcattctgaattcaaataaatcttcttaaaataataattcataactaatatgcaagtttcataattaaaccctatttatctgctaatttccaaattaaagttaagcggtctttataattttctccccttaaaaggatttcgtcctcaaaatctgatctgaataattcagaatactaagccctcatgttggactctaactcccaggtggtttcctccaccttcctatttttcctgagtacattgaccaaagctatggtcttgttccaaagaaccttatcttttctgtctaggatctaaactggttgttcttcgtaagataagtctgattgtagctcaagattctcataactcagtataaaagtaggatctgaaatgtactttcgtaatatggaaacatgaaatacattgtgaactgctgatagagatggaggcaaaggtagacgatatgccactaatcgcactctctcgagaatctcgaaaggtcctgtaaatctagggcataacttgcctcttttcccgaaacgtttgatccccttcatcggagatacccgtaaaaacacatggtcccctacttggaact

SEQ ID NO: 372522 - DNA, 629 bp, Cannabis indica
gaatcatggatgtcatcagatgtgggacatgacaattcaaataatatctaagttccagaaatattggggaaagattcacaggcttatgtgtgtggcagttgttttaaacctgaggtacaagtttatgttgcttgaatattattttcctgtaatctatggagatgagcaatatgtaactgaaattgcaaatgttcgtgagctttgttgcgagctactggaggagtacgggtctaagtttcctcatttgagagaaagaagggtttaggtggaaaatgtatcaacatcttcttcaacacggcgattggatgccctttctaactttgacagatttgttagagcttcctattgagtagagaatgtgaagtctaaactggatttatatttagaggagaacttggtacctaggactgaagagttatttgatatatacaattattggaaggtgacgcgcctcaaataccctttgttaagtatgacaggcctcaaataccccataataccatttaccaaggatgtatttgatgtgtctgtcaacactgttgtttcaaaatctacattcagcactggtggtagacacgtgagtccacatcgattgaggtttcaaccttctacattagaagcattagtat

SEQ ID NO: 372523 - DNA, 462 bp, Cannabis indica
ggcataaaacccaacagacacccagtaggaaatcacccgtctcaaacaggaggctgagaagttgaagaaagatcttgaagaagccgagaaggccatcaggacccaggctgattaatttgagaagacgctcactgagaaggaggccaaacttaaagggaaagaagccaaactcacagggaaggaggctgaaagcacagaacaatgcaacaaggtcagcctccgtactgtataccgagcctggatggcaaatcacaacatggatagaagcttcttggaggaggaggaagagaaaactctggcttgctgcgagaaggccaggaaggaggagaaagaggtagaggcagaggataaaaaagaagatttatccaagtctcccaccatgtaggcttggtttctatttatctctctttttgtttttaaaaatggccttttggccgagacaatggtttgccccttgtggaa

SEQ ID NO: 372524 - DNA, 659 bp, Cannabis indica
tccaggtcgtctatgtgccccccagccttttctggatttgacgagcatatcatccacgtatacttccatatttcgcccgatcttgtctttaaacattttgtttaccagtctttggtacgtagctccagcgtttttttagaccaaacgacataactttgtagcaatatagacccatatatgttcggaaacttttatgttcttggtctggtggatgcattttgatttgattgtagcctgagtaagcgtccatgaagcttaatatttcatgccctgctgttgaatctactagatgattgattcttggaagtggaaaacagtctttagggcatgccttgttgaggtctatgaaatcaatacagactcgccatttcttgttcagcttgggcactaatacgggattcgcgacccaagccgggtagaaggcttcaattatgaagttgttgttgcgcaacttttcaaattcttccttcagggctactgctcgttctttgtccaaaagccttcatttttttgaaatggccgaaagttggcatcgatattcagaacatgtgaaataatagaaggatcaattccaaccatatccgcatgtgaacagccaaaaacgtctaggtttgctctcaaaaattttatcaattctgattttacttcgagcaacaaac

SEQ ID NO: 372525 - DNA, 620 bp, Cannabis indica
tttttcttgatcaaaagttctatttcccgcttcaagttgtagcaatcgttggtgtcgtggccgtagtctccatggaactgacaaaactttgtcatgtcccttttgctggttttcttcatggtcccggtcttcttgtacggaattagcgattgagtcgctatatgcacactttctatatcttcagttaagatagtgaatgcagtgtgtttggcgcgatcacggggagtctgtctgggtttttcggtgaactttcccttcttcctgtttccttgcttgtggttgttgcctgagcgcttgcaacttaaattgcttgaatattggggaagttgggcagacgttccagtagagggagcctttgttttgttcggcttttgctcaccctctgctcgctgaatggcttcttcgagcttgatgaaaccttcagcccggtcaaggaaatcactcattgagtcgaccggtccgtttttccttatgtccttccacagttcgccaaggacttcaatgctcccagtatcgcaaataactttccatcctcggttacccgtgataccttggtcgcttccgtcatgaatctgctgatgtatgcccggagtcgctcgcctggtcgctgttttacttcg

SEQ ID NO: 372526 - DNA, 605 bp, Cannabis indica
tatgtatatcacaagttcagtgggagtaaatacatatttctggttctatatgtcgatgacatattgcttgccactaatgatataggcttattgcacgaaaccaagagatttttatctaagcaatttgagatgaaagatcttggtgacgcctcttttgtattaggaattcaaatacgtcgagatcgttctcggggtattcttggattatcacaaaagagctatatcgataaagtactcaaaaggtttggcatgcaagattgtagaccaggtgatacccctgttgctaaaggagacaaattcagtcttagacaatgccctaaaagcagccttgaaattcaggaaatgaaaaagattccctatgcatcagttgtagggagtctaatgtatcttcaggtatgtacgcgtccagatattgcgtacattgttgggatgttaggcagatatttaagcaaccctggtatggaccattggatagcagccaagagggttatgaggtatcttcagagaacaaaagattacatgctcacatacaggaaatcagatcatttggaggtcgtagggtattctgattctgatttcgctggatgccaagatagcagaaggtc

SEQ ID NO: 372527 - DNA, 696 bp, Cannabis indica
caataagatgggccaaactagtacaatagttatgtacatatgtatattattatagtatgtgtttgtgttcaattatttattttttttggaagaatgtgttcaattatttattgtcgacaatatagactagtctggctatatagcttaattatataagtatataaatttatattaattctactaatgacatttgattgagtttcataagaaaatgacttaagacactttgcattaatctatatattataatataggccgggtctacataacaagttctaaatttaactatacattggcttttcctagtcaatttctatccatatatttggctatataacacaatttttaatttaactttaactttaacaaaatatcttattaattttataatattattatatatattcaaaaataaaaattatataaatattttatatataaaaatttaaatttaaatttaaaattaaaatacttaaaatattattgatataatttatacttataatattattgatatttttaattatatttttaaatttattggtttaaatttaaattaaaataaaataaaaaattatgtaaatattttatataaagaaatttacatgtaaaatattataaatttataatggtaaatcggttcacacattatatttttcgtaaagtttggtaataaaaaacttttatatcaaattt

SEQ ID NO: 372528 - DNA, 511 bp, Cannabis indica
gggcataaaacccaacagtgggcttcttatacgggggctagcgactgagtggccatgtaaacactttctatatcctcagtaaagatggtaaatgtagtgtactttgcttgattctcccggggagcttgctcggttttgccggtgaactttcccttcttcccattcccttgcctgttgttgttgttcgaacgtttaccatttgagcttgaattattttgggtaatgggagagttgggcggacgttccagtggaaggagcttttgacttgtcagggttttgctctccttctgctcgctgaatagctttttcaagcttagtgaagccttcagcacggtcgagataatcactcattccgtctactgggtcgttcttccttatgtccttccaaagatcaccgaggaccttaatgccccccagtatcgcggacaattttcaatcttagttacccgtgagaccttggtcgcttctgtcgtgaatctatttatgtatgctcggagaggctcgcttggtc

SEQ ID NO: 372529 - DNA, 569 bp, Cannabis indica
actgttatttatttattgatgtttacgttttgagtttaattgctgtaaatcaatgtacaaacggattgacaatgaatgcaatccttgtgtaactaattggacacttgctttttatataaaggaattatccaccatgaaatgacacctacgaaactcttgcaacagtgaactaagcagaccgtgatatgactgaaccactatattcctgtgtcttcttgatatttccagtttttgccaagtatttacgtttccagttcaagtactcgccgttttaggttgaatactcgaaattgttcatcatattctttcttattattattattgtgattattcatttttggtgttgcgaaatttgctcgacaacatatatatatcaaacaaaactaataagtttcgtttttttatatatatataatattaataataatattaataaaaactttattattaatagttatcttattatattttagccactaagaaatttctatttttagggtatttggccaacttcgagtaccctaaaataccccaatatttctaaaatcaacttatcccaataatcctat

SEQ ID NO: 372530 - DNA, 881 bp, Cannabis indica
aaatggaactagaaccgaactaggacaaggacctaaacctaaacccgaacccagatcaaaacctagacagagacctaaacccaaaccgagactaggactcaaacccgaacctagaccgagacccaaacccacacaataaccaggacctagacacagaatcaggataggccatggggaaaagaactaggaccgggacaaagtacccgaccgaaacctggacttgaacctaggacccagctcgtgacccgacaacagaaatggaaccagactgggacccgagattgggatctgaatctggtccctaggcttggacaaaactcgtattcgatgtctggatttgggacccagccctggacccgaaccctcacaaggatttgaaccaacacccggacctgaacccacttccaatctcgaaagtggacccgaacccgtacgctgttacccaaaattggaaccaaagccggaagttcaccggtattggaactaggacttggacttggaatcataactaaaattggacccagacctatacccgaattgggaggcggagctggatccccacccaaacctggactcgagacccgaatccgaacctaaactcagacccaaacatggaacctgactagggacacaaaaccaaggtcgggacctagaaccgcacctcagtctcgatcccgaacccaaactaagaaatgggacctgggacctgaacaaaaaccaaaccgagaaccgtgacagtgatccagaccttgactcgagattcgaggaacagggcctggaacagacacgtagtcagtgtctagatctgggactcagacaaggaccagaacccagaagaaggaccaatcctaaaccgagacctagacctgggacccaaaatt

SEQ ID NO: 372531 - DNA, 511 bp, Cannabis indica
gtatttttttttttttaaaaatatttcctaattaattgtgaaatgtgtacttaatcttgaatggagactatatgaggccatatagttggtgtagaaagaaagaatcttctgatttttttatttctaaataaaaaaaaaaaaaactaacaacacaattttacatgtaaatgtaatatgaattaatgaaataattaagtgaagcttgttgcatggacaagttaatctcattaatatggcagaaagtgacaagtcaaataaatatttttaaaaaaacaatagtaagttggtagcaataaataaagagagtaattgctaattttcttgagcaaagaggtaaagagaaaaaataaaataaaaaatttactatgacaaataaagttgtgcataacgtataacgtaaaaaaaataatttaaaaaaaataagcctgctatttagcgtcacaaaaaaaaaaaaaaaaaaaaaaaaaaaagagtataatcagctcaattttcggatgacaataaaatggat

SEQ ID NO: 372532 - DNA, 889 bp, Cannabis indica
gacggaggtgtgcagagcaaaacggaaccagggtttaggtagtttagccgccaaaaattcaatttttgtggttaagtgttacaaaccgtaaagttcaggtggtttagccgccaatatccctaataataaagattacaaaaaattataaacgaaacatgaaatttatagaggttcagcccctttcagcagtaatagcctactcgcttttttgttgtattgcttatgaaataatatcatgatcacaaggaccgaccaagtgagtttctcaatatctctaaaaattattacaaatattttagcaaagtaattgctctcttaagaatacagaattcgatttcccttttagtgaaataacttcactatttataaagaagatgtagaatatttacatttaattatgaaataaagagagaaaatcatggagatttgagcaatctcacaattctcttaatttaattccatgaaaatatgaatcttcttcaatcaatttttgggagaatcaactaagaaatgaatctggatatttctctcgcgaatttactagtcaaacgttctctgtgagatggatctttggtcactcaatgtactggtcaggtgctctttcgcataataccttttcggctacctgaaagggtacacaacatgttctgctcagcacttatacttggctggacgggctttgtgcatgcatactcagcttggttcctttcgagtaaactgtttgtccatcttttattcgtctagcgttgaccattcttgccatgtgtcatataactccatgctacgttatcaaggtaattttcaagatataccctacaaaccttatcgaccccatttaagattcctgaaattccgtattttaatattcccagtttgattatttaattaa

SEQ ID NO: 372533 - DNA, 808 bp, Cannabis indica
ttttcttctttctcttttctttcttcacgcctccttcttcttctctctctaacttcttcatctttgaaaccctagcccccaaaatcagccccatcaaaccccagccgactccccattccagctccacccacagccaaccaagctctcaattccatctccaattccctcctccaaaacttcctcttccccacttctccaactcgcaagaccatcaccactccaccaaaaccacctcccatcctcgatgaacaaaccgccactgcagttatagcaaaatcttagccgtgcatagctcaccgccttatctgatctccggtcttagatgcgcctccgaaattaaagccgcctctcacctgcgagaaccatcacgtacgggagccatcatcccccaaaccgaataaagttagagctggagtggggtcgactaggtggttcgcttggtggtgggagattcacgtaatggcttcgggtgaatggaggttactgggtagtgtgattcttgctgctgggttcggtttgggtgatgagggcttcgggtcagcttgcttgtggcgattttggtgaacggaggtgggacgtggtgatgggagatggtgaaggtgggtagtttgcaggtgggggagtcgctggttagtgtggttcgagtgggggcttctgggttaatgattggaggtgcgaaggtggagggaagagcggctggagttagaaagaggaagaagatcgaagaagaaagaaaagaaaaaaaaaaagaaaataaatataaaaataaatttttaatttaaatttttgattttaataaaatattttt

SEQ ID NO: 372534 - DNA, 728 bp, Cannabis indica
  modified_base (670)..(670): a, c, t, g, unknown or other
ataattttttctaactcatgtatgtattctttttttattttttttaagaaaatttcatataattttttattttaatttttttctcataatatttaaaatataatttatttttatttgataggtatattttttaagaatatgaattgaaaaaaaaaagttaaaaaaacttagtacaattaaatatataaattttatacaaatttttgggatgtatataaaatttcccttatactaattaagcaatactaacaattactcatttataccctttcatctaacaccttatccaaaattctagccacctttttttttttgttcagcaaaaaataatttgtttcattgggaattttattttactttttcttaagaaaaaaaaataatggaacattttgaaaaataaaaattgtcttttaatagtatattaataattttggaaccaataaacttatataataatttaaataatgctacaagttactactgtgtctaacaccactttacaatttacatggtatactgctatttaaaaagatggtgttgaatactagtatctaaagggaatattacaatgattaaggaccatgtgtatttatgaggtttcaatagaagttatactaattggtattaccatggcgaacatttacctaatgatccatatccattggaaaancgggggtagatgatatcgagggtaatgatttcgatgattatccattggacttgcttaa

SEQ ID NO: 372535 - DNA, 871 bp, Cannabis indica
tgattaataaaatttgttgtactgaaataaataataatttgttatataatgagtacgtgaaaccgcttgatttttttttcaaacacaccccttaatatctggttaaatggttaattatcaaaggtgttttcttcctctcgaggcattcgtcaaggtgaccctttatcaccttatcttttcttaatcgtggctgaaggcttgtctgctgccattcgtcttcatgaggaagccagtcttctctctggcattaaaatttgccgcggggctcctgttttttcccaccttctctttgctgatgatagcatggtttttgcccctgtttctacccaatcctcggaggctataaatcatattttgcatctttatcttgaagcctctggccaatctgttaacagggacaaatcttccattctcttctcccctaacacatcttctgattctcaatcaaattttcgatcttccttacgcctacatggtgaaggtttcattagtaaataccttggggttcctcactgtataggtagggtcaagaactctgtttttcactatcttatccaaaaaacttcttctaaacttagttcttggaatgaaaaacttttttcccgtgctggcaaagaaattctcattaaatcagtcatccaagcaatcccttcttttgccatgtcctgtttcagacttccaaaatccacctgtgcctcaattcaaagcttaacagctaaattctggtggggctcctcttcgaataaacaaaagattcactggaaaaattggcctgctctctcggcttccaaattttttggtggtttgggatttcattcccttacttcgcacaatcaagctcttctagccaagcaggcttggcggatttggt

SEQ ID NO: 372536 - DNA, 504 bp, Cannabis indica
tcagagccaaagtttagattaacgcggaaaatttcaaagatggtttcttccacaaaatttgagatcgagcgctttgataggaagaacaatttcactttatggcagagcatggtgaaagatgtgttggtacaacaagggctcctaaaggcactacaggaaaagaagcatgagagtatgattgatgaagattaggaggagttgcaggtgaaagcggtaagcactattcgtttaagtttggctcctgaattaaagtatagtgtattaaatgaaacatgtccatctgagttatggaaaaagttagagtagctttatatgtcaaaatacctaactgatagattatatttgaagtagttatatgaattaataatggttgaaggagaagatgttagggatcatataaatagatttaataagtggataactcaattgttaagtgtagaggtcaaaattgatgaagaggatcaagttattattttgttgacgtctttaccaaaatcatatgag

SEQ ID NO: 372537 - DNA, 541 bp, Cannabis indica
tttattttttgatgtaagaattatacttcaatagaaaacttgttcactaactcattaaaaaataatcaatatatagaaacaatagaaagaaaatatacttattttagtatagtataaattgactatgtctatttttatgtttacaattataataaacatactaataatataaaatactttgtatatatatgtttattttgttttctatttattaaacatactaatttaataaacaaaataataatattcacatatgtttattatatcactctatgtgtcatgtttatttttagtaattttaagtattgatttatatttatatacattaatgtttataattttgatattgtattttattaaaaaaaatcttattaaattataataattcatactaaaatagataataaacatttatcttttaataaaaaaatatttaacttgtttatttttataaaaccgtttaattaattttacgaaattgtttattttgaggtttaataaacatattaaaaatgtatggtttcatgtaataagttttcaa

SEQ ID NO: 372538 - DNA, 535 bp, Cannabis indica
tggagtcatgagatgatatctaaaaggctcactcaattttagttcaaatttggctgaaagtaaaagcgcgcacattgaagatgttataaatgtggtcgtataaatatatataatttttagtctatatttataaaattaaactctagtagtttggtttaaatttagcacatgataaaatttatattaaatttgacacaaaatataatataagttaaaatttatagcataataaatattatatttttttcactactcattaatctaattaataattttttatatttttatttatatatttaatataatttttatatttttccaataaaatttattgtttatgttgacttttttaaacttttctactaaaataaaatttatttttatctttaatattggagcacaattgtatattttggattaaatattacattaactcattttcttaactaaatttagcacaaaatttacaacattcattagatggtcttagaccatctccaataagagatgtaaaaaaattgtgttatatttgaca

SEQ ID NO: 372539 - DNA, 610 bp, Cannabis indica
ttttttaataaataaaatattattaataatatgtaattagataatacaattttagtattattatatattagaataattttgtaagtatattaaataaataaatagttttttatcataacaataaaaaaaaaattagcagctatattgcttagtttttaataaataatatgttttagagaataaaatctgtcaaaagtttcggaatcaaaatagtcattattcttaaattaataaaaaatacataatcttagcgtaatcctctatgtatataattagactagtgtagggcacgtgcgttgcacgtcctcctacaatcttagtggaaaacggatgaaaattaattagagactaagaacatctctaaccgaaaactataaatgtaatgtattgccatttttagaatattattttgtttcaaacttaactccaatagtgatttaaaaatatgtgcaaaaattttgacccaaactaaaagttgtaccaaattaatttggcacaaaagatagcgtgagccaaattttatcccacaataaataccacattttttagttacctctttggcattcattaatactattcattaatagaaaaattatatttataagatatt

SEQ ID NO: 372540 - DNA, 565 bp, Cannabis indica
tctcctgctcggcatcctcagctcggctaggtctggacttcttcttcttctccttcatgggctttggcataaaatccttcagatagagcttgtacttcacaaattcggcctcagtggtcaaaaaagtgatgtttcgatcatcctctggtagttggagaattttttgtgccctctccctaagtttcaacatgaaaggagggcagcagtacgaaggaatctgttggaaccgggtgtggacgttctctatacccgtcacaaagtagtactgagccacaaagtaccctattttgctaactgcagggtctacgatacccttcaaccacttatcgtccagctaggagaagtaaaaataccccgacctgctctgcttgggggtcgactttaagtcgaagagccagttggtaccgtgcgaactacgaagacggctcaccccatccttgagtggtgtagaggatgaacaaggtagataagtacttgatgcccttgggtgtgaactgagtcaggaaaatattgtaatagtccgtaatccttttgaagtacggatgcagaggcagcatcgcacctt

SEQ ID NO: 372541 - DNA, 1246 bp, Cannabis indica
tctatggtgggggtagtgtcatctaccccttagactaacttgtcatgtgggtgtgtggtgattgttcattctgcttacgaaggtgttagtccatcattttttctttttagagacgccaccttactcaagccaggggtaaaggtgaccatctgacttccattcaaacggtcatgatcacccttcatggttgacggtcatgaccacccttcatggttgacggtcatgaccacccttcatgattaacagtcatcccaacggtcatgactttacatattcttcattaatttagtgtcggtatttttgtgccacgtgttgctactctgaacacgtcatcgttattaaaatttggataaacatttgcctcccaagtttctagcagtatgaccatacggtagaaactttcttgtgtaatctgggttttgcttttgttgttgacgggcacaacagcaccaaaaatactacgcctatactaaaattacattctaaaaactcaaaaatattttccccaaccattacttttttcacattttataatatatcccaatgataattttttcctttataagcaaaataaattatttaacaaaaaaaaaaaaaaaaatctaaatatttacaaagacaaaaataaataaattacttgtagcattataataatcattggaagctttgaggtctctatcttcatagtgggtaggttctctacacttcctcttgtaattttattgcttgaaatttgatgaagtttttagcacttctttttggtagtttttttcatggccaaaaatggcattaaatcattgggatttttgagtttttgataaaatgtgagtgtttgacgattggattatgtagcataggctatgtgtaatgtatttttggctatagttttatgtaatttggtgagaaaatgaaccactttgaaacttttggtttattgtgttcttgaatattgaagacaccgagaacatgaaaatactatttttccaattttgattctcattaaattgataaaaatgtgcttgtggagtatataccttgggaagattcatttgatagtcattctttgtgtgtggtggggatttcgggccaccttgcatccccacacctaggactgaacattttgagcaagttcgatctggacccgggcaacccgcccggacccgacctggtcaatccataatttttttaaaaaaaaatattcgggcgggtcgggttcaacctggtacccttcggacgggttcgcggg

SEQ ID NO: 372542 - DNA, 677 bp, Cannabis indica
ctccaatacccgcaatttccacagccgagagtgcttgtaaaccagaccctcaactcatcgtcgctagctggattcttccccgagagcatcccatgtaaacagtcctcgctctgtttctgacacatcctccatttctatgtcatcatcttcagagctgtaagggttcatagagaggagatatttaagcttgtcgagtttgggagcaacctcaacgagctccattgtacccggagcaactttaataacagatgcaacgggtatctggttttgagctttctgatcacaatccattgcactaacagcaaactctgagtgatctgatggtggtactaggaagacagagttggaagttccaacatatttcatagcataagttttcgatttagtgcaaagaactgcatcttcgtcgggctgtcctctcacaactaccctacaaaaacaaaagaaaaaggatctagagttagtaactcactaaatttaagccacaacaaattaagcaaagctttaaagtattttaccgttggttaagaatatctgggagaagtttctcatcaagctcaagtagcattatatcatcatgagaaccaaagagttggtgatatgatatagtaactgaagagcttggttgaagattaagaactgcttctgcaccttgttccatctctctctctctctct

SEQ ID NO: 372543 - DNA, 943 bp, Cannabis indica
gtcaacatatgatccttggtatcctgaagatactgcatgaccttcttagctgctttccaatggctaagtccaagatcactcaagtatctacgcaacatgccaacaacaaaagcaatatcagggcgtgtgcatacttgagcatacatcaggctacccacaagtgaccactttcatttcatttgtctctttatcattttgtggacattggcccttagaaaactagtctcctttcaatattggtgcctttctaggagaacatgcatgtatgttgaaccttttcaagatccgatcaatgtaagttttctaagacaaaggaagaatacctttagttctatctcggaggatcatgtatcccaattcccaagtacatatgaagcctcaccaaggtctttcatatcaaaatagtcaaataacaattgctttgtctcagataacacaaacacctcaattcaaccccaaactgcacaataacttctaaaacacctatttacactataataaactgaaaccaagcaataaaacacagcaatcgacccaaaaacttaaaacattagagcaaagcttgagttcttaaaactcaaaccttgctcaaacaccacaacaatccacaaacctaggttaaaacagctcatataacctcaacataacatcaaaatacaaaattaaataattcaaacaaccacagaaccctaattccaaaattcatgcaatagaacctatctagaacttaggaaatcaaagagtgcaattccaaatctatagtggtacaaggaggaattaataagttagagaatttacttggtaaattatagatctgcttataggaagcttggttatataggcccatggttcccacactagttgagacaatactgcttgtaagactcagttaaatcaattataattctaaaattagactatgtcttatttatgaattttcact

SEQ ID NO: 372544 - DNA, 520 bp, Cannabis indica
attgatccttggacttggcttaaagtaaaactttttgtcactgtaccaaataatatttatgatattttcttcttatttaatattttatttatatatttatatttttttcttcacaatttcgggaccctatgcggcaggggaccgaggcgcacgcctagttcgccgactccttagggcctcaaaattatgaataaaaaattattaatatataaataaatattaaataagaagaaaatacaataaatattatttggtgtagtagtaaaaagttttattttacttcaagaggtcaagggatcaattcttaatctctagttttttattttttaaaaaaatatttaatatgtagctataaaaaattgaactttaaaacttttaaattttttttaaagctttatcattacactaaggactcgtttggaacgccgtattaggtcgtattgtattgtattatattatattgaattggattatatatcatattttattataatactatgttaaactttaatttatacta

SEQ ID NO: 372545 - DNA, 510 bp, Cannabis indica
gttcataattagagttggtccaagttactaatttacccttctaattatctcttgattcctaatgtatcattaattcaatgtgaactgttaatctataatctaattatagatttggattcaactcttagtactcccagaaataacactataagggaattaatatttgatcctttcagaaagcttagattctattattgtataacatgttcccaggctcccaactactcatattattagaaattgtaagaatcatcttctttgagaaactttaatgagtgaatcaaagaactcaatgaacacaaatagaagtttatgtatacttaggattcagactgatctactaatgatcatcattatgatattaataactcatggtaaatggcatgttaataaaagatgttattcacatatcggtccagtcatgtataatcaaataatacacaacacctttactacataattatccatatatgtgattcgaatcaaaaatcacacacactagagtatagt

SEQ ID NO: 372546 - DNA, 536 bp, Cannabis indica
tagctttaaaagttttgactttgccaccaacacttcttttcttcttgtagacccacttatatccaattgaatgatattcatcaggtgcgtctacatattcttagaatttgttctttttgatggaatccatttatgaatccatgccgctggccattttttttttctattttggacttgccattgactatttataggttaatggatcgtcatcaatactgtcactaacgaccatattgatttcaccatccaagccataatgagttggttttgtggaaaccctcccactacgacgagaagatgttaccttctgaacaggaacaattgtggtagatttctcggttgtatcaacttgcaaatgttcaattgagggagtgggattatcctctacttgagtagaagaaaatggaacattatttggagttatatctgaaagtatttcctcaagtactactttgctttgcgacttgaaattcttaatatagtcatctttaaggaaagtggcgtttgtagaaacgaacactttatcatccttgcga

SEQ ID NO: 372547 - DNA, 710 bp, Cannabis indica
gccccaaaccttaagagcagctagatcaaaggctttcgcagcttcgtcttctttttcatatcctcccgctacatcaaattattcaataagtaaaataaaaaataataataatgagattgaatattattttagcaaatttattctgatacaaataacacaaattatttagtttttatttttaaatttaccattgtggtgtttgagctaaaaagaattgtacaaaactcaaatgccaaataattagttattggattgaaattatattctactaacccttagcattttcttattgtaattaggaaattaatatatttgtgtttatataaataattagatgcaataattattaaaacaatctaattaattggtacaatatttacttacccacataaactatgtgtccaataatatcagataattaaatcggaaaagaagaaaacaataatagttagtcacatgtatttaattataatcgaacgtgtatgtatatacacacatgaaatagtataataatatgcaataatatataatataattacttgtctttgatttcacacttgggttggagttatcccacaaaaactgcatcgaaacgtccaccgtacctattggtaaaaaatatatttcattaattcaataaaatttagtatcaaaagaccttattagaaacatgtatataagtatgacgttatttatattgatatgtgagt

SEQ ID NO: 372548 - DNA, 766 bp, Cannabis indica
tttaaaatagaaccaacaacaaattctgaaagagtaaccatggcttctttaaagaggagtcaactatctatcaactaaattttaaagtcatgaaaagttaattttaatacttcaaaaaacaaccgtcggtggatccaaaaccgtttggacaaacaatacaaaatctcacaatggctaaaggcaacattcaatatctttaaaattttaaaacatctaaggaaacattaacaaaagttaattttaacttttgaaaaagcaaccaacaagaaatttccaaacaacaattattctttgtcgttcgaaattatttaaaaataaacaatacaaatctcattaacagtggggaaagataacatttcaatgcacatttctatcaagtaaattattcagaaaacaaaagccaattttattatttaaaaaggcaaccagcagctaattgcataatagttattatgtaactgtctatcaagtaaatttttatggcataagtcaattctaatacttcacaaggtcccttagtaccataagacaaaattcaaatgtatttttcattttgtaacaatggaagaagcaactgtcaatcaagtaaactattatttatacatagcaatatattttactcccaattatttatttccttaattcaaatagcaaaaaatttacatttgaatgtaaattttacttttaaacatgaggcaaccgtctatcaagtaaattttttagacaacaaaagccaatttattatttaaaaaggcaaccagcagct

SEQ ID NO: 372549 - DNA, 571 bp, Cannabis indica
tgtttaacataaaattgcaatataaagtagctccgtcctatataaacatatgctatagagtaatttatggtataaatatttaattttaactttcaattgtaaataaatacttaagtttaattttagtagtaataatacttaattatatttctaaaactttataggaatctgttaaatgacaactcattatttacgtgtgttttattgatatatttaaattaaatttttttaaaattacattgtcacgtggtaatttacttaacatttaacaatcatgtacctatagacttttaaaaatataacttaagtattattgatgacgacgtaaaaattaaatttaaatatttatttacaactaaaaaaataaaacttaaatatttacaccataaattatttatttatttatatatatatatgtataaaatgaatattattattatatgaaattaattgacttactagatgaaatgttaaatccatgttgtcgtagtaatctaaaatcgaatagagacatcatgtagatcttcatcatggttggtagtagtagtagtgttgatcttgatgatcaata

SEQ ID NO: 372550 - DNA, 679 bp, Cannabis indica
cacactgatatttcctcgacatcctctgttggttcacaatttttcagaccccacccgggggtccaactcatcttcttcagccattcctggctcgatggttcccggaccatcagtacgggcaggtgggttgcaacattgtaacattgccttgcctccccctggtttcctctcaccgtccctattccagcttcctgggtagggaactttaagcacaggtgccgaatggatgtgactgcgccaaaatctaccagggccggtcggccgaggatcgcgttataagcggtcgggcagtccaccaccacaaaagtgcagtatttgaacgtgctttgaggggtgtccgggcacaaagtgacgggaagcctcacttttcccattgggataagcgttgttccgttaaaccctgtgagttgggaaccgctgggtgagaggtctcggtccgtcaggcctattgcaatgaaggcctccttgaaaagtaagttcacggaacttccgttgtcaatcaggactctggccaccactttattggcgatgggggtctcaatgaccaacggatcatgatgagggaagcgcaccgtcttggcgtcttcttccgtgaacgtgatgggctgatccatcagccggggcctttgagctgggagttgagtaacctcccaaacctcattgtgctttacggcccccg

SEQ ID NO: 372551 - DNA, 597 bp, Cannabis indica
actgcactgtgctgcactattttttgcggtgcgggttttgcagtttttcaattttgcggtgtgagtgcagtttgggaaattaaaaaaactgtatgtgcatgttagtttaagaaaaggtaaaaaaccgcaccacgcaccacaaacacccttattgctaaccaatcactatacgacatgtcttgaaactcgttggcaccactttaataaaagttgctttatcaatttatttttttcagcaatttaatataactcatttgttgtcggttcgtttgggttcagaattgtatttggtaaaatatgggtcaataacccaaatttcatttcattactttattatagaatttcaacaacattaaaccagtaatactcttaaataattttgtcaaaactataaaaaaaaaaacgagagggaaaatttgtagcacagcgaaaaaagaaatataaaagaaagtaaaagtaggcgaaaaaaaatacaaaacgaatctctaagagagaaaaaaacaataattccaatcagacatattctttgttttttttagtacattaatcagacatattgtctatttgtgagaaaaaaagagagagaagaaagagaga

SEQ ID NO: 372552 - DNA, 686 bp, Cannabis indica
ctgaacgacaacaatggcgagggtttgctttgcacctgaacgagatgtggggtctcagttcttgacccttcagtgagcaagcttctccactgtctcacctctctctctttcattttttttacagatttaattgttcgatctaagattttttttcttatggatttgaatggagtttgtttgtttttgtgggatttgaaactgagatcgttgtaggtgtctatgtttgtttgattgtgtttggatatgagttatggggttgtgtttgaatcaggatggaggtgacgatagtagtggtgatgagcagttgtggtttcgactgtggtgatggtgtgcagttgtttcgacattggtggtgatggtgggcagttgtgagggttggtggtgatggtagtcaccagttgtggtggatggtgatggtggcttcgacgggaaatgtcggctaactttagagcaatgagagagagagagagaacgagaagaagagtaagaattttttaggaaattagggtttttttttctttcaatttaattttttttaatttttaagaaactagaatttgtttgattttttatttgttattttaaatattaatttttattttttaaatattattacgtgatcaataaatgttccatgtgtacacattatccacgtggacaatacagtgtgtacacatggataagtc

SEQ ID NO: 372553 - DNA, 617 bp, Cannabis indica
ccaaacttagactggaactcgggcccggactcgggacccaaacccgaacttgaactcagacccaaacaaggaaccagactagggagacagaaccagggtcgggacctagaaccgcacccagtctcgatcccgaaccaaaactcagaaatgggacctgggacctaaaccagaaccagaccaagaccggtgataccgatccagatcttgactaaggttttgggtaacagggcctggaacagacaagtattcggtgtctagatctgggactcaaactaggaccagaacccagacgaagaatcaaacccgaacccaaacctagacctgggtcccaaaattagaacctgaacaagaattgcccaaccaggaccctagaacaagtttaggaccgtgaccaggactaggacccagacctagaaccgaacacaaacctagcctcacacccaaactgagactggaaatcaggctcaaaaacggttgtgtacccagaccggaattgagacccgaacctgcacctaaatctgggacccgataccaaacacagacttggacctagatagggatccggatacgaacctggactcggacaaagacccagacttggatcaaattgctggacc

SEQ ID NO: 372554 - DNA, 817 bp, Cannabis indica
gatgctaggctcttcaaggaactgtgttttaccaccagctatgaatcactgcacatctcaagtgttcggccttcatttccttcgatagtttaagtccagtgattaaggcctcgtattcggcttcattgttagaggctttgaatccgaatttgactgcagcgtgcaggtgttgccccccaggtgtgacaagggcatttcctgcaccagatagttgatcggttgccgacccatccccatgtagcttcctggtcggtttgtcttcaatattacctggctatggtttggctcgggatcgctttttggtatgctttctgttttgcctgtgcattccaccacaatgtcggccaaggcttggcctatgatagctatttggggttggaagttgatttcgtactgacccaattctaccacccacttgaggaaccgtccggaggcatttggcttctgtagtatttgtcgtagtggttggtcggtatacacccgaacaagatgagcttgaaagtaaggcctcagcttccttgttgctagaatgaggcagtaggctagcttttctatcaatggatgtcagctttcagcttcgacgagtcttttactgatgtaatagtctgggtgctgcacgctgtcctcttctctgattagcacgacactcacaacatgctccgtaactgctaggtatattcccagttcctcaccgtctagaggtttagaaaggatgagaagttttgcgagctgcgcctttaaatcttaaaaagctatttcacattcttctatccactcgaacattttgtttcctcgcaggatgttgaagaatggaaca

SEQ ID NO: 372555 - DNA, 518 bp, Cannabis indica
catgttgatctatgtgtttattgatgattgtttgatgtttacaaattttttacataaaataattagaattttattctagaattatttttgttggatagtatggaaaaaattaagcaattcacttttttatagaacttaatttcgattttatttgaattagttaggaatttttgaaaattagaaaaatcttaggggtggtgacaccccacacacgcgcggatgcccttatttctcgggtgcacgcggcttcggacatgtgcatgtccaagaattctcggtcaaaggggacaatttttgtttgaacatggggccatgcgcgcgcgggattgctacatgcagcctccccgtgcgtgttttctcggccagccttcccctagcacgcgcgcggatggtatgcaatgcatatcatccgtaccaaatccattttttttttccatttttacatttttttcatgcttattcaaggaattaatttcgaattttttgtgtaattttgtattttagatttttatttttca

SEQ ID NO: 372556 - DNA, 830 bp, Cannabis indica
gaggaacaaaaagttcgagtggacagaagaatgtgaaagagcttatcaagatctaaaggcacaactcgcaaaacctccagtactttctaaacctctagacggtgaggagctggggatatacctagctgtcacggagcatgccgtaagtgccgtgctgatcagagaagagaacagcgtacaacacccagtctattacattagtaagagactcatcgaggccgagggccgatatccattgatagaaaagctcgcctactaccttattctagcaacaaggaagttgaggccttattttcaagctcatcctgttcgggtatacaccgaccaaccactacgacaaataatgcaaaagccagatgcttctggacggttactcaagtgggcagtggaattgggtcagtacgaaatcaacttccaaccccgaacagcaatcaagggccaagccttcgccgactttgtggtagaatgcacatgcaaaaaagaaagcataccagaaagcaatctcgagctagtaccacatccatgtaacaatgaagacaaactgacctggaaactacatgtggatgggtcggcaagagatcaactatctggtccagcgattgccctcgtcacgcttggggggcaacacctgcacgctgcagtgaagttcggattcaaggcatctaaaacgaagctgaatccgagcctctaatcaccggacttaagctagcccaggaaatgaaggctgaacacattgaaatctgcagtgattcatagctggtggtaaatcatgtatccggtgaatacgaggcttggagagaaaagatgatagcatatctgagcaaaattca

SEQ ID NO: 372557 - DNA, 815 bp, Cannabis indica
caataactccatagctgtcacattttcaattaaagcataaacttttaaaggtaggaatatcagaaaatgattagtagaatagacatagcatattgtcatctctttattctcttgatggtttgggaaattataggactagtttggtaccccgtttaaggatcatattgtattaaataataaataatactatgtttggataaaacaatatattgtattaactattacgaacaaaatttctaatacaatgtatgttgtattatttaatacataacaaatggtccgtattagcttgtattataatatttacaaagaatttcgggtcaacactaatctctgactagaatccggacttggaacccgaactcgggacccgaacctggacccggacacagaccagacccgggctctagacctacaccccgaactcaaagtcggactcggacccgagactcgggacccagacccaggacttgggactcgtgacccgaatccggacccaagacctagagctggaccgggaccgagaccgggacccaaaccccgacctgaggcccggacccagactcgaactcgaaccccgacccaaacctgaacccgaacctggacccggaccccgacccgaactcggacccggaccccgaccctgaacctaacccgaacccggacctaggacccacgtagtcggtgttagggtcgagtgtattgaaaatatattataactttacacgatcaattaatacaagtcaataccaaacattgtattgtattaaataatactaatgggctcgtttggaacgccgtattaggtcgtattg

SEQ ID NO: 372558 - DNA, 569 bp, Cannabis indica
gtcttgccacatatgtaatgttggtacaattttgaggactaattttatgtgaagtatcgcccaatatagacaatgaccacatgactatttttttttttattttgtaatttattttattagaagaaaattattttctacccaaaaagttattaattcaatgtggtgtgggactatggtggacaacttttagagttgtcaaccactggagttaatttttttttaaaaaaattagacaaatcttatgtggatgagagagacaataaaaagaattattttaggatgatgtatgtattttggcaaccataggtgttacccacattggagatacatgtataacatcaatgccacatgtataactcaaaataaaaaaaaaatgaaaatattaaaagttaattcaatcttttaaactagttttacttttaaattaaaattgttttaattaagatttcctccaccagaccaaccttttcggtccatctcgacaatggcgagggccgctagtcgataaatttctttttttttttttttttaatttttaaggtcataaatctaaatattaaaaccatttg

SEQ ID NO: 372559 - DNA, 812 bp, Cannabis indica
aaaattaaagggacagtattcgtcacggaatacacaacctactccgactcaagatatgcctttggatccaagagtggagaaaaatttgataaattgaccagactaatgttatggatgtctcaaaggttgggacctgatgttcgtctacctactgatgaggagttgctcggaatggcgatgcctcaaatgtctggaggagggtctgcttcatcttcacagccagctgggacttcgcagtatcaccaagcccagcagtcgcctccttttatgtatcatctgtcatcacctccgcaaatgtccccttttccttggatgtcatcgccgattttgcaaatgcaagtgatgaacatgcagcagacaccggaaacacaacagatgcaacaacatccactacaaatgcagcagatgccatcgatgcagcatacatcacaactgcagcagcattcaccacaaatgcagcaaaggccatcgatgcagcaaacatcacaaatgcagcagccttccatgcagcagatggcatcgatgcagcagccttccatgcagcagatggcatcaatgcaacagactccacagatgcagcaagcttccatgcaacatatgtcatcgatgcagcaaacaccacaaatgcaacaaccttccatgcagacaccacatatgcaaccatctttcatgcaacacacaccacatgtgcagcatatgacacatatgcatcagatgtcacatttgcaacagatgccttcaatgcagcagacaccgcatacgccttcgatgccattgatgcagcatatggcaccaacgtctcagatgcaacc

SEQ ID NO: 372560 - DNA, 615 bp, Cannabis indica
caccatcactacctatgctacttgtcactctgttatagataacaccactgatttatggcatgaaaaacttggacacattcattacaaaaaactgaaagaattaatccattgtcagggattattacgaggaattacctaaatttggtaaagaagttgaaggaaaatttggaccatgtcatctcactaagcaactgaaaaactctcacaaaagtgtccttgatatgaattcttccagagttcttgaacttcgtcacatggatctgatgggtccaattcaggatgaaagtttgaatggtaaagtgtagatgatttctcttggttttcatgggtagaattttttagagaaaaatttgatacttttgatttttttaagtatctttgcttgaaattaaaagttcaaaaagattacaacattggtaagatagttcgtggtaagagtaatcatggtaaaagatttttgaaaatactgtgtatggtaaattttgtaaatcttatggtatttttcataatccttctgctcctaaaactccacaacaaaatggaagtggttgaggtattcccaccttcttgatcatgtttatagttagcaaaggctttgtatggcttgaaacaagc

SEQ ID NO: 372561 - DNA, 841 bp, Cannabis indica
caaaaactaaagtagctaataaagagttacatattttgggtctaaatttaatagagccataaatagaataatggagagtaactttttgagttttcacttgcttgaggagagtatcaatggcattgaattggggggaacaagaaagagatttgaggattgattggtaagttatgaaagtgtgactgaaacctggttgttgggctgcccagttgaagaatccaagtgcaagtgagtggtgaggaagaagaaaggggtcgatgactcgggcaacgagtgatggggtgagtgagttgcgacaacggagtcggtgcaatgtgttcttgagggaaggactccatgaacgagttggctttgtgtagttggaagcggcgattagagcttgacttatccgacttgcaaactcagttgccgaaccaccacccttcatcaatagtcggagacaaagaagaagaacgaaaatgagagaaactaaatggtgaatgtagtatttttgtaattacaatactttttgagatttaaaaaagtaaaagtagttttgtaaaaatgtttaataaattgataagcattaaaatgtaaaaaagtaattaaatttggtacctagtgtaaaaatccccatattttaccatccattttgtgaattcacacatttatttttttttaaaaaaaaaagtcccttatgctattgtaagtttgaatagggaaaaaaaaaagtctcttagtttttggcaaatgacaaaattttggggttgttaatttagtaaaggggtaatttgcggcaaaacccccctcaactatcaatttacttgtaaaaaaccatccaacctcatattttggtgggaaa

SEQ ID NO: 372562 - DNA, 505 bp, Cannabis indica
cttaatgtgcctcttaacattttctgctgttaatatgtacatatctttattaatctcgattatgtttttcttattgttttttgttttttattttttatgaatgatatttatattgatgtgctactcaataattacttagcaattttctaaattatttattaaattaaaatttgtgggagttgatattgaaatgtaccaataagagtatgctactttttgtggtgtttggaaccttaatgtgtcttttaacatttcattattaatatatatgtacatatctttattaacttttattagaatttttttttatatataagtttgcaagaacatcttcaatgagatatataaaaattgtactatatttaaaaaaaaagactttgtgatatatgtgcatcaatttttagaattatgttccgatgcacaactgcaaaacttaggtgcaaatttatttatttatttattattatttttttttgtttattgaatgatctttgttactattttt

SEQ ID NO: 372563 - DNA, 568 bp, Cannabis indica
gctagataaattgacaagacttcaccgattatgggttttgataggattgggggctgccccaaatgcgttttcaatgcttgaaaagcctcttcgcatttctcggtccactggaacttcttatttccctttaaaatttgaaaaaactccttgcatttgtcagaggatcgcgatataaaacggttcaaagcgacaactttaccagtgagactttggacttcttttggcttagtcggtgatcgcatttctactaatgctttgatctttgcagggtttgcctctattcctcgctgatgaaccatgaacccgaagaactttcctgagccgactccaaagacgcactttagctgatttagtcgcattttataccacctaagtatatcaaacattgcttgtaaatgtttgacatggtcttttgcctgttgagatttcacgagcatatcgtcaacatacacttccatagtatccccaagtagatctccgaacatcatatttaccaatctctgatacgtcgcacctgcgtttatcaaaccaaaaggcattacttataacaatacagacctcaatctgt

SEQ ID NO: 372564 - DNA, 598 bp, Cannabis indica
gtcaaataattatcatcatcgcattccacattcaaaaccgagtccaacgacatataatatgactatatctaaaatttgggattccgaagcctcacctaagcggtgcacactaacaatcggtggcggtaaaaattagtgtaccggaaatgtcgcagaaaataggagtagtgtatatcaaaacgaccacctcgacgagtacatcacacccatgccaaccgtttgtcaaaacggtacacgatgtcaccgaaaagtcgccggaaaggggcggagctacaaaaatgtcaccggaaaaagtaacgaaccgggaaaaatgatttaatgtatgttgttctcctcgacgagctgagtttagtggtgaaaacctctcatcaaacggacgccggaggtgaccggaaaatccgttcaaagtttgaaaccccaactttgacttgcgatcccaagctaacggcggcgagaggagcggcgccgcttggggggtgaggtcgccgacacttgggcttccgatttgtccagcgtgtggggccgggcggtgggcagaggtgggtcgccggagtgtggtggttatggaggttttatgggttttcttttgggtttgtgt

SEQ ID NO: 372565 - DNA, 663 bp, Cannabis indica
ataatttgtgtgtacatttatcaatactcttaaattatcaggttactgtggtggtaaaaaactagtgttgtaagttttgtgcgtgccgtgctggtctaacctatatttatttgtgcttttttaaaaaaacgggtggtgtcgtgctgtgtcacaataaaatacgagtcgtgctgtgtcgtgtcaacttttggtaaagggtaggctcagcacggcctgtaagcctagtactttcgtgctgtgctcggattcgtgatgtactttactcgtttcgatcgtattttttaaacatgacagcccatttttatatccaagcttaaattcgtgctttattttttcatatattttttttaataattattaaattatatgtatatttctaagctttagttatatttatataacttttgaataatattttacttataattaaataaaaaattattaatattattataatttgtagatttacttataaatacttaaatttttatatcacaccctataaataaattaatatataatattattttttcatattttaataattgtaattatagaattataacattcaatattatatttaagtgtcaaaaggagaaatggactctcaacgagcttatttctcattgtgtgcaagaggaagaaaggttgaaaaaggacaaa

SEQ ID NO: 372566 - DNA, 760 bp, Cannabis indica
ggtgtttaataattttccacatgggattagatttcttcctaatgatgaagaaattgttggattttatgtatacaacaaaaacttcaaccctcatctacttcaatccaatcacattttggatgtaaatatatatgactttcatcctcaagaactcactcgtaagaattcaatataacaatattttctttttattattattagttttttctttagttttattactcacattatgtttctgctctcaataattttacagatcgatactcgccgatgactgaaaatgagtggtatttttattataaaaaagatttatttttcacaacaaagaataataaaagattgaatcgaaaagcaaaaaatggaacttggcacggcaatgcaacaaagaagtcgatcttgaatcaacaaaaggtcgagataggttttaaaataactttggattttatggagccagataaaaaactaactctatggaagatgactgagtatcatttgctcgaatccaatgacacacaggtactaacaaatacccttaatgatcattagtatttcacttttaatatttagtgtacataatagtaaagtctaacttaattttaatttattttttgtcagcaatgtacttggatattgtgcaagatttataaaatgaaatctaaagaaaagaagacgtttacaaataataagaatgaagaactaaacaaaaaagacaaaaattagtacaagagaatattatggtagcaaaagaacaagaatcaat

SEQ ID NO: 372567 - DNA, 880 bp, Cannabis indica
atataatatttcaaattaaaaaataaggctatcatttaatttaaaatatgtctaatattaaaatatctaatcttataattaaataatatatagatattaaagaaattaataaatttttaaaatctgaccatatttaaaaataaaataatcaatttttaaatttaaacctcaaaatatcagaaaatttataataatctattaaaaattaaatattattaatttaaaattgatatttaagttaaaatatatttaaaataatattttattttgaatttttgggtgaaattgggaaaaatcgaaaatgaaaaaatctcacaaaaatcagaaataggtgtggttgcccaagaggttgcacgtgtagcccaagaaggctgcaagcagcccatgcgcgcacagagcagagggatttgcagcctcgctggttgagaaacctcgatcagctgtaggagaggatgtgcgcgggatgcaaggtcacgttggcagatgcgcatcagcgtgcgcttcaaacaacatgatgtcctaggcacatgcgtgcacacgagcacccttgtccgagtgctttgttcgtgcgattgagcaccattgacaccaattcaatctgaaacttcaaaaaatcataacttcttcgtatttcatcagaattgaattacgtaaaaacaaaaattgcttaatttctctcaaggaatccaaataaaatttttcacaatgaaaataaaattattttttagtaaaattttcataaaacacattcaatcatcaaataacacataaaccaacatgaacacatccaaatcaacacaaaaaaaaattcgtttcaaatccatattacatgaaagtaagtcattgttgggaattattttaccaggatcttagatctact

SEQ ID NO: 372568 - DNA, 521 bp, Cannabis indica
tatacaactaaaataaataaataaacattagaaagacaaataaataaattatttttttaattaaaattaaataccaaagcacaataaatatattaaaatttaaaaatgtaccaaactattgaaatcgttttgaaaaaatatatgaaagaactaaggttgttaagatagacagtttatagttataaatatttaagtaaatattttattttttaattattaattaaataaaatttaaattgtgttggttgaagtttttcttaggtcacatttggtaacatttttatttttaaattttttagtcaaaaaaataaaataatttttttatttttaaaattttgtttttgaaaagaaaaatgtgttctataaccacttttattttataattttaaaaacgaaaaataaaagtgtgttctgtaaattttatttttatttttatttgttgattttatttaagtcgaatccaggttgggtccgggtaggtttaggttggggtagaagtctaaaatattgatatatatata

SEQ ID NO: 372569 - DNA, 536 bp, Cannabis indica
gacccaagaagcaaaaggttggaagaattaagaacaaccgaactgcttgtaacggtgaaaggattatcaaatcacaaaattgtagcaagtgcggtgccaaggggcacaacagaagcacttgcaactaccaaggttaaaaatgttattttagtttatttctatcatgatgtgtaggactattatgtattgttattgaattaatgttggactattttaaacattagaatttgtgatattttatgtttacataattattataatttgttgcatgaaagaaaggcgtaaaatttgtatgaactcttaaaaaaacataaacatactgtaatattccagcaaataaataatatttaaatagacatattttattaaatatgtaattattttggaaacgaagtaagattatgatcttacttaggttaattattgagaaattatttaatgaaatacgatattttcgggctcggcaattgtgagaatttagcgatgtggttagtaatgtcatgacattaatgaaagaattattttgagaatatccc

SEQ ID NO: 372570 - DNA, 823 bp, Cannabis indica
tattgtaaacactagtttaagtttccatctttggatgtacaactagatgttgcatttacaaacacttatctgtcgagatctaacactattatgtttgtccaacggatgaaaatcctttggaatttgtccctttaaaaccaacaaactaagttagaccaacaatgaatattctaaattatactacaacattaataacagaaaactacatgattcaatataaattcatacacattcagaaattatcatacatttagcaagtaagaaagatatgcgaaaatacaaaacaaacacatcttacataatttctaaggttttcaacaaacttatatagtgtcccatttaggcaagagtcgaagatatcattcattgaatagagtagtcaactcatctaaaatggataccattctagcaaccttttattcaatcaagactagaatctggcgttgtcctgtttaggcgagactcaagaccattctatcttatgagcttccactattttttcataccttgtaagtcttaatcttagcagccactttagggtggtcgttactaagaataaaatacttacaataatacttatctttcaagattctacgatgttaaattgctaatgaacgttcattcttttgggatgattactcactaaaacaagaactgtgttgaaccaataacggagattgaatatccttataactaaagctcattattttaaggattgtattttcatttggtatatattttaatctatttagtgtaatgtatatatttatttaattagaattactaatttagatgaatctaactataaattttaatttaatat

SEQ ID NO: 372571 - DNA, 732 bp, Cannabis indica
atgttaatgtgcaatgcacatataattactattcttttttaattaagtttaattaagtgatgttaagtgcaatacatgtttaatttttttaattagatactgtatttttttctaatttctgaaataagatttgagtattttgatcgtatttttttttaactattgcagctatattagtatgttatttggatgtgattatatgtacgtattttatatgtacaataaaattcaaatgaaatatcatggtaaattgaccgattgaatagaattatcttttattttaattcaatattaaactaataaaattaaaaatatttataatattttaagtattttaaatttaaatataaatttctttatataaaatacatacataattttatttttactgttaaattaagaattgcgttatataaaataaatatattaatacacaaataaaaaaaataaaagattataattttttttaaaataccataaataccaacagctacttggccacacccctagtaaatgagtttttacaattattattattattattattattatttatttttcaaaagtgatcaaagtaagggttatttacaccacatactgaaattttcaacttttttatttttttactatcgggcggaattttttttcaaaaatactgtgtaagttttatactgtgcagtgtgataagttttcactgttgttctacggtagttttttagttgtttcactgtt

SEQ ID NO: 372572 - DNA, 602 bp, Cannabis indica
tctctctctctcctctctctctctctctctctttgtctcacacatgtacacacctatccaggtgtgtgtgagatcaaaaccctaactctattacagtgtctgatcatgatttgagtacacactataatacctaaatttgttcatccaataagatctaatagcctactctattcttgagtgttgaggctggcttggaaaatcaaggagtggattcttcaacaaagttcttaaactagatgttcgataattatacgaaaagaaacaagaataccctaataggcttcaagaggtataatctttctttcagtagtttagatttaatctacatatattatgttgagatccttaggcttatagttcatattagataaaaactattttgattgaaattctgctttcgcttttataactctgatatagatcataaaattaacacattgggcttatagaactactgcccggacaaccacaggacactctctgttttcaatgatgtaaggatgcaaagtaatggtcccagtagagagtaccattccctcccacaaattcatctagatgcgtaccaaaggaaagtggcaagatactttaattcaaaagtgaag

SEQ ID NO: 372573 - DNA, 588 bp, Cannabis indica
atttctattaatagttttatctattttaggaatatagagaataacaaaataggaaatattaattttttaatatttaattaatgattataaatatcaaccattagatatttgatccaatggtcaagaataaaatacccatacatgggtaatacccattaagagcatacccatatatatatatttatatatatattggaaatgcctatggtagagaccttagttttgttcctatggtaggaatatttttctagctcttgattgttgatctaatggtaataaagttgaggaaatataatagtggaacctagcttataatatttttacacattttttgtctttatactattgtcttcttctttttttattttttttttaaaaagtaaatttaatagttattttattttactttttagtacacttaattagtaatttcttattatttttaatattcttctaaatatatactttttagtatgttgttttcaaaaaatatttattttaataagcttattgaggaccctttttaaaatttattttctaaaaattatattttatgtctttcttatatttattttttttataataaaa

SEQ ID NO: 372574 - DNA, 538 bp, Cannabis indica
caaatcatcaatcctgggcaacatgggcaacagatacttggtcttgatcgtcaccttgtttaattctcgataatcaatacacattctgagggaatcatcctttttcttcacaaatagaactggagctcccaagggctatacactgggtcgggtaaaccataaatcaatcatcctctgaagttgtaattttagctccttgagttctgctagagcctatttgtttaaatatattttagcaggacctagatttagtaacaaagttttttttagcatcctaaatatgaacctctaaaatgatgaaaataaacacatataaagtatgagaaaccttacattggttgcagcagaattaaatgactccttcccccccagatctctaacccttatctgctttttgcctcagagtataatcaagatctgagcccgaaactccttcagttgtttggattcttcagtcttacacactatgattgacgactaacttgttatgggtgggcatgcactcaatcactaaagcttgaattttaatggtgaagaa

SEQ ID NO: 372575 - DNA, 1066 bp, Cannabis indica
taagtagaaaatatatttaagttaaaattaatttacattaattcagaccaacttaaattagaattattttcttacaacttaaaataagaattaataattaagttgattttattcaacatacttaattatttattcttatttcaagaaatttaattaaattagaaatatatttaagttgaaaattaatttgttaattaattttgaaccaacttaaattagaatattttcttagatattaaattagaattaataattaagttgaatttattctagatacttaattatttctattttaatgaatttaattaaataaaaaattttatttaagttagaaatttttcaatttcaaatcaacttaaatttgaataatttttagatttatctttataatcattttaccacttaaattttgaattgccttaatttaatgaagatatttcaaaaattttcaattttgaaaataagattaaagttaaaaattaattttagatcaacttaaatcaagtaattttcattaatgattaaattaaaataaatagactaaaatatattataatttaattagaaaatcagtaattagtttatgaattatctagatagatattttctaggtagagtttttggtatttttgtagatatacttaattaaataaaaaaattaatatttaagttgatttgttctagacacttaaatatttaaattatttttaagagatctaataaaataggaaaattatatttatgttgaaaattaatttatttaattttagaacaacatgaattagaatgatttttcagttttattttaaggtgatttcgaaaatgtatctttatacattggatttcgaatttatatatatatatatagaaaattatatttgagttaaaattgattatttaattaattttggacaacttaaattaagtaatttcataatattcattggaaaattaatactaaggatgaaaaataaattttattttttcagtatcttcctagggtataattttataaatattgaattaaaatttatatttagagttatctaaattagtaattttaatt

SEQ ID NO: 372576 - DNA, 531 bp, Cannabis indica
atttaacagaatattctttttatttttaagaatattctgttaaaccaagaattgccgttagataggcacttttaatatataaagatacctatttaaaaaatagaaagtttaaactaatatattttttttatgacaaatgatttgaactttaaatttaatttttatatttatctcattatcacaataactataatataataattgaatgtaaaaaaaaaaaaacattagtgttcggtttggatggattaactcgaccaaatcgataaattcattgggcgggttgcaattttttttttcttaattgggcgggttgcacttagatttttgtaacccctttacattgagttaaataaaatgaaatgtaaaccgaccaaacggactgacatacacccctagtaacggtatacatctttttatatattatgttattatataccttttaatatattaggttattattgcacgtatatttagttatatttttaatttttatttttgttatgagtagttttaaaattttataaattaaaa

SEQ ID NO: 372577 - DNA, 558 bp, Cannabis indica
ttttaggtcaatttttttcaaaattatccgagcatgattgtaaaattatggtttgagtcatatttttgctatgttttgttaccaagttgtattttcagagttattttatgcacttccaaacttgtaaagaaattgttgttaacacatatagttaagaaaaataatttgagtgtaaaatttttcatttttttgtgagttgtgagagttgagaaaataactttttgaacttttattggtcatttgagttggcaaagttaaacttttaaaatttcaaacatgacatttactaaagggattaatttcttttgtaataaagaacctttattttttttttatttctttgtaatcttattttatttctttgtatttttattccttcgtatatgttgtctcttgtaaaaaaaataataaaaaaaaagtaaataaaagagaaaaaaaaaaaataaaaaaaaaaaatatatttatagaacaagagcaacatcattttatttcaattttctaagtagtgtgcatcttttctaataaaaaaaaaaatatatattatatataaaaaaagta

SEQ ID NO: 372578 - DNA, 809 bp, Cannabis indica
ggaatttttaatggccaaaaaagctcaaggggcatgatttagtacatgtcaaagttcgaggagaaaaattgcaaattagccaattttaaaatataaccataatttcaaaatataaaataactaattttaaaattcaaacttcaaaatatcatcaatgaataataatctgttaaaaaaatattattaattttaaaaaaattgaaatttaggtttaaatattaaaaaaaatattttatttagatattttagggtttaaaattcaaaaaattcaaaattggtgaaaaaatcaccaaaatttcagatttctggtgcataacacctagctaccgataaggaaggttgttggcagccatctatgcgcgcacatgaggaaatctttagcctcccaagccaagaaatctcagcattggcagcatcaggtggggtgcgaatcgtgtttgaaggagggttcacgccgagcttcagacgagaaattgtccaagatccgtgcgcatcctagcaccttgtctgagtgactagtgcatgcggtgctcgacattgcgacaccatatggacccaattttcaaaacaccatattattgggaaaattttaccaagatctagatttacgaacaagtatgttgattaacatcctaaatatgaatatgtctaaaacaataaattaaacatataagagttttagaaaaccttacattgatggcagtagaatataatgactccttccgctcacatctctaacccttgttcctttctgtcaaaaagtattatcaagatctgagcctgaatctctttctctcattcgggtttgg

SEQ ID NO: 372579 - DNA, 809 bp, Cannabis indica
ggggattttgcattagtatgctcgtggctagatgataagagagaaacaataatcaagtttattgtgattaaaagggtaattttattcttaaaaaaaaagggtaattttaaaaattttaaattgagttttgactggtaggtaatattaaaaaaaataaaaaatgaagtaaatagtgattttttttttgtggttgatttagttaaattgtatagaaatttttattctttcatttttagtggttaattttttttattatttatttatttattttattgctcgatgagaaattttcatttatttattgaatttttgggttctgattttttttttttttttttgttaaaaagggttctgaatttgatttggattgagtagaatatttcttttattcgtatacaaatttgatcgcacatgatattttttagttttgactttttagtttgacatgtatagatttttttaatttaacaaacctctagcattattttttttaaaatatatatatatatatatatatatcaacagaattcattagttagctttcaattttataaatcattattattccttttaatatattttattcacattaatttttatttcttaatattacataatatattattttttttcaatatattacacaattatgcattctctttctttaaattattattcttttatttataattatcaccctgtattgaacattatttagtttaaaattaatatttgaaaaaaaaaccataactacaattaaaacctaaactaaaactaaatttaggtgactttgacttgtcacgtaacat

SEQ ID NO: 372580 - DNA, 379 bp, Cannabis indica
agacaaggatagaagactattagaatccatattgacgagacacatatctgtctcggagtacacaagcccaagaagataattcagttatttaaaggagtgaatacagttatgcaaagcaacatcgggttatgaatagcgagacaaccaccttacaattctaaagaaacttgacaaggcgaatgatctgcacttagcattctttccacattataatagacaaggataagcaattcgaaaataagcgagatacaattgtccatatcagcattaaccatttataaagataagaataacaagcatttaccttgttatctagtattatccaatatacgatttaaatgaaatgtgggaattaatcacgtttcattaacgattatat

SEQ ID NO: 372581 - DNA, 562 bp, Cannabis indica
ttgttgcccctgattttgcccaaaatacgtggaccaaccggacgatgacacgtggatgggaaggggtcagcatttaaataaaacagcgaagtctccttaaagcacaggattaccttagacatgcctcccggagaaggcatgtaggtctcgtatgctcccggagagcaagattgcaacaaagcatctccgggtggtgtcagattctatctgaacagtcatctcgcatttaatgccgcatgggaggaggcgtattgaaactaccatacgtaatgaagtttgacgacacaaccccccatctgtacctactaggctatgattaataaagtctagtgacggctactctgtgaggaatcacatcagtcaaaaaggattaaggactgcccccataaaatccctacagaacctagggattagaccatgcattacctatgataatttcattgggaatgtgtggtttcattgatagttacagaaatacatgtaccttaattttagggatcaccccacaaaaacactataaataccccccaaactcattaaagaggggtcaagaattctgggt

SEQ ID NO: 372582 - DNA, 615 bp, Cannabis indica
cgggagagctcttcccaagaattcaatcttcctagggctagcctaaaatactattgttggcaatttcagctagagttgcctgaaagattcagcattgcacgtctctagatacttctaggagatctgtttggatcttaaagtacttcaggtgtactaaagggtcttcttttcccgtgtacatcttccaagccaacatcttgaattttggcaagagcaaggcattgatataggctgagaatagtgatcccctagccctgtctagctcgagttctgaggttttagaccagctaggcccttaagcatgtcttgtatttgatccaactacgcttgcacacaaggattttttattggaggtgcctagttgattggccttctttgattgagcttgtaacgccctaactagtttaggcatgttagcgtgatttttaacgtactgtgcagctcgttgctaatcaacgagattatcaaaaagcgtgattaattaaaatttaacttatttaattgaaaacataaagtatcatacttataaaattctgggatcctgtttacaaaatacatttacaaaagtttaatattcatatacataaacttgtcacccagcgactacacaacaaa

SEQ ID NO: 372583 - DNA, 537 bp, Cannabis indica
ggtagatatattaaaattagaaaatggtagatcttattatcattacataataatttatttatttatttagtatggagaatggatttatcatactaattacatgtaaaagtctacttaattatataatgggtggcaaagttacacaattcaaaaataaacaaaaaaattacaactaataaaaatattttaaaaagcacataattattaatattctaaacaaaacaagtcgccttgatcactgtgtctatattactcgcaattatcactaatttcgggctaataaatgcagtagtaccttacttagagcatctccaatggtaatattttgaaaaatatttgataaggtggaaagtttatgtggcaaaatatagaagtgctataccattggagataaaagaatgttattcttgaaatttgcattgatgccacacaatgacattgatgctatgtcttttttatacaataaaaaattaaaaatgcaatatatataatagtttaataaagaaaaaaaaaattatatatataataatatgtgat

SEQ ID NO: 372584 - DNA, 943 bp, Cannabis indica
cttctttaaggcttgatctctgaagtcctttagctccttcatctccacggccaagttagccctggactgcaagtccgcctggtgcaactcctctaaggacctcaccttggcggccatctcgtctatggcctccttagcctcccgaagctcgcgcttggccttggcagtggcctcgccctccgccctcagcgcctcccggtgcctcgcctccagcctatccctccgcaggacctcctctcggagcatcgcctccgcctgggcttccctctgtttggcctcctcctcgagcttcgccttagcgagggcctcctttcgctcagcctcctcttggatcgcccgcctctcagcggacaggtcccgcagaatcctcacgacctcgtctatgcccccgaattcggacaggacgaagccatgattgacgatggtcctggagaggcggctggtctccgcagaaatctgaaaaggagaaaagagtgagatcaaatgccttagacaaaatattgaggaaagaaatgaatcaagtgcttaccgcggccatggcgttgctgatgtcttgaacttggtagacggagttcaaggatgcacaagcagcgtaccgtttgggcgggaattgagtcatgtgggagacatactcgctggtcatctccgcggcaaaaggagccaaggtgggccccaggaagcgattaaaccagtccgtcagcggatccatattcaggtcccacggattccgaaagtcctccacattgaggacattttgttgctcctcccgaaggaccctcttcaaggcctccacttcggcatgcctccgggtgtattcatcaagggcatagttgtgctcggctatcgaaagattctgcctcgtctccaggaatcggagtcaacacaatgccgagaggcactgcatattcctccgcctcggaggggatcctggagtcatgactcg

SEQ ID NO: 372585 - DNA, 714 bp, Cannabis indica
gtgaatgcaatgattgtgggattcacgctgaatacactgatagcgggatcttgtgctgatgaatcatgttgcgagaagctttatttgctaagtgttggtcgccatgcgcggattgctaaaaacaaacatattgtgggcatggttaactgttcgaatatttttgaaacagggatgtcattgtaaccataacgaacaccccgtgaaaaattgtaatttttaaaaaaatattccgacatgtaattttcggcttgaagattgagacagagatagaaacaggatgttcactgtaacagtcccacagaaatgatgatatggaccaagtgtatcccagtgtaatatgggacgtacactgttcactcgttgtactttgtcaattcacacagcactaaaatattattttaaaataaaggactgcttgtgacatgacatgatacacttcccaacgaaacaatcagccatgccctattatgttgtacgaattaggctttgaaattgggattttttttggcaccaagattgatcaagttaaaggtgaaagtgaaaaagtttaaaaaaaaaaattcattttcccaccactaactcatttcgaacagcctatatataaacaggtcccccctttccttgtgagtaacacacattatctccaccatagttagaacaaaaaaaaaaaaaacttgtatacctcacaaattatagtacatcgaacatggtggt

SEQ ID NO: 372586 - DNA, 535 bp, Cannabis indica
aaaaataaattaaagttgaaaattaatttttaattaattatagaacaacctaaatcaattaaatttttcatgaagaaatatactaaaataaattacattttaattaaaaaataaagagattaattagtgaaaatctggatagttattttttgtttgcttgaagtatttttctagttatatttaattacatagaaaagtaatttttaagctgactgtattcatgaaacttaaatatttgataattttcttaatacttaattaaataggaaaattatatttatgttaaaaattaattttaattaattttggaccaacataaattagaataatttttcaggatatattttattttattttaagcaatttcaaaattgtattttttttttaaatacattggattacgaattttgctatatatatttatagaaaattaaatttttgagttgaaaattaattttaattaatttttggatcaacttaaattgaataattttcaaaatatttattaaaaattattactaagatgaaaaataat

SEQ ID NO: 372587 - DNA, 556 bp, Cannabis indica
gctccccctccttggcatccttctcctccttcatttgatgaagaactgctcgcagagaagtcctctcatcttgaagactgtttacctcagcagataaaatctcgttggtctcctcaaaacggtcagcaacctcgagatccttaatcaacacggtgattttcttctcagcgacaaatagcttcttgttggcttcgcccaactctaaccgaacagctccagcttccgccctggcttcttcaacttccttcttggccaagtccgcctccaccttcaaggtgtcggacagagccgcgttcttggaagtagcagacttagcccgggagtaagtgtaggctaacttactaccggtttgcacagaggaaaaactttagcatattgagctaggtgttgaaaattaaagggaagtatcaaaaaagacttaccctggtgaactccttcaagactccgcccaccagaacatccaaagaagagtcattgtcagcaccagccagttgctcactgaccccaggaaccagccggttcatgtaatgggccaacatctccttgccctttttgg

SEQ ID NO: 372588 - DNA, 716 bp, Cannabis indica
gccatcgctattctttaattatctaattaaataaaaaaaaatctagggaatattttatttctatagtagctagattggtacataatacatattattatgtttgatgagtactaattataaccttatattataaatttttagtcagtttttgtgtctgaaattacatgttaaaatatttttttctcatagcgatattcattatagttacaatatcatttctgtaaattttttaaaaatttcaaaaagtttataattgcaaaaataaaatttttgatattctactttactacacgtgctttaaaaattttaaacctatttttaatactgtaaactactcaatttttttaataatttataaagatgatgttgtaactataacaaacacttctatgattattttttttttaaaaaaaatatagtaatatgtattttcaagcacaaaaattaattaaaaatttataataaaaagttaaaaatacaacccatctctatttgagaaatgtacttaattttacaagttggatatgtactaattttacgaaatcacaatatgcaatatggtatataattccttattttttgtgttaaaaaaattttcttattttttaatttttgtattattattatttattttttgaaaggtttataattccttaatttgattgtataaagttgaaatttttacatgaaaaatccttttactcactttattacat

SEQ ID NO: 372589 - DNA, 1302 bp, Cannabis indica
tcttccaagaatacactattttcttaggtattttatctgatgaggaaagagagaatacagaaacctagtgtttcttggggaccactacctataatttagactcatcttagaatgaatttggatatttataattttgcccctcaacaaattataaattaacttatgatatctacacattatttctatgacaatttaataccatttgatacccataacataattggttacttaattgtgtatcacactttataataacatatacattatatatatgtgcccacaataggattttaatctaacatcgagctggtagttgaggaaaggttttcatatgaaaaacttaattaaactcaagatggatataacagagctacattagaagtaatttaatgttattcttagcaatatgatattctctggcctagtaattaccaaaaagtgtggtactcaatggtctggaacagattaagcaccctaaaacactaatttatattaaggttagctgcattaagaagctccaaaaataaagatagattatttagatttggagtgagcactgatgttaaatgtttgatttgtggggataaagttgaatccctttctcacttgttttttcaatgtcatttaagtaaggaacttacaactttaattctaagttgaattggcattggctctcatcattttagacttgaagatttctcaaaatgaatcaaaaattacaggcattagattcaaaggagtgcctatactgctgccttgaatgccatagtcaatatggtgtggtgagtcccaaatgaagtgttacagaatttcaatgtatatactatatacacagctgtacacaaagttaaaaatgttattagttgtagattttctgatattaaagttgagaaaattagtgatatagataggaagtggttaaggaaaataatagaaaaggaaaatttgcctaattctttgtaaggagtatacttgactcttgtaaatgattgagttatgaaataaaaattcatcttacttactaaaaatatgtatacaaaaattaaaggattatttgttagttttatttttcaacaaaggttaaagtgttacatttgactattcatgttatgaatatccaatagaaggaggtttcaatggttacatttttttattgtaactatcatggttacatttttttttagctattggatcactattaaatggttgtgattaatttagaaattaaataaaaataaataaaaaaggacatgtaacctgatattaaacaattaatttatttccttttaaaactttaattaa

SEQ ID NO: 372590 - DNA, 510 bp, Cannabis indica
gatgaagcacaaaagaattaatacaatattgagaataaaaagtataatagctacactctaacctcaccaatattactactctagttcactcatttttgtcacagaaaattagtgaaactaaaatagcaacaaatgaaaaataaccaagcaacaaagtatattttttctactacaaaatccaatgccctttacattggatttggctctttttataaacccaatgtaaccttaaactggggtacaattacatatagcacttagagggaagcatggctaaaagatatagataagagcatctccaatggtagcatcctttaaggatgctaacaatatccacatcatccaaaaatataatattttattttatctctcttccacatcatttttagcacttttacttctaaaaacactccaatggtatagcactcttcaaaaatgctataattattatgaattcacatattattatttaatatattactttttttaattataaatacattatcacac

SEQ ID NO: 372591 - DNA, 507 bp, Cannabis indica
aaaaattgtgaaaatttatgaggatgaagcaaagaatgttgtgcatcaattttccaatgcacacgtcgcgagataaagtagttttcatgcactaacaataattttaatcgaaatagtgaaaatcacacatttctgatagtggtacccctttgtgaaatgtggcccggaccaatctcggaatattttttcccactagtcacaagaatttgtactactaagacatgaatatgaagattggattcaagttaaattttgttaaaatggccccctaattaaaaaattgaaaatattcttcttttcaaggtatattttagcaagttttttccatcatcttacactcattagtgttctgctaaaatctcaccctacacatctcgaaaaatcgtgaaacttttcaaggacgaaacaaagactgtcgtgcatcacttttctattagacacattgagatataaactagttttcatgcactaacaatcattttaatcaaaatagtgaaaatctcacat

SEQ ID NO: 372592 - DNA, 487 bp, Cannabis indica
agttagttctccacttgtaggccatttcaagctaagctccaaacaatgtcctacaagtgagaaggataaacaagaaatggcttcaataccttacgcatctgcagctggcagtttgctgtatgttatggtttgtacaaggccagatattgctcatgcagttggagttgttagccgattcctctctaatcctggtaaggatcattgggaagcagtgaaatggatattgagatatctacgaggtacttccaggttgtgctgatgctttggtaatggtaaacctatgcttgatgggtacacagatgcagacatggctggtgattgtgattccaggaaatccacttcaggattcttgatgacatttgtagggggagttatttcatggcaatcgaggttacagaagtgtgttgctttgtctactacagaagctgaatacatagctataactgaagcttgtaaagaagctttatggatgaaaaagtttctacaa

SEQ ID NO: 372593 - DNA, 496 bp, Cannabis indica
tttttattactaatggtaatggtttgttgtagttttatttagttaacatgaggtagcggatatagaattattattactttattttttaactctcctaatttctagtcatgatctgattttttttctaaaataatacacgatattataattatttatagtcaactttaatgagatgatgatgaaacgaggcgtattaggactggtgcagcttggttcatgcaaagatggtgatgaggttgtggttcaggtgaagtagaagttgaagatgatgattagatgaaagtgaagtgggcggaggattttctaggttggttgatttctaggtttggtgatggtggggaaaaaagagaggagaaatgtgattgggggtctcataatgaggtttttggcgaatggaggtggagaagggtagatggtggtcagggtggtcgtagttcaggcgaggggaagaaatagacgaggtggctatggtggttaggatggaaaaggaagaaga

SEQ ID NO: 372594 - DNA, 603 bp, Cannabis indica
  modified_base (508)..(508): a, c, t, g, unknown or other
caaccattcaataataatctaatgaactaaaaaaatataatggttacatttttaatgtaaccattgaaatcttcatccattatctataacatctatataaaaattaatgttagaatgaaacaaaataaaaccaattatgattgtggtttgtttctttttttttttatatacatacactatttctttttttacttttttatttatttttttatgaattatgtttagtacaaattttttaaatgatttttgtagtattatttccatatggcaccttaaggtgttcaatacaataccgatttatatacacaataattagttaacagctttcactacaaaaagctgctacttttagtgacaacttttttagtcacaacataaattttttgtgactaaatgtgacttttagtcacaacaaaaaattacttgtgactaaataaagcatttagacacaatagttttagtcacaataagtattgtgctaaaaatacatttagtcacaacaaattanaatttttgggactaatacttttagccacggactttttagtcacaaataggaataataatttataattagtcacaactttttacttttagtcacaa

SEQ ID NO: 372595 - DNA, 286 bp, Cannabis indica
tgtaggattttgtatttttggatggtgggaaatggtgccctgatcttcaattttttcaaacctcttgagaggaggaaaatttgcatcataatcaatggatggctagaggtgatcatgtttgcgtcaggaagtgattgaactgattgttgaacagctggtgttggaaatttttctccatgcttctcatccattttgcttgtcgtttgtaaccaggcaaaactatcttaggctgtgaatcttgtgaagcatcgtctgaatcccatccggtaagttctggcataggctg

SEQ ID NO: 372596 - DNA, 609 bp, Cannabis indica
aatgtaatatgagctatatgtggaataaaaatattttcaggttcggcgaacctgaagatccgataagtggataaataagcgtaatttgttaattacagagatttatttgaaatacgttgatataatataagatatttgtgaaataaaatatttttaggttcaacaactatggagactcgattggaggccaaaaatgtcacaacgattttagttagaaatattgatggaattattgggataagttgattttagaaatactggagtattttagggtactctgagttagccaaataccttagaagtagaaatttcttagtgattaaaaaaataataagataactattaataataaagttattattaatattattattcatattatattatattattattattataatattattttatatatatataaagttatcgttaatatatattataaattaaagtaaacataaacggaaacgaattaatagaccctcgttctttctccttcgacaaaaccttctccccctatcttcattttcttcaattttcaactcgaaacctagcgatctaagcttcggtagtagcaggataacaaattcttgaagagagaaagct

SEQ ID NO: 372597 - DNA, 528 bp, Cannabis indica
aattttgtcatcataccttcttactgaaaccaccgacggaaagtttgcctatgcaaaacatcgtggttaccattaggatattcatgcctgatcttctccaaatgttcactgtgaagtatgataatgtcaaggtacgatagaggaaaatagagaataaaaactaaaaatttaataaaataatttataaaaatgtaacaaacttactctaagtaagcttgaatttcaggagaattttgaagaatgtaccactcaactttttcacgaccgatacgatcaagaggcttgataattccgctagtcagaggacgagattgagaattaaaaactgagagatagcgagacacagaaggcacatcttcatttcgatcaagacgattaaatcttgtttcacaccctttaaagtacattgaataaaggttactgcctcatcagcaacataaccttctgcaattgacccttcaggcgtagccttgtttcccacataatcttcaattttttcatgtacctttcaaaaggatacatccacct

SEQ ID NO: 372598 - DNA, 1019 bp, Cannabis indica
ctttgaatgcgcttctgtattttgcttcttttaaaaaaaccccaaaatggcatccttatttcttctttatgacacaagggagaccaagataagtactatgttcatctgcaagtctcattctaaggatcccacacaatcggtctcgagtagcagtaggcacattagtattgaagaatacagaagacttactgaaattaacctgttgactagaagcgatctcaaatagctgaagcagatataatatatattcaaagcctctctatcatttgcgcgacaatagacataactatcatcgacaaaaagcatatgagatataaccggagcaccagtagccaccttgcaacctttaagccgaccatcccgctcaaactttcgtatcaaagatgagaagccctcagcacaaataagaaataaataaggtgatagaggatcaccttgtctactacccctcccaggaacaatcggacccagctcgtgtctgccatgaattattttataccgcacagagctaaccgtagcaataacaagatcaacgaaacgcaaatcaaatcccattttactcatcatagctcgaagaaagccccactccacacaatcataagctttactaagatccagtttgagtgccatatagccttctttgcctttacgcttccttttgagataatgcataacctcaaacactatcataatattatcagtaataagccgtcctgggatgacaacagattggtttggggatatgatctgaggcaacacttcttttcaacggtttgcaagcaccttagacactatcttatacaagacattgcacaaggatatgggccgaaggtcacccatcgaagtaggctatttcttcttcggaatcaaaacaatatttgtatcattcagtccatcaggaatactgccattcgcaaagaattggcaaacttggttcacaacatcgctcttcactatttcccagtatttctggaagaaaccttgggtcataccatcgggactaggagatttatcaggat

SEQ ID NO: 372599 - DNA, 501 bp, Cannabis indica
ttttcaccacttattttcacctttactagagatagctcttaataatacaacattgttaaaaaaattgctttcttagtctatcaatgcaaagaaatatacataaatcattatgtataaattaacatgtgaatgtaaaaaaaacgtctaacatgtctctaattgtcaattgccgttattcaaagaaaagaaaaattgaatcatttatcaataaagagtattattaagtagtcggtgaattaaattgtgttagttagttacaataaattaaaatggtcccttctttacttgtgttctaccctatataggaaaatttaactcatccaatccactcactaatcctgtcacttgagataggcaatcctgtcacttgagataggaagcctgaattaaaattaaaaataaaataaaataaaataccagttttcttacttttttttttttttttttgaaaaagaacgttcattgataataaaattaaacttctcggtcattacaaaataa

SEQ ID NO: 372600 - DNA, 621 bp, Cannabis indica
cttacccaattccaaagccaataacaatatagatcaaacaattaaaacagaaaaatcaaacaaatattaaatgtttaggggagtacataccagtactaatttctttctcactgaaaagcaaataattaatgataataatatcgattgaggatcatcagtgaatcagctatggaaaatggcggcacaatgggagatcggaaccaaagcattttctggaaggaagagaagagtttgtcttcaagttccaattccatgaagatccaaggccaggacggacccaaaattgatcttgacgatgaacacaagaccgtgtttggaagaggtttcgggatcagtacggacgactgatttgctctcggatcactatattatatggttgttcaacggagcttgagtagcggcgggagtgaaaagagagataagagattgaaggaggagatgagtataataaagacaacattttagtgacgatgaggttaccttcaatttcatttttaattcttatctttttttcattcatggtgggacatgtttttttgaacaggtaatattgaagaatttgagatttattatttttttgtaatttaaaattaaattgataaataattttataataagaaa

SEQ ID NO: 372601 - DNA, 727 bp, Cannabis indica
aaaaaactagcataaaatttaatatacgtgccttgcacgtagatttttgctagtactatacatatacatctattataattatatgcaccaatgattttataatacatgcacctctatttatttcgatatttgaaaaaaattttaatttattagtttcattaacatctatgtattattattagtataaatttttatatattttattttaataaagattatcaaaaattattaaccactttattgtgatgtgagtgctttatatttatcctttttattaattaagtgtaaagacaactatgtgtgtagtaaaataaataaataaaaaaaaataaataactatttaaattttatattttataagttatattattttataaaataaaaatttaaacattatattcttcgaaatagtaataaaataaaatctagagctttaatttttatttgatttaaaacttaataataattaaatttgattgtgttacgacaaaaaataattatatttttatatttattcatgctaaaattagtttcagattatttatatctctaaaaaattaactaaaaattaagtttaaagtctattttgtattatttaaaaaactcaaaatttaaattgttaaataatgttcaatttgtaactttatataattgattaaatggtaattaattaaggttatgataacttgtacagaatatctatggcatggccaccaaaatttatagc

SEQ ID NO: 372602 - DNA, 770 bp, Cannabis indica
aaatatacctacttatgcataaatattcataaatatcactatctattattcttttcattttttttaaaaatttgattagtttataaatataaatttaataaatcaattattatctttttgaggtaattattattaatgtgtctccaacaatttttttttaatttttatataaatatttataaattaattattgtttttttttttttttttgtagataattgttattaacgtgtttacaacaaattaatttatattatatttaaatttttaacccctctaaaatctctttatttaaatatatatttattttatacaataaaatatgattatgtaacgaaattattaatttaagagatatattattacttaatagaattatttttttttaatttttttttaatttaagtttattatatgcttagatattttataaaaataaaaatattaagctaagtaaattatataaatgacaaaaatgttataactaaaaaaataatcttagttatatgtagatatttagaaaaatattataaaaataaaaaaaaataatagatattctatataatatatatataaatgagagatatgaagttgtgacatatcattttaaaatctctctaaaataacactattagctaaaaataacctatttatttattctatttctatatctttatatattaaaagtgtctatctaaccgcattcttggtttaacagatatactaaaaataaagaatattctgttaaatttaacgattagatttgatct

SEQ ID NO: 372603 - DNA, 513 bp, Cannabis indica
aaatagatgtgtcatcatgccgtgtattttcccattaggagttattggtcggtgggaagctgcgggtgatgaccatactagcttttagtgggatgagggcatattggatttgattcgaagggataaaggtcaatacttggacagttggaagaataaggagagaatatatatggccctcttcttcgatagtgcaacgcattgggtgacactagaggtagatctggatcattggttgttgaacatatttgaatcgagcctcggatcgatttccccgaatgaattgaagagtcacttggcaaagtgggaaaagatactaccaactttgatgctgcaggctggcctatttgagagtcatgacatgatcctcctgcctcaatggaccgcctcagagagccaggttagaagtcttacttcaaacgtcatcgactggagcattgttcgacagacagaatcaaggtaactaattacaatttatttttatattaacttgaatttaatttgctatacttttat

SEQ ID NO: 372604 - DNA, 710 bp, Cannabis indica
gtcctagtctgagtcccagatctagactccgaatactggtctattccaggccccattttccgaatcccgagtttacatctggatcaatgtcacaggtctcgttgttgttctggttcatgtcccaagtccaatttttgagtttaggttcgggatcgagactggggtgcggttctaggtcccgaccatggttgtgtgtacctagtctggttccatgtttgggtctaagttcaggttcaggttcgggtcctcagtccaggtttgggttgggatccaggtctggctcccgattcgggtctacgttttgtttggagtctgtgtccttgtcgggttgcgcttttggatctaggtccaatttcaattatgattcaaagtccaagtcctagttctagtcccggtcaacttcttgtttttgttccaatttagggtcacagggtacgggttcaggtcaacttttttgtttcggactgtgttcaggtccgggtgtgggttctggtcctcgtcaatgtttgggtcttgggctgggtcccaaatccagataccgattacaggttttatctaagctctaggtccagatccagatcccaatctcgggtccgagtctggttccacttctagtcctaggtcacgagcttggtcctaggttcaagttcgggtctttgtcgagtaataggtccatgtcctagttctgtttcccaggtccctatccttat

SEQ ID NO: 372605 - DNA, 1066 bp, Cannabis indica
attactctttgaatatcaatttcgtggtaaaatttaaaaaggaatcgattttgttcaaggatcttcacatacatgccttttccgggcttccaaagatcagccatgatgttttgaaaaatgagaaaatcggataccttcccagtcaaaagtctaccaatcaggcaccagcggtcgtcaagatcgggttccctttcatcagcatcttcatcctcaaaaacaacttctgtagcttcttcttcctcaagacacatatcagcccacttttcatgtaaattccctccattgctactgctagaagccatgccgtaccactcaagcaacaaccagaaaaatagccaaatacaagaacaatacactcaaacaagagcgacaaaactcactccaacgagagcgagagcgactgttaacatatatatatatatatatttttttatttgataatcgtctactaaaatagtaaaaagtacacagaaatatatttttattaatagtcaaatgtctacataatttgaatcaatttattgaaagtgattataatttttttgtttaatctaaatatgaacgtatattatcttttaacaaaagtttgggtttcgggtctcggtcctcatcaatgttatgtcctgtgcatgactttccacactataaggaaacgcattactggcagatcaagaatagtaccaatataggtacgaaaatagattccgaacatcttgtagaagatcccaaaataggtctactgccctttggctcctagttagtgtgtagactataagaccgaagaaagacaatccaataagaccggtggcgatagcaagagcaagggaaggtgacaatactgcgtatgtacccgtaacaaatgctatcaccattaatcccatagccaccattgctaaaactattgacacaataaagtaggacagcaagtcttcactattgttcgccagaagccattatagtgaggaagaggttcataaagacggacgtagtagagagtaccatggctattgtgtctgttatgatgaacgcttagaaaggctttgttattggtgagaacagcagagcc

SEQ ID NO: 372606 - DNA, 610 bp, Cannabis indica
tgttttaattttatacaattaattctttgatttttttttttttttgtggtcaatatcccttaaatttacttttatttgcaaattgagacgctagttaaattttactgttaaatatcaactaaattgtcactgtatatacatgtatataggtgatatgtttacattgggttttaaaatttttagtgtcatgtgtacataggtatttacaatgacagtccagttgatatttaatagtagaatttaacttacgcatcaaatttacaaacaaaataaatttatggaaattattgccacaaaaaaaattaaggtctcgtttggtaatatttttttaatcagtttctgtttttaaaattagaaaagtaaaaatattttcaaaaatatgttctattaaactgttttcactttttcaagtttttaattaaaaattgaaaattttagaaaaaaaaaaaaaatacacttttattattttttaaacagttttttaatctatgtttggactctgaccagactttgaccaaactcaaacctggccctagccttggtgccgaacctagcaccctacccggacccagacccgacttaaacaaataaaaaaaataaaaataaaaat

SEQ ID NO: 372607 - DNA, 604 bp, Cannabis indica
tttttttattttggggcccccggaaagtgtgggccctaggcacgggcctagcccgcctatgcctagggccggccctgattgtatgtttagtccacttcactcttagttttaaaattttgtcttaattttgtcaacactatattttggcttataaactatttaaaagtgacattaagaaaataattactccaaaatatacttataagtaatggtgtagtacatcccttataagaatcgttcggatgcacaaaagttttgtattttttttattcgtataatgatatatgctgtagctatttaagatttattgtaaattttgagaaaattaagaataatttatagtgtcaataaaattcaaacaattacttaccacttattaaaaaaataactacttatataataaaatatttcataactgtaaacattagaatggtacgtggcccaataaaattaattaaaataatataatttctttaaaaaaaaaaatgcttggaatgatctatacatttcccttgtgttcaaaaataattttactctatatgaagataatttaaataaatttaaacgcattgaaatatattgaaccacattaaaaattaaaagt

SEQ ID NO: 372608 - DNA, 486 bp, Cannabis indica
accaaatcatgtccttcgaactttgacatatactaaattatgccgccctgaactttaatccatgttagacttttttactaaaattagaaaaaaaaaataccttaaattcaataatctcaattgttctaggggtattttcaataaccttaaaagttcagggggcatgatttggtaacatgtcaaagttcagggggcaaaaatcctaattagccataaaaaaaatgaaataaaaaaaatctctcagagcaaaaactagataaaagtactatatcaatgcttctcttttaatgggtccattgtaaaatttttcaaaaatatttttaaagaaaagtacatatagagctaattacatttttttatcataacaaaataattgtataatgagctataacttataagaaaagtagtcactaaacactaatatatagtagttactatatattacataggtcatttttcatgggtgtgtatgcatgagtatgactt

SEQ ID NO: 372609 - DNA, 739 bp, Cannabis indica
tgaggtggtaaacccagaagttcatcaggaaaaacatctaaaaagtcctgaaccaccttgacgtcttctggccgaacagagtcaggccaagtagtatccaataccacggccaaaaaccctagacatccatcacacaataattctttggctgataaggccaaaatcaccgggatccgagatccctgaaccgaaacgacaaaaacaaacggttcctcagtttctggttggaagattaccatcttcctcttacagtcaatagtagctgaatatttggacaagaaatccattcttattataatatcaaaatctaccaagctcatttctattaggtcagcacttaactccctatcatcaattctgatcggtatagacctaatccaccttttggagataactaactctctgccaggtaaaagggttccaaaccttgattcataactatcgtacggtctatccagtttactaaagattctggctgccacataagaatgtgtcgccccagagtcaaacagtacagagaagtaagagttgttgaccgaaagctgacctgttacaactgaagggtggcttctgcatcagcctgagttatggcaaacacccttgttggagtgggttttgctggagtcttcggtgcttcggttctgagttgagggcaatccctcttgtaatgccctggcatgccacactgaaagcacccttgccctctacacccccctagattgtgccttttacaactggg

SEQ ID NO: 372610 - DNA, 363 bp, Cannabis indica
atttgcatcccataaaattataaagttgtggtatttataaagtaggtggctaactttaactgcctaaatagttaatcacaaactaatgagaaaaaaaaattgtattaaaaaatgtgatagataattaagaagtattttgtctcttaaactaattatttgttacagcattttcaagctaaaaaaaagatagtatattgttacattttagcacttgtgagaaaaaattacatgtgccagcataaggtataatatcgtattaaatttaactcacaataaattttatatttttatttactgtatagtgccactaattattatagtttattgacttttacataactttaagggcattttacataaatg

SEQ ID NO: 372611 - DNA, 499 bp, Cannabis indica
aaaagattatattcacctaatccctaagatacctacgacataggtcatgtatttcctattttgtatctgctaggaattcgtgcccctaagaggctaacacttaaagataagtgatccccttctaaggattctctcgaaaaaacactataaataccccaaacatagaatgtaaaaggggtcgattgatcaaataaggaatcgaagggagtaaataagagagagagagagagagattcaccgagaaattctttgtacaaacactctcataaataaacaaagactcgtggactaaaactcgtcaatgcctgaaccacgtaaaaatcacctgtattaaagcttccctagctcttctcattctttcatttaattggttgccgaaaatctcggtcaatattttggtgcttttcattgagagttgaaggaagcatcgtctaaaagacaaacagtaaaaaaaaaaagtcagagtaacaatggtagaaactcgtaacaatacacgtca

SEQ ID NO: 372612 - DNA, 811 bp, Cannabis indica
atattctgttaaattttaatttatattaatatattgtatatttatatatttatacaagtcaatattattatgagataataatgataatatatagagagagtggagagaaaaacgacaactcgaaaaaaataaaatgtcgggaaagtggcaaacgaatcctttctttagttaggtttactatgccccatatatattttctaattgtttcgattaaaaccaatgaatatattttttatttgagataaacatatattgtcattatatatatttgtatattatatttgaaaatgttatagtaagattatccaatgttattatttttttttttaagaaatttatgtaattttattaattatttgtgacttaatcgggatatttttttaattggctgaaaatacaattaggattagaattacaaaaacaagccaactaatcggccacgtgattcttatatcgttttacaaaagaaattaaaatatagtcagataaaaaaattaggcaaatagtaatataagtatctaaaattttaagtttgtaagcgatataaatttaataatttttttagcggatatttataattaaaactgtaattttttttaagttttattagtacggactctgttattgtcttaaatagaacacatataagacccaaattttaaattatttaaatctgaatggaaatatgtacaatagtatcatttattgtattgcaaatagaatttaaacattcaattatatgtaatttttttagtacgcatataattaattatttgtaattatatttttagttacgataaattatatgcat

SEQ ID NO: 372613 - DNA, 509 bp, Cannabis indica
gattgatgtacaaccaagaaaccaatcacgtactcttggccgaatcacttggtgaaatcgaagagagacgagccactgcaaacttgaagttgatggcccatcaacaaaaagtagctcgatatttcaacaaacaagtgaaggcttcgaaattcttcgtgggagatatggtcctaagaagggtattcttaaacaccaaagacagtacggcaggtgtacttggacctatctgggagggaccatatcaactggtcgaagttctcaaatccgaagcatacaaattaggtaagcatgaagaaaaatccaactcgttctagtaccacggtattggaatggggaacatttaagaaaatactaccaataaagtaccaggtcggacgaccacacaaagtactaaatgaacattaactcttaagtgaatggcctgttaggcgaactacgctcaaaggtttcgacaaaaggaaaaaagtactcaagtcaggtgaccaccctttaaagtacaatttctattt

SEQ ID NO: 372614 - DNA, 527 bp, Cannabis indica
taaaataaatacatgtatttttctttcaatattaattagtacatgatcaaaaatatcagttaggaagtggtccttaaaaataaatgcaccgaagagtaaactattaggtattattcttgtaattttgttggttttttagtttttttagtaattttgagctaatgatttgagttgtgtgttaaattttaagtttgtattttagattttcttttgaagattgtcattctaatataactgtgttttggtttggtgttgtgatgttttttttagtctcgcttactctggcgacaactattaataaagggaaggtgtttttcaaggtgatggggtattgttcaaattcgttatagctttattgtctatattttcgggagcagttttgtcctatgtgacttgcgttttgttttccgcagctcatggtttggcaaaatatgcttttcggttagacaatgagctatcctggttcgaggggcttcactaccgattgtggtgtgctgcattgttaatcatgtatgactttgttcacc

SEQ ID NO: 372615 - DNA, 349 bp, Cannabis indica
cttttctcccgtagaagcttgatcatttcttaagtattttacatttccctcccaaaataaataattttacaaactaaattaaaatttaaaaataaacatattaaattttgtgttaaaaaataaatatttattatccgtttcaatatgaattattataatattataattataaaatatgaaataaaacttatataataatatgtatcataaataattttataattatggtaagtatatttatgtttaattattaccatatatattatcaaaaaaataaacaaaaattctaattatatataagaaaatggtaataaatgtttttttacacatattttaagcgaataaaaaa

SEQ ID NO: 372616 - DNA, 581 bp, Cannabis indica
tctggttccatttctggtgccgggtcacgagctgggtcttagtttcatgtccggatctgggtcgggtactaggtcccagtcctagttctgtttcccatgtccctatcctaattcttggtccaggtcccagttattgggtgggtttgtgtcttggtccaagttggggttacgagtgcgggtccaagtttgggtctgggtgagaatctcagtccagatgtaggtccagcatttcgatcctagtctgggtctagttccgagtccaggtaagtatctggatccctatctacgtccaggtctgtgcttcggatcgggtcccagatttaggtccaggtccgggtctcaatttcggtctgggtacacgatcgtgtccgggtctgagttccagtctcagtttgggtctgaggctagtctgtgttcggttctacgtttgggtccgggtcctggtcacggtcttagtcttgttctagggtcctggttcggcgatacttgtttaagttcaaattttggttcccaggtctaggtcttggttcgggtttggttcttcgtctgggttctggtcctagtctgagtcccagatctag

SEQ ID NO: 372617 - DNA, 616 bp, Cannabis indica
aaaaaatacatacagaaggtgtttacactattaaaaaactatgaaaaaactattacaaaatgagaaataatcaaatgaagaaactgaaatgaaaaacaataaaacatctcgaaaaacaaaaacaaaaaaaaaaaaaaaaattaagactaaacaaacgaagatgaaaaactcataaaaagaacaaataaattaaactaaaaaaatagaagccctaaaaaatcaaacaaaactaaaagaaatattacaatgaaaaacttaatagtaaaatcgataaacacaaaacacgctaatgtcaaatacgaaaaaaatttcaaagagggggaaacgaaaaagaaaccgaaaacaaacctgagatcgaagaccagctccatcttaatcattttttgagcatcatcttgatgatttttttcctgtgtagcaacatttgattttttttaggaggagctcgctcacgtttcgacaattgaggagcaaaatcggagtcatcgtcttattcctattagctacagatttcaaccccattttagaacttttctttggcaaaggagaaggagaagagttcagctatggaggttttattaaaaaaaaaactgaaaagaaattgaaaataataaaa

SEQ ID NO: 372618 - DNA, 1209 bp, Cannabis indica
gtgtgagccccggcaagctcggccaaaatggtgtccatggaagtacctgctacaacaaaagaaaaaaggcaagtgttagaatgtccatgggaaacagtttacactcgaataaagcaatcaagctagtcctaccctgactctctaattcggccctagcaaagttccgaatcttaacgctgacagcatcgtctccgagatagctgtccgaaggccgaaaccagctggaagaaatgtaagccgaagggtctaaaggaacaggctccggaggaccagagcccatccgggaccgacctaggaaatctcctaagttggaaaaataatattccttcatatggtctccccaccgggtcgagggcatcctaaacctatggagacgctcatcgaaccctacatgcctaagactggcatatttgccaacggaaggaacgtaatgtactgctaaatgagacttactagagccggaagtgctggcgctaggagccccagtgttcggtacctgaatcggaggctcgggcctgggagccgtcctctctgctgagtccccaatgcgaaggggcttcccagcgatcgcctggcttctcctcttgacccggctccccacgcaaagtggtctcccggaagccgcctgggccttggaataagccttctcctgggccttccggtacagatattcctggtacttcttctcggcggtggcaatgagttcatcccggaaggtcttctccgcggcaggcaccctcacattcggacagataaccttagaaaggttagagtcctccactgattggtgcggcaggatgagcttggcctttcggcaattctctgtcgtgaccaggcccccgacgtcaaggtccgcccggtcgtaagttgcaaagacctaggccctccgtagaaagacctgagtaggcgcggtccgctcatgggggaaatcctgacccactctgtgagaagttccgggtgctccactgctcgaaacccggaggagaagagaaacggtggcgatactccttgacatgagtttgcctattataacggaccaccccatcattggaagggtgggcccggaatccgtaaaaaccgtctttaaactttgtccccctcttggggacagaacaagttcgtaaaaaatcaaaaatctccgccggactgggacgagcccccatccccgggcggagtaaaaaaactaataaagcctgagagcaggcggta

SEQ ID NO: 372619 - DNA, 827 bp, Cannabis indica
ggtatttaatccaattccctgtgggatcgacctcacctgtgtgagatttactacttgattgcgtatacttgcgtagcgttcataaaatatagcaacacatcactttttatagggctgtaaacgtgtagagaaagtgtttcccttctcgttacaatgtgtataagcagaaagatcatgtgaaaattgctgaatacaccgatcgtgggattatgggataaatgcggaatacactgatcgtgggatcgtggatacggcatatctctgtaattctgacccctaagttatagggatgtcgttgatgactcatagtgcaaaagctaaattcgccaagtgttgatcattctgtgcggatcactaattatcctgcgcagattgctgacgaggcatgttgctcagattgggtttctccgaacagatactcacagttgcttccacgtgtcaccatcatgtgatgccacatcgtagtgcaaaaattgggataacattttccccctaagtctgtacgggactttcaaagttgcgtgtagacttcatccgagctgttctacctttggatggggtcacttgtcaaacgcatctgtctgagtctcgatgtgaggctgactgggcaccccttcgattttcggctaataaatgttctgacaattaatatttcgaaatccgtttttctctctccacggttgacggttgcacttgattatttttgaattcccatatttacttttaagagggaatcgaagcgtctgaggttcttttgaaataattactccttttttcgtgactcgcctataaatatcaaccaccatttgtacataagctcattttca

SEQ ID NO: 372620 - DNA, 818 bp, Cannabis indica
aaataaaatttacttgtgatgtgttggcaaaagggggttggcaaatcaatgttggtattagaacttttgtcagcataaaacaaaaagcgctggcaaaaatgacttttcccagcgcgtaattgcgctggtaaaagttagattttagccactacaaatgtacgctggtaaaattttgacctctttgccagcgcagtagcaaactgtgctggtaaaagtgacatttcttgtagtgattattagttagttataaataattaaggagtatttaaaatataaagtcatccaatgattgtacatacctaattgtctaagtgttgttttggattttccacaatcaataattcttgaataaacttcatgcaataatattcatattgaagaagattagggtgcttttgacacgtgcaattagtgaagttcgtgttggaaattatttttgagcctgaatgtccttcttgttaaattgctttcttcacgatcttccacactatgattgaggtactacttgttgtgtgtgggcactactctatcattaagagggttcgaaacaatcaatgaagaagaaaaaggctaggtttagtgtgatggctcaggtttttctctaaaaggaataagatgcaaaagttacgttttcctgaagccatcactatctatttatagcatgccacatagggctaggtttgaattatttggcattaaaataatgaaaatattaaatgataaagcctacataagtggtcggccatggcttagtggatttgggcctcacttttgcaattttgttgttttatcatttctgcatctcattttcttaaaaa

SEQ ID NO: 372621 - DNA, 979 bp, Cannabis indica
ctgaagcaaaataacatttagcaccattcaaaattgaagcaaaaaaatcaatatttacgcctacggctataacatcagttacacaaaccgaaacaaattgtttatgtgtcattttaaaaccgaaacaaaagactctttttgtagtagtgcaccttgtgtagaaatttagataacacgttacatatcaacattttatataaaatatattatatataaataaatggtcaagccacaatgaccgacttttgattagatatacatatttattgagaaacgctagagacaatttaagttgtcaaacactacaaaaggtatcctattgtaatttggtgcaatgtaatattagatcctatacatttaaattaataaataacattaaggcccgtttgacacaacttagcttttagagaagctaaaatctgctttgtgataaaaatgtatttggtaagcagacaaaaaataattttttgaagaatttatggagaaactacaactaaaagctaaagctggtatatatatataacccaacttttagaaaaagctctattaattaaaagactatgataaatttatttgtacaaaaactatatttatttatttattatatattaaaattaaaaatatttaatataaaataattataataaaataaataataattaaattatttttttttttaaaaatatattttatattttattttaatattaacgaatcacatcaacttataatttttttatatacttgagtttctaatttttttttacgttagataaaatattttataaaaatactataaatcaaatgcatataaatttatattttgaaaaaaaataaaaatatataaaaaatataaatattatataaaataagttttttatatatttgtaattataactaaactagattataatattatcattatcattataataaatcttaacaactcaaaatattttaaaatttataatttatcaaa

SEQ ID NO: 372622 - DNA, 776 bp, Cannabis indica
cacacaatacatattcaacacaaaatacataaatagggtaatactatggtaggacctatcaaaagttccctaccggtagggaactttttttttaaccgttgattttagatcttgtggatattatgatgtaaggtatatactcttactataggactgcttgtatacaattaaaactttatccatattataataatatatttattttaaaaaataaaataatgttaataattaaaaaatttattaattcatctaaaaaaaattattaattttttaatttttaattattattattttctaaaattaatttaaattatttttatatagacatttattttcaaaaattcttttgatgtgggatcgctttaatgattttagatgctctttaattgaaaccgtaccaacttgcttctcttaaactcaattattttggcagaaaaaataatatcaaaccaaattaattaattttttttaaaagtggcgtctcaaaagagcagccaaataacaagataaaaactactgaaaaacagtcaataacaccagtattacgcacaacctaaaagcaaaaacaaagaaaagactaaggtgtaaacacaccagcagtaaattactaaattatgaaaagccaaaaaactaagaagccaaaaaaaatgagtttagaaaaaataattcttttttgaaaataaataccaatataaaaataattcaaagtaactttaaaaaaaaaaataaattcaaaataaaaattaataaaatttgtaattattaatataattttt

SEQ ID NO: 372623 - DNA, 514 bp, Cannabis indica
atataaaactaaaagtgtatttcaattaatcttaacaccttgatgtctagatcaagtgtagtatgtagtattatctttgtaataggatatgataggttgtattcaatttcaaccttctccaccattacatctccttagtcataaaatccttgatattgtgaatttttttctatatgtttactcttcttaagatattgaattcttttttggcaactatatgtatgttatcgggaagtaacactagtagttaatccatgactggaataacgcttaaaattttatagaactttccataaggtgaaaaattatctagtagccttctggaccactttaacattcagtctcactggtagagttagagactctagattagttttttacacttctccaaaattactgctccaccccaaagtaatccccatctcataagtagactttcttagcattaacgacaagtactagaaacctaattggtgtagtctaagagtattaaaataccacccttattgactaa

SEQ ID NO: 372624 - DNA, 505 bp, Cannabis indica
cttgcaccaccaagcaccaagaatcaaaagcttctttaaacaatttcccaagcacttaacttcaattcaatgttgaaacaaagaagggtttgaaggagagagagaggggtcgggttagagggagcgaaagccagaaaaatctattcatttttgccaaaatttcaatttaattaaaattcaatttagtggccaaaagaccaaattgcccccaagggccaaaataaagcttatgcataaatcaaaggcaaaaatgtcatttacctcacacaacacttatataatttttcagaatattcacatataattaaaatgccaaatatttcaaatcccaattacatttcgggcccgaacccagttcggcccgaattacccagttgtgactataccgcactaacctgttagcacacacctgaaaaagacagcacatgcatactatataattatatagtcccataagcacgttaataaattaattttactattttacccttcttgggtcacaatt

SEQ ID NO: 372625 - DNA, 1111 bp, Cannabis indica
tttttttaaaaaaataatgataacatcaatactactgtaaagcattcacacatattcttggaataacattattttatctttaaatggtatagcatctcaatattttaccacttcatctatccacttaagcaagcatcccttaattttttactattagaaatgctctaatagaccccattctcacttgcagttgcaggtagctaggggtgtacatcggtcggtttgatcgtgttatagtgtatttttaccaacccaatataaatgtcgggttgaaaaaatctaactataacctgtccaatgaaaaaataaaaataaaaagtgtaacccgcccaataatttttgtcagtttggtcgggttaactcttttcaaccaatctttatttatttttatttttttttctattgttgttagctttcagtgttcaaataattgatttgaaaaaataaatgtataatatatgcctttcaaaattaaaatagttatactttaaattaatgttaaaaaataaatatgaattcaataaacattaaagtattaagcaatatttttcaaaaaatagaataaaaaaatatacacatatataaattttaaatttcaacttcaatattcaaatacaatcaaaattatcaactataaattctaaatttcaaaataaacactataaaatacaaactttaaatgtaaagttgtttaaatattaaacgcaatttatatattatattataaataattttagtaaaaaatatgtaaatcggtttactcgagttatttgggcgggttagaataatattcaacccgcccaatatattcattaggcagtttgaatttttcgtaaatttattcgggttatattttttaccagtttattcggttctgtttggacagtttattcgggttgggcggtttgttaattttttttaacagccctagtctataatcatttacagtgcttggacatgttgcctagattactagtttttggttttagtttctttcgatcatgttttgctttctgactttgacatatatctcgattattatttttgtgcaccaaattcatataattgtcgtctttaaaactcaaaactgcacaactacaaaaaacacatc

SEQ ID NO: 372626 - DNA, 604 bp, Cannabis indica
tatatttattgatttttaatataatgtactatattattaaagatttaattaagtatgtaatgtcatttaagaaaaaaaaatatttaaaatgaagtcttagggcccgtttagcaaagattttgaaaaagttacaagcttttcaaaaagttgtgataaaaatgtgtttggtaagcagtcaaaaaataattttttgaagaatttttggagaagctacaactaaaagctaaagctactccaacccaacttttaaaaaaataaactgttttgattaaaagactataatacattttttttactaaaactatatttacttatttattatatattcaaaaaaaaaaaaatatttaaaataaactaattattaaatttattatttttttaaaaactaatttatatttattttaatattaaccaacaatatcaacctagaatttttcttatatacttgagtttctatttttttaaattatatttgataaaatataatataaaaatactataaattattttatcaaatacatataaatttatatttgcaaaaaaattaaaaatatatagaaataaaatattatataagataggtttttacatatttgtgattata

SEQ ID NO: 372627 - DNA, 453 bp, Cannabis indica
ataaaaccctaattaaatctaaaaaatgagagatgaaactaaataaatgagaaattggaaaaaatagaaaattggaaagaaaactcatagaagatgccacatcaccatccctaacaatagaattatatagatatatagatagattgatgattatttaataaatttttgtatttttcaatatttttcaagtttaaaataattattaataaaattatttaactaaattttcatataaaaattattttcttacaattatttatttataattaaaacaatattaatttattaatacataaaattataactaattgaggaagattaaatttatcaatcacccacataaaaactaaattaatatagttttaattatttaaataaataattataaaaaataacttttatatgaaaaaaataagtaaatgattttattaataattatttaaacttgacaaa

SEQ ID NO: 372628 - DNA, 485 bp, Cannabis indica
tctaagatcctggtaaaaattaattccaacagttagctcctcactgacgtagtccacgccctcaaccaggacgtctccatcagcatcgactggttgcccaacctcattgtactccccgaagttggggggtccaacctcttcctctccctccacagcgggaggactgcccggacgcacctcgtccagctcctcaacctcctggacttcagcgtccccctcacggtcctcctccatcgggaccgccaaatcctgttcggcgtcacgcaaagtggcaagccgagccacttgaggatcagaagcgtcaaccagacgcgtgttttcttcgtacgagccatcatcctatggctgagtacggggtcagaagaatttccttcgctagaaggagggttagcacgaagacgagggtgaacttcgtgcagaagttgaagcaaatcctggtcgatttgatgctcgagctcctaagactcacctgggttcatctacaa

SEQ ID NO: 372629 - DNA, 1436 bp, Cannabis indica
actatatcggacggtacctgagtttgcttctcaagtcgtcgtcaaatcctcgctctcctacaatgatgcaccacagtcacaatgttgatttttttagtttcttgactttttctttttatgataaaaatagtacgtaaacattattataaaatttatctataaggtacatattaattttaatattataaaatagtatatattcaggcatataatattttggttgtgatttttgtgatgaaaaattgaatgtttattattttttttatttggctactgattttttaaaaaaaattatgatttagttattttttttttgttatgatgttgaccatatagcaattagtaattaaaaatttattagtttttatttgtattataattttcttgatgaatattgaatatatttttttattatatttttatttattaataataatttgactaactagtaatttttaaaaaaaattgtaggaaaaaaacgttaaggtgaaggtatcatcactaaagtcaaagacaattaattttgagtgtgtttagtgagaccgatatgaaaattgattttattttctttaaatttgttatagacaatgctaattgtaatacactaatattaagaaatttgattatcaaaccccaactagttaaatatgtattattatagaattatattattatatatgaatttttatgatatatgacatgttaagaccccgttggtgagctaggggcaatttagtaattttgacctgagaaggataaaactatgaatttcatttaattacgtgcttatagactatattattatgtagtatacctgttttgtcctttttcaggtgtacactgacaagttggcgcggtatagtcacaactgggtatttcggattacaccgggttcagagccgaaacacaatttttggatgatttattggcattttaaatatgtgtaattaatctgaaatttattcaatagtgtattatgtgatattaaccattttgcccttggatgcttttatgtgtgttatagtggcccaaaggggcgttattgtaatttggcctatttgtaccattgtagaaagtggaattatttgcaaaagagaaaacattttatggatttgctctacccaaatcgatccccctcctctctctctctaaacctatctctaaaatttgttatttttgcttgggaattacttggattcaagcttgcttcgtgggaatcttggagcttgagttcttgaggattttaaggtagatttcttactgctttaatttgtaatttgttgctaaaatggagattaattgttcatcttcctggtgtcccaaagtccattatttcggatagagatccgaagtttacatcaagattctgggaaagtctacattgaactatgggtactcagttgaagttcagcacagtatttcatcctcagacggat

SEQ ID NO: 372630 - DNA, 540 bp, Cannabis indica
cccaagaatggagtctatgtttcattttttacgaaatcaaacccacaatcatcaagcctctattttgttggtcttagagggatcccaagatacttaagagggaactcactgatagaaagatttatcttttgggcgagaggaatcggttgagcaaccccaccaaagtaaacttgagatttagcaaaattgatggaaagcctctaagtcttgctaaactcatcaagcataaacttgatagcacttaaagagccctcattccctttacaaaagataactaaatcatctgcgaaataaagatttgtgagtttcattttttttttttgcataaaggatggtaactgaaatccttttctctggctgcttgttggatccttcgggaaagatactccatgacaagaacaaagagaaggggagagatgggatccccttgtcttagccctgctctcctttaaagaccctgaattctaccatttagtagtaaataataagatgtattctcacacaattcatgatccacttgacaaacttagcaggaagcaa

SEQ ID NO: 372631 - DNA, 939 bp, Cannabis indica
aattataaaattaatttaattttatttttattaatatttattgcttttattatgttgaactgttgatataatatcttagtgaaaaaatatatattttatgtttacccaaattttgacgacgatgacgtgtcaagaatagcaccgcgtggcacaaaaataccaggactaaattaatgaagaaggtgtaaagtcgtgactattgagatgcccccacaacttgggtttagaggggggaccccccctccccaccaaacttgggtttaagggggggagcccccccctctctcaagttgggtcttgagggggtcacctaactatgatggtggtcatcccccctcaacgagagtcccgggggtgttacccccaagtatgggcttaatcctcaaaggtggttgacgaccatgtcacacccataagggacccttgtcatcagtggctccttcaaatgttcaaatctcgggaaaggctcaaagacagttgtcaacccacgaaaatagcgggatattatcctaaaaatcaaactccaaccgcctccgaaaatcaaggagacggttgagatagctccgcgttggtcgcgtctcttgaagcgagaagcaccgacccccctcccttatataaggggtcacccatgacctgggaggggatccgcaatctgaaacacatagaaaaataaacacttctcattctttgcaatcaagagcttgttcttaacttttgcaactcagattaataaaactaaaggggagtaggctattaccgacatccggggccgaacctctttaaatttcggtgtcttttatttcatttattcgaattctggtgttataattgcatttattattgtgcttttggtttaaatctcatttattacgacttccgcgtcggttggctaaaaatccagtcaaacattttataaaaaactaaaaactaatataatag

SEQ ID NO: 372632 - DNA, 659 bp, Cannabis indica
actcttatgtgtttatttcattgttttagaattcatattaggattttaatcaaacatacttggtagtaaatctagatcctggtaaaataattccaacactttcaggctcacccgatcaaggtgttgactaaccatccactccgaaaagtcctacagaagccggaggcatccgagagactcctcaaattggctatggaattaagccagtttgatctacactatataccacgcacttccataaaaggacaagcgctagcggacttcataacagagtgcaattaagcagaggctagtgcaatcattccaacaccacaaacccagacatggaaagttttcgtggacggtgcctccaacgaatctggatccagagctagggtagcaatgatatctccgaacggacttcgagtccaggcagtcctacatttcgaattcacagcttccaacaacgaggctgaatatgaagctctgattgcagggctgaggttagcaaaagccgtgggtgccacaagagtagaagtcttcagtgattcacagttggtggtaaaccaagtgttgggagaatatcaaacgagtggagaaaaaatggctgcatatgtagcaattgttcgggaacttctccatgagttcacagactacaaagtggaaagaatccctagaga

SEQ ID NO: 372633 - DNA, 573 bp, Cannabis indica
ttgaattttaaattctaagtgtttatgtggtattagttcttggcaaagataaatataccatagattttgtatcaataataaaacacaaacacagacaaacatgataaacatataaatataaattgtattggcatacaagttgaagaaaacatgaagcttaattcataaatgcaattcataactaaaagagaaaacattattaatattcttaaaaaatgaattgtctgcgtaaatatgaaatagggaataaaatcccaaaccaataatttaaattaaattgttcataaattaaaataattaattcaaaaaatttaaaagaagattccgagcttcatcttcaatcttcgacattctccacccttctgtccaaccatatggctcatctcgctaggatagcaatccaagtttaagcagttggagctgaaataagaagaaaacaaacatggttagtagatccagaattaataacccaaggggataataattctctaaaacacatgagtttatagcatagacaaaaataccttgtttatttgctagaaacttatggcactggggtttccagtggctctt

SEQ ID NO: 372634 - DNA, 654 bp, Cannabis indica
ggatcttgttcggcgtctaggcaaggtggcgtgccgagctacttaaggatcagatgtcgtcagccaaacacgtggttttctttgtacatgccatcatcctatggctaggtacaagagttggagaatgcccttcgctagacgaaggtgggctagaccaaaaacgaggatgatcctcgtgtagaagttgaagcaggtcctggtccatctgatgtccgtgttcccaagactcacctgagttcatctacaaaagacaacacacgagatgagtgtttggtcagaatatcgaactataaacaagcaaatatgccgaccaagagtactcaacaaattaaagaacgattatgttcaaagaaaagtcagaactcaagaagtcaaaaattttcttgagttagggcaaaaaagttcatgaagcttagaataagcaagatgaaagatggacgttatgcagttcagaaacaagcattatggctgtaaaatcgcacgaagacatggtaaaagaaaaatcgcagaggtttctaaacctagggtttcctaaacatttttctacgacacagtagaagatgcattcgaaatgtaaacatgcagagataaagcaatgaaggaaatcagaagcttactcgagagtcagatgtctgggttcgaagtaacgtcaat

SEQ ID NO: 372635 - DNA, 1191 bp, Cannabis indica
caacaaaacccaacataatacccattcatgagcaaacttaaaaaaaattaataaggcaacaatctgattaaccttttatagcaagttcccaactaatttagttttttttaaagaaatatatttattttttataaaattgaatataataattacaaccaatagtatgaaaaagttataaattatttttaaaaattaattaaaattactactttattattttatgaaattgtgagtttattaatcatttattattgtaaaactaattttacatgtatattaatgtggttttttttttattaggagaacaagagcttgattgtggaatctaattgtcttaatattattcatgctcttaaaaataaaatgctacaatacttcttagttcttacttaggtatcattgttagaaaaatattattatcatctaatgatttttttttacaattaccatgcatcattctcctaaaagaactaatgaggtgttgttcattatttatattcttaggattggaagatgataatcttgtctaggagtcaagtataattttttgtgctgaaattcttgtgttggcaattgtcattattcaataatgtttatgacactttttttcttcgttcatttttttttttggttaaagttgttcacacaatgggtttggttcttataggttttggtaagctcaagtattttttaaaaaataatagcatataaataattgttaattattatgaaattaaagattctaggtttagaaaaaatcttatacattttatatgtattaagcttaaagcttaaaattattttgtttttttgttctcagtaatgcaatttagaattctagtttgaacaaattttataaaaagataaaggtacacctttttctttttaatcttcaaaatgatttttatttaaaaaaaatagtttgatagttttttagtgtgttttacttctatatataaatttttatttttattaatatttttatctattttaggaatatagagaataacaaaatcaaagaataaaatatcaaccattagatttgatctaatggtcaagaataaaatactcatatatgggtaataaccattaagagcatacccatataagtatatgtatatatctttatatattaaaagtgtctagctaacggcatttcttggtttaacagaatatacttaaaaataaaag

SEQ ID NO: 372636 - DNA, 853 bp, Cannabis indica
aattttatttatttattctattaattattattagatattattatcaatttactgttaaataaattgataacatattcattaatttaattacatttagaatctattctatcattatttatatattactattgtatataattgtaacgtttttaccgtaattttttatcaatattgctaagtttattaatcactcacataaaaataaataatactaaagatatataatctttaattttaacattcacaatagtatcacataaaaaagatatatatataatatattttaattgtttaatataattaataattgtaaagatatttttaaataaaaattctaagaaaatatattttataagtgaacattaaatagactttatttatacacccaaatagttttctaaacatattatcaaacttattatttttttcttagtgttttacacaaaactataactaattaagcaaaattagattaaataataaaaatattttatttaactaccatatatgaaggtttaaaaaactaattttattataaataaaatgaatattaataaactttacttatattatatagtgtagagtaatttgcggcataacctctttaagtggtcaggtgtttgtaataaccctcaattctaaaatttttgtggtaaaacctcctaaacccaagttctgttaacagttagcccttttcgtcgatttttgggtgttaagtgccaggttagaatgtctacgtgtacacaatgtacacgtgacacagtttaattagtccacgtaataaatatttaaaattaaaacaaaaaattaattattttaaaaataaaaataaaaaaatatatttactttaaaa

SEQ ID NO: 372637 - DNA, 569 bp, Cannabis indica
ttatattattagtatgtttattataattgtaaatataaaaataaacatagccaataaacacatatataaaatgttttatattattagtatgtttattataattgtaaacataaaaataaacataaccaatattaccatatatatactaatcaataattatcaccatatatatattataaaaaaaattaaaaaaaagtttttaattatatataaaagtgtatgagaaaatgttaataagtttttttgcacatattttgtaattaattaaaataatgtatacaaaattgtaaaatgcccttaatagtattatgtaaagataggcatagtatgactattatataatagggtattagagatattttttaaaaatattttttaatttattaatgttaactagggaactaagccgcgcttcgcgcggtgttgcccaacttttgtaaattatataaatatatgtatattatattgtacttattgagtgatataatctaaaatataacatttagatgtgtgtatatattaacaaatcatgtgtttgctattttctttttatttcaaaataaaaaatg

SEQ ID NO: 372638 - DNA, 623 bp, Cannabis indica
tcttcaaagtcaatacctttcttccgaccgaaccctttcataaccaatcgtgtcttgtactgttgtgagccattgatttcagtcttatgcatgcatttgttcttgagagctttttccctttaggcaacttcaccaagtcatatgtgtgattctcatgcagggatcccattgttggaattattttaccaggatctagatttactaacaagtatgttattaagatcctaaatatgaacttctaatacgatatgaagtaaacacacacaaagtataagaaaccttacagtggttgcagcagaatataatgtcttcttccactcagatctctaacccttgtatcctttctgtagcaaagtatcactaagatctaagtctgaatctccttctcttaaaactagattcttcacaaccttacacactatgattgagtactacttgatgtgtgtgggcactcactcttttcactatgtggcctcgattttgaagagagagagagagagagagagatggtttcggctagggtagtgaaggaggctttgaaatttttactaaaggaatgagatgcatcatcttttcccttaagccatcactacctatttataggaaaccacctagggttaggt

SEQ ID NO: 372639 - DNA, 388 bp, Cannabis indica
aaagttcttttcaaagattgatttgaggttaggccaccatcaattgaggattagggaaggagatatccttaagactgctttcaggacacgttatggacactttgagttgttggtaatgccaattgggttaacgaatgcacctaatgcctttatggatcttatgagtagagtcgttagacctttcttgaataagtttgtggtggtattcattgatgatatcttagtgtattctaaggcacgagagtatgctgggttttgtgccctaaatatataaaacccatttcaatataatcagatttactaattaataaagatccgaaatccttttatgttgcatggttcagatgatttatttcatgattataaattctattaggtccagaacata

SEQ ID NO: 372640 - DNA, 511 bp, Cannabis indica
acatactccgaagacatggcttgaagacgaagtaagtttttaagacttttttactttggtttttaaggatttcatctaactctttttatttaatctctaacatatttaattttcatgttttagcatttggatgcggcgcatttcatttgatgaggaggcgacaacacttttatccggaggtgtacctaaatagatgtgtcatcatgccgtgtatttttccattaagagttattggtcggtgggaagctgcggatgattaccacactaactttcagcgggatgaggacatattggatttgattcgaggggatgaaggacaatacttggacaattagaagaataaggagagaatatatatggctctctacttcgatatagcaaggcattgggtgacactagaggtagatctgaatcattggttgttgaacatatttgactcgagcctcggatcgatttccccgaatgaattcaagagtcacttggcaatgtgggaaaaattactacaaacttt

SEQ ID NO: 372641 - DNA, 680 bp, Cannabis indica
aaacatccacactagcggctacgacgagacattttctgcctattacgcctgtagtggtgtccgagggcatcattatcctaaccactgatcagtacacggcaatacaggatcaaatacatgctttgcaggccgaaatcgatggacagaataggactcgacgtcctactcgagtgcccactacccgctcagatgatccttaggtaacgaaatctagacgtcgaaataaccgtactcgcagggaacgaaggacagatcaggaagggctcaatttaaatcagccgatgtcaagggatcaatccgcaaggaacttcaatcgtgaggtgcaatcgaaagaagatccaggacgacgtaaccctcgcagcaaacccgaaccacgaaatgaggagaatgatgttgaattcagctcttcatcttcgtaaagtcgaactctaagcaggtagaccaagtcaggttcgatggaaacaccgcgaggaggaagataccaagttcatagtggcgacttgcgtgaccacctcaatgtcattttcagggcacgttctcagacgccccgaaacgatgaagagcgtcatgatcctcagttgggcgatcggggcataaataatcgcaccaacccaagctttactctaaccaatatcggtcccttccgatgcatactccatgcacccaacccaagctttact

SEQ ID NO: 372642 - DNA, 799 bp, Cannabis indica
catttcaactacccttacctaagcctaacactacaagcctagaaagaccttctaaatcttggttgtgcgttgatttatattagtggacaatagtaagtattgcaagcatatgaaattttagtttagtggatttatggttgtaattggcatgcataaagtggttcaactgttagttaattgcgttctatggtttcatgagctgaatgaaatcaaaattaaagtgtgtcaagggtgtaattgaactgaaattctggattattatgcataagtgaaatttttcataatcatgttattgagtctacttgaatattactcatattctagagactgacttgtttaacttttattttttttagtgttttacttgaggacgagtaaatgtttagtttggggaaatttgttaagttatttttagattaattttagtgtatttttaatttagttttactcgtgtttggagcaatgttatgctttttacattttattttcgtagatttaaaatagaaagaagattagaaatatcaaaggaaaagatgagaaaaaagataaaagatcacataggtgtgcagatggggaccatgttgcggcatggaaaagagcatgccacgacccgtgtcaaagaaggtctgaagacgtgtggaaaagccagggcatgcgtggcccgccccctaatcaagggaataggaacttcagcgtgtgctcatctgtcctctctaattcaaagctgaataggttttctgcatgtgctatcttttctatctctcattggctatataagaagtgaacttcagtggatttc

SEQ ID NO: 372643 - DNA, 546 bp, Cannabis indica
ctaaaaccttttgcattcattttctgcgtgtcactataggcgtatagagtcaagttttgtcagaaccaaaaaaagtaacagccacacacatgaagtgtcactatatcattttttttttctttttaattaatatttttagagatatagtgacacacaaaaagtgccactatattaaatatttttctaaaaaaaataatatttaatttaatttaatatattaagaatttaaatgggtataattatcaatttaaattacaaattatataaatacattcagattttatttaatttaagtgatataaatacatttaaattaataaaaaaatatacaaaaataattatattataattaatacagaataagaaaaaatacaagtataatttaaaataaaataacataaaacaaaatacaataacattaaaacaaaatatgactaacaaacctaaaaattggtatgaacaatacaacaacaaaaaataaataaaattatcaaatccaaacattgcctctccaatcctggctgcatagtccaactgaaagtcaaa

SEQ ID NO: 372644 - DNA, 559 bp, Cannabis indica
cagaccggaattgagacccaaacctggagctaaatcttggacccgatcccaaatacagacttagacctagatagggatccgaataagaatttggactcagagcaagacccagattgggatcgaaatgttggacctagatttggagcgagatcttgacctagacccaaacttggacccgcactcacggaccactacttggacctggacctgaacctagacccagatcggggcccaaacctgtacacaaaccgggacacagacttgaacccgaactcaaacccacacctagaatcagacccaaagctggacccggacccggacccaaactcgaacctagaccaggatcagattcaaggacttagacgcagaactgaatccagactcagatcgggatttgaacttgggactcagaccagacctagacacaggacgtgaactctgatcggaactgaaacccagactcgaactcagaattgcaaatggaactgaaccgaactaggactaggacaaggaccaagacctaaaccaaaaactcgaacccagatcaaaaacccaaaca

SEQ ID NO: 372645 - DNA, 450 bp, Cannabis indica
atataggaggtcagatcactttgaaatcattggatattctgattctaactttgcgggattccaagatagtaggagatccactttgggctacatatatctgctaggtgttggagctacatcatggaggagtgtaaaacaaacactcatagcttcatccaccattgcagcagaatttgtttcatgttatgaggcatccaaccatggcatatggctgagaaactttatcaccatgctacacattgtgaatggaattaaaagaccacttaagttgtattgtgacaataagtcagctgtatcgtattccaacaacaacaggagcttgacgaagtcaaaacacattgacatcaagtttcttgttgtaaaagaaagggtgcagacgtaatagatatagcctttttgaacagacgtaaaaaggtctttgtgaccgttttaaagtgtcataaacaattt

SEQ ID NO: 372646 - DNA, 456 bp, Cannabis indica
  modified_base (103)..(103): a, c, t, g, unknown or other
cattggaaaaatattcaatttactaatcaagcaatagatttaggtttagttttagtgttgacttgtttgatgtatgattattttttttttttttttttttttnttttttttttttgaatactaaccgttgtttttagtgcccattggtttttattttgttttaagtttaaaaataaaaggaataaaataggagacttattcaatcttcacatttttatttaatttttttttcttatttttattttttgttcttatttttatttttttgtgttaataatatacacgtgagctaaggaagaatgtcacttaacaatttatatattttatatcataaccattaattagataaatgaaatatacgtttattagaaaaatcacatgtttgaaattggtttattatataataaataagggtttccttttggatttgctgaccattatcctccaaatccaatg

SEQ ID NO: 372647 - DNA, 543 bp, Cannabis indica
cgataataatcgtttcataatatttccctcgatcataatcgagtcaatcggtaataatcgttttataatacttccctcgatcataatcgagccacatccaatacatatcgttaacctcgattaggattacgttacaacaacatataacaagatttcgatcttaatcgaaactgcaacaatcataacattaaccttatacagtatttaatacttttcttacctcagtccagaagtcaagtatgtgggccgacctgagtggaacgatgcccgacactttcgagtcctatgtcacgacaaaggtaaatcaataagggtctattccaaaacactgtctaaaacccgcataaaataacctaggattttctaccaaatcttatggtaaaaacaccctaaaataaaatatatcttttggctctattctatgtctcatactgtagagctccttataagcttcaaatcggtatatagaatgtctaaaacggacacccaagtaaaaagttatggctaaaatacgaaaattggagattcctgaaaattgaccat

SEQ ID NO: 372648 - DNA, 666 bp, Cannabis indica
gatcctggataaatataataccaacactttgttcttcgaacgcgagattgaccacaccacagtgcggagttcgtcttgatgttgatgcagggtattgttatgattctgcatgagtccaagagcgtcgcggagattttgtaactcagtagcatcttcgatggtcgtctgggcattggttccagggggaacaattgtgttatgaatgccctggttgggtgcggaactgttattcccattctcttgcacacgaggcacgatttcatgtataggagttgttacaccgttccccacgttcgccggctgtccaggattaacagctggcgaaacccttgtgttttctgggttctgcaatgcaggatccactgtctgtgaacttgctggatcagtcaggcctctacgagtctgcaccatcgtatttgtggttagatgttgaataaagagcaattcgtgatcctgctctcaatgaaagcaccaaaatattgacctcgcttttagccaacgcaacgagtcaaattgtaagcgatagtgatttgtagcaatcgatatataataaagcaaatgtaaaagatacaggaatttttaaagaggttcagccccgagtagttcggtaaactagcctaattctcgttacttgtattgacttaagacaaggagaaaggtttcttt

SEQ ID NO: 372649 - DNA, 579 bp, Cannabis indica
atattgaaaaagggacgaaaaaatcaatagtgaaaaaggcttaagaattgtatcagaaatataataagattgattcatggactatgcagatttttaactgcaaaaccacgtaaaaaatctttgtgttctcacttttttctttacagtttctattttctgtgcaagtttatcacaatttaggctcaaatatagttaacgaaaatctgcattaacagagacaaataattaagtatcttgaataaaattaacttaattattaattctattttaagctctaataaaaatatcctaatttaagtttgtctaaaattaattaacaaattaattttcaacttaaatatatttttctacttaattaaatattagaaaatataaattagtaactagaaattactatctagaatcttttctttaaattaagtgtgttattctaaattaattttaaaacaatctaatgaaaaattagttctatttattccaaaattaattgtgttgctaattcaattttaattaggttgaactagtataattagcctaatacaattatttaaataaggccaatgggccttcacaattggg

SEQ ID NO: 372650 - DNA, 722 bp, Cannabis indica
aattcattgaaataataataataatatggtcatatgtgctataaatattatacatttcatgattagagaaaatcataaagccacaccatcaaatcttcctagttcatataaaaactcagcatgtgtttttggggttgtaatttctctattaacatatatagatcatttaattttgtagcccagtagcaaagtgggcgtattctcacagctcttatatatatatggtgaattggatttgtacagtattccaaaaaaaatattatttgtaatgatggggagatcttattattttgttgaatttataaatattttattttaaaattaataaaaaaaatagaactcgtgaaaatttcatgaaaagtactaaacataacaatcaacagcaaaatttcataaaaattagcagccacataccaatgacgttactttcttagaacatagatagaacatagcttgaaaagagtgctatttgattagtattgattgagtaaatcatatgttgttgtcataataaaaattagtcaaaaagcaaaaaaaactaaaaaatagaagtttatggtgcttcattttattagagggcagtcctcttttgttgcactatttaccaaactgaaacaaggaaatgagaaatgtcataatcttctccatcttgatatcaatcaatcaactcacgaagctttagtaaaaaactaattttttttaaaaaaaaaaaacgtttaaaa

SEQ ID NO: 372651 - DNA, 584 bp, Cannabis indica
agactactgccaacgatcactaccctcttctttaataatccccagcaagcaatattataatttggccactgaaaatgagaaactggataacaatttcttagctcattttttatctgaactactcaggctcaatatcaactgcttctggtgggagctgggcattatagctccattaatcttttaaccagatcatactggttgacacaagatgcattgtatgatccacaaagatcactaataccattgcacttaataaaactgaattaatatagaaagaaataaaaagaaagagcaaacctgggaataaagaccaaacgggaggcgttatcagcttctacggtgccgccaatgtcggtttgggctggggttaatttctgggtttgggcgaggatttagacgagagggtttgggcgagagggtttgcgtgagggtttccgtgagggtttgggcgagggtttctgagggacttgggggttgtacgtctgatatgtcgatcgagcttgtacgtttgggattttagggatgactttttatctcggttatttagttaaaaccgggataaaagggtttcacactaaaccctt

SEQ ID NO: 372652 - DNA, 618 bp, Cannabis indica
ctccaagggggatgacgctcggggctactggcctatattttgataggctcttcgatttctgcatggtgagcccttaatgcctccatctctttgtccctccactcggcgaacatacgcctctgttcgtcaaacgcgaggtttactgcggcacgtaattcctcctgatcgtgatgcagggtattattgtgaccctgcatgagtccaagcgcagcgcggagattttgcaattcggttgcgtctccgatggtcgtctgggcgttgatgcctggtggaacagtcatgttatgaacgtcctggctgtgtgcggaaccgttgttttcggtctcttgcacaccggcgcagtctaagtaacaggagttgttccatcattcaccacgcttcccgtctgtccaggattgacagcgggtggaaccgtcaaactccctgggtcctgcaacatcggatccagcatctgtgagtttgctggggtggacaggcctctgcgagtttgcaccatcgtgtcgaaagagcgatctgtgattcttctctcaatgaaagcaccaaaatgttgacttcgcttttaaccaaacacaatgagtctttttgataagcaatgaacgatatgtcgtaataataata

SEQ ID NO: 372653 - DNA, 706 bp, Cannabis indica
gtatatataaagagcgtccctaccatgttaactgctgtctcaattaaattagtaatactttaaaattatataaaacatatttaattatactaataatataataattaatatatatatatatatatatatgatatcatgcatcataaccaaccacaagtataaacgtatatatatttttgaaaattacgtaactttttattggtgtacaattaatagaagaagagacaaaataacctagtatgttactacacacttccccttgatcttcactctataacacatatatatttaaataattaatcgacatagaattttagagtaaaagcttaggaaataagataacagcactagctacctattgccttattttccaagttttaattactctctctctgggatcatgagtagttttgttatcgttatctagacattaaatttacactatgattgcaccatatgtcatgacattgattaaaaataaatactattacaacctatttcgagtagctagctagctagtaccacgtaatttaatcagtaatttagttatttgaaccattgtttgataattactaaattgttcgtagctcgttaattgctggtgactatatcttaccattaaaaaattatcatttttagtgtcaactttttagtgacaatattaaatgtaacttttagtcacaataaaatattacttgtgattaaa

SEQ ID NO: 372654 - DNA, 563 bp, Cannabis indica
agttcctggtaaaataacttccaacaaggacaagtatcaatagtatgccccacaacttgacatattccacatggctttatctgttggcctaaagcaagttgttggatcatggaggttaattgagctatttgttgactaagctggttctcaaggagttttctcacttcattaacctgtcgtgatgttgagggagagtctcggcaagtgccaaactattgtgaattggcacccatgtttgagataagatttttggcttctgttggggttttgtctaccaatgctcctccacttggtgcatctatcatacttctctcagaaggcaagagaccttataaaagtattgaattaggagttgttcactgatttggtgatgagggcaactagcacacaaccttttaaatctttcccaatattcataaagtgactctccagtaatttgttgagttccacagatttcttttcagatacttctaactttaaaggctgggaagtatcgctccaagaaaacaatcttcatgtcattccatgtttcaatagttcctggtggagatagtacaaccact

SEQ ID NO: 372655 - DNA, 708 bp, Cannabis indica
ttttttgtctaggaacactaatggtattgtcctcatcggttgtgtcaatacaacagaggcagtggaaccatcttatatagaataagattatataacactttggaatgcatttcctctactttgctactttgttttcaaatttattcatattcttagaaaagtagtatttgttgtaacaaacactttcttatcttaatgaccataggatagtccacccctattcactttaaaatagctatcaaacatgcaaaccctagttaacagctctagcttttcttaagttcatgatcatgacatacactaagtatacaaccatttcatcattctgaagttttcctatcactagggtatttccgtagaaggacttaggcaactgcttgtaactaagcatagatcttatactttcatcaatatgcaaactgaatttctaggaaggtaagtttgaatacaattcaaaatttaactaaatgatctttgaactgcataaccaaatatttctccaccactaccagttcgcaagatctttagccacttaccttaatgtgtttaacattgctagaaattcctaaaatttctcaaacattttaaatttctttgcataaggtaagatctagagcgaccgtctaagaatttaacgataactcatatatacccctgaatgtacatctatatttttgaatatagatgatcttgttggaaattatttta

SEQ ID NO: 372656 - DNA, 717 bp, Cannabis indica
cgaacactgaaagtaaaatgcataatatgtttttataatttagttggattttccagtcaaaccattatcattaataattaatattggtttaatttaactaattagaatatttcatcttattcttattcttattgttttattttatttaattagttggttcacattcacaatatagtcaactattgattatcttgatgatcactttattgaaccaatggctagaaattatggggatttaattagatagataacataataataatagcatatttaagggatgacccaactagtcattgaatgacattgattaatataattatgaaaatccgagtattagtagtgcttacgattggtcagcaatatttttttaaaagatattttcttaagttatacgagaccttacacttaattacactaatagtaatataactctaaaaatggtactaaacactagtaatatcttttagtaattctctaacaaatcttaagtagaacaccactttttctttttttttttaatatggactttctctttattttaccttggtatatagagatattatattaattattttatatcacaatatacatcgtagttataataaatatttaactgttttgggaacaattctacaatggaattccaacaatcaattacactcatatatgtttttcgttagttatataataatttaattttttaaaattaataatata

SEQ ID NO: 372657 - DNA, 601 bp, Cannabis indica
gattcattatcctacattcctatattaacaaataataaaaagaaaagtatgtattcttgtgaaaagaatgtatgaaatttctgtgttgaaagaggaaaggtaatttttttatacaaaaaaggaatgatgaaagattaatcatcatattagaaagcatgaaataaggtattagcacccaacccgacataaataaataaataagttagtttttctttttgtttttttttttttttttgtagattttaccaggtttggaacccttggcctctttattttattgggctgaccaacctattttcgttcggtcatatgtactgtggggtgcacgtgggtttgggtaaactataaatcatttaatagtccaactcaatatataattacggtttggataaattataagtcatttaattttttttattgtacaactcaattttagttagtataataatatagggggttgaaatgaatattttaaactttaataattatgttactgataaaattattcaatatattgcatacaaaaaaagatatatatatatatatatatatgtatgtgtgtgtaatatagtgcatttaaaaaaaaaactaaagtagtagt

SEQ ID NO: 372658 - DNA, 927 bp, Cannabis indica
gtatacatataaaatagttatttagtatactttatattaatatttaaaattagttataattttgataatataccaattgattacttttcataaaatgatctactttaaataaaaatattttctgtaaataatctttaatttttagattagttatattaaactatatatttcatttttagtttatttatgttcatttatgttatattataatatcttattatttaaaatacatttgagtaacctttgaatttattttcgaaactaatgaattgtcatgcggtcattttgacatgtgagaaaactatatattttctcatcgtcgccataataagaagtaactatttaattgcttatgatatctaaaatgaaatttagaagtagctatgaagttacttttctacacacacaacataaaagtgattcattcttttattaatatgcattatttattgaaaaaaaaaaataattgcttctgatggcaataaaaaatattgtgatgttggagttttaagtggcaagatattttaattggtaaactaatataataccaattggatacttgtttataaaatttttatttttataattatatattgtcgaaattaaaatgtataaaaatgagtatataattaatatggtaagcaactaaatagttacttgatttttaaaaatgctagaaaatatatacttcctacattttaaaatgatcatattaaaaaataagtcacaataatattatttttaaactcaaaattaaggatgtaacaagaatttattgttaaagttagaaaagaaagagaaatagataaagatagagagatgcatgaaaagttaaaaagaaataaggaaagaaaaaaaagaaaattaaaaaaaataagagtgcaacacttaggctagagtaaagcgaaccaaaaaaaaaaaaaacaa

SEQ ID NO: 372659 - DNA, 553 bp, Cannabis indica
gtatagtcttagctcaactgcttttcgaccggtcttttgattagtgaacatgtatcactatttatagggcaagtaagcttggggaggaaaagtttcccctctcgttataatccgtataaatagaaagatcgtgggatcaatgctcaatgcaaggatcgtgggattgaggatgaatacactgatagcgggatcgtgtgtatgccatatccacgtaaattgatccctgagttatacggattgtgctgatgactcaccatgcaaaagtttaattctctcagtgtttggtcattctgtacgaattactgaatactttgctctgggcatgccagtgaggcatcctgctcaaactgtgcttcccaagcagatgttcctagtagactccacttgtcaccattggtgtgatgccacgttagagtgaaaaaattgggataacacggaaaatacgaggatcggagagaaaacatgatagcatatttgagcaaaatacatgatctgctcgtgcaattcaaaagttacagtctcagacaaattccaagggaagaaaacacaactg

SEQ ID NO: 372660 - DNA, 206 bp, Cannabis indica
gtaaaataatttccaacaccgtatatgttcactctctctcgttcgttctctgtttttggtgtacgaaaatagaactcaaaacctaatttctatcgtgtttaaactcaagcaaaagatcaacgattcttattccacaaatttcgatccactccgaaccgtgcgtatatacacgactctcgtatatacagtttaataataataataat

SEQ ID NO: 372661 - DNA, 591 bp, Cannabis indica
aagtccttaaatttaacaatcttaatagttcagggggaatttttaacggccaaaaaagttcagggagaatgatttagtacatgtcaaagttcgaggggaaaaacttctaattagcctaaattgattttagaaataccgaagtattttggggtacttggagtcgaccaaataccttaaaaatatagatttcttagcagctaagaaataataagataactattaataataaagtttttatttatattattgatattattattgttattattcatatatattattattaataatattttattattattattatattattatatatatatataaacgaaagtttcgtttatcagtttatatatataatatgttttaaaaaatattacagtagcagcagaaggacgaacgaaaccctctttctctcttttcaaaaaaaccttcttcttttatattcattttcttcgattttcaactcgaaacttagcgatctaagatcttgtagtagcaggatagcaaattcttgaagagggagagcttaaggtatggtttaatttcattttaagtttaaaacaattagtttcgtatagggatttt

SEQ ID NO: 372662 - DNA, 609 bp, Cannabis indica
ttttttttaaaaaaatctatttaaattctatacctaaccctagtatctccctataaatagaaaagtatagctcttattttcagaagactcagtctccttcatcagataattagaaaataaagagagcttctatttttgaaattccttcttcttcctcaaaatttcgaagttcatggtgaattgagagtatgcccactcatgttaaagcaatacctatcatagtgaggaagactatgtataacaaaattgaaggagagaagatctaggttcagatcttgataatgctctgctacaaacaagaatcaagggctagagatctgaatggaaggagtcattattattccgctaccatcaatgtaaagatttcttaatctcttatgtgtttaattcattgttttaggaaattcatattttggatgttagattatagattataatcaaacatacatgttagtaaatctaaatcttgataaacaagttccaacaactgacctcaaagctatggtaatgatttattttcatgaaatatggatttaaaatagttatttgttaatttggtatgtgttcatgttggtttatttgtttcattgatgattgaatgtgaattac

SEQ ID NO: 372663 - DNA, 620 bp, Cannabis indica
tcgtgggattgaggctgaatacattgatagtgggatcgtgtgtatgtcgtatccacgtaaattgatccctgagttatagtgattaagctgatgactcatgacgcgaaagctgaattcgctaagtgttgattgctctgcacggatcgctgaatatcttactctggacatgcgagcgaggcatccttctaggcctatctttctgagccgatgttccaagtggactccacgtgtcaccattcccgtgatgccacgttagagggcaaaatttgggataacaattttattcttttaatccatataatttagccctaagccctagttaaaattctagaaacggaacatgatgctctcactcatccaactcttgtcaacttgactattcaactgacctagatgagagagtttctttcttggtgattttagcctctttcattgttcttcaccatatttgaaaccttgagtgaaagagtgtcatgcccacacatagcaagtcaagtactcaattatagtgagtaagacggtggtaaccaaactcgaaggagagaaagagatccatgttcaaatcttgataatactctactacagaaaggaatcaagggctagagatcttgaacggaagg

SEQ ID NO: 372664 - DNA, 798 bp, Cannabis indica
aaacaacacaaaaatgggaagaactagggttcctaaaaatgtcccaaccggtagaccggttctacaaccggaattccggttttggaaaattcttggaagccccaaccggtcgaccggttgctaatggcttccctgaaccgaaattccggttcagtgcaggaaattttcaaaaattcactactcatgcaattcaaccccaattcataccaaaacttccagacctgctatttagaccctaaggaacataaccaaagcaagaaaaccaagcttcatgcacaaaatcaaaaccaccattaaagctccaagctttgagttcaaaactcaaacttggttaaaccccactaacatgcatccaaacctggtttaaactactcaatcaagcatataataactgcagaaaacatccataaaccataacaaccattgcagcaaccaaaatcaccattttactttgaaaatcatagttttgagccaaaattccacactagcttaaaatcaactaagcatgcatcaaaatcagttccatttcactcaattaaacattttaaatcataggaaaacaacaataaacaataacaacagccacaaccacaattcaacaagcatgcattaactcatttttttcttaaacttcaagaaaccaaggaaaaacttgaacaaggattacctccactagaattactctaagattgatggaaattacttgaattgcaaagaaaatcacagccctagcagctcccaagcaaggccgaaagagagagagagaactcttgagagaaaatgaaaaattgcttcttt

SEQ ID NO: 372665 - DNA, 663 bp, Cannabis indica
gtgttggcctccgtaacatccatggattgacgtggcataggctatttgccacagaagagtcagctgggacgccacatgtataaactagatttatactaatatattaattaatttaaaaaaattgtgagaatattaaaaacttgactaaaataaaagactgaaaacaaacattataatggcagtgaaaaggtgttttggggatccctcttataaaagatttacccaaaaaactataaacaatagcaattcaaaatacaacagatattgccaatctaaaacaactcctggcaactcagcacacaggccggtggggtcaatatatacattgctggtgaaggtagtcacctcatggtagctctaactttttcttgtccttacctgcaccacatagcactcgtgagtcacaaggacttagtaagaaaagtaataataatcatatagtttattattcgaatattatcatttatacacaatcataatcaaaccattacgtattgttcataagataaaatccaaatcactactggcatatgccatgaataagcatcatcatacatatgtatggtaatacaaaactattataccaataataggaatcatattcatttaaaaatataatttacatatatatgttacctcataaagtaaccatcttcattacat

SEQ ID NO: 372666 - DNA, 608 bp, Cannabis indica
atttatttatttatttacttttgctaaaaattagaatacaatttgcttagctccaaaattaatcttatgtgtggagattttaatgtgtattaaattataccctattgacttcttagatctttgatggagtgctaaaatagtggtgtaatactatatattttaatatttttaagaaaattagttttcaaatggtgataaatcttgtgttaattttggttcatacctaaagttgtgccactgtacatgatataatattatgccaaatatggtacacaaaatatttttcaattatagttttaccattgattattaatgttgagtttaaatatagttttttttatatacaattttgctattaattattttttaaatatttaattaattgataatccttaatgatattttatttttgtcataatttatattgtaaaatattattatgtaatagcaaattacacctgaaaatgaatttaaatataacatttgtttatttttgttccatatttatcataatatttatctcttgcattgaaaatgatctaaggtcttaggcgatcttaggtaatgggcaccactacttttagactttagagcatgctttataactg

SEQ ID NO: 372667 - DNA, 690 bp, Cannabis indica
atttttaaaaataatgtaagctaatttgggggatagaattttatgtaatttattctatgtaattatttacataaaaaaattgtagaaaaccaaatatgaattttaaaatctagatttactaatatgtatgtttgattatattctataatctaacactctaaatatgaattttctaaaataataaaataaatacatataaagttgtagaaaatcttacattggggcagcggaatattatggttccttccgttcagatctctaacccttatttctttctgtcgtagagtatgccaaaatctaaacatggatctcctttagtgatggaatttttcacaatcttctacattatgattaagtattgacttgatattagtgggcatctactctttcactatagggcacaatttcaagagggaagaagagaagaagaattcaaatttctagaaaggctctttgtttctcaattatttgacagaatagtctgatgtaggttatgataatgagagccatcttattctttatatagtatttcatttatggttaggatttaaattatatagaattaaaaaggataaaagaatggcttaaaatccccttaagtggccggccatctatgtggacctcacatatttcaattttgtcattttatttaacaacttatcttttatttcataaatgtcatattttaat

SEQ ID NO: 372668 - DNA, 512 bp, Cannabis indica
caatgcatacaatccaaacttcctagcaatcgtagaaaacctcaacgttcaccaatgtggagtagccttacaacatcatgagtgttaggtgatcggagatagtgggctctaaacacctcgacaacagtacaacaaaatcgcttcaaactttttaaagttgtagattctactattttgatgtatttattggtagcatctgtcggcacaccgtacgctaacattctaaatcaagttgttactttttacaaacctgatatactgagttttttccattctatcccttcactggatgaagtaattatcatgtttttgtataacgtccaaaactataaaggaataaacgacgacctattcgaaatacttggcaaaacatcaaattggtaaacttgagtaattctctgtaaattagtcattgaaaaaattgtgatcaatgttatttgcggcgaaacccccttaagtggccatgtttttacaactaacccccaattctaaaattttggtggtaaaacctc

SEQ ID NO: 372669 - DNA, 523 bp, Cannabis indica
acaaaacccgtagtcggtgtttggattttggacccagcccttgacccgaacgctgacaaggacccgaacccacacccgggcctaaaagcagtcccaaacccaaaagtggacccgaacccgtaccctatgacccaatattggaacaaaaaccagaagttgaccgggattggaactaggacttggaatcataactgaaattagacctagatccagaaccgtaatcggacagggacccggactccaaatcaaacctagacccgaattgggagccggacctagactcaggacccgaagccgaacctaaactcagacgcaaacatggaaccagactagggatacagaaccagggttgggacctagaacccaaccccagtctcgatcacgaacccaaactcagaaattggacctgggacctaaaccagaacaagaccgagacccgtgacagtgatccagatcttgactcgggattcgggtaacgaggcctggaacaaaccagcaggcggtgtctagatctgggactcag

SEQ ID NO: 372670 - DNA, 245 bp, Cannabis indica
ttttaatataaatcttaatttaaatttaaattagacgttaattcaattaattaatcatattttataacaaatttattagttatattgtttaatatatctaaacttatttgtttaaatttattaatcatatttaatagatgatgttcattgtcttaggcatgctaatcaagcggcccacggcttagcaaagtacactctggagttggatgaagatgtcatttagatgggagaaattcctcatccta

SEQ ID NO: 372671 - DNA, 1232 bp, Cannabis indica
tttcaaaccacatttttttttacagtgtggtgcggtgcgagcggtttgagcggtttcatgaacacccctacttaaaaataaggactcacctggtgcatatatataatactattttgaacattgtgatgtgtaaaagttactaatttgaccatttattttgttaaatgacaaaataaaccttgtattttttaaaattgtacaaataggaccctaaattaattttttgttaaaataaaacttaataataatctgatctagaaatgttatgaaaaaacttgttacattttttgtatttgttcgtgttagaaattgtcttaaagttagttatattaaaaaataaaattgttaaaaaaaagtacatgtaaataccacaaaagaaataaaaaaaatatttaattacatatataaatatattagatggtttattagtgtatttatattgataaataatataattataataatcattaaaaaaaattattacttttttagaaaaaaaaaagatttaagttgtattaatttttattctgcataatttttaaaaaaaaacttacaatttttatataaatattaattgttactttgttttattttaaaatatatgtatatattttttttttcacttttattcttaatgtagttaatttttttataaacaaaaagttagtagaataattatattagaagtagtaatgacacaattgtaataacattagaatatcataattaattattaagtaaaaataacttttgttgaaaatataatatttgtcatcacattaaagagagagtgtaaaaaagaatgtgatagaaaattctcttagcactcttcatttaaattttgtatttacaataaataataactattaatataatattgtgggcaacaaaagccatgatattcttaaaaaatataaatgcaaaattaattaatgaaaaatatttattggtatggcaaaactcaattcttttttttctttattggtattgcaaaaattaaaactcaattattaaaaattagtgatatttattataaaattaaatttatacatatatttttaataatatttattaaatctagttaattaaaataattttttatttcctttatgttaatttacaaaaataaagacatcaaacaaatcaaaacaaactatttatttagttgattgatttaaataaaatataatttacaaataaaatctttctaactaacaataataaaaaaaaaa

SEQ ID NO: 372672 - DNA, 579 bp, Cannabis indica
ttgttgtgtttacctctgtttttggggggacaatcttctgtaattcttgttcttcgattacgcttccattcaccaaaaactcttcgccggatttaatggttttttcttggttatctccgactctggcaactccacaaacacgaagccgcacgttttttttgtgtttttactgttcaaagtataaatgttaagttgttgggcttgagcagtataaaagtaaagaaaacgggcttgggcagtaaaaaattgttttgccgtgtcccagcatttttgtaaaattttggtcaaaaacagtatataggtaaatttccctatttaaaattccgtttttttttttttttttttagaaataatcccaaaaaggatagctcaagtgttgtattcatgctctccatatgtaaggcccaagcccatatggcaatgtttgcattccgttttacatttagaagtcatccaacggtgaatgcaagccaaagtgcagaggagcggtagagatgaaccactagcgaaatcgttcagaaaggcagaagggcatcgaaacgtcgtcgtagaggtcaatttatcaggatggaaaaacaa

SEQ ID NO: 372673 - DNA, 633 bp, Cannabis indica
aaactcaagaaagaagaaaatactgaaaaattcaagagaaactctctttccttcacctctctctcttcgaaccagctaggaactatgggatttctcgctgaaatttgtgatttctaccaagatttcaaggagaatcaaactaaggtaaaccctagaatccttgagtatgtgaattttcaagttttaagttagtttgaattaatgaatttgtgatatagtggctgttaggtttaggtaggtttagggttcgaattttggggttcttttgagttgattttaactcctagtggctggttttagtgtgtgttgttggttttatgcaagtttaagctttgagtgcaaagctttgttcattaatggcaacttgagttgtaatggtttgttctgtgaaatactggttggaatttattgtttatgccctaattaggtactctgtaaggtttcattgcatttggtagagagttgagcattgaatgaaaggttttgggaaacctggtgcaaaccggctagccggtttgcagggccacaaaaaccggctagccggttttggcagggttctccgggcctttcattttctcaatttttgccttttcgatgcctcggatgggtgtttccccatttccagagttagaa

SEQ ID NO: 372674 - DNA, 501 bp, Cannabis indica
atgctaactaatggttctggtagatttttacatcttgggtacatgatagttcaattgactgtgagcgttgatcatagatatggaatctatagcttctataagtatttagaagtgaaacgatgatttccttcgagcttagctgaatagaaataaatgattgaggcctcatttcaataattatattaatttattgaagtatcatttataggtagctaagtgttttaaggataaaatacattaaatggtagaacggtaaatttatcccttttcgatgtagatcatctatagaggatctttaactattaggattgtaataatggatgatcataacgtatctatatcgtggtacatatagaacattctgtataattgagagttctattcaataacaaatctatagtggcgcaaggcgaaattaataagttagagaattttaccaagtaaattctagatttacttattgaaagctgaggaaaagaggttttagggttaatttattaa

SEQ ID NO: 372675 - DNA, 827 bp, Cannabis indica
agatagaggtgcatcaatatatccatccattttaagggggtgcattgtagaattttcctatatatatacatattatgtggcagagaacgtgccaaagtaactgccgtcaaacatcaatcatatagagtaaaatttaaaaaaaaaatcactaatcaattattggataccacacggatataacattaagtacattaagagtaccaatagcaaggtataaaaattactttttaaaaaataaaattaaaaagaaaacaaaaaccataaaagataaaaaaaaaaaaaaaagtaagtacaaagatcattcataaaaataatataaaagacagaaaaaaaaattacaaaccaattatattgagtaccatagtgacattaagcacattaaaagtaccaatagcaagtaacaaattaaaaaaagtaccaaaaaaaataataacacaccaatatgacattaaacacattaaaagtactaataattagtacaaaaaattatttaccataaaagtaagagaaggatagactatatctattcatagaattgaggtattatataaaaacaataggatattaatattcataaataaattaataaaaacaagtaggatcaaaaccacaaaagattttaaattgtatttttgtagccggtgtggaaggtttgatgaaaaaaggggccagaaagactcaatcataggaacttaaaccacctacgcgctggtaaacgaaaatcacctcgaccggatcaaagtgaaaaacaatgtcgaattaggccgacccttgtcttgaaagaattcacacacggccaccagctttcccaaaatcaggggaaaacc

SEQ ID NO: 372676 - DNA, 771 bp, Cannabis indica
ggttcgggtccacttttgggtttgggactgggttaagggccgggtgtgggttcgggtcgttgtcagggtttgtgtgcttggctgggtcccaaatccagacaccgactgcgggttttgtccaagccctaggtcaagattcggataccaatctcaggtccgaatctggttacattttggtgccgggtcacgagctgggtcctacgttcaagttcgggtctagatcgagaactacgccctgttcctagttctgtttcccatgtcactatcctgattcttggtccaggtctcggttattgtgttggtttaggtcccggtctaggtttgggttcgagtcctagtcaaggttcgggtttaggtctttgtctaggttttgatctaggttcgggttcgggtttaggtctgtgtcctcgtccttgtccttgttcggttctagttctacttgcaattctgagttcgagtttggggttgagttcgggtcagaattcgagtcctggtctgagtctgggtttgggtctggatttgagtctagggtcagatcaggctccgggtgtgggttcgcctccttggtcttggtctaggttgtgtcggagtccaaagttccaataacgatctgagcctggattcagttctgggtctaagtcttttgttctgacatggtctgggttccactttgggtccgggtccgggtctaactttgggtttgattctagctgtatgtttgagttcaggtccgagtctgtgtccgggtttgtgtccaggtctggaccccga

SEQ ID NO: 372677 - DNA, 561 bp, Cannabis indica
gggcgccttggatttgttgattgagtagagagatcagctgttgactgagctagagttgggaagtgccagccgcggaggggtctggagtgggagtcaccgaggcttaattcgctcgagcactggtggtggtctttttcttgtctcaatatccgggaggaaaaccgtggaggaagtagcatttgccaacaaggtgacccggtttaagacaattagaacaagttggccgaagtttcttattccgagatggttgatttggatttggtttggccgaagtagcagtaacaacgccagtattgccaagacaacattgttgctcttgttgaacgaccatggagaacaccttggacagcgaggggagtggctcatagagtaaaatctgagcccgaatacccccgtaagactcattgagaccaatcaagaattgaatgatcttgtctcttgtgtaatagtcttgaaccttttgcatcgcgccgcaagtacaaccacatgtgcaggggatatttagttggtattcgttgagctcgtccaaaagagcttacaattgagtaaaataagtggtga

SEQ ID NO: 372678 - DNA, 703 bp, Cannabis indica
attcttctttatatttattgatataattaagtatcaggtcttatataattttaaaaaaataaatttttaagtaatattgctaaccaatcataatatactaccaaaaatattaaacactattagtattttaataataatacactataattagtgacggttgtaaataaagcattctcatctacttttttcaacctaatccaaaatattcaaggaagaaagtaaatatatttgaacttatcaactattaaataacattgacttttaatatgaaacatttattggtacagctataggtcttctcatttttttttatggagatactaacaattactgaaaaaaaaaatggaaataaataacaaacacattaaatggataataaaaagtaagtttttttttttattattatttttatattttaaaataattttttatatttttacgaaaatttatataaaaactcactttaacaactaacataattaaaaaaaatatatatgaagtaaaaatgaaaagattaaaaaagatttttcacaaaatatatacactcaaaaatagtatttttttttgttaaaataataaaaaaaaaaacagtatttctctttcctctttcaactttttattttattttatttttgcattttttatagggttaatttcacaaatgcacaaaagcaacaaaaaaaacaacaaaaatacggtttca

SEQ ID NO: 372679 - DNA, 734 bp, Cannabis indica
tgacattatgctaatcttacctcaattccgaatttaggtgtgccggtcaacctgagtaaaacaactgctcggcgaattataggctcctaaatcacatcgataacaacacgaataagtgacacgctaaatcacatccaggacttaggttttaaccaaaaacctttcactgcaacttaatatggcaataccctaaactagcagggagtcaaccaactaaaaacctgaaactaacgcgaatcaacaagctgaatattttgggattcccagctacaaaaatcggttaaccggttttataggtacttgtaaaccggttacccagtttttcccaaaaaccaacaaaaattgaaagcttcaccaaaacgattccaaactcaaccaaactttccagaactgcatattataccccaataaactattttcaagcactaaaacagttaaacaagctcaaaatccaaaatcaccataaaagctccaagtttgagttctaaaacttaacacttggttaaactaacaactaacaaccattaaaacaagcttaaatcaacatatccaagcatacatacacttctgaaaacaaaaccaaacaacaacagcaatagcaaaagctagaatcaccatttcatgcaaaacttatttcttacaactcaagaaaatcagggagggagttgctaggagctgttggaatattttttaccaggatttagatttactaacaagtatgtttcattaacatc

SEQ ID NO: 372680 - DNA, 797 bp, Cannabis indica
gtgggtccaattaataaatatatttaaatattattttatttgataattatttataatatttaagataacattgttatttaaataataagacgaaataagtagtaaaattagaaatgacactttagtttctttagttgaaataaagtgatgaaaatccaactctaaagcccattattgatttcaaccgtacgagaaatatttcaactcaagtctttgttttaagcctatctcatctaaacctaactctaactaaagcctatataaagaaattaattagaagagagatcttaccaaagtttcatactcaaatgtttcatcttcctcttttcctctatattctaatatccttatgaattccctctctctctctaaatagttgaaaggatttttgagtatcagcccacactattcaatttagtactcaagcctttctggaagactatgatgaacacaatacaaaagaagaaaaaaaccaacgtcaaatcccgaagggaactttcaaacaaaaatgatcaagggttagagaattgaacagaaggagacattatattcatctgcaactattgtgaggtttttctttaactttatatgtgattgtttcatcattttttaattttattcatgcttaggttgttagattatagatttataatctacataaatattagtaaatatagatcttaattaaataaattctaacatgtggtcccccaacaccaaggtgtataacacaagtggaagaaataatttctatgcatcatcaagcatggctgactactgccatcagtgtgcataac

SEQ ID NO: 372681 - DNA, 1532 bp, Cannabis indica
tacagccattagtgattgagtgcatgcccacgcatatcaagttggccctcaatcatagtatgtaaggctgcgaagaatccaatcaacaagaaggagaatcgggctcaaatcttggtgatactctgctacagaaaggatacaagggttagagatctaagtgggatgagtcatttaattccgctgcaaccactgtaaggtttctcataccttttatgtgtttattttcatcattttagaaattcatattaggatgttaaaaaacatacttgttagtaaatctagatcctggtaaaatatattccaacacatatctcactcgttttttatcagaatcgagtttcttaaaataaaaattacttaatttttcacaaggaattcaaaaaaattatttccaaaatgaaataaaattatttttcatcgaaaattcataatgaacatacaatcatcaattcacacataaaccaacatgaacacatcaaaatcaacaaaatcacattttaaatacatatttcatgaaagtaaatcattaccatggctctgaggtcagttattggaacttattttattaggatctagatttactaacatgtatgtttgattattaactataatctaacaccctaaatatgaatttcttagtacgatgaaataaacacatacaaagtttagaaatcgttacattgatgccagtggaataatatgtctccttccgctcagatctctaacccttgtatctttctgtcgtagagtaataacatgatttgatcaggatctcattctccttcagtttggttaaccaccgtcttctgcactatgattgaatacttgacttgttatgattgagcatggtactctatcactaaaggcttgaagattgatgaagaacaatgataaggattcgaaatcactataaaaggagtctctcatctactagttgtctgacatagttagagaactagatttagtttagttgaagggttggatgagaatgagagcatcatgttccttttatagtatttcaactagggtttatgatttaattatatagattaaaataaggtaaataggcaaaattcaacatagtggctagccatacatagtgggtctcactagttacaattttgccactttatttcaactatttatcttttctttcaataatgtcatattttcaaatttaaatcctataaatgtcaataccatttatttaataattataattaattatcaaataaaattaccatttattttatttataaattaaacttaacaaagtatcttaattaacaaataaactccgaaatctcttttctttacaattaagaccttgcttagagataattcataaataagacatagtctaattttagatttataattcactaattaaaaccaattaactgagtctacaagcaatattatctcaactagtgtggggaccatgggtctatataataaagcttattaattcctccttgcgccactatagatttgaaattgccactcttaattatgtagaacgctctatatgt

SEQ ID NO: 372682 - DNA, 1019 bp, Cannabis indica
  modified_base (24)..(24): a, c, t, g, unknown or other
atcagatcttgaacgagataggtnaagggggtctccattcttggcatacattaatgcgttgcccttgcctaagtttagatgcggtacagaagatgataacgggagagaagatcctcatacacacatcaagcacttcgagatgtatagaaagatctccaaaaattcattggtgatgtgtgatgctggatctttctggtgactctataaaaaatagcccaacaatggtacttcaagctggctccaggaagattcaattctcggaatgaattttctcgagatttctacacacaattcatgtcctcgagacagttaccatcacagctggaagaccttgttgagatgaaacaaagacaaggcaaacttttgaaggattatatccaaaggttcatggctgaggccacaaaggtcaaaagcctagcagaagaaggtcattatacggccatattgagggtatccttccgttgagtgacttctggaaagatacccgaaagatctcaaccaacaacatgaaggagttcctcaagtgagcaaacgataaaattaaaggaagtcgtcatataagcccaaacaggaaagcaagccagcagtaggtagtcttagggtgctatgcagttccaagaccttccaaacatgcaggccagtacaagcagccaaccagccctccaatggaaaaaatgtagaggtaagtgcaacaacaacaattctggccaaagtaatggcaaaaagggaatacaacacttcccctataccacgaaaccaaaaggagaaggagaggaagtacagtgcttcaccctcctaactgaaaaacctaagaccatttacatggctacttaggctattgtcccatacaagaagcctcctcctataaaaacggagatgagtaagagggacatgttaaacgttctgccgatttcacataatttggctatacaccaatgagtgtcaaaaacttcgaaaagggtagattgaattccgtcaactaaggaaataatccccacttgtgttgttatgtgcagaac

SEQ ID NO: 372683 - DNA, 542 bp, Cannabis indica
gtttttttaaaaaaaaccctccttcccccatacaacttcatacttttgtgacccgacgacagtttacacaccatattcgtatcacatgttctcttagtttgaagcaaactcaaacgaccataaggtaccaagtactacaagagattgtttaccgttattggtacattttaatatcaggtcccacacaatttaatttaatatataatatggagaattactggtcaattacaatacaatacatcaacatagtgtttctcctttttaggtacctaatagcaattgaaaaattgtgttctaaagttcatatgagataagtggcttagtttatcctaaattattattaaactttttttccttatatttggatccatctacacgtctgtctgtataaaacttctaattatttatagataaggcaaagaataattaatatttttttcctctgaactttatattatgacttattaataatatcattcagaatataactttttacagtaaaataataaattagtagttgattgattgatactaaattaatt

SEQ ID NO: 372684 - DNA, 1153 bp, Cannabis indica
caataatggggactattactaggttataatagaatgagaaaattagggactaacaaacttataaaaattttgaccttagggactattactgccaatttttgaggttgtggacttatcaacatcaaacataagtttttgaagacttatgctgcaattttccctaatagaataaagaaataaagaaaaaaaattgtctctcttacatttactattaagtgatgagaattaatggtaagtgagtcattcacttatatttgtttacttaatttattaaatttaggaaatgaaaaacttgattaaataaggaagaaaagaaagagagaacttcccacaccaattttctaagaaatgctattaagggtaatggctttaatgttttatttgcaccccataaagttataagtacacctcattttaataatttttattttatacaaaatataaatctttaattattactattttttttaattttttttttcttctttttatattcttaaaaaatatatctataaagtaaaaataaaatatattttaaatattaaggtaaaaaaattaaaataaaaaattatatgaaattttattagaaaaaattttaaaaaatcatacatgatttaaaaaaaaaatgtgaaaataaaataaaactaactattaatatcaaatgaaaataatgtgaaaaaaattcaaaaaaaaatactaaaagtgatttttaaaaattaatttaagttaattattttttaatattagggcgtacttataactttatggggtgcaaataaaatttccctaatttatttttattttattttttaatattaaatttataatgacaattttttcatttaaaatatgtcttataaaataactaccatatactataatttcactctaaagggtaatttagtcaatttaagcattccgattatatttcctaataaagtaaacaagataaataactatcattctatttccaagcagttttagtaaacaacatattacaaatattgattccgattattcttcatttattctgttacatttcttcattaatttatttcgattctgaatactggatagtaaatgtgtcataatttccattgcttattagtaaacatgtcattagtataattaaatcttatcaagttcagtctaa

SEQ ID NO: 372685 - DNA, 939 bp, Cannabis indica
ttacttctttgtatgttgtacattgtaattgtaagcaatcatcaatttatttatttatttaattgactttttgaaaaagacaattgttttattaaaatttgataaccaaattaataaatatatgtgcaagtcaaagtcaacgttttgtttttcttttcatattctgtgaaattcaaataatctcttttttttgtttgctgaaccaatctaattcattaatacttttactttgtttattgtcatcaaaaaaataaaaatgattagagaatgtgttataaataatgaaaaaaaaattggagaatagattagttctgctctaattacctacaccatagtttttttttttttttatgtatatgtggttatagttatactatatgttgcttaggcgccgataaattcttacgatattaagaatagaatttgttatattatttattataatataatataaattaaaataattaaatgtgacatattatatattaatatgagaataatatatattatgtgttggatgttagtataataatcaaacatagtactataatatacataaaagttgtaacatatgaggagttactaatttgaaaatagattgtaatttaaggatcacaattgataaatatgtaattatgtgagttattatatatggaagttatggaattaatgggataagtttctagctgtttgaaactgttacaatattcaattatatcatttaaataggtattgccacattggggaaagatttaactcgaagaggagtttgagttttctggaaacagttgtttttatgttgttttatggttgttttacaaacacctggaacaagtttttgaaaacgtccagaaacgtacatgaattgattgaacatgtttccagctctcttgtccaacgtttttattatattaaacaccaattaaagtgttggtaaca

SEQ ID NO: 372686 - DNA, 650 bp, Cannabis indica
tttgcctcaaggagcgccaggggttgtagcaggagcattggttccagttgctcccctcggagacgcccagcatattcccaacctgccatgaagacccaacgggagagtggctatgatctctggaggaccccacatcggaggaactacccgcaaggagctcaaacggtacgcaggggccgtgaaacacgatgaggtctgggaggttactcaactgccaactcaaaagccttgactaattgatcagcccattacattcacggaagaagacgctaaaacagtgcatttccctcaccatgacccgttggtcatagagactcccattgccaataagatcgtggccagagtcttgatcgataacgggagttccgtgaacctattattcaaagaggccttcactgcaataggcctaacagaccgagatctttcaccaagtggttcccaactcacaagatttaatggaacaacacttatcccgatgggaaaagtgaggctcccagttaccgtgtgcccagacacaccccaaagctttcaagtattgcacatttgtggtggtggactgcccaacagcttataacgcaatcctcggccgaccggccttggtagattttggcgcagtcacgtcaatacggcacgtatgcctaaaattccat

SEQ ID NO: 372687 - DNA, 598 bp, Cannabis indica
tattattcttagatgatatttatttttattgttatgtatagtggtggtatataattttattaatataataaaaatattttaatagagatatataatctcattaatatactacatatatttaattattatttttatatattttaattttatttatactcatttttttacttataaatattctatagaatttgtttatcttacttccttaaaaaaattacaatcttccctcctccctcccactttctatcacatagaactacccttttatattgaaatcaccttggatatattctttcttttacaacaataatccttctaaaatttatatatagataatcattaataaaatacttaacttgaatatatacacgttccacaaatttcttaattaaaaatatttcatacatgtgtttatatatacatataaaaaaaattgataacaacggatttgaacttgtatcaaaattattaaaaattgaattcaatattgttttatggtttaattgtcacaaaataaaatacaacagcatactacgaagcgtgatttatttattagtatacttataaaataaaataaaaatatattttaaatattaag

SEQ ID NO: 372688 - DNA, 352 bp, Cannabis indica
aaaagactggaggtgcctgcttgcgaaacattccttacagtggttccattcgattcactgcagcgactggtcctgcctgcatagctgggcaagagctacctgcttttctgaagtaggggattgcaggagcactctactgtctcaaccgtcgaatctcttcatcttgttcattgatcttggcttgcattgctgcaaaccggttatttcccaatcatggacagtttgggcatcttgggcagcctgtggcgggttagcatcaccccggccgtgtgccctacttctaatgcctctacttcagccacatcatttaggggaatacaaactccctgaccgacacttaatccgaccgagt

SEQ ID NO: 372689 - DNA, 517 bp, Cannabis indica
aaggcaagaaatgaaatgttttggtgccaaaagtaataaaggtagatacaatggtgaagtatgataatagatagtgtcaaaatgaggatgttatgtgtaaggcttaaaaaagattgtaagaaagatatgaaataatttagaggcaattatagttttatttgggtacacattcaaatacaaatgtatagatgtttttgttcaagtttcttcaaaaaaggagacaatgtagagttgtaaaggttgtttggtatggaatacaattttttgattcctccgaaaaagtagtagtagtgtgaatgtttgatacattggcctagctagtattataaccagaattagtatcttatgtggtgattgttaaagtttatcctagatatgataaagaagatgacagaaaagaatagagagaaagatcaaaatctgaaaagatatgattcattacgatattgagctcaatgagcatcgtctatatacattgcaatgagagagagagagagagagagagagagagagagag

SEQ ID NO: 372690 - DNA, 532 bp, Cannabis indica
aataattcttagtacaataatgatttagtagttgaaaatctcggtaaacaattataatattattatttttataaaacttatcggattttataagtttatatatactatgtttaaaacagtaaatcatacaaaaaaaaaaacccttcaactttcgtcgaatgaaaccctcatctacctctatccattttctttaattttcaacttgaaacctagcgatctaagctccagtagtagcgggatagcaaatccttgaagagagaaagcttaaagtatggattaatttcattttaagctaaaaacgattggttctacataagagttttgtgaattggaatagttatggaggttctgaccttatagaattgttcttgggtagccatgggactagtttcgatatttacttattgaatttgaggtgattttgagttagaaattgagtttggaactttttaaagcttaagtctgaacgttaatgatatttttcatttaagggcttgattttaatttttgttacgtaaggatggcagtattt

SEQ ID NO: 372691 - DNA, 746 bp, Cannabis indica
aaaagttacatgatagaataggttttgaatcaattgtgtaaaattattaggtagtgtaattattagagattatatattagagtaattatattttgttttaaaattacaatgtgtgtttggattttaagtagtaattgtatatgaatttttatttttattattttataaatgagttagtaattactagaatttaataattaattatttaaaaattagtaatgttttataattacccagttgtaattatctagttgaataaacacactaaatttagtaattactaaaaattatactcaattctaattacacaggcactttttaaattgcactataaaagttaaagcttccacatctcaatttttaaaaaatattattttaattaaaataataaatttatttatattaaaatatatttacttaattattatatagtataaaaactgaaaatatttaaaataaataaattaattaagacaaataattaatatttaattgtcattcaacttttttttttcaaaaaaaatatatttataagctattttttattttcataatgttatgtaaataaacaatttagagttttttatataatattttattatatgtgataaaatataatttaaaaatactataaaatattttttaaaattattttttatcaaaaacatataattcatatcttgagaaaacaattattaaataaagacataaataatgaatatatcatgtaacataatttattatat

SEQ ID NO: 372692 - DNA, 626 bp, Cannabis indica
cttgtttacatttttaaatttccaattatgagatttaggtcgtgtgtattccattcttttttttttcttgagagaacagtgtatcatggtaattgataataatccatatcgtgtttaagtgctaagagcctctcctattttctaactaaacctgactaatttattcatttgaataattcaacactcccctcaagttggatgatatatactattcaatccaagcttctctttcaatctttcaaacaaaggcatatacatcatttaaacaacattttaaaaacaaaaattactattaaaacaccaaaaaatcaaagcacacaattgcttttcttttccttaatcactgaggtggtttcattttcatctccaaaactgtcatctttgtgatggctgctgcatgggctcctaaaatgtagatggacaaccaccgtgaagatcaccatagttgcaagatggagatctttgtggctgccaagaacaacacccactcatcaaggcttgcccactcaaacctccatgaatacaacatccaactccacaattggggtgaaatatctcagtatccacccactcaaaaaaatcacaaccctgttcataaaattacaagatgttaatcacaatctaaa

SEQ ID NO: 372693 - DNA, 821 bp, Cannabis indica
ttaattaattttggacgaacttaaattagattatttttcttgaatattaaattagaattaataattaagtttattttatttaagatacttaattatttttatttaaattaaatataattatatttaagttggatatttttcaatttcagatcaacttaaattagaataatttttcagaatatattttaatttattttaataatcattttcccacctaattttgaattgcatttatttattttaaatgcaaatattttgaaatttttcaattttgaaaattagattaagttggaaattaattttaattaattttagatcaacttaaatcaagttattttaattaatgatttaattaaaataaatagattaaaatatattattttaattagaaaattagtaattagtttatgaattatctagatagatattttctaggtagactttttggtatttttctagatatatttaattaaattagaaaattaatatttatgtttattttattcctaaacacttaaacatttgatattttcttaagatatttaattacatagaaaaattatatttatgttgaaaaataatttatttaattttagaccaaacataaatcagaataatttttccagttttttattttattctatttaatatgaattttgaaaatgtatctttatacattggatttcaaattcagttatatatttatagaaaattaaatttgagttgaaaattaattattgaattttggagcaacttaattaagtagttttcataatatttattggaaaattaatactaaggatggaaaataaattttattt

SEQ ID NO: 372694 - DNA, 577 bp, Cannabis indica
agttttcttttacttaatatataatctaataattatttttgctattatttatttaaatttactattattttgaaactaaatttttaaacacaacattctgtaaactaaaataaaagttacatagtttgatagatagaattgagcaaattctctatctaagttttttttttaaaaaaattatctcaataatacataattaaatacatatttttgttctaatatgtattttgtctaaaaaaaaaattatattttactttttatttacttaactttttaattttttggtgacaatactcttttaactttatttccgattgtaaatttaagacgcctgttaaaattctaccattaaaagttagttgaaattccattgtcaaacacttttctatgcgaaatatatttcaataattttgagaatttaacgccacgtgtatacatatgtacacagtgacagttccaattaacatttaaatattgaatttaacttgttcttcaaatttgtaagcagaagtaaagttaagggagtgttgctacaaaaaaaaaatataacaaaaagttatgtgtataaaaactaaaa

SEQ ID NO: 372695 - DNA, 541 bp, Cannabis indica
gtacgttatagttaattaagacacttaccaaaattttgcgaaaatcgaaataatttacaatatgaaaagtaatattcaaacaatctatttcagatgcatataaaataaaagagtcacgcgtgcaatagactgtttgaatcttatttttggagtattaaatttatctaatttgtttaaaattttgcaagctatcgacttaaataactacaatgtatactattatgaaaaataatagaactaaatttttttcctcgaatgccgaagcggataaaaatatatcaatgcactttttttaaatagtgccttgtaaaattttcttaaaattttaatgtcttaaaataaaaacaccttaaacccatcctaattctaccaataaagtaagagcttcttctttatttttaggctaattaggatttttgtccctgaactttgacatatactaaatcatgctccctgaacttttaaggttgttaaaaatgccccttgaactattcagattgttggatttaaggacttttgcctaatttcattcaattttact

SEQ ID NO: 372696 - DNA, 514 bp, Cannabis indica
agacgaattagttcagcatatcatcaatgaagttcttcgcttcgaggtaagcttttttagtcctgaattcgtccctatagagatcaaaaaactttattaaagtgtttcactcaaaggtagaggatcttgaaagtatggttttcaaagacaacttgaaaagaatccataattagataaatgagcattggagtaattgtattgatcaatatttggaccaagaaagtaatgatagcgatagctctgattatgtttttgatcagtagagtttcttttcttaagtgttaagggatgggatttaagaaatatggagtgaatatgatccaaaattatggtaactttgctcttctttagttaattaataaatttctttatcattgtaatgtttctgtgaagatttatcaataatagaaagaaagattgaagaatttattattattattattattcaattatttaattattttaggtttcaaataaaattgaaatgaagataagtataatttttattaaacaa

SEQ ID NO: 372697 - DNA, 713 bp, Cannabis indica
ccatccatcgcattttccgcgtcgccgaaaaaaaaatcataaaaattgcataactcatatataatacaaataatacctctagagtttaataaaattttcagaattgagaaattataattctagcgcccacttctaataatgggaccaacaatcaaataaatttatgaatattataaaaatatcaataattaacgctaattgcctttactaatccatattctaaaatgcggtcattacaggcatggactgagggaggaggatgggtgcagggccttggggtgccaattatcagacatcaggcatgagatgaccgagttttctcggacagctttgtgtatgaactaagtttgtctgaaggtttgggccaaaaaatcaagcccccacgcgcagaatttagcttcaaccctagccaaatttttaaaacttcaaaaaatcatatctcttcaattttattccaaattaagttctgtaaaaggctaatttgcttaattttcaccaactttccaaataaaataattcaagatctttcatagaaaattttgtaatatcacaatcaatcatcaaacataaataaaccataatgaacacatccaaatcaatcaaaaattgtttcaaattcatatttcatgaaaataaatcattaccatggctcttaggccaatcgctggaagttattttactaagatctaaatttattaacatcctaaatatga

SEQ ID NO: 372698 - DNA, 531 bp, Cannabis indica
tgctcggtcacttggggggcacctatacctgtacaaagcacttggtaaaaataaaactatcacaattgcaccacaattataaacagagaatgaaattcattaaggataacaaaagcatgtaataccgggaataaagctgtctggtcagcctgttctccgaaaaatgaaaaataattcctagtttaaagaccccttggtgggtcatgatgtcttagaaaaggccctgaggccgaataagatatataaaaataaagagataaaaggagaaatgtttaaacagctggagtcccaggctcttggttcggttcttctgggccaattggaggctgaggatctgttgtttgaataggaggtacatcagtagtctgatcagaggttgaagctgtaacgccctgtccaacagggacgccacgtgtgtgcactttatttaaaataccaataattatataagatgtaattatactaaaagtgtggataattaaatttttttagtatagttaaaacttaacctttaaactagtttaacgtaaa

SEQ ID NO: 372699 - DNA, 397 bp, Cannabis indica
tgcctttaaatattatcatttctgtaataaaaaaatactcatacaatgctaacattaggatcccaagtcatctaagtatatgcatataacaaaaaaaattaaagtgatcacttaaatttgcttttacttaataataaaatctaaaatagctaagatacgcaaaaaataattaaataatagttaaaaatagataaattatataatagaaatatcataaatatattctaatctttttaaatatttctatattgaagagaaagagaattttttctcttttcttcagtttttttaaatatattctaattaatatgtcaaacaaatattctagttaaaagattgttatatatcctttcatattcttcctttttatttttatttttttttttaggtaaaaaaa

SEQ ID NO: 372700 - DNA, 727 bp, Cannabis indica
aaataggactctggaattttcaacaatttttttttaatgtaaccaactttaagacattttttaatacaaacagatatagaaaatgcagcaagttttgtcataagatctctagatcggattattattaagttttattttgacaaaaaatcagttcaaggtcctatttgtacaattttaaaaaatacagggtccattttgtcatttagcaaaatataagatccaaaatagtatttactcttgttgaccgaggttttcggcaaccaattaaataatgtataagaagagctgtagaaagtttaatgtaggagatttttacgtggttggggcattaatgagccttagtccacgagtcttttttattaatgagggtatttattacagagaatgttcttggtggatttctctcctattctctctcttcgattccttaaacaaaatcgttcgacccctttttaatctgtttgtggggtatttatagtgtttttcttgggagatccctaggaatggatcgcttgtctttcaatgttagcttcataggggcacatattctcaacagatacaaaataggaaatacatgacctatactttaggtatcttaagagttaggtgggtataatcttttatcccctcttgactgatgtgattcctcataatgtaaccgccactagacttatcgattattgtgtaatcgccgaaaagggggcttacgccatctgtcatgtcgttt

SEQ ID NO: 372701 - DNA, 532 bp, Cannabis indica
gttctgtgtccctagtctggttccatgttagggtctgagttaaggttccggttcgggttcctagtcttggtttgggtggggatctgggtccggctcccaattcaggtctaggtctgatttggagtgttatggttctgtccaatttcagttatgattccaagtccatgtcctagttccaatcccgctcaacttcttattttggatcaaattttgggtcacagggtacgggttcaggtccacttttaggtttgggactgggtttaggtctgagtgttggttcgggtccttgtcagggttcgggtccagggctgggtcccaaatctaggcaccgactaagggttttgtccaggcccttggtccagatccagatcccaatctcggcacctagtctggttccatttttggtgtggggtcacgagttgggtcctaggttcaagttctagtctgggtcaggtactaggtccctgtcctagttctgtttcccaggtccctatcttgattttgggtccaggttccggttattgtgtgggtt

SEQ ID NO: 372702 - DNA, 697 bp, Cannabis indica
ctaccttggtcacgagtgacgagatgagcatcggtgttgggatttgtcttatcatagtgggaacctatggacaatgtgagtatcttggctagagagccctgatgcatggatgcttgtgagcatgactcggtagaagttgttcgagagacgggagtgtgcacgaggcacacggtcgtgcgaaaaatgagcccattgttactcggatggttggaaggctgaccttggcttagagaagtcaaggtgtcgcatgggtgttccgctgcctgaaaaggtgagcccgtgacagttggtatcagagccaagttcatctcaatgggaggtgaacctagttggcctatcctagaggggatgtaggcgtgtggaaggatgttagaaagacaactaccacgtgcaattgtggagaggcgcaatggaatgtttaaaactcgttggcataggacaaggttgattgggtagtctatactgtatgcttggtacattaggccaagtttgcctgagtgacatcgtaagtcgcaggaggcacttttattaaaaaggaagcttgttggcaggggtgtggaagtattgcaggggccgtcagattcttgttagtcacgacaatggtcgagagttgatgaccgagatggttcaaattgggatagagatggaatgcttaagttgctacgtgtgtgtgccaagagggacgcacatggagacc

SEQ ID NO: 372703 - DNA, 547 bp, Cannabis indica
gtcaccattctgtgatgccacgttagagtgcaaaatttgggataacatttgccccccaagtttgtacgggacctctgaagttgcgtgtagacttcttctgagctggctctacctttggatggggacacgtgtcgagcatgatcgtttgagactcgatgtgaagctgactgggtgtctcttcagttttcggctatttaatgctctgacaattaatatttcaaaattcgattttctctctccacggctaacggttgcactcgattacttttgatttcccatattcatttttgaggcgggaagtcgaggcgtctgaggttcctttgatgctgttacctcttttcgtgacttgcctataaatacccatagcattggcacataactcattttatcacccttcgttgctaagtaaacttcagagcgaaaagagagttttgtggcttcaaagttgtcgaagtgccttcatacaactgctggtttgcttaacgttgctcaaaccaagacactcgaatctttgagtaagtttctgatttcctttatgcttttcttt

SEQ ID NO: 372704 - DNA, 660 bp, Cannabis indica
caacactaacattattgaacaagcgagcagcgatctccagcgctcgttgcttggctaactggatctcatcgaccggtggaggaaagttgtagtaggagtcaggagaggaagaagtgattacggcagagaatccagtgggtcgatgaggcagtggtggagtggtttgttcttcgtatttgcgtttgttattggtgacaaagtctggaccagaagagtattgaccagaaaaagataaagaaaaatattatgaggaaagaaaagaaaaagaaaaaaaattaagaaaagaaaattttttattttttaaaataattatttttttatttttttttaaatatttatttacgtggaccaataaaattgtgccacgtgtacactgtgtacacgtagacattccaccatgacagttaacaacaaaaaattgatggaaatgttaaactgctagcagaatacgagtttagcgagttttaccaccaaaattttagaattggagattagttataaaaacctggccgcttaaggaggttatgccgcaaattactctaatttgaatgttcatacttaatttgtaatacttcgtgttgtatatataaactagttgcggagtacgtgcagtaaaaatttgtgaattataattatatttattatttttattaattatat

SEQ ID NO: 372705 - DNA, 647 bp, Cannabis indica
agttttaatttaatagttttctttagattgaagtttttaatttagtaattaaatttaattgatatctacaaatttagtaaacaaaaagtgaaaattaaaaaagtaattgtcaacaaagaaaaaaaaaagaattaagtgtaataaaaattagggaatatactcatttaacacctttgtgttttctcaaaaaatatatatgatactttgtgttttcaattatacttatttggtacattgtattttaaaattgtacatacagtagaaccactatctaagaatattctattaaataataacctttaatttgttataagaaaacaagtcctaacttgggtcaattataaataagaataacatctaaattgtaattagttatacatttgttaagtctcgtattaacaaagtatacctctatataagaataattatattttaataaaatatatacatatattttgtaaatttatttacgtagaattaataattttattccaaattgtaaatttgtaatacatgtataaacattatatttactcaaaaataattctattaggatatagtattaataatagtttattgttattattgttacattaatattttttggtattttgattttttttttctagtgtaactctatttagtta

SEQ ID NO: 372706 - DNA, 618 bp, Cannabis indica
atgaagaagatcatcgccgatttgaatatttgtatccattatatcttgcttcattaaatgaaaattctagtgctactgaaggtactagtaattttatcgaaccagaatttagtgacggggaggaagctttccaatactattctttttataagagtgatagttccaaaaagtggaaggcttggtacgagtctcatcgaccacgtccttgtgaacatacgccatcttttgcacatctttatgatgacatggaagaacaatcctacaactctttctatcagaatagtcttgatgattatagttggaagcctgagtacaactataaccccttatatgagtggagttatgaagaggaagatctttggtttaatcacaaaagttctgatgattatagttggaagcctgagtacgactataatccattatatgagtggaattgtgaaaaggaagatccttcgtattcttataactcccaacatccatacaatagttccctcagtgacactattgttgagttacaagcatctatggcgataaattgcgagatgatgaaagacttacttgctgagctgaaacaaataaagcaggaattgagcaaattttctgatcacctggtaagtt

SEQ ID NO: 372707 - DNA, 708 bp, Cannabis indica
atttttgtgatatttaggatattgtcatgttatccatcaataaaaaaaatctagttttgatttttaagccctaggaaatactttagcgtgtctctcatcagaagttttggatattgtggcttaggaccctgtaaagcgtcgagctgctgttccactagggctgaccgacacacgtgagcacgaaaacgaggtaagatttgtgtagaacatacgctatatgcatgttgtgtttgtgattgtatatttttttggtgatatcatagcgacacaaccattgtgtcgatttgacagtacatgtatcatattggttaagagtgatattcttcccagagagtattaattggcgttatcatagagacacaactagtgtgtcagttcggcactacgggcatagtatcggttaagagtaatatcatggctaattgtactcttgggtgctattgatgctatcatagcggtacgaacatagtgtcggtcctgcagtgcgatcatagtgctagtagtgggtgatatcattgtcaatatatatcatcaaccattacgaacattcttaatcattcgattagtcttgtgaataggtgtatgggcacctagacacaagtcgactatatgtgatttgttatatgcttatcttacttagtctgtcgactgatgagtttgctaccttgtgtaggtaaggataaagcttggctggaggagcagtgagtt

SEQ ID NO: 372708 - DNA, 727 bp, Cannabis indica
gggaatgtagcagtctaactcacccatgtagccatcctgatcgagatcctgtaagcgtgcctcagtgacttcggatggagggctcacccacctggcacccagagcatcttgccttctatgagaaaccgcagcagtaagttcctcactggcatagtccacgccctcaaccaagacgtcgccatcagcatcgattagcttcccagcctcattatatcccccgatgtttgggaatgcaacctcctcctctacctccgcctcggaaggactgctaggacgaacatcgtcctgttcctcaatctcctagacttcggcgtccccttcatgatcctcctccttctggacggggggatcttgttcatcacttggtaaggtggcatgccgggccacttgagggttggatgctttgattctacgcattgtcttttttgtacgagccatcatcctatggctagatgaaagacttaagctaaaatgttcgtcactcgaagaggttggactagaacgaagacgatgatgatcctcgtgcaagagttgaagcagatcctggtcgatttggtctttgcttccccaaaactaacctgggttcatctacaaaagacaacacacaagatgagtgtgtggtagggatatcgaacattaaaaacaggcaaatatgtcgactaggagtactcaacgaattaaagaataagaatattcaacgaaagttaaaactcagaagtttgaaatt

SEQ ID NO: 372709 - DNA, 807 bp, Cannabis indica
gttttctatttttttaaaactacaattttttaaaaaacagtttttaaaaatttttagtcaaccgactcctaatagtttttaaaaactgttttcaattttaaaaaacagaaaataatttttaaactgtaaagccaaacagcctcttggtaaactccctgagtaatattttactcaaaatatttcacacgaaattcctcccttcacacaagactaactctcagtatttataggctttgtttacttagttcatcgaagtactcttttatccgattatttattctatcattatgattttcataccaagttgtttgatattttattacttgtatgtgattgtgtatacttgcacatcaaagaagattcgcaaacactattcttgatgtgtgacaataaaaatgcaggaaagaaaaaaaaagaaacaagaatgaaacaaacaaacaaacaaacaaacaaacctcaacacccctcgatttccactcttgcggactgcttgagacttgcattgactgagcaagtgaatcatcgagttgttgaatttgcacaagacacttcttcatccaatagtcaaacataggtttggagaattcagtgttatcacaaatccacaacctcttctttgtacatccagtggcaacgtataatgccttcaactcagccaacaaaatcccatgtttgcactcgttgaaaaagaggaaattgcagtgatgttgattcaatcagatcttgctcattcatgtatttatacataagcctccattgctttctcaaaggggaggatccaaaaaagttgtacagcaaatacatcct

SEQ ID NO: 372710 - DNA, 571 bp, Cannabis indica
tctctctctctcgaaaattcctatggctgctagggttggaatttttcccagtaattcaagtcattctcagctagttgttagtgatctcaagccaaggtatagtcttttaaacttctactcttgttttcttgaattttaagaaatgaatttttgcatgaaatggtgatttagctactgttgttgctgtagttgttagatgatgttttcagaaattaaattatgttttattatgttgaattaagcttgatttggtggctgttagtggatttaaccaagttttgagttttagaactcaaacttggagctttaatggtggaatttgattctaagcttgtagaagtgttttgttgctttgagtatgttctatgtggtataaatagaaggtctagaagatttggttttaattggggttgatttgagtgagttaggaatttttgaagttttcctacactaaaccagaattccggttcagtgggacctgtaggaaccagaattccagttggtccctaggaaaccccgcagaaccagaatttcggttgggaaccggtctaccggttggggaaattttggg

SEQ ID NO: 372711 - DNA, 673 bp, Cannabis indica
gggcacaaaacccaacaggctgaacctctggtctccataacctgcaaaaaagttcttggctttgttgttaagaacataatttgcagatttggaatacccattaagatagtatttgataatggaactcaattcgatggtgaattattcactgagttttgcgagaggaacaagattattaagagcttctcatcagtatcaaggcctcaagcaaatgggcaagtagaagttgttaataaaaccttgaagatactatcaagaaaaagttggacactgcaaaaggtagatgggtcgatgaactaccacaagtactttgggctcacagaacgactgagaaaacagcaacagagcataatccattctcgctggcatttgggtcgaaagtaatgctgccagtagaattaaatattgcgacccacagacaagatttctataatcaagaagaaaacaaagaactcttgaaattgtccttggatctgcttgagaaaaaacgtattgagtcgcaaattactaatgcagcctatcaacatcgagttacgagatatttcaataagaaaatgaagaaaaggctctttaatgtcggtgatttggtgctgaggcgagtgtttggaaacacaagagatccatctgcaggagtatttaacccaaacgtgggaagggccttatgtgatcgaag

SEQ ID NO: 372712 - DNA, 615 bp, Cannabis indica
tctcaaccaaactttatcaaactctccagtacacctatacaatgcataaacaaccatttccaatcaacaattcacagaacaaaccaacaatactcaacttgccattaaagaccaaagctttgaactctatgttcaaagttgcataaaactaacaccaagtatcaaaatcaacaaccagaacctttaattaatcaatattgagcataaaaactgaaccctaaccatttcttaacctaacagcccctaaaacccaatttcacatatttaacctaaactttagattcaagagctaggctaggagttgctagagcttaccttgggtttaatttctagttgaattccttgctgaaacaaagaaactcagcagcaaatctcccttgcttgcttcagccgaaagaggaaaagagagaaaggtttatgttgattttctatttttcttctattttctctaaatgggaaaagcttaaggaaaaatccattttcctttgcttaatttaacttggctaggtgtcaactaaccaaaaagccacctatctcctatttttttcaaatgacaaaaatacccttaaagttataacttgggtatttctaaagctaggggtaaaatggtcaatt

SEQ ID NO: 372713 - DNA, 413 bp, Cannabis indica
tgaacgaatggctcgacgatgctgtaagttatttcttaacataattaatttattgtgtttttaaatgtttatgcgacttatatgcgatttatatgcgatgtttgcactttctgttaaatgtacaccaagaagcatcagttgatagaagcggtttacctgaagagtgtgtgatgaatgaatctcaaataaggcaagtacatactattgaacaaagaactcaggcaacacctgataatgtccaagggatcaaaacttttgagattgctgaaagggtgggtgaagaagctccatcttcttgtgaatttgtcacaaaagatgaattgatcggtcttcttaaagccaaaagagggaagtcatcatcatcgatagcttctatcaattttcatccaccttactgttggaaatattttacc

SEQ ID NO: 372714 - DNA, 761 bp, Cannabis indica
tcatagaagagaaaagataaaactacttaaaaaaagcataacctaataaaaaataaaaactaaatatgtgtcaaagtttaaaaaaaaacaaaaaaattatatatatatatatctatatcggggtcggatatggtgcggatagtattatccccgcccccgccccatccccgcttcgggtattgaaattgtcccccaccaccgccccattaaccactaagatggggaatccccaccccattaggtgcgggtccccgcggttacccatccccgcggtataaatttccatctctagtcttcccctcctcaagattggttaaaattgatttgtaatattaaagtggggcttaatagcatgtgtttagcggttgttgccaggaatcatttaggtggagtggtttgggttcatacgactagaatggacttcactaacgtgctctgtggggaagcagcggcctgctgtttggttttttctgcagcgctggaagtgaatgctaagtttgttattgtagagagcgattcgaggatagttattaatgctctcaatggaaaggagtcccgttgggttattgaaaactatgtctccttttgtaatagtcactcttctttattttctagttgtatcttctctaatattagtaggacttgttattttgtcgcccataatgtggctaagtgagcgtttacccacaagttgtttgatgatattccgttattcaccacccttttaaacattttatgtaatgaccatgaggtctaactta

SEQ ID NO: 372715 - DNA, 587 bp, Cannabis indica
atttattttgcagttatagctaatagctctactaattttctaaagtgaatttaagaaacatacataataactacgatacaatttctattcatggtttacaaataaagatttgaatgattcataaacgaagttaataaaatacatattaattaaatggtgttatgtaataaggtaacaaaacataagggaaaaaatattaataaaataattattttaattaaatatctaaccaaatttaaattcaaatgattcttgaaaataagaaaataaaatcactatatacatataaaagagaagtatgaggtggtgacaacatgatattctaaaatcactccaaaagttctctctttaattctctcaattttaatattttattaaagcataaatctacaaattgatattttactattattttaataatttttctattaaaaaaagcacaaatctacaaattaatattttactattattttaatactttttctataaaaacataaagcataattctacaaattaatattttactattacttaataatttttctataaaaatatagaaagtttaaagaaaaattaaaaaataaaaa

SEQ ID NO: 372716 - DNA, 751 bp, Cannabis indica
tacggaattctacatagaaattcctattgcaactagcgctgtaaccactttaagaaacccaaaccaataaaatttaaaaaaaaaaagttaaaaaagtagtatatgaggtaataaatagaaaagagataaaaatttctagacaaaagacaccaccaatgtcttgttgagacataagtggcgcatataagaaagagttatccccactgaatttatgtttgggttaattaattaattcaaaagataaatatttattaaatttgaatttaaaaagtagttaatgatattttttttgttgagatattcttttaagatagttaagattttcctcaagtggttaagagattctttcaatcggttataagaaataaacatctatgacagaattcaattacattatttatttaaataattaaattatatttaataaataatttaaatttattaattaattaattacataaaatttttattggtttcaatttaaatatatcgtataaacttgaaaaggattaatctgattaatctcttttcaccataattactatagaatagttctttctcatgtattgagaattcagcctagacttttgctggcactcttaggcgcgccgacaaaagtcgaagctgaacaaataaacatgaaacacagcgtttcattaatgtggtaacttttgccagcgcatatctaagtacaacggcaaaagtttccaccaaaattttcacccacgttttcatttgggcgagaagttga

SEQ ID NO: 372717 - DNA, 736 bp, Cannabis indica
attttgccccattgttaatttgtcctttagtggactttatgttgtgaaattatgtgattttaattgctatttgttagctgaatataaagtttagttatacatgatatcttttatttcaaattggaaaaattagaaaagaaaacaaaacccaaatttcctctcaagtctctctctctttcggcctctctttgagcagcaaggaggtgttgttctccttggaatttcaagctgattttagcaagatttttcgtgttctcaagtgcttggtatgatccttgtaactttattttagttttcttggtttttaagaaaagttgagttttgcatgcttgagaatttgtggctgtagttgttgctaggttttaattttattttctgtagtttaattaggtttcaatatgtggattcaagcaagtttttgttggtatttagttgattttaaaaaagtatgaagttttgagctaaatcttgattttagtggtggattgttcaattagcttgctgtacttgtgggatttgtttagtattgttttctgcagttattatatgcatatttgagtagtttaaaccaggtttggttgcttgtaggtgagctttagccaagtttgagttttaaactcaaagcttagagctcacatggtgaattgtgtatttttgtatgaagctcggttttgatgctttggaattgtttaatggggtatttagaacaggtctggagtgttttgtatggtttggg

SEQ ID NO: 372718 - DNA, 503 bp, Cannabis indica
agtaattttgttttttacggaactcgattccgataaaaattgaaaaagatatgagagtttgaaaatcgggtgcacatggctcaatcgcatgcacaccaatcctttggataagatgatacgcgcgctgaagcctaggtgatacccgccgagcttgaccctgcaaatggagtgatacgccactcaagccccctacatatccttcacctgcgcgcccgtaggaggctccttgtgggcagcaggtgatgatgcaccaaatttccgaatttttagggattttttttccaatttcggatttttgctattttcaaaccctaaattaaaataaaatactatttttaaatatatttgaacttaaatatcatattccaaattaataatatttatttatagtaattattatgaattttgatattttgaggtttaaatttaaaaattgattatttattttttaattatggtaagatttaaaaatttgttaaattctttaatatttatatattatt

SEQ ID NO: 372719 - DNA, 449 bp, Cannabis indica
tatcattattattatttttgtttcaaagaaagttaaaagaaaaaaaaagaaaaataataaatgtatgtgaattaaatcatatatatgataatttatatataaaaaaaaatgatatatgataattgaaataaaaaaaaaaatcatataataattaactttttaataatattttatattatataaataagcagatttttttcgttacgctatatttttgcttccgaattaaataattaaagttgttaacttagcataaacatatataatattattatttcattatcaaattatttgaaatttaaatacttcttgattttatttcaataaaaatcaactcattttaaattttttaaatctttttttttttagttagtaattaaaatttttagttaatcctttattccttatatatatataatacaatatcaatcgatttagtaaattactat

SEQ ID NO: 372720 - DNA, 798 bp, Cannabis indica
agatttctaatggtttttcaggacctttttttcttataatttttcgtccccctttcagtataacatgcctctatttataattacatagtcagacagttaattacagagttgactatgatctttacaacatttttcccctaaaattgtggggtttaattacatatcacgtagtataaatgcagttattatttgaatatcacacaactgtgattaattcgcttttactgggtcaaaatgatcgtgtattaaacacattttaagtcataacgctctgggatgcctcgacaggaactcagtaccaatgaccttgataacgagctggagcttttcccctatctttccgaggttgatgatgtacgcctcgttgcctcttcgcttgaaggcataacacttcattttgacaatcgcagctcttaataacaaagagtacttcagcagttatcattcgaatgtcaacttctgctcgagagaattgattcaccaagactaatatcctcactaaaagatatctgaagctgattggcaaaagtaataggagtatggcttcgtatagcgagatgccgtatggtttctcgttaatacgtgaggcaacagtttgtatatctttatctcgcatagaaccttatagtcagcaagttgtaaatatactctgtcactcccgcatttaatgaattattccattaaatgtaattactgttacacgcatcgatccatattcttcttgacttgacacatgtcctccattgacattgtagccaaatttcgagtataacaatattttttctacatacacatata

SEQ ID NO: 372721 - DNA, 542 bp, Cannabis indica
atgacttaaaggctgttacgttgatattccattcatgcctgaagtttccaacaaagaatgggctaaggtgtctaagaggaaatcggcaggttgctcgggaatgttataaccttgccatagccaaggctaagaaggaagtatcctctagccagtgctcggacaagggaaaaaacatttctaagtagggaacttcccaaggcagggatgaagatgtggatcctcgacttggggacccaagcagcaatgttggacctatggaagaactagaagagattgagatcgacctgatattccaactagaaagcttaaaatttgaaaaggtttgttgctcgaagtaaaattagcattgataaaattactgagagacaacctggacgttttggcctattcacatgagcatatggtcggaattgatccttctgtaatttcgcacgtcctgaatattgatcccaacttccaaccagttcaacaaaagcgaaggctgttggacaaagagcgagttctagccctaaaggaagaggtagagaagctacaaaataaca

SEQ ID NO: 372722 - DNA, 562 bp, Cannabis indica
ttcaagctcatcctgttcgggtatacactgacccaccgttacgccaaatattgcaaaagtcaaacgcctttgggcagttactcaagtgggcggtagagctgggtcagtacaaaattaccttccaaccccgaacaacaatcaaaggccaggccttagcagactttgtggtagaatgcacaggcaaggaataaagcatatcggaaggcaacccgagccagtacaaatacctcagccaagtaacagtgaagaccagtcgacttggaaactacatgtggacggattggctacagatcaactatttggagcaggaatcgcccttgtcacacctgaggggcaacacgtgaatgctacagtcaagtttggatttaaagcatccaataatgaggcagaatagaagctttgatcgtcggtctaaagctagcccgggagatgaaagccgaacatattaaaatctgtagtgattcacagctggtggtaaatcatgtatctggagaatacgaggctcggggagaaaagatgatagcatatttgagcaaaatacacgacctgctcacacaattca

SEQ ID NO: 372723 - DNA, 614 bp, Cannabis indica
aaattaacaaaattttaaaatttaaccattaataaaaataaaataatcaatttttaatttaaacctcaaaatataagtattaattataatatattaaacataaatattattaatttgaaaaattaatatttaagtttaaatgtattaaaataatattttatttttgatttatagtgtttgaaattgaaaaaattcaaaatttgtacaaataatccatgaaaatcggattttgggtgttgctgcacgtgcagcccaagaaggctgccaatagtaattactcgcgcacgcatggggcatatgcaacctcatctgccgagaaatcttggcatgttgcagcctcgaggtgcgtaagtgggcgtgtagtcgtgtttgagtgcgagcgagacacgatttcaaacaaaatttgtctaggtcacgcgcgcatgctcggcttgtccgagttgctgtgcgtgctacgtgcaccatctcgacactatttcaaccctaaatttaaagccttcataagttttccaatttttattgaaattgagttccgtaaaaaccaaattgcttaatttttcacaaggaatccaaataaatattttcagaattaaaagaaaaatattttcatggaa

SEQ ID NO: 372724 - DNA, 647 bp, Cannabis indica
catatccaccgggtttttcacaacaaccccgacattcacaacatgctaaaaattcccaactgagttctttggagagtctaatgcggaattatatggccaaaaatgatgcgatgatacaaactcaagctgcctctcttcaaaaccttgagttacaagttggacatttggccaatgaattaaaagctaggccgcaaggttctttgcctagcgacacggaaaatccaaggagggatgggaaggaacaatgcaacgccattcacctaaggagtggcaagaatctgaaaaattctgaggaggaaataaagggtagtggggagcccacttcaatccaaactgacgaaaaattgagtaacaaaactgtccaggaatttgctgataccagacaagttgatacagcaaagggtcagcaacctgacagtcagcaatccgcaccggtatgttctagtcctaaaccacccgttccatttcctcaaagattcggaaacagcagcaagatgggcaatttaggaagtttttggatgtgttgaaacagctccatatcaatattcccttgctgtatcaactgggacatacaagtggaaattaatcacccaagtctattttccaaatctaaaattatcaccactttaatcacttttagcttctta

SEQ ID NO: 372725 - DNA, 1006 bp, Cannabis indica
cgttatcgatgtactatgcattgcctcaggaacgtctctgctgctcattactagtaactcatttggttgtgtcatcgagaccatctacattggcttgtttatcttttacgcttaccaaaaaatttaaggtattcatccactattaatattttattttaacaatattgaatcagaaattttgattttttatgcgtacatgtacttcatttttttttcctaaactcataatatttgatatttttggaatatgacacattttataattttaaaatgcatgagtttagggaaataatttcccccaatagtatgcatatataatcaaatttccctagtgaattcacaaaaattatattagaaacacactgtagtagatctacgatgcaaattcagactgcgaagattcttcttttactgaatattttcggctatgggctattgattgtattgactactctccttactaaaggagatctacgacgccaagtagttggattgatttgtctcgcgtttaacattggtgtatttgctgcaccttttgttaccatggtacttattatatatacttaatatatgaatataatatatatatatttaacttatatataatatatttattaattattaattattttaatataatatatatatgtagagacaagttatcaaaattgggagcgtagagttcatgccatttctgttgtcatttttcatcacattaggggcaatcatgtggttcttttatagttttttagtcaaagacttttatgtagctgtaagtatatcttttttatatatatatatatataaataataatattattactaatttgactaatcatttgttaatatatttgttttttgtcttatattatacacaacttccaaatgtattggggttttttcttcgcattagtcaaatgatactttacttcctgttcaagaatgctaatagtgtaatattggttcacgaggatcagccaaagctagagctagtatgactttatgg

SEQ ID NO: 372726 - DNA, 582 bp, Cannabis indica
actttgcagcataaagattggcttctgtttaatatgttccacccccattttgataagaaagccaggttcatttctttagttttcctgaaacctagcccgcctaaggatttcggaaggcagagtttatcccaagccttcagatgaatgccgtggtttcctttctcaaagccccaccagaagtctcgaaccaaaccatcaatccggttgaccattcgggaagatagtttagtggtttgcatagcatacattggcagcgacaggcccacagattttattagtgttgcacgtcccgcctttgacaaagttttagccttccaaccttgaagctttgctgtgagattgtctaagataaagttgagtcagcgtccttttgcctagatctaaaaagaggcagacccaaatacttaatgcacccctctggatagtcaatgcccaaagcttccttgatatcacgccgcatttccattggggtattcttgctaaagaaaatggttgtcttaagcttgttacctgctgacccgctaaagagcaaaatttttctaggcaactccagaagccatttgcctcgattagattagctct

SEQ ID NO: 372727 - DNA, 626 bp, Cannabis indica
gaaaggaaagtcaggagccttagagacgatcgtgatttgcacgttctcatgataattaaaacaaataaaattgcatgtttattttatttgtttattttttttttcttaacgaaaattgcatgttttaggttaaattttcggatccaaagcaattggcaaggtaaatatggtattttttttaattttttatttttatttttacaccatatattaaaattttctattttgtttttattatagggtaggttttttttttttctaaaatactatatttttttcaggtaaatactgttttggaccctatattttgcaaaaattatagattggaccctctgttttgttaaatgacaaaatagctagaccctatatttcttaaaatagtaaaaataagatcatgagcttaatttttcgacaattttttttaatataaccaacttgaagacaattcttaacatgaacagatacaaaaaatataaatagttttattataacacatttagatcgaattattattaaattttatttttacaaaaaattagtttagagtcctatttgtactattttgaaaaatacatttggtccattttgtgatcatttaagaaaacagatggtccaattgataactt

SEQ ID NO: 372728 - DNA, 618 bp, Cannabis indica
ttgaccaaaagaaatacggacccgcggtctccacgggaacgttaaacgaaggaatcatggcagaactcgccatacttcgaaaagacatcgcccgagtctcccggagacagaaaggcgacgactccgactcagactgtgaggaccgggagccatgtgccaagcacatcctggaagcagagctccccaagaactttaagatgcccgaaatggcagcttataccgggaactctgatccaagtgatcacctgtcacggttcaaccgggtcatgacggtcatgagagtcagcaatgacgctaagtgtctgtgcttcccgcttactctaagcgggtccgcggaggagtggttcaagaaattggagccaggatccgtgggctgctggaataagttacagaccaacttccggagacagtttgtcgccgcaagaaaagtcaatctggaggtcagcgccttgactaacatcaagcagctgcctacggagacactaaagaattacataaagaggttccgggaggaagcctcaaaaaccaagaaagtagatgacggacaacagcttgccctcctccaagcaggcatccgtacagggactccattctggaacgaactacaacaggaaggag

SEQ ID NO: 372729 - DNA, 569 bp, Cannabis indica
agcactttaagggattgagtttcatgttgtatttcctgaggactttgaaacattcgtcctggtcatttatatgccccctagccttcctgaatttgacgagcatgtcatccacatatactttcatattttgttcgatctggtctttgaacattttgtttaccagtctttggtgtgtagctccagcgttcttgagaccaaatggcatgaccttataatagtatagacccaaatctgttcagaaacttataattagtgtccatgaagcttaatatctcgtgtccggctgttgcatccacaagttgatctattcttggaagtggaaaacaatcctgtgaagtcaatacatattcgccattttttgttcggcttgggtaccagtacagggttagctacccaggccgagtagaaagcctcgattatgaagttgttgttgcgcaacttttctacctcttcttttaatgcttgggcctgttccttatctagaagtcttcttttttgttgaatgggccagaagtttggatcgatgtttagggcctgtgaaattatagaaggatcgataccgaccatgt

SEQ ID NO: 372730 - DNA, 554 bp, Cannabis indica
gggatatacctagcagtaatagagcaggccataagcttcgtactaatcagagaagaagacagcatgcagcatccagtctattacgtcagtaaaagaacaatcgaggccgaaggccgatatccgttgatagaaaagcttgcctactgcctcatcctagcaacaagaaagctaaggccttactttcaagctcatcctgttcgggtgtagaccgaccaaccactacgacaaatactgcaaaagccagatgcctctggacggttactcaagttggcggtggagccgggacagtaggaaatcaacttccaaccccgaacagttatcaaaggccaagccttcgccgactttgtgggggaatgcacaggaaaaactgaaagcatcccagaagacgatctcgagtcaacaccacagccgagcaacactgaaaacaagccgacttggaagctgcatgtggatgggttggctacagaccagttattcggcgcaggaattgcccttgccacacctggggggcaacacctgcatgcagtggtcaaattcagattcaaagcctccaa

SEQ ID NO: 372731 - DNA, 525 bp, Cannabis indica
ccatttattaaaaatattattagtggccattttttttttacaaatacaataattaagtgtatgttatagccattgacatagacgatccttccatatgtgcttccaataaaaatatctgaaaaaaaaaattgtgacacatttaggtgacacttgctaatatttttattttttaattacaaaaataaaagtaaaatttatgtttttaaaaaacaaatgtgtttgtaggaatttaggtctggtacatagaaattaatctctgtaattccagattcaagatcacacttaaatcaaaacaaacaaattaagaattaaaaatcaacaaacacatatcaaaccggaaagataaacacaaatgaaatctagatagcttctagacacaacaacacacgagaattattctagttccgatcctaagttcaatgtgaacttggtcatactccagtttgaaagcattgccaacaatttttattgataatgagaattagaaatatcaatttcaggtagctacaaggaaataatcatagt

SEQ ID NO: 372732 - DNA, 607 bp, Cannabis indica
tcccctcacccttgctcttagggatgagctcaaaatcttgcccggttgccggagaaagacaggaataccatccagttgacctccgatgataatctggtgaagtacgggctttacccagaggacttttctcctaagtcagtggcggggaagaaggggaagtctaatgctggccgacctgaacgaactcatccggagaatgagttgattcaactgaagcgagaggctaagttgaagggaggtgtcagggccaagcagtatgctcaggagcccatgaatcctgaagatgaagtcaaggctgaggctgaggctgagcaggtgaccccattgaagaggaagaagaaactcccggccacgcccaggcctgttgaacatgcaattcacataagggagcccatttcacatgttcggccatcttatccctttgctggaaaagggaagactgtcatgtcttagataaagtcgatgttaggtgatgatggacttctgattttctgggcgggcagccactttgcattttgcttctttttcagcttcttgactttcatgatttgtattttttgctggctttttctaaccacgctgtttttgttctatgcagacatgtctc

SEQ ID NO: 372733 - DNA, 823 bp, Cannabis indica
cggaggtcaatcgatttttttccattggttggactcgacgattgaaggctataaagaacgatttgggttcttaatcgctactctccaatcaaaaattgcgatttcagccgcttcagtcgctgagtgcagaggtttcaaatttgtgatttaccaaagacttgtacaacttcttcttctgcttctttcttctactactctttcaagtccggagtcagttcgactcattcacttacaaaatgtttttcgctgatctgctattggagatgaatccaccccagccagcaccccgcgccactactagccccaaggcccgtagatctgactccaaatttcttttttggtatattggacacgagaatcggttagtatctccacgcccaaaacatggatttcagacccaacccaattcaccgtgttcaccattctcatcttcttcctccttgatttcagatagttttttcgttctcaatggattttgtttgttggtgtagatgggaatgcttgaaagaaattctgcttggtgattggactgatgggatattaatgggattttgtttgttggtgtagatgggaatgcttgaaagaaattctgcttgtgtgggaaaggcataacatagtagtaggtacttggctaaataacttctataggaaattgaagaacccagttcctatgtcaccctgtggtatgtttgtgtatatagtatagttctatcccaaatgaaataggagaatttgattgactgggattattatctattttcatttatgaattgggttttgtgtgaattttgattttgaagttttaaactttatttattttcag

SEQ ID NO: 372734 - DNA, 584 bp, Cannabis indica
catagtgttcttcaatattcaagaacaccaccaacctaaaagtttcaaatttccttattttttcatcaaattgaaccaaatcaaagccaaaaacacattgcccatcacctatactacaaaacccaagcctcaaacaatcacattatatcaagaaatccaagaatcccaatcaagcatgtcaaattcggccatagcaagaaaaccaagaaaaagtttcaaaaatgccaccaaaaacatgatttcaatgtgaaaaatgactatggaggagttagaaacttacccatagtaaagaaatgttccaccaagtgtccaagaatcacttcaaagcttcaaaatctcctccaatggtgagaagatgcccaaccccaaaaatgaagagcaaaaaatgaaaaagatggtttttttttttttttgaaatgtgaaggtttgtcatcttttttctcttacatagggaattttatttttgcaaaaagagggccttttaacccaaaattgctattataaccctccactaccattgagggctaatgagcaatttttatatttttgttggtcatttctttgtaaatggttgtatttctttg

SEQ ID NO: 372735 - DNA, 794 bp, Cannabis indica
actataaactacccccaaacacagttaaggcaggggtcgagaattcagggtttcataagaacaaaagagagaaaatctaccaagaacattctctgtaataaatactctcataaatactaaagactcgtggactaaggctcattaatgccccaaccacgtaaaaaatctcgtgcattaaacttcctacagctttctcatacatattataaaatggttgccgaaaaaccttggtcaatattttggtgctttcattgagagctgaaggaagcgtctgcaaatagacaacaaccttataagctaaaacaacaattttggagactcgcaacacgcgtcaaaccccgtcctccacgagacgcccaagatcctgaagatgaggaggtagcttcaagggttaacgtgggctctgaggtaggagaagaaacccacgacgacgaatacggaggaaacttcggcgagtatgacgcctatgacgaaggtagttacacacaactagttctcttaagacaaaaggctgctgatcatgaggctgaaatcacagcccaaaaagaacagaacaaaatgattcatgaggtgatgctcgccatgcagaaagccattgaggcagcagggatacatgtgcatcctaaagccatccctgcaggacttggagaaacaccataagagtcctcacctagcacccaaaagccaaaatctagggaacctagccctataaggtatccctctgaggggaaaacagcagaaaaattctacttccacgcccgggaaaaacgaaaaaggtgcaggatccgcgaaag

SEQ ID NO: 372736 - DNA, 678 bp, Cannabis indica
agtatttggttgtgcagcatatgcacaccaaagtgttgggaaattagaacctagagctatgaaatgtgtttttctgggatatccagaaggagttaaaggctataggctttgggtttgggaacaaaggggttttaaaaccattaatagcagggatgtaatatttaaggaagatatttttccatgtttgcctatttcatctaaccctagtgcaggtacaaaagacactgaaaatgcaggtaacactgcaaatgaaggaactggatctattcaggtggaacaaacagtgaacacacctgaacagaaccagggagatcaggttcaggtggaacctggggaccaggttcaggtggaacctgatgatgataacactggccttattgatgaagggactcaagaagacttgggggattaccaattggtcagggacagaggcagaagggtaccaagacctaatcctaagtacagctttaatatatgggatgaagacattgcatatgcctttatgagtgaattggaaatggtcaataatgaacctcaatcatatgaagaggccattaaaggaccaaattccaggaaatggaaaggtgcaatggatgaagagatggaatctcttaagaaaaataaaacctggattgtggtgcctaaacctaaagacaagagcatagttgattgcaaatg

SEQ ID NO: 372737 - DNA, 736 bp, Cannabis indica
aacttttttgccctaactcgagaaaattttgacttcttgagttctgacttttcttcaaacataattattctttaatctgttgagtactcctggtcggcatatttgcttgtttaccgttcgatattttgaccgagcactcatcttgtgcgttgtcttttgtagatgaactcaggtgagtcttgggaagacggacatcagattgaccaagacctacttcaacttctgcacgaggatcatcctcgtctgtgttctagtccaccttcctctagcgaatgacattcttcaaaccctgtactcagccatagaatgatggctcgtacaaagaaaactacgcatctggctgacgcgtcggaccctcaagtggttcggcacgccactttgcccagtaccgaacaggattcagccgtccagatggaggaggatcatgaaggggacgctgagatccaggaagttgaggcgcaggacgatgttcgtcctggaagttccttcaagaaggaggaagaggcagaggttgcacccccaaactacggggactacaacgaggctggggagccagtcgatgctgacggagacgtcctagttgagggcgtggactacgtcagtgaggagcttgttgcggtggttcctcatagaaggcagggtgccttgggcgcaaggtgggtaagccctcgtccaagattacggaggcgcgccttcgaactcttgaccagggtggatacctgggcgagctggactg

SEQ ID NO: 372738 - DNA, 606 bp, Cannabis indica
aactatgttattgtagtgcattatgaaaacaacaaatagtaataacgattttaaatatagtagtgactataaatgagatacggtgataacaataattttaaatgtagtagcgagtatatataagtagatttgattataaaaacgtttttgaatataataacttttgtttgtttgatatgtttttattgtagtttaagaaaataaaaaattatttaatttaattaaatttaataaatattcattgaaaatatctatgatatataatttaaattttataataatcaacctaaaataagtcattttgcaccgcacaaagaattttccaacccaaattataagttaaaagaatatttcacatgtataataacatcatgaattgtaaactatattttgctacctctagcaattaatgatatgattctttaaaagtttgaacgaaaagacatgtttttgactttatagccgcaacttatgactcaaaataagcttataattcatatggaccaatatgtgaggttcaaagaattttcctacccaaaataaaatatgagttgaagaatattcatcaaaaaaaattataattataatacgactgtaatattttac

SEQ ID NO: 372739 - DNA, 701 bp, Cannabis indica
cctagctgcttagggatttcgtgagagagagagagaaagaaagaaagagagaattttcctacttttttctaaattttctatttttttaaaaaatgaataaataaaccttgttattaaaccatttcagccaatataacttaaaaaaactgaatttaattaaatcaattaaaactcacataagacaaaacaagaatgggcaaaaagaccattttgccctttccacactaaaaggcataaaaggggtacttaggggtattttggaaaactctaaaattttgttaattcctgacactccaaaattctaactattgtcccgctatactaaaaatactaagatgtgattcaaaaagccatacaccgcgttccaatgttgccgggcagtagaataagcaaaattatgaaatttctatatgtgacataaaaatgcattctgaattcaaataaatcatcataatttaataattaagcataaataaataattctcataattaacgcctgattatctgctaatttctaaattaaagctaagcggcttttacagtaagcctcgtttacagcaactacacagaaatcaaaatggctagtgacggctccattataaagaatcatattaatcaaggaaggataaagattaatctcacctaactgtaagatacctacagtataggttatgcatgccctattttgtactttataggaa

SEQ ID NO: 372740 - DNA, 803 bp, Cannabis indica
tagttgtcatgagattattttttagtttaccttctttataatgagagtcatatattactcttattctacatggaaaactgattacaatgtaaggaaggtatacacataagttaccacctacaactaattctaactaacattaaaaagtatgcattattttatttaacgtgttaaaaaatgattttaaaggtgtcaaagagatatgtgcctgaacaaaaatcttccttcactaatttggaacgatgttagagtgacgaggagaatgatttctaatactagcccctcatagaattgtaaccatttacacaactagttttagtaaacaagctagctgggactacgatgacagtacatttttgtcatcatacatacacatataccaataatctttataagcgttatagcagtatcttgattttttatcattgtcatgttgggattttatgccctaaataaaacctatttcaatataatctgatttgttatcaatagatgattagaaatcatttatggttacatgtagttttcatgtttatggtttaaaatatacaatttatgttaagtccagaagatatagttatttacaattacagtgatgtcaacacagtggaaggtaattgtgattatatgcttcaaaagataatgtcccatgattcatcagtgcactggatttacagtgatgtgatagtcagcgataaagcttacttacaccttggataagtgatatgttctttccagaatattgacaaagtatgctagtatcagatgtatggagtatacattggattgggaccgatattgat

SEQ ID NO: 372741 - DNA, 551 bp, Cannabis indica
attataaaaaaaaaatagaaaaaacaacaaaaaaatttataaatatacagttgtatgaaattttaaatatttttacaattttaaagattttatttatataaaatacttcttttgatatttttcttatgttgtacttttgttatttagtttttaattttttgttatttgtatgttattttttatgtttttttcttattgttttatgtagtttttttttgttattttggtgttatttttatgtacactataaaaaggtaaaaaaaaaaaaaatctttaaacgtaaatgcttacaaaatttgctaaaaataatagtttatgtaaaattttcaagcataatttattagtaaatgccatgcaatatttatattgatatttttcaatctaatacattagttagccagcatttagccacatcttgaaaataattttaatattcctgaagtatctcttgtgctgttttcttttggtcttgcattttggtatttcagtctcaatttttcaatctaattaattttttttttcttctttcatacaatatttaagtgatattc

SEQ ID NO: 372742 - DNA, 503 bp, Cannabis indica
acgaaggctccttcaactggaacgtcactattctaactgaagatatagagagtgtgtatatggcaactgagtcgttaatttcgtacaagaagcccgggcccatgaagaaagataccaacaaaagggacatgacaaaattttatcggttccacggagactatggccacgacacgaacgaatgttataatttgaagtgggaaatataatatcttatcaaggaaaacaacccgcacctacagaagtatgtcaagaccaaccaaggtgaaaacaaccaggattgctacctccaccagtagatggacacttgcaagtcattattggaggcccacacattgctggagatacgaccaaagctcgagagagatatgcccgaacagctcagtatgagcaagaagaagtcatcatgtcgtggaagagccaaccataactttcaacgatgaagatgctgtcaaggtcagatttccgcacaacgacctgctggtcgtggaagtccagatagcaaa

SEQ ID NO: 372743 - DNA, 608 bp, Cannabis indica
accatgggaatgcatggtcaaatccctaggtgctatagggattttatatggaatgtccttattgcctcttgactgacgtgactcttcgcagtgtagccgtcaatagacttaagtgatcatagccttgtaggtgcagatcgggggttgtgtcgtcagactttattgcgtgtggcagtcctaacacgtttcctcccacgcggtattaaatgcgagatgactgctcaggggaaacctgacacctcgcggagatgctttgatgctacttaggcctccgggagcacagggggcttcgtatgccttctctaggaggcaggtcccaaatgctgcctttcttcataaagacttagcaattaatttaaatgttaagagcttttggtccacgtgtccctgtctggttggtccacgtacattgggcagaattaggggcaacagtaataattacaaaaaaaaaaagaattgttttaaagtgtaaaaataaaaaagcccttaaaattaatttaggaaaattaccccttatactattttttaaacctttttctttttttgtcaaatttacggtttgagtttctaaagtggtttctctggtggtttatatatgggttgagcta

SEQ ID NO: 372744 - DNA, 1130 bp, Cannabis indica
acgaaaaatatgcgcaagaaaagaaaaacgaactataaaatctggtatcttacataattaagaaccccaaacgaaaattgactaccggaaaagagtgaactagttcggtaactatacaacacccagtcgatacaaaataaacgaaaactaaaacctttcttctcaaccaaacatggcaaaacaatggggattctaactttctagggttcgaagatgaaacaaacacttaccccggacaaaattgggaatcgcactgaaactcgaacacgaacgcagcaaagattagggttttcaatttctttaaaggcagatatcgcaattttgaaagccaatggcccaaaagatatttcgcgttttttcaggtttcgggagttaaagggatattttttctttatatacaatttattaatttgtctctaaattattacatatttttcagttttgaccccggaagtttttttcttgcattacaaaaacaatcttctttactttttttttctttctttcttaacagcaaaaacgttttttatatgcctaaaaaataacgattcatttttaagaaaaattacttttttaaaaaaaactcaaaataaaaaactatttcatgaacttacaattcatttttttaccgttactatttcatcaaattttatatatcttaaatttgagatgtgtataacggataaaaaaacacattatttgaaattcaggatgaaatttgaaattaatattgagatttgtgaaggataatagtggtgactataagagatacggtgaagacaacatgtaagatattgtgatgacaatcagtgagatatgctgatgacaatgggtaagataaagtcaaggtcggtcctagtggacataggaaaaaaaatatttttggacccttatttagaataaaatattatatttttcaaaattagtaaaaaaaaatatgtacttttaaaagaggacaaaaattttttggccccaaggttaggtgggccctaggcacaggcttaccccatctatgctcatggtcgagcatggatgagatgataacaacggaacatacaatgatgataacaacttcgaaataatcgaaatataaaaaaaaaaacaaaataacattaaataaaaagaaattg

SEQ ID NO: 372745 - DNA, 651 bp, Cannabis indica
tggtaaaataatttccaaaagttattacatgtgtgagcactcctccacttatccagagattcatgggttgtcagtgtttaactcattaaaaaaataatcgtagttacctcaagaccaactctacaatatttgttcagaacttgagagtgttgccaggtctgtgagctgcaatttattaataccaacgaagtaccaacaagctttactcaatgcttttattcattacatattaaattcaattacctcactgtgagctaagttgaaagaaaaaaaaagcatagtaattgcaaatttttatttttcatcaaagcataggatttgtcattctataaaacacatgattcaaaaacaaaagcattaccttcattcgaattgtttagaagtctgggacatcgttcttcctaatgtcccttctcattacaatttgaacaatgaagagtactaccatcaattgtacttaaagaagcaacattgttagaagcttcattcttaattcttttcctctaacacaagtttgcaaatctgggggccgacattgcaatcaagttccgttcataagctcgcaattctgcttctagcttatccatgtcggaagagttaaaattgttgatcatataagatacaacaaatccattatacttaggaggaaga

SEQ ID NO: 372746 - DNA, 575 bp, Cannabis indica
ttactaaaattagataaaagtccttgaatctaacaatcttaatagttcagggggaatttttaaccggccaaaataattcaggggggcatgatttagtacatgtcaaagttcggggggggggggtggggggaggaattactaattagccttattaaaatcataattaatttaaatattactataaagtatactaaatgaaactattttatatctatgcttatttgttatactatacgaaaattaattagttagtaccataaccttaaaaggtaactaaaattataactttaaaataactatttagcaatttaaatgtttatcaattttactaataagttatgtgagttgtttttttttaactttattagtttattaaatagacctaaaggtaatataaatacttttacaaaagcaaaataaaaaataagtagcgtaaaagtatttaaaataaaaaatgaatttaatataatctaaaaataaacacaaaagtttcaaagtaacaaaaaagtgaaaaagtatataaaataaatgataaataaaaatagtaacttattatattatatgacaattcatta

SEQ ID NO: 372747 - DNA, 533 bp, Cannabis indica
atggatcatgatgaaaaaatttgatctaggttgaagacaaaggcccaatatagggcccgatggccagttaatttttggaaaaattgacaggccatcgggccctatatcgggcctttttcttcaactcagatctaattttttcttgacgatgcatcgggcctacatcgggaatgcaacggacctgaatcgagcctgcctagaaaatgtattttccaacccaaaaatcacaaattcaaatctaaccctaaatctaatccaaaacgctcataccagaccctaaatctatcaataaataatattttaaccctaaatcaataagaaaaatattcaaaaataccatagggagaaatcttaccttggtggttgttcgtcttcgtggtgggtcgactgggtggtgggtggagtgggtgttcgtcctcagatggtgggtcgagtggtgctcagatagtgggttcggtggctcttttccttcgtggtggtgggttcggtgggttcgacagagttcgagagaaagagagaaaggggaggaagag

SEQ ID NO: 372748 - DNA, 964 bp, Cannabis indica
aacctctgcgattcttctttatcatgtcttcgtgcggttttacagccataattcttgtttctaaactacataacgtctggctttcatcttgcttattctaagcttcatgagctttttttccctaactcaagaaaattttctacttcttgagttctgacttttctttaaacatagttgttcttcaatctgttgagtactcctagttggcatatttgcttgtttatcgtccgatattccgaccaaacactcatctcgtgtgttgtcttttgtagatgaacccaggtgagtcttgggaactcggacattggatcgactaggatttgcttcaacttctgcacgaggatcatcctcgtctttgttctagtcctccttcctctagcgaacgacactcttctaaccctgtacccagccatagaattatggctcgtacaaagaaaactacgagtctggctgacgcgtctgaccaccaagtggctcggcacgccgctctgcctaacgccgaacaggatccaaccgtccagatggaggaggatcatgaaggggataatgaggtccaagagattgaggggcaggacgatgtacgtcctgacagttcctccgaggcggaggaagaggcagaggtggaacccccaaattacggggagtacaacgaggcttgggagccagctgatgctgacggagatgtcctagttgagtgcgtggacgacgtcagtgaggagcttgccgtggcagttcctcatagaaagcagggtgccttgggcgccaggtgggtaagtcctccgtccaagattacgaaggcgcgccttcgaactcttgaccagggagtatacctaggcgagctggactgctacattcccgcccacaacaatcgtgccacaaaccctgacaaggggatgtgcacctggtcgggtgcccatggttagcaggagcgttgaggcccttgcataaatacttcaaggatgtg

SEQ ID NO: 372749 - DNA, 592 bp, Cannabis indica
agagtagtaacatttttttgaattaattttttaaccttttaattcaaaaaacatgctctataaatatttttaattttttaattttttaattaaaaattaaaattttgaaaataaaagaaagattcattacaaatttttttttacttttagtcacaacaaaacttgtgactatatgtaaaaaaattgtgactaattataaattatcattcttatactatgactaaaaggttcgtgactaaatgtattagtcacaaaaaatataatttgttgtgactaaatatatttttagaagtattgtgactaaaactaattaattagttacaacttgtatctaaatactatattttagtcagaagtaatattttgttgtgactaaaaatcatatttagtcacaaaaaaaaaattatgttgtgactaaaaagtacgttgtcactaaatgtaagaatattttgtaattactttcaaaaaaataaaatttcaaaacaacttttttttttcttaattaatattttgaattccaactccaacctatctagaccccggtcgtaaacccagacttggaccccagtcccagccccaaacccgaactcga

SEQ ID NO: 372750 - DNA, 401 bp, Cannabis indica
tcatagataagtttttcttcatattttaattcctatataagtatatattttgaaattttagtttttaaatttggtttattttctataagttaattccttacctcatttatcttttttggtattttttaggttgtttatctatacttttaaacacaaaaagttcactatattgcaaaagacctgaactcatttgttacttctaattagtcattcaagtagaaactttagtcttaatgatagtgttgagttggtttttacatgttgttctttctttttgttatgtggagtctgattatttagctttggtttctgttttttaaatgcattttttctgctgaaatgaagcttggtttctttagatttttttgctagtttgctttccaatttttctaatacatccc

SEQ ID NO: 372751 - DNA, 783 bp, Cannabis indica
gaataaaattagcaccattcaagagtttacaatccaagcaatgtgtttaaatccatgttgaattttgtattattatactttttcttggcgtgtgttagaaacaattgactatagtaatgtgatacactacacaaatctctagattatttagactttttcttagcaataaattattgaaacctttattatactattttctaaaatatactttagacaccttatgatttttaactcaagtctaaaacgttcaagaactaaattaaatcacaatgcaacgttttgtactattttatgttgtgctataaatttattagagtttatgagttatgcattattctatctttgattttttaacatatagaaaatagtctttgaaccatttgtaaagtagtcattctattaattttgtcacgtgtaacaaataaaatgttcatttaaattaaggagacacaatttcgataatagtgggtaaaaaaaaataaaaagaaagattgcagcgtaaatctctaaaaacttcaatttgatgcaaataagtctctcatcttaaaaattggcggtaatagtcctcaaatttactattttcgtaagtccgttaatcctcttttctaatatatttgtttactaattaaaaatgacacatgttgacaaattattagttcaaattataattttatttaaaaaatttaaaaactaaaataaattaatttttgaagtttcttcttgtataaaaaaaaaattaatttaagaaactaaaacaaatttaaataaatttaatatttttag

SEQ ID NO: 372752 - DNA, 353 bp, Cannabis indica
gcacttcagataaaaatcgtgcagcttcttcttgagtaacacatctgagcaacaacatggagaaacctcgtctgtacataattccctgtacaatgatataccgtccagccttccttctcatcttttgagcttcatttcgattatctgggagttccccagtgttgaggtaggctgctgttatcgtcatctagtttgaggaagtagcaatcatttcgatctcttccatgccagtaatgctaggctcttcgaagaactgaataggaaccaagtttgccttatcacttacattactgcttgccagtctagctaacgcgtctgcagtcgtgttttctcccttggaatttttctgagac

SEQ ID NO: 372753 - DNA, 548 bp, Cannabis indica
ttaattcatttttttttttaaaaaaaaaactttagcaattagcactaattgtcaaataaatataatttcaaattcatgaagaaaaaattattttataattctttttatttcattctgtgaattgagtctggcttagtaaaactaatctaatttgactctcccggcttgatggtcagaattaataagcccaataggccatgaggatagaccgacaagaacatgacatgatatttcttcatatttgatgattagtatttaagggtacttttggcatgttgtatgtataaagagtcgtgaattttgtattacattaattattacaattataaattttgatacaatacgaattgtattattctaataaataactaaaatagttcacatagcttgtattgtaatatttggaactcatgttgtattgtggtaaaatcggagttgaggttaaggttgttgttcgagttaaagttggggttgagggtctctagggctgggtctggggatatctagtgtaacgccctgtccaacagggacgccacgtgtgtgcaatt

SEQ ID NO: 372754 - DNA, 735 bp, Cannabis indica
attttgtcggttatatttcacttattttttgagacataatgttagtataccgagttttgtaggcaagtgatattagtccgacgaaccgataatggcaatagtagtaaaatattgtaacaaattaaaaaggtttagtttagaagggtgactcatgtttcatgtgggtgtagtttgtggtgatgatgattacaacaacttttttttctatttgatagggttggaaagaaagaaaagagtaatagtggaccaaaaccatataaaaggatgatgagttttgggtttttagagttgtaaagcaaaacaaacaaagcatgcactctgacattttttttctgacaatcacaaaactcactagtaccatagtggtcccttctcttagggcatccaaagtctcactcaaattatttatttgtttgttcaaatttaagttcttttgttgttgcctccccttatggatttcaaaattgtaaaattatttttgagaaaaagattcaattatatttatagatactattgggagcttttaggcatgggtcaccctaaaatttagtggatcataagaataaaaatatttttgagtccttatttaaaaaaatatagtatttttcaaaataagtaaaaaaatatgtattttcaaaagaaattttttttttggatccttgagttaggtggaccctaagcagaggcttagttcacttatactaaaggtgaaatctacttttacggtgcatccct

SEQ ID NO: 372755 - DNA, 505 bp, Cannabis indica
tccgaacccactatgtcccaacacttctagaaaaaacccagagtcataccatctggaccaggagacttgtcaggatgcatctagaaaagaccctttctcacttcttcaatagtaaccggagccaacaaatcagtattcatttctgaagtaatagcaggggcaataccatcaagaatatcagtatgaagactacccaaagtagaaaataactcagtgtagaaactgaccatatgatcacccaaacccgactcccaatcaagccaactcccatcctcatcttgaaacttatgaatcgtattttgacgtttacgagcactcgctgaaacatggaaatacttactatttctacatccttctttgagccaaagttgcttggagcgttgtttccaaaacacttcccttttagtaagcacttcaaaaagatctttttccgctatgagatgggcctcaacaaacacttcatcattcttccctttaaatcgccgaatcaagctcttgcattcag

SEQ ID NO: 372756 - DNA, 719 bp, Cannabis indica
aatattatcttacctttaaataacatctattaggacaaatttaatgctaattaaaagttaaatttagtattaaatcaacactaaaaaaatataattttagcattaaataattttttttctattccaaccataacactacaataaaaatattctttattattatattattttattaaactatctcacattatataatatattttatcataaatacattattttaataataaaaactaatgtaatttatagtgtctcactatttttatttaagtaattttatgttcaaactccactaatttttagattttatgtgttctattggagaagcccttagaattaacattattattaattctaatataattataatcttacacttaaaactttgtttgatgtattttagaatctaatgattaaaaattatttgataaaatgtaacaaaaacatataataaaattagggaatcactttatataccgtttttttttttttttaattttaactttaatttcaataacatcataagttttttggtaatatacagtggtgtaggaaatccttcttggccgcatgttggcttgtcacatatgatttttccatcgcgattgtataaatctatttttttatgacatgcgtcacatgacatgtaataaaaattctggagagtatcagttatttttattgccgcctcaatccaaaaatattttttctacatccaa

SEQ ID NO: 372757 - DNA, 521 bp, Cannabis indica
tttgtaaatcaatatctaatttcaatatatttagggtaaatacagttttggtttagaaactattgtgggtgaataattttccattaaatagatcaatatttgggtgattgatgaccttaattttacccaattagttatatttgttgacctcgtttttagtcaacgacaatgagtctaatttgtaagcgaaaaatactataatacgagtgtaatataataaagcgaataaagacacaagaattttatagaggttcagccctgaacagttcaataatagcctaatcctcgtagtttgtattaacttaagaataaggagaatggttccttttcttggagctcttacaatagtatttctgaatatgaattcttagacaaatgtttcgaccctttgcctagtgaatatgaatcactatttatagggctttaagcttgtgagggaagttatatcccttctggttacaattgatataagtggaaagattgcatagtaaataagggagtatttcccttctggttacaat

SEQ ID NO: 372758 - DNA, 874 bp, Cannabis indica
ttctgtaacactcatttggctgagatattgagagatggcaatgattctttagtagtgtttggggggcccgtaatgatttactttggaatgataaggctgcttctgtggaaaagttatttcatctgcaattacgtaccttgaactttagaagtttgctcaaaacaacaatggaggagtttcatcttcttctggtcagcctcgtgctggtgttgagcattggattaaaccgtctttgggagagttgaaggttaattgtgatgctgctcttttttctggagaaaggagtcatgggttggggtggattgctagagatcatgctggtttgtgtctttgctgctgctgctgtcaaacttcgaggtgaaattgaccctgttgttgctgaggcgttgtccatgaaagaggctttgagttgggttaaatcatgctgggaagaaggcagggctgctgaggacttttgtcctacagcggtgattttggagtcggattgtcttgtgttggttaatgctatcaatagcaagagccaaattctttctcctcttggtcttattatttcggattgtattaatcttatacggtccttttctaattttcatatttcagttcagtttgttaaacgatctgggaaccaagcggctaactggttagctcgttcttctggttcatgtcctgatcgtatttccagtagggggtctgtcccttctggtttggaagctattttgttagctgatttgctttaatgaaagttgcaatctttgtttcaaaaaaaaaaaaaaccttagatttaaaatattaattatcatcttcctaaaaagctaataaaattatcaatgcatattgaattaagttttattttttggcaattttattatgtgat

SEQ ID NO: 372759 - DNA, 557 bp, Cannabis indica
aaataaaaagacaaagttatcttttaatttaaaatatgttaaatatcaaaatatctaatcttataattaaataatatataaatattaaagaagttaacaaatttttaaatctgaccataataggaaatatttaaaattggaaatattccaaaatggaaatatttaaaattggaaaaattccaaattgaaaatattttaaaattggaaatatttcaatttagaaatatttaaaattggaaaaatgaattttgggaaacaatcccatgaaaaaattgaattttggggaaaaatcccacaaaattcgagatttaggttggctgcccaggaggggctgcaagcagcagcccaggaggctgcaaaagcccctgtacgcgcgcggaggaggagatcacgccgagaaacgtcggcgtttgcagggtccctgaccgagaaagctcggtcagctgcagggtgatcagggccagtcacgcgcgcggatggggaaggtgtccgagggtctggtgcgcatgagcaccaccctcgacaccatgaaatcccaatttttaaaaattcatatc

SEQ ID NO: 372760 - DNA, 562 bp, Cannabis indica
tactatttcagtgattgtttatgtattaaaccatgctccctagactttgatatctactaaatcatgtccctcaaactttgatatgtattaaatcatgtcccctgaattttcatccatgttagatttttttttactaaaattagacaaaagtctttaaatctaacaatctcaatagttcagggaaaatttttaaagacaaaaaaagttcaagggttattatttggtacatgccaaagttcggagagaaaaattactaattaactattttttttcttttttgtacaaatttcttactacgaaatttgatggaataagaaataggggactagtttgtgtgtcattttgaagtcatattttattgcgtgatcaaattaaattggttaggttaaaatgatgctaaaatagtagtattagttttttttatttttgttgtaaatataaaaataggtaatcactttttgtaaatttaaatgtttgatttggtacgtttatattggtccgaaagaagactaccgtgtgtgttgttctgttcttaaatcgtaagaataagtaataatggaaa

SEQ ID NO: 372761 - DNA, 684 bp, Cannabis indica
atttttgtggtagaaaaggacatatcaggcctaaatttttcacgttgcaaaatatgtttaaatcaaattattttggtaatttgaaaaaatctcaaaagaaacataaatgtttgaaactaaaatgtgtgaagaaaaattgtctagcaggtttctctgataaaagtgctgcatctcaaatgaggtattttgatagtggctgctctagacatatgacaggtgacaaagactttttaactaacattcggcctatgcagtgtggggaagtcactttcggcaatggcttagctggaaaagtcattggtatgggaactctcaactttgaagggttacccagattgaaaaatgtgacgttagttgaagggctaagggctaatttacttagcattagtaaaattttttaccaagggtattctatctcatttgacagtgatcattgttatgtacttaatgatgataatcaatgtattttgccaggatttcgatccaataataattcttataccctaactcttgtgtttacttgtcattcagccatcaacaacaccaccgatttatggcatgccaaactcggaaatattaattataaaaaatctaaaaaaaaatttcaaatgctggtactgttcgaggtctacacaaacttggtaaagaaagtgttggtaactgtgaaccatgtcaacttagtaa

SEQ ID NO: 372762 - DNA, 771 bp, Cannabis indica
tttattattaatattattttattttaaaataaatatataattaaatattattataatatgtatatgttttaattgtatataagcagtcttatcgtaagattgtacaccttatatcttaataaatacattatctaaaatcaatgataaaaaacttctccatcagtagggaatttatgctaagtcttaccatattctttgccctatatatatctattctatataaagtgtgtctatataacagaattcttggtttatgagaaattcatgggtgactttttatttatattaaaaataaaatggtttattattaaaaataaaatggtttatgagaaattcatggatcactttttatttatatataataaaataaatcccattaaattaaaaaaaaatacgattgggtttttgctgttgtacatctacgattgggttttctttaattatttattgtattccttttcctattacaatttggacattcccatgggatcacacataatattccaatccgcacttctcttttttcttcttcacaacttaataacaaaatatataagtaataataataataaaaaagaagcgtgacttttatcaaagttcacaaaaccaagcatcatggtcggcccaaaggctgtgcaaccagatcaattgcacaaagcccacataataaagggccaatctgaatttttgttttgtttttgtttttttttttttttttattttttaaatttgtatttcttcttatattgtctcttaaatttccactttctt

SEQ ID NO: 372763 - DNA, 771 bp, Cannabis indica
atttttttaataaatattaataaaaatttacttgatttaagttggtttaaaattaattttcaagtttaatctatttttcaaaattttaaaatatttgcatttaaataaataaacacaattcgaaattaggtgggaaatgattaataaaatatatattaaaaattattctaatttaggttgatctaaaattaaatttgcaacttaaatataattttctgtctaatcaaaattcctgaaaataactaatatttaagtgtctagaaaaaatcaacttaaatatttattttctatttagtaaaatgtatcaaataaaagaacaaattattaagtatcttgaataaaattaacttaattattaattctaatttaatatctacgaaaaatattttaatttaagttggtctaaaattaattaaataattaattttcaacttaaatatatttttcttattaattaaatattaaaaaatataattaattactagaaataactatctagaatatatctcattaaactaagtctttttctaaaattaattttaaaataatcttatgaaaaaaaaatcatatatttttaaaactaattatgttgctaattcaattctaattaggttaaactaatataattagcctaatacaactatataaataaggtaaataggctttcataattgtggtagtttgtgtgagggagggttgggttcagtatgtcgtacccactactatgaccccctaactctcacacaaggcccaaaggggaggagtttaacc

SEQ ID NO: 372764 - DNA, 533 bp, Cannabis indica
ttttacaaaagttttgaatcaaaattatttttacattgcaacaaaaaaattatcataaaaaattataaaaaacacatacaaacataggtctaatatatacactactgcaactgcaagcacgtaaaaataacaaataaaaaatatataatgggtaattctactgtaaaacccttagtttgtacctcatggcatagtgtaatttttttggccaataagattaagtcaattaaagattacattgtatagtagtgtgtaagtacacttgtgattttttatttggtaaaaaagtggtcgctttataaaagaaattatttaaaaaaatagattagagggctgctttaactttgttattttaataatttttttttgttattaaaaaatatatatgttaaaaaaacatataattttaaaaataataaacaaaattagaatgtgtcataaaaattatattatgttcataaaaatgtgttagcatgtgtaatttatgacatttggctaaactaaaatttatgtataaataagaaaaaatgtat

SEQ ID NO: 372765 - DNA, 794 bp, Cannabis indica
gtccaaaatggtatttacccacttttaaataataatacttataattaatgtcatattatcttttttaattcatttacaaattattttttaatttaaaaagtaaaaatattctttattaaaaaaaaaaaagtgaaatattattaaccaaaaacatgatcctttttaaaaatagtaaaaaaaattacttacaacaaatttttaaacaacttttttatttaatattaccgtactaaaatttaacttaaataaaattaaaaataaattgcaaaacacttttgtaacaaaatttttaaaaatgaaaactctacttttattttataattaaaaaattaaaaaacaaaaatgatatcaccacctaattaacgagaaataattatatttaataattaatttaattggtttttttttttaataattataaccaaaatccagaccaattcaattagattaaatgggtcgttttgaacttaaggacaggaaattacgactttgaccttgaattaatccattcaatagtttgcgttaaatgttgttcaaaagatatgataatagacttttatggatcattggttgaaaactgaaaaattattttatgagtaaactagggaatggtaccgcgcttcgcgcggttttaataataattgaaaattatacatattaaaataattttatattttatagtaaagtttatatattttatgattgaaattcatgattaattttacagcttgtacaatttaaattattataaaaataaattagtaagtatttttttctcctgatttaaaaaaaaa

SEQ ID NO: 372766 - DNA, 617 bp, Cannabis indica
tttttacagaattttttttttctcttagggacagtagttatttataagttgttttaaaaaagactattgttttcacgtatcgaagatattgtataatgctatggcaatatgaaaacaatatttgttgtttattttctaaaaaataattacaaatttgtaaaaatgtaaaaaaataaaaaaataataataataaaaaagtctgtaaaaaatataaaataaatgtgattttagatactttctgtaaattttcctattttaatttaacataactatatattgttaataaatcaataataacaaaatgaattgttaaccatttatatatatactaggtgaatgtacgtgccgagccacgtattgctagttttatttaagattttggtatttttaagattttgaatgtattttatttttaaagattacaaattttttgtttgaaaaaattaaatatttatatttgaaatattatttaataatgtattaaaaataatattagtgtaattataaaattgtaaataaatttattattggagtagtagattattctatttagttctttttttaactataacattgtaatgtaagtttatatctataaatattctgtaaagtgttaa

SEQ ID NO: 372767 - DNA, 576 bp, Cannabis indica
atttatatattttttttacaaaagtacgaattattaaaaggacaccataaattatcattataaaggattaaaaatggtaaaattaaaaatatatatttaactgtaacaatgttaaaattttgaaaaaaaaaaaccaaatgatgttataaatttagacagatattagtaataaactttttattcattttttatcttcactttgctttgtattctttatcaaagttacacatatatacatggtcgtcttaaatattttagaggcccggttctaatttaaaatttgggcctctagaaaaaaatacaatttgtaaataatatttttaaatattatcattcagttaaaaattccaactatttataaatattgttattgattctaatagaacaaaaattcgcacttgtgcggattggattggattagaaattttaaaatccgcacttgtgctgagtggatgttgattgacatgtaaaagtaactgatccaatccaatccacacatatttataacaaaattaaaaaattatatatacaaataacattttaatataaagaaaatagtaatttaaaattctaata

SEQ ID NO: 372768 - DNA, 850 bp, Cannabis indica
cgtgatagtcatggtaagcttattgaagctatctctgggagtagatggggtttgtgtgtctgcagagatagctgaagtgattggtatcaaggaggcgcttagttggataaagcgcaaagggtgggatgcggtggtacttgagtctgatgctttggttgcggttcaagcaattaacagctcaattcatatgccatcccaattcgggttgttagttgaggactgtcgtactattttatctactttaaataatgtccttgtctcttttgttaatcgttctgcaaataaggctgcccattgtgttgctagggccacttatttatcgtcagatcgaatgtttaatgagctgaatgctccttctttcttgtgtgacattgttcaggctgaggcctgaatttaatgaaactttgattaacaaaaaaaaaaacataccaaataattatttattaagaataaaaatctcttaaaactaataacactaccaaaacaaaaataaatggctaattaataaaagcataatttactacaatcaatcacaataaaacattgtaacacaaaaattgttaagaaataaatatagtcaaaacaaacaattaagataaatcaatatatatataaaagagaggtatgagacggtgacatgacactctcaaattactctaaatgcttttatctaatctctccttgcttttctcattttttaattttttatttgattaaaaaatatttaattattcatatatgccgaaaaatctttctccaattatttatacacattaaaaatacacactgtaaattcttaaaaaaaaaatacttataacaaaactaacatataaatgttgggattttatgc

SEQ ID NO: 372769 - DNA, 667 bp, Cannabis indica
ctctttttatatgtattgtacccaaataccttgatataagagagtcacatggagagaatcttgaagtgtcaaaggcaacattggtacaatatttaaaaaaaataggtaaaaatgatagactttaaaaaaaatggtaaaaataaaagaggacaatataaaaagggtatagagtgtaatttcctcaacaaatagatcccaattagcttttttttttgaaaaatgcgtttataaataaaaaaaattggagttagacctcatggtcattacaaaagatattaacaggtatagtagatatttctaccatgcccgtaacattgtgggcaaatgcccatttagccacattatgggccgcgtagttacagtttctagttatataagaaaaattacaattagtcataaaagtagagaggagtttgcaatgacgcacatagttctcaatcccccaaatagagtcatccccttttaggttcttgataacaacatcagaatcactctccactaaaacaaaaggatgatgtaatgagaccgccgtctccatggctaaaagacaggccgcagcttctccagtgagtgggtcagtgaattgtaacctttttgccgccacccacaaaactgattcattatggtctctcgcaatcgccactgcacacatagtctcacctccgac

SEQ ID NO: 372770 - DNA, 602 bp, Cannabis indica
ttgataaaattcgatgcatatgacaatccatccatctaatttaaattaaccacaaaatattagatatctaattgtaattggatcagattgaatattatttttaaatatgtaattagattagatcgaatattagacggagtgtccaaaaattcaatacatctaacacctaataaaactaattactagcgttttcatttaatttgaatgaatacttaattagattttttgatgttatacataatttataatatatatgaaaattaacattaatttttttatccaatttattaatattagattgatctgattgaccaataaaaaaatattaaatctaaaatattagataaactcaaattagactaattgatatatatgaaatacatttagggcgcgtttggaaagccacctgggaattggaattggatgtaattggaggtaattacacagtttgacgtgtttgcgtggccatgtaattacatagtaactgtgtaattagaggtaattgggaggcctcaattactctcttcaattctcataccccatgagaattgggtgtaattacacagtgtaattacataccaaaaataaattaaaattatttt

SEQ ID NO: 372771 - DNA, 772 bp, Cannabis indica
tcctcacggctccccagctttagccttgctcttacctacacatggaaatagcattgtgagtcgacagactacagtaagaaaagcataacgtaaaacatataaataactcgggttataacctggtgccccatacaccccgatccataacccctaatccccgtgtcccacacggtactgagtctagaacgttcatacgacaatactatcgaccataatgtcaacctatactcaatatgctagtcatactctagccatattgatgtgacagccatcgatcagtattttagccaacatacatttatcagtaatcggtacaactctatgtatactattactcctatcaatgtaatctaagaggcataaacaccatgtacgctaataaacatgtaataacatatgcatgacattactctaatcttacctcaattctgaattcaggtgtgtcgatcaacctgagtggaacaactgctcagcaaattataggctcctaaattacatctataacaacacgaataagtgactcgctaaatcacaatcgggacttaagttttaaacccaaaacctatctacatcaacttaatctagaagtaccctacattagcagggaaccaaccaactagaaacctgaaactaggacgaatcgacgagctgaaaatttcggggaactctgctgcaaaaactggttacccaattttacaagtacctgtaaaaccggttacccatttttctgtagaaaacccaaaaaattacaaagctcaaccaaatcgattcc

SEQ ID NO: 372772 - DNA, 559 bp, Cannabis indica
gcttctcttcgatttcatcaagcaattcgggcaggagtacatgatttacttcttggttgtacgttaatcttttgtgggatggcggcttcagttctacgggcagcatagcttcatatccatatgccatggcaaatggagtttgtctagttgccattttttttagttgttcgatacgaccatagaacttcagggagctcctccggccagtttccattagcatcctcgagtcttttctttaatgtagccttcaaggtcttgttgcttgcttctccacctcttcctttagggctagtgctcgctctttgtccaatagccttcatttttgttgaactggtcagaagttgggatcaatatttacgacgtgcgaaatgacagaaggatcaattccgaccatatcctcatgtgacaaggcaaaaatgtccaggtttgctctcaaaaattttatcaatgttgattttacttcaagtaacaaaccttttccgatttttagctttctggctgggatatctggatcgatctcgatctcttctacttcttccacaggtccaacattgctgct

SEQ ID NO: 372773 - DNA, 563 bp, Cannabis indica
gctttatctcttctccctgctgcccatgtttcccatattcctcggtctgcaaatatttttgctgacaaacttgctcactgggctgccgggttagatgaagcagcaatttggattggcgatgacccctgcgatcttcgagtttttctttctctttagtgggctccctttccctacaaaaaaaaaaaaaaagaataagaagaatgatgagtacacacataaattacacctatataacaagtcacctctaataaataaaacttcttaaattgaatataaagggaaatttgaattttcatgcttaaataatccataaattattcccctaaactaatactatacataattaattatatatgacactttttatatttttccaataataccctccccacctacatctacccactccaacccttttctcatcaattcaacaaacaaaattccccacccaaaagcttccacaaccaccaaaattttttttcttctcttcactcatcactaaaagctacaaccttccacactacaagccaccacactaatccaccacattagaagctagaaca

SEQ ID NO: 372774 - DNA, 1647 bp, Cannabis indica
gctcaagcaatgatcatgggtacggttttaaataaaaaatatatatattatttaattttttcttccttaaggcaaaaaattgatggaatattatgagacaaaagggcccattttactcttcttttttttcactagtgcaagccaaaaccccaccaaagcttttgtgacaataattataaatatatatatatgatcataatatataataattaatcatgtacatcaacaaggtcaaactttaagcaaacacaacaacacatatagcaacaaatcacttcacagctggggagagagagccatttaattacctttttatttttattttttattttaaagtaaaaaaaaaagcttttggtagcttcttgcactcaaagcaagtagactttgaagtcctcatctcttgttttttttttttcttttttgttagaatctatataaataatttttatatttattatatataaaggaaagtgatattgctttttgataatattagatgaattgggtaaaggagaagcaccaatcaaggcaaaaaaaataaaaggtttgatgactttggtttccccttttctctattcctttttgctaaaagaaaaaaaaaaacaattgtactatataatataaacctaattatatatatataaagtgatgttaaatattttgtaccaaccaatatatatagctaaaataaataaggtgtgattttgaagaagggaagtataattaattctgatgaaaaaatagtgactttgttgtgatcttattgggagtttctttattctgaagttttcgagtaatttctttgcttttctatgcaaaaatagatgcaggcatattttgctttaacataacactttttaagtaaaattatatatttataggaccacatttctcttctctttatatatatatataattatgactgaaaatggaagcataaaatatttttgtggatttttttgttttgtaccaaattcaacttgtacatacatatactatatatatatatttaatatatatatatacatataataataaagttgatcaagaagacattccaattaataagacttccatatataatacagatcattattattttgtatgaacatttttatatattttttaatagaatattatttttatattttaataagtactaaatggtaaaaaaaaaaccaactttgtagatattgatcgtataaatataaaaataaaattctttaaattttttattttacaatcactaattaagtcttgttataaatacataaagtgataattatatgatttatatcactattagagctagagggagcctcataaataattttttttatttgcaaaattaataagtgaaattataacatttggaagatgccataattcccatcccacctcatcaattaatttattaattataatatatttttctttttgttttagagaggaatccttaggagttactaacaatagaaaatcccaacttaaaaagctagagaagaaggcaaaagttatataggaatatataacaaagctacttttaactccaccattggtgtgaaatctggtttattttgtcaaaaagctatatatataaatataattatatatattacaattacactactattctctctctctctc

SEQ ID NO: 372775 - DNA, 434 bp, Cannabis indica
ataatatataatactaaaaaaatatataacttaatttaattattatatatcttttaaaaaaaataatatatagtaaatgtatttatataatttttattagttaatttattatatttagtaattttttaattttattttagaaaatagacatttactagcttagtttccaaatttatggtcattttgcatctcagctcaaaatataactacacaattacattacttaaatatgaaaatcaagtgaacatcaatgaatattgtcgaaaaaaaaccttaaagaaacgtcaacacaatacacaaaaaatcttaaagcatgtacctttaaaagactaaacatattttattttcaactatttgtacaactaaataacaacaaataaataattgtgtaacaactctattttaatatacaaattaaataggtatcaacacat

SEQ ID NO: 372776 - DNA, 521 bp, Cannabis indica
tgacattcttatctactccaaaactatggaagaacatgaggaacacctgaggatgattctaaaccgacttaaggagaaccaactatatgccaaattcaacaaatgtgaattctggttagagaaggtggaattcctaggccatatagtttccaaagatgtagtcgaagtgggtcctacaaagatcgaagcggtcaagagctggccaacacctaagactacaggtgaagtaagaagcttcttgagtctagctggttactatagacgctttgttgaaggattttccaagattgcaactcctttaaccaacttgactcgaaagacgcagaagtttctcttgtcagaaaagtgtgagggtagcttccaaacacttaaggacaaactaataacagcccctgtattatgtgttcccaataacaaggataagtttgtggtgtactgcgatgcatcgaaacaagggctgggatgcgtgctgatgcaaaatgacaaagtagtagcgtatgcctcaagacaacttaaggagt

SEQ ID NO: 372777 - DNA, 708 bp, Cannabis indica
ccctacttggaaatgttttttcccactctgtgctctggctagaagatacttccttcttagccttggccactgtaaggttataacattcccgaggagtttgctggtttcctcttagacaccctaccccattcttcattggaaacttcaggcacgagtggaatatcgatgtgacagcctttaagccatacaaggctggacggcctagcattatgttaaaggctgaaggaacatctaataccaggaattgtgccatgacagtcatgctcgtgggagcttgtccaacagtgaggggtagacgaatttgtcctggatgtgtgactccttggccggagaaaccatagacaggttggagacatggggctagatccttgagctggagtcccatcttctcatagacagtcttgaacaagatattggaagaggctccattatcaaccatggttctggccaccatctttttagctatctggacctccacgaccaacgggtcattgtgtggagatctgattttgacagcatcttcatcattgaaggttatggtaggccctcctgctcgtgggattttgggcttccttttctacggccaggatcacttcttcttgctcgtggtgtgctgttgagcatacctctcccaagctttgcccgaatctccagctatatgcgggcctccaatgatgacttgcagatgtccgtctaccggtggaggta

SEQ ID NO: 372778 - DNA, 553 bp, Cannabis indica
tgagtctggattcagttctgggtctatgtcctttgttctgatcctggtctaggttcgagttatggtccgagtctgggtctagctttgggtctgattctaggtgttggtttgagttcgagtccgagtctgtgtcctggtttgtctccaggtctagacaacgatctgggtctatgttcgggtccaggtccaagtttgggtcccgagtgcaagtccaagtttgggtctgggtcagtatctcaatccagatctagggccagcatttcgatcccaatctggttcttggtcccagtccagggtcgtatcctgatccatatctaggtcgaagtctatgcttgggatcgagtcccagatttaggtccaggtccgagtctcagttccggtttgggtaaacgaccgtgtctgggcccgagttccactctcagtttggttctgaggctaggtctgtgttcggttctaggtctgggttcgggtcctggtcattgtcctaggcttgttttagggtcctagttcggcgattcttgttcaagttctaattttgggtcccaggtctagg

SEQ ID NO: 372779 - DNA, 648 bp, Cannabis indica
gtcacaatattttggacttttgttgttgaattacatatatatcctagaagatatatatacactcaaaaaaaaacttagcaacataaataatttacaaaaaaaaataaaataaaaattttatttttaatattcaaaaaatactattataaacaataataaaaaagaaaagaatataccacatcataggtttattaataatagtttaatttttgctttcaaataaatatatttaaaatatttcacaaaataatattgtattacataaaaaaatttacaaagaaaataaaaataaaaattaacaaactaataaactaagtttaagggagagttttgtttattctacataaaaatataaatatatacattatacatttaaaataaaaaaatgatttatttcagttttaaattttgcaagagatcttatcatataatcactaaaatattaaaatgatgtttgattagcaaaaatgaaaatataaaaataagaatgagaataaagatgacatttaaatattttaaaatgcaaccaaataaaagaaatagaatgagaatttttttcgtttcaattctattctattttatttcctacaactaaacatcactataattataatttaacacaatgtataattcatatactaacacgtg

SEQ ID NO: 372780 - DNA, 632 bp, Cannabis indica
atgctataccattagagataaaaaatgttattcttgaaatttgtattgatgtcacaccatgacattgatgctattattttttttataacaaaaattaaaagtgcaatatatataatagattaataaagaaaaaaattatatatatattataatgtgtgagatcataattatagcattcttaaaatgtgttatattattggagtgtttttaaaaataaaacgtgtcaaaaaataatgtggaagaaagataaaataaaatattatatttttagataatgtgaagatataacacctttaaaaaatgctaccatttattcacctaatagtctagattctaagtggagtgataatttgtaatggctaattaggatttttgccatctgaactttgacatttaccaaatcatgccccttgagcttttaagatcattaaaaatacccactgaactattgagattattggattttaaagactttttttttttttttctttaattttagttaaaaagtactaacattaatgaaagtagcaggggcgatgatttagtacgtgtcaaagttcgagtggcatgatttagtagatatcaaagtctggcgagtatggtttagtacataaacaatcactgaaatagta

SEQ ID NO: 372781 - DNA, 501 bp, Cannabis indica
actagtttttgatttttagtttatatatttattttaacccacgaaagcatctcattaacaacctaattacaaccatcatataaacaacgaacattgcattttaaacacttatgtaatattttttggtacaacttaatttcaacttgcttttaattgatcatgcaaacatttattatttaactataatatttatgtcatttgtatattaatgatcataatatccattctctattaacaatatgttcaaaaaactctcaccatataaaaagtttcagttaaaaataacgaaacaaccaatagaaataatctgtatgtttatctaaatgtttcagaatagttgttttttagttgctgaatagttgtttgtacttctatgctgtaattcttctgcaggtttttttgttatgtccaattttgtccacacttgccacacttgttttgcttctttgtttcccaagctgccgccattcttcttttcctcggccttccagacttgattct

SEQ ID NO: 372782 - DNA, 603 bp, Cannabis indica
accaacttattccccaagcataccgcctgctttcaggcttatttattttttattccgcccggggatggggatctccccgcccggcggaaattttgtatttttatgaacttgtttccgtccccaaaaagggggacaaacttaaggatggttttatgggttccgggcccaccctgctaacgaaggggtggtcccgtataacaggcaaactcacgttaaggagtatcgccatcgttttttcttctcctccggattccgggcagtggaccatccggagctccttactgagtgggtgaggattcctccctatgaacggactgcacctactcaggcctttcttcggagggcccaggcctttgcctcttacgaccgggctgatcttgacgtcgggggtctggtcactacggagaactgcaggaaggcaaaactcatccttccgcatcaatccgtggaggactctaacctttcccgggttatctgtcccaacgtgagggcgccggtcgcggagaagaccttccgggacgagatcattgccacggcagagaagaagtaccaggagtatctctaccggaaggcccaagagaaggcgtactctaaggcccaggc

SEQ ID NO: 372783 - DNA, 859 bp, Cannabis indica
aattggatcttgaatggttacctctgtagccattagagttctgatttcccttgaattccctcttggggaattttcccttaacaatgagtaatccttccccattgacctcatctttctcatctcccttcttctgaatttctttcgaattcaatgcagccttaacctctgtcatagtcagagtttctttgccatacaagatcgtatcaacaaagtgctcatacatcttgggaagtgaactcaacaggattatagcctggtcttcatcatcaattttcaccccaagattattcagatctagaatgattctgttaaaatcatctagatgtcttctcaattcctttgactcatccattcgaagtgtgtacaacttcttcttaagatacaacttgtttgcaagagatttcttcatgtagattgatgccaacttgttccaaagacccaaggccttgtcttcatctgaaacttctctcaaaacctcatcaccaagactgaggaggatggcactatgtgctttggcttcaatctcaagtttcttcttattgtcttcaattaatttcatggcttcatcatcaagtgcctcataaatcccttggtgaactagaaaggccttcattttgattctccataggctgaaatcattcgaaccattgaacttatccacctcaaaccttgctgaagccattaaaaccaattcttgattgcttgaatatggttcttgaaagttcgagtttgattcttgaaatgttgaagatgaatcttgattggttgaatgtgattcttgaactctaaaccctgagctctgataccatttgtggtgaatcctcaccctcaaaacaagttgttacagcagtaacaatgt

SEQ ID NO: 372784 - DNA, 769 bp, Cannabis indica
taattacatagtaaaaataaagcaatgtaaattaattacaacctaaaatttaaaaattttccaattaattatttcttaactaaataacatatactaaaaaatataacgttaaaataaaataagaaaatttaaataaatataatttaattgaataaattaacaacactaaataaataaaataaaatttcaaaaataaatcgaagtaaattaaattttacgtaaattttacgtaaatttacctttaaatttttctttaaatttttcgtttttttttttttttggaaaaaactcccttcaaaaatgacatatcatttttcctttaaataaaaaatgacgtgtcattttcagatgctgtcgaaactacaactatgggaaacgacagtcgtttttcttctatatagagaacgagatgtcgttttctacttcttaattctccagacaggtcaaacgactctatttttctgcatatggggtcacgcgaacccgaaaaaacctagacagaataaaagaacttcaatgtccaaatcacatgaaatcaacccagaaatgttctaaaggatagaattaagaggtatatgtaggtttcatgcaggaaaaacatgtaaaaatgtagactttaattttaaaaaaaactaaaaaattcgggtccgatcgtgttcttaggagaaattttgagttttcagatggtttttaaatctttttcattcataaaatcgatctaaaatattatatgaatatagtaatgaatagaggattcaaaataaatacc

SEQ ID NO: 372785 - DNA, 724 bp, Cannabis indica
atccatgttagaatttttttactaaaattagataaaagtccttaaatctaacaatcttaataattcaggaagaaattttaacagccaaaaaaattcagggggcatgatttagtacatgtcaaagttcggagagaaaaattactaattagcctaaatataactcttcacctcataacacattttgactcacttttgtcaaacaaatagaatcagagaaagagagctagtattttctttagtgtaatttgaaattgtcatagattttttcttaaatttcgtggtcccttaaatttcgtggtcccttggtattgagtgattgcatacacatatcaagacaatacttaggatattttgaaaaactatgtaagattttcttaaccttagaattttcatattaggatattagattagaagctaatttaacataattgaataataaacaagatcctagttaaagaagttttttacttttttaaatatatatgggctattaaaatttttgcccacaaactttgacaggtaccaaatcatgttttttgaattttttaagtcgataaaaaattctttttaaattattgagattgttaaatttaaagaatttttgtctaattttattaacgaaagtctgacatgaatgaaagtttagagaataaaatttggtacatgtcaaagtctttcgagggcacaatttagtatatcaacaatcgtcacattaataaaattg

SEQ ID NO: 372786 - DNA, 807 bp, Cannabis indica
gttgatatagatagtatcaatcaatttatttctcaatttgtatgtgtcgtcctcagggacggaggtatattacattgtatagaggccatggcccccctaggatttatataaaagatatgttagttttttttttttggttaagtaggtatgcatatatcacgtaagtctatgcaattttagtttttttagtgtacagtgatgatttgacaaagtcaataaatgttagttttctttttgtttttaatgcatttccttttttatacgagtacactattagtattatatacaatttactcttatttattattatcatttttttttaataaaagatttacttgttttctatcatcttttaaggcatttgttatttaataatactaatttagtttacaagacaccccaaaatcacttcttcagaattttttttaattaaaataaaaagaaataaaaactaaaaggttaaaaaggctttcaaatagataatttggtatttatcactctcttctgcattttgtattttatatttgttacaccaatcactatttttacaaataaaatattttttttcgaatatttgtataaaatatgtttatcattaagataaaaaatgaacatgtattgttaattagtgatagcagttttacaagaatgaattgaagagcagtccacataaaagaataatgattgattttaaataacaaataaagctatgttataaaaaataacatatacattttaattattcaatccaaatttcaattgtgttctttctcctaaataataaatattatatatatacaaataatt

SEQ ID NO: 372787 - DNA, 755 bp, Cannabis indica
attaattaatttgtatggagggagagaaagagggagctacaaataaagccataaattgccggttatatttttggctgggaactctctaagtctagatattttttttttactcaaaaggagcacacagttaaacagtttcctgataaagacatgtacataattaacttattttctaaaatttaccactaggagatagttttgaccacaaaatataaagagtacagaagttgtacagcccatattatactgttattaatttggtcccataacaaacaccacttcattgtccattattatttattttcaaatggtaaataaatatattatttttctattttttttttaaaaaaaaaacaagaagaagaagaggacaaagataaggtttgttctgctagctgtcatgtagtataaattaacatgaatttatttggaaagaaataagatgatataaaaggcagacccccctcccttgggagccttgccctagagaaatctacaatgcaatcaaaatttatgggaaattttttaatgcaccctcttaaaataaatatattaatgcacccttatctgttttagcatccgaaataattttttagttaaattttttctcatagttatgtacgttatagttaatttaagatatcctgcaaaattttaagaaatttgaaaaagtttaacacgccgaaaactacattcaaacagtgtattgcacgcgtgactattttattttattacacgtgtaaaatagactgttt

SEQ ID NO: 372788 - DNA, 665 bp, Cannabis indica
ttagatttttttaagaaaaagattattatattaatttttgaccaaattacataacaattataagtgaagatgaaaaatcctccaaccaaatacattaattatccaccgtaagagaaaatttagccaaagtatgagcataagtattaatagatctgtaaacatgagtaatttgtactcatgtaaaattggacactatagaaagttaatataattcaagatcgcatgaaaagcagaaaattaaaatgtgaagaatgcaatccttaaactacaatgagtgaatctattttgatgtaatgcactcacaaattgagagttatgagccacttcagacttatagccatgactagtgcttctattttttctgatttaagacgaccctaaatttaccttgataatattgcaataatagagccagatgaatctcttaagattgcaccaacttaatcatcaatagaagcatctgtattcaacttcactcgtgtcttagatctctgagtagtaatttgagcactttgatattcaaagtaaaattagagtttgcaaacaataccattgcaacgactgtttttgtaaattttccataaactacataaaatgacttagttagaaaggcttgcagaaaggtgcaacaagaaatcctcacaagtgattgaacaaacaagatg

SEQ ID NO: 372789 - DNA, 821 bp, Cannabis indica
aattgtgcatggaattccgaagagaagattttccatgaactaaactttcctggagccaacttgaaataccattgttgtgcggcctctgacagagtagcggggaagattctgcaacatacgtctcctcgtaccccttgtaaatccatttgcatctcgaaatacttgagatgggagagaggatcttctctcccagtgtacatcttccacgttggcatcttgaacttctgaggtagtggcaggagattgatttctggtgagaagggagttccgcgtgcacggtctaactcaagatcgttgttacgctgcctggccatgccatgaaacatattctttagtttgtcgagctgggcctgtacggctgggcttactaatttggcattcaggtcgggttggactgcgtcagtgtctttctgagcggggatttgagtatgggctctggactgcacgttcgttgtagtattcttctcgtctattccccttcttctgtttacagcgtcccttaggtcatgggttattcccaacctatcgaacacagaagaacctggctgccttagcgattggttcgcttggttggcaggtggaatggctccattattttgcgtggatccgtcgagcatgactcctcctgatgtatttctggagaaagtctgtccgcctacctcttggcccacgagtggaactcgtgaccggggattggacggctgaccgttggttgtctgggaagcactcaccgttgggtcatcctcggtttctccaaggggaatgacgttcgacgcttgctggcctcagtctgataggctcttcgtatcagcacagtggct

SEQ ID NO: 372790 - DNA, 600 bp, Cannabis indica
aatgctagtcgctataggcgtttcttgcaagaaatctctgaaggcaagcgctgattcttgcgatatgcggcctgaccggaacctctaagtgtgtcctttattcctttggcaaagccttatttaaccaaagtcacaattgcttttgaaccaagtgacttggatttgaaaataatgcctcctaagccatgtacatcaaagactccctaggaccccaaagtaaacttttaagttgatttaatagaatcgaaggtgcaatctatctcaggctacacgggtgatataatggagacctgtggaattaaacttgggcaatcatgccaagttaggtcagtacgagagggtgagttccgttgtttcccccctccgcgcttttcaagcagtatcccagggactggtggtgagactagtaccagtggctcaactggcatgggcgcttggagcctggagaatattagtgctagggccatactccctcttcgagactactttaaggattacataaatcaccttggggttgccccattctagttgaatcctatctcttacaagattctcgctagttttaaggttttgtataaaattctgaactgggaatgcccc

SEQ ID NO: 372791 - DNA, 761 bp, Cannabis indica
atatatactatcacgaatttaattagctagactagatgtttatgtgtaaagatttgtaattcagtccataattaactccaatgcatgtataaatatgtagaaaataaataatataagaacatcaaattatgactgttaagtaattaatatttttagttcatttttcttacctaattattaaaaaaaaaaactagttataataatctagctaccttacgactaattgttaccatatatatttatattgattattgaacttttagggttataaagtttcaacatttgaacaatataaatcacctaccaataattacatttatacatcttttttcttcacacactacttttttcattttgattatgattacagtactggaaaaggaaaaattatatatatgtattgtctcgttaagtattaattacatatagagttctctttgtattaattatatattattaatataaaccaattaataatgttattttatccatatatatatatttgtaaacaatataatattaaagttatgattctaattttaaccatttaatttctataacttcgatcatagatccagatgtcgatgtatgattatttttcaaattgttataaattatagctaaaagatgtatacaaatatatatatatctttatatattaaaagtgtctatttaacggcatttcttggtttaacagaatatacttaaatttttaaaagaatattctgttaaatttatatattaaagttaacctcacgtta

SEQ ID NO: 372792 - DNA, 360 bp, Cannabis indica
actactaaccttgtttatttgttttttgtcctacaacccaagctgcttgaactcaggtgctattttcgcgagttgaatcagaaagctggactaaggggtggagttcgtccaagatatagatgaagctcgtttttttttttttgaattaattgtttcagtttcagaaaaattttggatttcaattattagtttgagattttactccctgttcttttctcattatgttgcaaacatttttttattgattttataattaagtttttttactaaataaattgcaatctatgagttgagcttcattactatatcttatataacaattaacaattattatatttatatgtttgtatgtgtatgtgt

SEQ ID NO: 372793 - DNA, 288 bp, Cannabis indica
ataactacatcacctaatcaagtgagcccgtgccaaaaacctgcacccatatatcacataattgcatcacctaatcaagtgagcccgtcccacgacatggcaccaatatgttgcattgcctaattagacgagctcgtacctacgcccgatacataaatacatcacctaatcaggtgagcctatgcaacaactttgcaccaatatatcgcatcttctaataagatgagcctgtacctatacttgatactcatatatgattaccgcctgtacttcataaggtacgacgcc

SEQ ID NO: 372794 - DNA, 511 bp, Cannabis indica
aacttaattttgattttatttgaattagttatgaatttttgaaaatcgaaaaaaaatcaggggtggtgacacacccatgcacgcgcggatgcacgtgacacacgggtgtctcccctatttcaggcacgggctgttcgaaggaacacgtccatggtgtctgaaaacttccccccccccccgaagcgcgcggacaggctgcatgcagcctctgtgtgcggtaatcctcgcccatgacaccaaccacgcgcgcggatggtatgcactacataccatccgcaccaaatgcaatttttttccaattttttcattttttcatggaattaatttcgaaattttttgtgtagttttttattttgattttgattttttaattttcaaatctaattatcagaattaaattaattatttttttaaaattaatttaagatattagtgaaatttgaatttgaaaataggtaaaaaatctatcttttttgcttaattaattatcttatttttaaaaatttaatta

SEQ ID NO: 372795 - DNA, 712 bp, Cannabis indica
tttataacttacatggatagcacctaaaaagtttttattcaatgtgtgacttttagtttgcatatgtagtgtatttttgaaagaaagtaagagtgtgttagaaaaagggaaaaatacgaggaaaaaagaataggatgccacttggactcttcttggactttcttttatatctattctatataaaatgtgattatataaccgaattcttggtttatgagaaattattgggtgacttttttttaaaaaaaaaaaaattcaactttgtttttgatatatatttctcataactttaacaatactataacagaattgttaattaatattattttattatttatttaaaatgatgaatttaatccttacgaaaaataatgaatttatttttcatactttttaaaaaaaaatatttatagtagtagacatttgttattctaacgtacactacaaaaaaatttacttttagtcataaaaaaaatttgtgactaattgtgaattattattcgtatgttgtaactaaaaagtccgtggctaaaggtattagtcacaaaaattacaatttgttgtgattaaatatatttttagtcacaatatttgttgtgactaaactaaattagtgataaattgtaactaaatactatattttagtcacaagtaacattttattgtgactaaaagtagcatttagtcacaaaaaaattaatgttatgactaa

SEQ ID NO: 372796 - DNA, 630 bp, Cannabis indica
ataattacactcataccatatctacctcaaaaatactcattgattatgtctatataactggttctattttagttataactggtttgagttctttcgtgttatttatttttattcattataacattgttataaaactagttctaatttaattataattagtttgagttattttgttttatttgtttttattctttatgttacagaaccggttatatttcaattataatcggtttgagttattttgaatattttttttattaatgatgttatagaactggttctaatttaattataattagtttgagttattttattttatttatttttattctttgtcttacaaaaccagctatatttcaattgtaacaggttctatttttgtttatatttgagacatctacttctagtgactttctcagtaacttttcccggcaacagtgactttttcgatgacggtgactttttcggcgccaataatttttttggcgacttttccggcgccaatgacttttttcggtgatttttcccgcgattttctggtaaaacttattattgtacacaaatatgggatttctatctttttttttacaaaaatatggcataaaaaaaaccatatataaatgtaaaaaa

SEQ ID NO: 372797 - DNA, 589 bp, Cannabis indica
tccaattaaatgaattggaagaacagaaacgatgcttacgattgtgcaaaaagttacaaagaacgtacaaagttgtatcatgataagaacatcttgcgaaaagatttctccactggtcagaaagttcttttatacaactctcgccttcatctgtttcccggtaagttacgttctaaatggactggtccatttactgttcgtactgtttttcctcacggagctgttgaaattgaaaattctaaaactggtaacatattcaaagtcaatggacagcggttgaaactatttttagactagtttatactatatttagttacttagatagtaattccagtaaaaattgcacaaaccaaacatatgatttgattgtttttaacacatttaattgagaaaaatcttaagttaaaagctttcatttttcgtgagaagtgagaattgagaaaacgactttttgaacatatattgatcttctgaattggtaaaacgaaatttttgaaatttgaaaatatgacaattactagagggatacttttttttagaatgagcctaattgtaaatttattatctttatattttcttatcacacatg

SEQ ID NO: 372798 - DNA, 1099 bp, Cannabis indica
ttggtccaaagttaaaaatttaatttttaactcaaatttaatatacgtatgatagaatttcaaatccaatctattaataaataatacattttcaaaattttattaaaataaaataaaaaaaagattagaaataattattctaaattatgttggtctaaaatttaataaattaattttcaacataaatataattttcttattaaattaaatctcttaataaaaatatcaaaattttagggtcttgaacaaaatcaacttaaatattaatattctattcaattaaatatatctagaaaaataccaaaagtctacctagaaaatatctatcaagataattcataaactaattacttattttctaattaaaatataatatattttaatccattcatttaattattcattaataaaaattgcttaattttaagttgatccaaaattaattaactaattaatttttaacttaatctaattttcaaaaatagaaaaaaaattcgaaatatctacatttaacataaatgtatttcgaaattatgtagcaaaataattattaaaataaaataaaatatgctctaaaaattattctaactaaagttgatctgaaattgaaaaaatttcaacttaaatataattttctatttaattcaattcattaaaatagaaataattaagtttctagaataaaatcaacttaattattaattctaatttaatatttaagaaaactattctaatttaagttggtctaaaattaattaattttaacttaaaaatattttttaatttaattaaatttcatgaaatcgaaacaaaatattaagtatcttcaataaaattaacttaattattaattatatttaagttccaagttctaagaaaaatattctaatttaagttggtctaaaataaattaattttcaacttaaatatatttttctacttaattaaatattagaaaatataaattagttactagaaatcactatctagaatatttcattaaagtaagtgtatttatctaaattaattttaaaataatctaatgaaaatttaatttaatttatttcaaaattaattatgttgctaattcaattttaat

SEQ ID NO: 372799 - DNA, 555 bp, Cannabis indica
tcaagaaaagataataaaaattttattttatgctattttacaatatcttatcatactttacaatatcttatgcccatttatacttattataatatcactttattacattttaaattatatattacatgttataattatattatttcttaatcatttattatttatattaaaattactaactttttaaaatttataatatctatttattacattttaaattatatattacatttttttaattttattattttttaatcatttatttcctatttataaataaataaatcagcatttttcttgtgtctttactagctatagtattcctttttttttctgaaaaatttacctcttgtttttttaatttaattcaaatacaataaaaccttaatttatgaatacacttggggctatattaaatattggtaaaaaaaaacaattaatttgataataataaccataaaaaataatcaatacttattatttataattattggatcaaattctaaccatcactacaaaaaaatagttacttttagtgacaacattttagtcaca

SEQ ID NO: 372800 - DNA, 704 bp, Cannabis indica
tctcccatgagtcttgtgttcataagtctcgattaagattttacctaaaaatcatttactgtatttttatccacatactcttgagaacataaatctagtgtgtcgggtccaatcaataaaaataaaaatagacgcagtcccattaccattgtgatatggaggtgaactactataaatctttggtgtctaatttatttattgcgattttattagtcaaaattaattcatcgcagtcctctatatttttatgattttcttagatcagttgatgaaaaaccgcgtcaatatatatatcataaatatatattactatcgtataaaatagtaaatcacataatatttatcatcatgctcatccatgaatagcttttatacaaaatgtcttacccttgtatttttaaaatcttgatttatctcctcttccattgaaaatgaattataagcttttaattgttagagattttatatatcaatgaaagataaatcaagataaattacaactcaactgtaaaaacaatacaagaactaaaataatagattcatatcataaatgttataatacatatattatatataagaaaggtagaagagatgattacaacacatgtaatatacaacatatataatataatatgaagaagaagatatatacatacatacacactcacagccttgagtgtagattagtggggatcaccatgact

SEQ ID NO: 372801 - DNA, 624 bp, Cannabis indica
ctgtaatatgcaaaataaataggtattataaaatatttctatatggccaaattactccggcaacccaaatggcaagttatacttggagactgaggggtcatcaatggctacggggttttggtttctcatcattgtacggaacgaaggtggcgaggatggcttacggggatgggttttcaaagagagaggagagagagagagacttggtgcatttgacaatcaatgataattgatggttcaagaaggggttaatatatatttattattatttatatttatatattagcttacaaatcgtaaactatttaatattaattatatatttaattttattttattagcttgctaacgtcaatcgttaaactgaattcgcttgataagatttttaaatttattgagaatttatttctttttataaaaaaaataaataagttattacttaaaagcgattaacaaactgaatcgttttcgtgagaataggaaagtttgatttgaaatattttaaaagtgttacaaaaaaagtcacccaataatttctcataaatcaagaattttgttatatataggcacattttatatagaatagatactatggtaggacctaacaaaagttccctaccggta

SEQ ID NO: 372802 - DNA, 603 bp, Cannabis indica
gtcggtgccggagaagtcgcctaagtagctttcggtgtcggaaaagtccctggagttgctgttggcaccgaaaaagtccgtcaaaattggcattgtcgctagaaaaatcactaagaaactggtttcttcatcaagaaattgatttcttcatcaagaaaccaagaaaccattttcttggttatttttctagttaatttttctgacgataataccaatttcaacgacttgttttggcgccggcagcaactccagcaattttctcgacatcggcagctactcctgcaacttttccagcgccggcagcaaattctggcgactttttcagcactagtgacaaataaaacttcttaagaaacaaataaaaacattgaatatgaggtttgaaaacctaattgacatagatatagcatatcaaataccataaaaatacctaaaatcaaaaaaaaaaaaaagaaattgtcatataaattgatcaatatttaagtaaacaacttttaaaatctcatagtaagtgtaattttttctttataaaattattccgaacaatctaatctttttcacattttttccaaaaataaaaaatttcactttaataaatttata

SEQ ID NO: 372803 - DNA, 590 bp, Cannabis indica
ttcatttctttcctcaatattttgtctaaggcatttgatctcactcttttctttttttcagatttctgcggagaccagctgcctctccaggaccatcgtcaatcattgcttcgtcctgtctgaattcgggggcatagacgagatcatgaggattctgcgggacctgtccgctaagaggcggggatccaagacgaggttgagcgaaaggaggccctcgctaaggcgaagctcgaggaggcggccaaacagagggaagcccaggcggaggcgatgctccgagaggaggtcctgcggagggataggctggaggcgaggcaccgggaggcactgagggcagagggcgaggctactgccacggccaagcgcgagcttcgggaggttaaggaggccatagaagagatggctgccaaggtgaggtccttagagaagttgcaccaggcggacttgaagtccagggctaacttggccgtggagatgaaggagctaaaggacttcagagatcaagccttaaagaaggctaaaagagatgagctcctgtcccctgtctcctgtaagcgttgtgtcaagcgcttcgatgatggcgtctatat

SEQ ID NO: 372804 - DNA, 803 bp, Cannabis indica
tacccaaaattcggctagtactttagaaggagacacatgtcaatttaagggaatatgaactgacaaatataatggtaattatattaacaaatattaaatggaataactcttcaaatacaaaagtcgatagagtatatttataactcgcaaactgcacagtccttagcgagacagggatgtacgaactattgactcaggtattgatgagaaatcatttcgtgttagaagacataatcgcaaagatgacgtctagaatacatagcgaggcatctacctcgcaatatgtaagaaaggtgctgacgaggtgaactggctagttaaaaaaattagtgtatgatatacactatactaactaagtgtaatagctagaaggacatggacaacggataatgagacatccatctcgctataggaaggcatactcctggtaaactccagctcactacaaaggttattgttgctattgagaactcccagaacatgattgcccagtctgcaaggccttatggtcaaagagcagttcttaagtttgctcagtacactggtgctcatgccattgctagagaacttataaataaagcaagttgttcatgaaccaggcaagacgtcccagcgagacatgttttgcagcgtgttgtgatccacgacaacattgacccgttaaaagttgtttaaatcacagctgtgtgatttttcaaataataactgtatttatctacgtggcgcatgattatagcccataatttcaggaaaatataattgtgggtattctaattttaaatgtaattaactgctaagctata

SEQ ID NO: 372805 - DNA, 655 bp, Cannabis indica
ttaaataacaaaatggaccctgtattttttaaaattgtataaataggactatgaattaattttttgtcaaaataaaacttaataataatttgatctagagatgttatgacaaaattaattgtattgtctgtatctgattgtattagaaattgtcttaaagttgtttatattaaaaaaattgttgaaaattaaactcatgttttatttttactattttagaaaatataagattcattttatcatttaataaaacagataatctaatttgtaacttttgcaaaatacaaaattagtatttactaacaaaaaaattatatatataataatatgtgagattataataaatggacacatgaaatttaagggattttgtttagattaaatttaaatacccatctttatcaattagttatttcagtgtaataaataataaattggttttaaaacagagaaaattgagaattgaagtgggcgcttactttggctagtgtagttagatatagatatgtatctctagaagcttctgttgttagcttaatcaattatcattactaatcaaattaattattagttagttcattagaaaagctaagaagataaattacataatttggtgtcaaaactttagtacatctttattttctttctaactcta

SEQ ID NO: 372806 - DNA, 645 bp, Cannabis indica
gtccagacctggacacaaacccgcacacagactcggacccgaactcaaacccacacctagaatcagacccaaagctagacctagaccaggacacaaactcgaacccaaaacaggatcagaaccaaggacttagaccaagaactaaatcaagactcagatcaagattggaacttgggacttggacccaacctagaccaagacccaggacgcgaacctacacccggagtgtcatctggacctagactgaaatccggatctgaaccctaacttagacttggactcgaactccgacctgaactcaaacccatactagaactcaaaatcataaatcgaactagaatcgaaccaggagtaggaccagaacctaaaccaaaacaagaacccaaatcaaaacccaaacagagacccaaacccgaacctataccgggacccatgcccactcaataaccgggactcagaccagaatcaggacagggacctgggaaacagaactaggaccggtacctagtacctgacctagacaagaactttaacctaggacccagcttgtgacccggcactcgaaatggaaccagactgggacccgagattgggatccggatcttgacccatggcttggacaaaacccgtagtcagtgtctggat

SEQ ID NO: 372807 - DNA, 660 bp, Cannabis indica
atgcagggtgcaaggcgggcgggggcaagggtgacacgggcgtgatgcacagctcacgcgcgcggatgaggggcttgcccgaagcacctgatgcgtgcgattgagcacccatgaacacctgaaatctgatttttccaaaaatcataactttctcaatttttatcggaatcgagttccgtaaaaaacaaaattgcttaatttttcacaaggaatccaaataaaatattttcaaaaatagaaaaaatatttttcatggaaaaaattcgtacaacacaaactttcatcacataagcacataaaccaacatgaaaccatccaaatcaacacaaaacatataaaacatcgttttaattcatattacatgaaagtaaatcattaccatggctctggtgccagttgttggaaatattttaccaggatctagatttactaccaagtatgtttcattaacatcctaatatgaattctaaaacaatgaaataaacacataagagtttaagaaaaccttacattgggtgcagcggaatattatgactccttccattcagatctctagcccttgattcctttctgttagcagagcataatcaagatctgaatctggatctctttctctccttctttgatgctgattttccacagtcttacatactatgattg

SEQ ID NO: 372808 - DNA, 302 bp, Cannabis indica
cataaataccttagtttaacttccaattacaaataaatacctaagtttaatttttagcagtaataatacctaagttatatttttgaaactctgtaggtacctaaccattaaatattaagccattaaatccacgtgcattttcttattggcatatttaaactaattttttttaaaataataaaaatttaatgacttggaccaatcaaggataattaggtacctacagaagttctaaaattataacttagatattatttatgtcaaaaattaaacttaaatatttatttacaactgtaagttaa

SEQ ID NO: 372809 - DNA, 593 bp, Cannabis indica
ttttttagttgtttttaatgaaaattatgatttcgactaataaattgacaatggcatgttattagtttttaacagttcagttagaaagagagactaacagacttacaagaaacgggaccttgggactattattattagagttagtcccacattgttaatgtgtggaaataaattgtcgtatataagatgaatgagctactcctcccattgccaattggttttgagatgaaccccattcaccttatcccaaattttaacttggtatcagagccacttgtgagcccaaaagtgctaccggtccaaaaagatacttccgttgtctcccctttaacctccatttgggaccttttcagccaatgtgtgccagtttccagtgttggagtctttgacttgtttcaaaatttataaatttcctgatatttagccttgtgagattctttcaaatatcacgtttggccccgtggtctcttaaaggtcgctcgttatacccacactttctaggccctaacgtgagaagggtgtactagagttagtctcacattgctaatgtgtgaaaaaaaaattgtcatatataagatgaatgtgctactcct

SEQ ID NO: 372810 - DNA, 831 bp, Cannabis indica
taaaatacaatttaatataatacaatacaatacaatacgacctaatacggtgttccaaacgagccctgaaaggtctaaatatctcaagtgtttcaacttgccaatagaatttaatactaacttcatacttgaacgtttcacagtcaaacagcgcataaccttacagtttgatgttatgacatcgcaaaatgactcctccttggacttggaaatactaagaaatgttcgaatattttttgtatgagccaacgaagctgaaagttcacttcctaagtaagcatcgtctaccaaagacacatgatgagtagtttccttgatatttccttggccatttgaaatgacaaaagtagtacattcttctccagctacttgaacagcaagatataagggagagggagggatgggaaaaaggaagaggtcatgggttcgaacttaggaccttgaagctgttaagctattaaatgattgtaaaatactattacactacactcaaaaaataaataaataaataaaaaaataacagcaatatcatgcattttgcatttctctataattccacattcatctacttcaacatcttgaaagaaagatccttccaacagaatcataaaccattcataaaccacgtcttccaaacattgatcttcacttggatttgttaacttgagaaacccatgtgccatccaaaggttaattaaaattctcaccttaatttctttatcttaagaaataaactacaataggcaaagcaaagtttcaaatgggagggaagatgatcataactcaatttgaggtgggtaagatatcatcttcacgttgataaggtatttt

SEQ ID NO: 372811 - DNA, 503 bp, Cannabis indica
tgaggggaaatcagggagaggccagggagtgctataatgttgcagcacacttactggtgctggtggtccgtgagggcgttgaaccaacattagtggaagaagatgagttagatccccgtgtgggatccaaaaacactgtagagcctatggagaacatcaaggaagtacgagtgtgcgacctcgaccctaccaagatcctccgtctgggaaaaagcctagagccgaaggaaagaaacaaaattattgaagcactaagggcggccataaatgttttcgcatggtgccaaggagacatgaccgacataagccctcatgtgattatccatgtcctgaatgttaacccagacatgccgccagtacagcagaagcgacgtccccttgatctggtaaaagcggacgccctggaaaaggaggtagacaagatgctgaccaacgacctgatccgggatgtgtgctacccggaatggctggctaatccggtactggtgccaaagccaatggcg

SEQ ID NO: 372812 - DNA, 776 bp, Cannabis indica
gtgctaagtcagaagtcattaagtctaaaactcgagctctaagtctgataactcacacctctctttctcacacacccagtgctacaaataaaaggggagtaagtaatgacccactaactaagaggttcaaacctctataaaatcttgtgttcatttactttattgttttaattgtgtaacacgtagcaagcatcagcattaaatatgactctgctgtcggttggccaaatcttaggtcaactgttcctatccctacgaagtttgtctttttgggctaattaattttttatttaattaaattgtgtgaatatctaatttgcgaagtggttatagatattttaaagttgttgagatattctctcataaatatcagtaaccaaattcaattgtatatatttatttatttaaataattaaataatggtttaattaaaggaatttaactacactaaataggagtctgatttgagaaatcaaaacgacacttctcactccttctgaactagtattttcaaaatacatgcatagagagaaaaataaaattagtttttcctctcaattgttcttgctcatgtgttggaaactcaacaagaaaaaggatatgcactttatcctaataccctacactattccttgtgtcgtgtgtggtggatcaatttggaagaaactagtgtgagtctaattatatttttgttatcatttggattaagggatacaacatacaagaaattttagaggataccctgatagatttattgagatatggtataatgataa

SEQ ID NO: 372813 - DNA, 805 bp, Cannabis indica
gattgggaagagatagggtgtgtggtccctgccaacaaggtaaacaaattaagtcctctcatcctcctataaatgccctacttacttccaaagtactggaattagttcatgttgatctaatgggtccaatgcaaactgcaagcattgcggggaaacggtatgtgatggtgtgtgtagatgacttctcaagatacacttgggtaaacttccttaaagaaaaatcagatacctttggagccttctcctctctttgtctgcagctgcaaaatgaaaagggtgtcaccattggcaaggtttatcgggtcagaagcgatcatgggaaggaatttgaaaacgacatatttgctcaattctgtaataaaatgggtattagccatgagttctctgcacctaagactccacagcagaatgggatcgtggaacgaaaaaatagaactcttcaggagatggctcgggttatgctgtgtgcaaagggagtggctatccggttttgggccgaagctgtgaatactgcatgttatatttgcaatcgagtacatttgagaactggtgcatctcaaactccttacgaactgtggaaaggcaagactcctaatctgagccatgtacatatatttgggtgtacctgttacatactaaatgatcgtgatcatcttggaaaatttgatgctcggagtgatgaaggaatttttcttggatactcaactaacagccgtgcgtatagggtgtacaacaaacgaacttttacagtcatggaatcaatgaatgtaaagtttgatgatttggaggtgtcagacaatgggtc

SEQ ID NO: 372814 - DNA, 551 bp, Cannabis indica
taatagtgtgcacattaaagtctcacacttccccttcctagagtcatttcatcttcttcttcccccaatttttttttatttattttctctcaaaaaaaacccactttcccaaactcaaacccaccccaacctcaccctcttcccccctcactcctccccagctgcagccacgaggcccgggacacgtcgacccagccgcagccccacctccgaccaccactaccatcagctgcagccacatctggcagctctccgaccaaccccagcgaagttagggttcccgggagttgaactccaggtacatatcccgccactccggttgggtagtatcctccgtaagccactatttgggcctcttccaagttgatgtatttttggaccctcttttggaaatcttagagattcgcagctccttcttgttgtaattcgttccagaacggggtttcggtacggatcccagcttggagaagtgcaagttgttgtccatcatcaactttcttagtttttgaggcctcttccttgaacctctttatgaaatttttcaatgtctc

SEQ ID NO: 372815 - DNA, 617 bp, Cannabis indica
aaaaagaaaataaagaaaaaaaaaaactctagacggggaaaaaaagaaaattaaaaactaaatgaaatgaatgagatgaaatggagagcaacattactaaatagttgactagaagtgaataagtggataataaacacaaaaaatggtacaacgtccaaccaaattatcatagtttcccttgtttaaatggaagagggtgcgaagaagtataaaatggataaagctacgtgatgaaccttagatcataaggggaaaagacagaagaaaagaacgaaacttacattaacagtttgattagaatcttctccatactttattgtcaatcttccatcgaagaaaagatacatgttcagctttgttccgaagtataaagggtgtggggaatgaatcacattgctagactatagaataccactttctcttatatatatttggcaaaccagtctcattgttaaaactctaattagtgtctccaccactgtactagggttttaattattatttttttttcctaaacttcagaatcatgagaaagtgacatgatctaaaatagttagcatgacacaggaagacgttaatataaaattggatagtgcatgtcaaccaattagttcatg

SEQ ID NO: 372816 - DNA, 1082 bp, Cannabis indica
caataagtgagagtcatgttgaattttgtagtggcaaccttggctttcacaggaaaggctaaggtggacaaacaaattcaatatgacttgcttgcaaaattcagagggtgaaacatcactaggcatgtgacagactttaagcagtccttctgtaacgtccccgcttcaagcctccattgggcccttacacccacggaataatggctcttatacacgagtacgtcactctggctgcttcctggattgatgactgaccctaagaccaacacgagtgtttccagcgtgctttgtcctcactcgcacgcttcctgggaaaacttcccaggaggtcacccatcctgaaattgctccaagtcaagcacgcttaactgtggagttctttcgtgatgggctaccgaaaaacaagatgcaccttgttgatataggtagtaccaatcaatccatttaagccctcttcaactgtgtagtcccatacctacacagtctcagaatcatcccacttgaccttccccaggcggtgtgggattgcacagcttacccggtatttccccttacggatcacgggactactgactgtcacaatcacccccccttacggggtccgacgtcctcgtcgaccacacttccggctgggtcaaggctctgatacattgtaacgccctaactaattaggcacgctacccaaaataattacgaaaccctaatcccgtaaacgggattactaattaaaaaggcgcggaatttaaacttttgtaattaacagaatgaaaataaaacatgtaataatttaaactttgcaatctaaaagttataacagttgggatcccaaaaatatttacaaactttattacaagtctttttctttcaaccggcctcagtggcaaaagagagtttcaaaatacatcactggtagacctttaacctgcttggtctgatgtggctcggacatgtacattcttcgcccaactcctgaatctcatggctgatcagctgaagccatccctttgggaatgtcaagtggaatgattctgagactgtgtaggtatgggactacacatttgaagagggcttaaatggattga

SEQ ID NO: 372817 - DNA, 642 bp, Cannabis indica
tttaaagttttagggtttatatgattataatatgaaattatattttgtgtattttgattttattatttttgatctacaattgataatagatttctcataattaattgtttatcaatgttcctacataattaatttcggatttaactaaggttagcattacaatttttttcttttgtgttcttcaattttgggattgtttttagccatagatctacccatttagtctttaatacccgaaattagtagtgtaaatgaattagaaattccaatccgatcgaaacccattaatttcccgatgtttttcgtcgatttttggccggaaaaaagcaagcagacccgaactgcacaaccgggtcgcgtgacccgtttcccagaaccggctggaggaagaagacaactcccagccgcgaagcccactcgcgcaggcggcgcgtggggccggctgggaggtccgttttcgcgatttttttttctgcgttattagaatttaatttctgattttcttatgtatttttaatttaaattttttgtactccgtttaacttaattattattattttaattagtataattatgtagttaaaaaattaattaaaaataaattttagtatgatttttcgtaaatcagtcgatcatagaaaa

SEQ ID NO: 372818 - DNA, 511 bp, Cannabis indica
tggcatcatattttctgtaaacaatgcaataatatcatattcctttaggataaaattaataaagtattttgacaagcatttaattaagagaagatatcatatacttatgcattgaaagaccagcaaatggtttaatcatttatgtattcagaactgtgaggttgtttatttccaaggaaagtttaggaaagtggaatgtaatagagagcgtaggacttttctctggaaatctcagccaatcatttcttgtgcctttctctttgtgtgtgtgatcgtaatttctacacttgtaatggaacatatttattctatctattgttagtttctgactctaactcaactatatgaatcaattctttactgttgccttgacagttagttagttgggtaactattagccaactgccatgatgttaatttaaaattagtataaataggtgttttaagtattggttggattttaactcatgataatcactctgtttctggcaagtgggtattatgattggac

SEQ ID NO: 372819 - DNA, 530 bp, Cannabis indica
ctggataggcctaaaaacattggatgtgatccaatgaacacccctaatggatgctaaggactcaataaatgagtataaaactcattctccggtaactataactcctatagcttttaagaactttaaattatgatatggaatactttttacactcataatattagtgataattgtgaaggttactcataacaacaagtaacttttcatatgttacaaaataatgatagtttgtcatacactctatgttacacatatttaatctatatattttagggtgctttacaatgtgcactcttaaaaaataaaataccgatgcacttcttttctgtttcggtattcgaaaaaatgttttagtgcaattttttttacagttgtgtacgttataattatttaagatattctaaaaaataaaaaaaaattaaaataatttacagtatagaaagcagggttcaaacagtttatttcacatgcgtataaaacaaaagaagtcacgcatgcaacagattgtttgaatcctatttttggcatgt

SEQ ID NO: 372820 - DNA, 580 bp, Cannabis indica
aaaaaataaatgatgatttttggaacacttgtgtgggatttcggcaaataagcgtctagactagatacaagtaaagttccatttgacccggtgacaagggcgcaagctaagagatttaaaaaagaactcaacaacttagttaatagaattttaaaacaagaggagatcgcaggcaacactgaaggagagcaaaaatttgtgtttctcatcaaagtggactcaatttagacccaagttgagcttatcacgttttccaaggcaattgccagctttccttttttaattttgtttcctttattttgtctttgttttatttggaaagttgtctttcttttagtttccttttttcttggttgtaagttggctatataaagccttgtaaacactttgaaaaatcagaatattttggaataaaattttgagaggttttcttcttgagttcttgagagaactattcgaacttatcaaggagtattccttgtggcgttcaacctgacttatcaaacggatttccaccaccgtttgtggcgtctaagaagattgtataaataagattactttgactctcgctaatcggagc

SEQ ID NO: 372821 - DNA, 593 bp, Cannabis indica
aagtgaaaactcataaataagactaagaattctaattgataaaataaaaaaaattaattgagactacaaaacaatattatcctagttagtgctgggaccataggtctgtgtaagtaagctcctaataagtagttctagaatttaccgagtaaattctctatcttattaatttctctttactccactatagattcagaattgcactcctgattacatagaacgctttattcaccaagaatagacacgctataaattatccattatttcaatccaaataatcaaaaatcctctatagatgatctacactgagtaaggacaaatttactgttctaccctttaatgtatttatccttaaaacacttagctacttgtaaatgatattttagtaaactaatataattattaaatgagcactctatcatttatcacgttaagtgaagctctaaggaaactatcgtttcacttctaataattatagaagttatagattctatatctacgattagcgctcccactcaattgtactatcatatttccaagatgtaagtattgggccgatccatttggtcagcattaacgaacaagtcaaagaa

SEQ ID NO: 372822 - DNA, 484 bp, Cannabis indica
gcataaaacccaacagttggttgtgtcagacccgaggggatggaatcgtcgacagtcaatgggggaagatcttcgatcgctggggaggccatgaatgtaggcgttgacccactgccgaatcatggtaatggtggaggtgtggttatggctccttccttttctcatggtccacgtgtcaatcaaggaggagtccctaaaaatagggggaaggatattgtaaatatttcagataatagcctagttgttattgataacaaaaaaaaaaggaaagtaagtgagggcagtaacgacaatgctgaggttgtacagcatgttaccgatatttcaaaaaactcatctttggcgggccttggcaatggggctcaccaatcatcatgaaaatactgtcttggaactgtcgtgggctggggccgccacggaatgttcagttcctaaaagaacttgtggttcaaaaaaggcctagtgttgtttttttgtgtgagac

SEQ ID NO: 372823 - DNA, 1026 bp, Cannabis indica
gatcgtttgacaaaaaaattaaaataaaatcatataaaaaagattacaacatcacaattaaccttaaaaacacacatattttatttcatccaccgctcaaaagacactaacagtagaaacagttgtagtagattcattcaacctcgtaatgagcactcaactattgtgtaagatatgtaaatacactactaacaaccctttcagtagccaagaatttgttattcccaaccactaagcacgatttgacggcgagccatcgaagaaaaaagaagaaccaacaacaacaacaaaaaacaaaaccatgttacacaaacaagactaaaatactcaaaactatatcacggagacaagatacaaaaacgctcaaaactatgtcactaagacaagactaaaaacactcaaaactatatcacagagacaaaactaatcacagtaagaaaatacaacccagaccaagccacgcctaagcccaacaaaggtcggcaagcctgaccagagaacaaatacaacttctaatagctatagatttagaaacgagaaatcttaatttttttttctataatatcctcactaatatagatatataaaagattaaaaaaaaaaactcactatattcataactagaaaacgaagccgcgcttcgcgcggttgtttaaatatatataaaaaattatagggagatttttaggtaatcctatttatatatttattctttttatgacaatatataatgtagttataacaaacataaatttttttttttaataatttataattttggaaaaataaagtttaaaatagcaagttacgcacatatatatatactagcaaaaattaacgtgcgaggtacgtatactaaatttaattgctagtttttttctatgttatttgtaaaatgtaatacaattaaaaattaaagtaaaaaataattaattagttattagttgggattatattatgtgtatttaatattatagtttataatagctgtcattaaaagtagatacgaactgtaatatattagta

SEQ ID NO: 372824 - DNA, 504 bp, Cannabis indica
ctcttcttgatcctaagatttatgtaacaacctaactagcataagcgtgttaacctgattttgaacgtactgtgcagatcgttgctaatcaacgaggtttataaaaatcgtgattaattaaaattttgctcatttaattaaatacttataatatagcatacaaaatacttcgggatcccatttacaaaacactttacaaaacgtttgctattcaatacaaaatatttgtcacccaacgactaactacaaaagccctgatgtctcgaggatcctacgctcctggcctaaccgccccgacatcttaaatcttcatctgctcgtcctcacggttcctcaactttggccttgcccttacctacacataaacatagcactgtgagtcgacagactcagtaagaaaagcataaatcataaacatacataaaccccgggttatgatcagacgcccatacccctgaccacaaccctaatgcccgtgtcccacacggtactgagtctcgaacg

SEQ ID NO: 372825 - DNA, 928 bp, Cannabis indica
atttaagtgtattataagcaataaatattcatagcttagttggttgaggtggatggcataatgtctaaggtcatgggttctaatcctataacactcttcttttgattatttttttatatatttttgagggccccaaaatttaattcgtcttgggcccatatattttcagggccggccctgggtaaaggttatggtgtaacatttttgtaagttgataatatcatttattttattttaataaatattatagtatattattaattaattataaggtgacactttattataatactaagtattataagacaaatgttaaagatactattagtgtctagcatcttcctatgtgttagtatttgttggataaattcccatactattgtcccataaataaagttacaagtaaaataaattagacctctttataaagcctcaacagaccattataactcatagagttgtcggttctgttttcctaggcttaggtcttttgtttcttaacaataaaaggaagcaaacaatatatatcaagactctaacaaactctcagctattcaaggcaaaatatctcaacagaatacagttatttctcagttcaaacaacacagccagcaacaacaaaaacattataaataagtggttcaaccttccactttgtacatcatcacattttcggccagcagagaaataagggagcagctgtgatttttctcttgaaacacacctcagaaacaagagagaaaatagagagagttagtgagagatattgttatgtaaatcataaaaataaagtgaagaaaagagagaaagaatagagattacctgctgtgatttgtagcatggaatctccatgaacttgtaaccggttttgacatcatagtgaagaatcaagcgtctttgagggaagcttgacggagatgtactcttg

SEQ ID NO: 372826 - DNA, 637 bp, Cannabis indica
gactttagctaattagaatttataattaaaaaaataaaaatcaagactttaaagattaattaggttttaattaagtgtcaatataatatcatcacacatcctgcaaaaaaaaaaaaaggtgtgttcttgtaaaaaaaatcattataaggacaaaattttaatttatataaaaataattttaatttttttaaaaaaaaaaattgtaatattataattaaatagcttaattgttaaaataattaagctaagggatttatatatatatataaaaaaattatttataaattttaattgctaaaaaaggtcttcttaaatatttatttaattacttaaaaaatagttaattataattaattaattctaaaaatggaatttttacctattggtaaccttctattataggtaaaaaaaaaaatgtaaccatatagttacaataaaaatgtaacaattgaatagtcacccaaaaaaaagagaagtatgaaacggtaacatgatattctaaaattactttaatctcactgtttcttctgtccttaattcttacttttttattcaattaataaatattaattattaattctttaagaaaaatctatacatccatctaattttttcttaatttttttattttttattt

SEQ ID NO: 372827 - DNA, 628 bp, Cannabis indica
atatcttttatgttctgtggtacatcccatattgtgtgattgtggtacaagatatattgactcgttgtatgtttcaagccatgttcttgtcatgtaataatgtgaatagtaattgtaaacatttaagttcatctcttttattacagcaagtgcatgagcacacagtaattcgtcaagttggaatctattgcaactgcatgttttctccttcgattgatcacccatgatcttgttggttctaccactttgaacatgctctcgtttattggctttacctacatattaggtcaagataatcaatgttctaactataaagaaaactaaaaagaaattataaggaaacttgtagttttaagtgattatcaattttctgccaatgagtccacaaagttgttgactagctttttctctatatgtaggtgtcaaaattgttgtgattttctgtgcttttttcctgtttgtgtatgtccattgttgtatcaaagctctcaatgactccattagttctctagctgctaagtttgcagcgtttagagattcagcaatgttagaagtcacagttgaatacctgttgtgtttgttgtggtatcttgaccatttatggtatccaacttgttgtaaatatggt

SEQ ID NO: 372828 - DNA, 523 bp, Cannabis indica
agtttacttgcaccttggataagagctatgtaaagaccgcttagcttaaatttgggaattagcagataattagggtttaattatagaaattatttattaattcagaattactaatttatgatattttatttgaattcataatgcattttatatgtcatatataaaaatttcgtaattttgcatgttcagagcccgtcaacattggaacatagtgtatggcttagtagaatcacatcttagtattttagtatggcggggcaatatagttagacattgggaatgtcgggattttagaatttcccaaattatcccttagtgatttttagtgagttttagtattaaggggtaaaagtgtgtttttagcatgaactgttttgtctttagtggttttaaatttaagcttataatttggtttatttgatttatgttggctgagatttattttaacaaaaagaaagaaaagaattacttaattcattttttacaaaactaagaaaaagatcacattttctctctctctctc

SEQ ID NO: 372829 - DNA, 551 bp, Cannabis indica
aatgtgttcgaaggatggtgtttctcaacaaacattgcttggcatcgaggtggaaggattgtcattgcttggaatccggtaagatacattgtggatattattaaatgtacaagtcaactaatgcatttaaaaatctctacaatggatcatacctttagtagctttgctactatcatttatgctttcaatgataaaactgggagagagacactatggaaagatttggcagctttagcaacaatggagaactggtttttaatgggagattttaatgatattctcttaaaggaggagagaataggccataaagtcaagtattatccggacatagcttttgcgaactgtgttgagcagtgtcggttggaagatgtgaaggcaactgggaattttttcacatggtcaaacaaacaacaagggaaagatagaatttgttccaaaattgatagagttatggctaatcaagcgtggctcgatcaatatcagacaacagaggctaattttttgagtgaagggacatttgatcattccccttgtgtgttatccttgtatcc

SEQ ID NO: 372830 - DNA, 668 bp, Cannabis indica
aattttactaaaaaagtctaacataaataaaagttcagatggataatttaatacatgtcaaagttcgaggggcatgattttggtagatatcaatatcgggagagcatgaattagtacataaacaatcactgaaataataaaattgaataaaattagataaaagtccttaaatctaacaatctcaataattcatgagcatttttaacgaccttaaaagtttagagacatgacttggtacatgtcaaaatttatggagcaaaaattctaattagcctaaaaaaaaatatattatttagtatatatatatatagatatagttcatgaaagtttggaatgagattactctagctagtttggattatggtaataaaagtagtaaaaagaaagacaaatgaatttaactcgaatgaattatctatatatgtatgtagtgccttaattatttatttgtattctatttttactatacaaaaataaagcatataatatacaatcaattcactattaagttgttttattattcttctatgacatgatcgaaatttaaatgatcatgagatatgtgtcatttctcaagaccgttatagtaaaaataaaaagtaatttctgcaatttttaactgctgatagataaggtaatttatttttgtttttgttttttttttcttt

SEQ ID NO: 372831 - DNA, 417 bp, Cannabis indica
ctcatttgttcttaagagctttcttcccttttggcaacttcaccaagtcatatgtgtgattttcatgcagggctcccatctcatcttgcatggtccatcccactcattcttgtgctcatgtagaatggcttcttggtaagtttacggctctcccccataagtgagcattacatactcatgaggattgtatctttaagttggtttacgctctcttgtggatctccttactggagtctcaactggtggtggtggaggtgcttcttgatcctgttcagttggctcaccatcatcatgaacatcataatcaatattctcaccacgatcttcttgttcatctgcttcttcattgacatgctcttcatggttttcctgttcatctcccccatgatcatcatgcactatgggtgaaggaactga

SEQ ID NO: 372832 - DNA, 415 bp, Cannabis indica
cattaacatctttggttggcccttcatagagagtaggacaagtatcaatagtatgccccacaacttgacatattccacatggttttatctgttggcctaaagcaagttgttggatcatggatgttaattgagctatttgttgactaagctggttctcaatgagtttgcccacttcattaacctatcgtgatgttgagggagagtctcggcaagtgccaaactattgtgaattggcacccatgtttgagataagatttctggcttctgttggggttttgtctaccaatgctcctccacttgctgcatctatcatacttctctcagaaggtaagagaccttcataaaagtattgaattaggagttgttcactaatttggtgatgagggcaactgcacacaaccttttaaatctttcc

SEQ ID NO: 372833 - DNA, 502 bp, Cannabis indica
cccaataatattttgtcttttagtgattttagtaattgaaaataaatgtttattttattgtttatttggctgaaatgagttatatgccttaaaagtcattttcttttcattttctacacttagtcaaaaaaatagaaattttcaagaaacactctctcttttcctctctctttttcggccctaggagcagctggattcttgctcttcttttcttgtggattcaaggattttgtgtgtttaatccaagctaggttagcttctcttgtttccttctttaaattgttgaattttgatgaaaagatgatgatgcatgcatgaattcttagttgttgttactgctgtgttttattgataatttctgagatgtaagcatgttaatttgaagttaattaagttgttagaaatgcatgtaaattactttgtttcaagtttggaatttctagctcaaaaatgtgatttttgaaggaaatgttgtgaatctgttgctgtgttgttgttaatg

SEQ ID NO: 372834 - DNA, 674 bp, Cannabis indica
ttttacttattggtgccgatgtacgctcgtaatattgacactatcactataggtgtttagcggtctagtgacacaaagtctgtaatcaagttaggtgcagtgtatcagagtcaccaactaaccgataccgaactagggttctacttagttctacaaatgtacactcgttaggtgtgtagtctgtaataaagttaggtgtagtgaatcagagtcaccagtttcgtaacaaaatcactaatcgataccgaaataagattcgacttagcggtgctgatgtacacttgcaacagtgacactatcactgtagatgtttacgagtcccgtgacacaaattatgtaatcaagttaagtgtactgtatcacagtcacaagtttcttaacgaaataactaaccgataccgaaatagggttctacttagtggtgccgatgtacactcgcagtagtgaaactatcactgtagttttttaggggtcccgtgacacaaagtatgtaatcaagttaaatgtggggtatcggcgtcactagtttcgtacaaaatcactaatcaataccgaaatagtgttctacttagtggtgctaatgtacactcgcagtagtgacaccatcactgtagatgttaaaaggggtcccgatgacacgaagtatgtaatcaagttaggtgtagtgtatcgga

SEQ ID NO: 372835 - DNA, 1066 bp, Cannabis indica
aaatggaatttttttttaaaaaaaaataattgatgccaacagtttataactgttgggaatactaatgttgggaatacttattatttccaacagtgataaactgttgggaaatgttctttttagtgtaaaaaaaatctaattaattttttttcttaataaaaaaattgtatttaataaaagaatatactaaaataaagtttcagattttttttttaaaaaaaagaaagaaaattgtaatttttttgttgcttaataaaagaaatttgtatttaatgaagtaaattttttaaaaaaaatcaaatttaaaaataaaaaagaatttttttcttaataattaataatttgagaatttataaaattgtaaaatttggaatttatatattttcaattagaggataattttagaaattagttatatttaaaaatttattgtcaaaattattccaaaaaaattattgtgaaagaaaaaaaattattggagaattattttgaatttagttataaaaaaattgtatttaataaaagaaatttatatatatatattttttttgtttaatagaagaaatttgtatttaattaagaataaccaaaataaaagtttcagcaatttaaataaaaagaaaatattattgtagaattatttttaatttagttataaaaaatagtatttaataaatattttatatattttctctttttttctcttaatgaatgaaatttatatttaattaaagaaaaaaaatgtttcagccataaaaaatagagggggtctaaatagaaccttataaacctaaaaaccctaatttcctatttcttattctctgtcccagtcgataccctctttctctctcttgctccttcatcatcgctcactcaacgactcaacctccttcatcgctggtgagacacgaacgaatccagcaagttgacgatgggcatgcgacgttaggcaaggtcaaaggaaaaggcacattttggattcgcagaggtggagtgttgggggtttacagaggtgaggcgggtatttttatagatatgcgattttcttttttttttttttaaggta

SEQ ID NO: 372836 - DNA, 500 bp, Cannabis indica
gcaatcgcatgtggcagtggttgagacttctttggaaacaaagaggttgtatagctacaactattgtttttttttcttttgggcattttacaatttggtatacattattttaattaattacaaaatatgtgcaaaaaaaacttattatcattttctcatacatttttatactagaagaaaattacgtgcaaggcacgtatactcagttttatgtcaggtgctctataatttaattgagaaagattcaataaataatcatataatttaaaatggtttaaaaactaattttaattagtgtgtggggttatttgaaaatcaatagtgaaaagtcaaatttaaaatttgtagaaagagaagaagagaatggagattagctatgtatttaaaaaataataatgctacacacttactacggacacttaactcgagccggtaataataaaattataaaaaataggggtagctgtatattatttatcaataatataatgtgtagatta

SEQ ID NO: 372837 - DNA, 475 bp, Cannabis indica
tgaactgcgtaacgtctatctttcatcttacttattctaagcttcatgaactattttaccctaactcaagaaattttttgacttcttgagttctaacttttcttcaaacataatcgttctttaatctgttgagtactcctggtcagcatatttgcttgtttatcattcgatattccgaccaaacactcatcttgtgtgttgtcttttgtagatgaactcagttgagtcttgggaaaacagacatcagatccaccaagacctgcttcaacttctgcacgaggatcatcctcgtctttgttctagcctaccttcctctagcgaaggacattcttcaaaccatgtacccagccatagaatgattgctcgtacaaaaaaaaccacgagtctggttgacgcatctgatcctcaagtggctcgacacgctacttttcccagcgccgaacaggatccagatggaggaggatcatgaagggga

SEQ ID NO: 372838 - DNA, 953 bp, Cannabis indica
tgaactaacttggatccttgctattctcaaagactttggtgtccccatttcttcaacacctaagatgtattgtgacaacacagctgcaatccacataagtgaaaatcccatttaccacgaacgcacaaacatgtggaaattgactgtcattttatccgagaaaaagtctaacaaagttctctccaactgatgcatgtctcctctcacaataatctagctgatatattcacaaaggctcctctccccttcacaattcaacaatcttgtattcaaaatggatatcattaacatgtacaattcatcttaaggggctattagaataagttagtcttacagttagttagttattaggagctaataggggtgttcatccaatccaatccgcactattttgctcatagtgcatccgatccgcactaagtgcggtattttatttttcggatccaatccaatccgcacaatagttcaaatccaatccaatccaatccgcaaaagtgcgaattggatcggttactttggattggttatttttaatattaaattatttaatacttatgaaaaaaatattttttttttcacataactagcaacaaaataaaataaattatagtcattttatctccaacaacacattaaaataaataaaataacaaataataaattcaaaaaaagaagaaaaaattatgtataaaaaatatttaattttattttaaattgtatgttaaaaaaatatataagaatagaatatacatttgatctatgaaatgtttcaatataattgtattttatgtattagacttttaaataattattttttttttactattaaaatgttatttgtataaaaaaatttttaatttttttataaatatgtgtggattggatttgatcggttacttttacatgtcaatcaacatctaatccgtacaagtgcggattttgaatttttcaat

SEQ ID NO: 372839 - DNA, 636 bp, Cannabis indica
tgcattccacttccagccggcaacttagtctccatgacaaacaacaacaaaggctgatgctgcttgacaagcagggagagattacggaatgctcgagggctccctaaacctcgagcattccaactgcagagactcatttttctcggcggggccgcgtagcagcacccgccgttggcttatcatcagacatagtagggaccacatcgtcatcagaaataacagcccttgctctcttcagcatacttcgcacaaaatctccaacttgggcactttgacgcacgaaggtcctcctggttctaggggaaatggcagtggaaagtgtggggcgtggttcattaataaccacccccttgcctcctcttatgtgtgagggaaggctggtaggagacagagcaatagcttttccttttgcaacatgggtggtgactgaatcagtcataataggtggaggaatggaagtttccatagcaggtcactactacaaaaacaccctttagaggcggtttttaagccctttaggcgtcggttttcgcgaaattcgctaccgacgcctatcagggcgacgctaaagggtttgatttgaaccgacgccatatatacccctatggcgtcggttcctagctaggaaccgacgcc

SEQ ID NO: 372840 - DNA, 506 bp, Cannabis indica
taatcaattttcaaatttaaacctcaaaatatcaaaaaattattaataatctattaaaaattaaatattattaatttacaattgatatttaagtttaaatattttaaaaataataatttattctaaaataagggtttgaaaattccaaaaaaatcaaaatttggggaaaaatcccacaaaaatcgcatttggggtgttgctgcccaggagcgctgcacatgcagcccagacaggctgctagcagtcttggacgcgcgcgcaggagggcatctaggaaggaatccgcgcgcggatgaccctgctagcagcgtgttatgtgcgcatcatcctgtctatacccaggtgcaagcggagctgaccatgtcttcagacatggaatatcctagcacgtgcgcgcggatgcttaccttgtccgaagcctagaccgtgcgtcgtgcaccaactcgacaccaattcaacccgaaacttcaaaaattcatatttttctcaacttttatcggaatcga

SEQ ID NO: 372841 - DNA, 564 bp, Cannabis indica
tcaccacaaataggagaaaaaaaaaataaacatatatatataaataggaaagcttcgaattcgggtaccgttaaatagtcgtcaggaattcgtaaaacctaattagcagtgggagaaagagatttctttcgggtacaatgggcagggagatcaaagaagaaaggtttggattagaaatataataccaaataagcccctccagcctcaatcattctaatttctgaaatatatttatatatattaattaaaaataataaatctcaagcctaaatgggcttgtgggcttacccaaatatgacaattcttaacttgggcttctattgttgacttgtattgttaagtctaagttctctctctctctcttctttttttttttttttttgataaacactattttggaccctgtattttgtaaaagttaataattggacattctgttttgttaaatgataaaatgaaccctgtatttttaaaaatggtacaaatagaaccctaaattgatttttttgtcaaaataaaatttaattataatccaatctaaaagtgctatgacaaaactgttta

SEQ ID NO: 372842 - DNA, 642 bp, Cannabis indica
tatttatgagagtatatttcagagaatgttcttggtagcttttctttctatggctcttatgaaactcaacattctcgacccctgccttaatgagttttgggggtatttatagtgtttttgtggggtgatccctagaactgagctacatgcccttctgtatttttcaatagaggcacacattcccaacgagtgtaacataggaaatgcatggtctatgccctaggttttttaggggttaggtggatgtaatccattatcccttcttgactgatgtgattcctcagatggggtttgatacctcccggaggtgctttgctatagttttgccctccgggagtacgtggacccctcataccttctctgggaggtatgtttcttactgatcatcttgattaaaaaggcttagtcgaattgtctcaaaaccttactcctcaaatccacgtgttgcagccgcgttgatccacatattttggataaaattaagggcaacatttacccccaagccttgtttagtgggaagtaaacgaggcttgcttaggtgcctccggttgtcttattaacttcctggcatgtgctttgggcgcgtgggggtgcatttatgaccatcatctttgcagtttttactttttgcaggcaacgatt

SEQ ID NO: 372843 - DNA, 682 bp, Cannabis indica
taaaataatactaactttactatagctgaaggtattttggttatatttaaaaatattttaaccttaagatcctaattgaatattttacaaaacataaggtttaaataaaaattttagagctcaaattgataattcatgaaatatagagtaaaaaataatattaatcctttaataaataagttattgaaattatttatattgtaaacggtttagtaagtttattgttgttcatgttttctctttgagttgtatcattatagaatatttgaggtggtaaataattatagaatttatatttttataataattaatataaaaataaattttttactatttttcaaatataaactaaatacatagtatatataattggatagggtcgagtagggtaataaatgagtttttaagtaaaattgtcatctctacttagtaagaaaaaatatcaaaaatgtattttaaaatttaaaagatatttataaattatcataaaattatgatatttgtgtgtgtttgcagtcagggacggagggactttagcccatgtgtgggctaaagccctcactcaaatatatacattaaattttttatatgtagatatatacatatattaattcactttgctcaatttattaaagtccaattcacaaaagccctcactcaatatcttaatcatgattcatga

SEQ ID NO: 372844 - DNA, 648 bp, Cannabis indica
taattagctttattagtcaaggtagagtaatccaaacatcattttaggggcccgaataaaaaaatactttttaaaaaatatacatatttttttagtaatttttaaaaataccatttatctttatagtaagggtccaatttttttttccttatgatccatttcaattcagggccggttctgaatattgtagatgcatgaaaacaaaattgtttttttttttataaatccgtaaaaatataaaaaaaaattgctattgtaggtactttttgtaaatttctcaaaaatttgagtatagggccaatctgaaattatttgggccttacataaagaaagttaattattggacccttattttaagaatttatgacatttttgaaaattatcaaaaaaatttgtatatttttaaaaggaaattatttttttgttgggccgtcaagttaggtgatgtaacgccccgatttcccaagacgtcacactcgctagtccgtttaaaattatttataataaagacaataaactaatttattgaaaataaccaaagtatgagatctcattattttaaaacagaaacacttgattcatttataaatttttaaacattaatttttacaaaagtaaccgagtcataatctttaaagaaatattttt

SEQ ID NO: 372845 - DNA, 421 bp, Cannabis indica
cattggtgccggtgccctcgcttccaatctagtgtaccacgcacggaccaagcacattgagatagacatccactatgtccgtgaaaaagttctacaaggaaaattggatgtgagatacgtcccatcttatgatcaaatagctgattgtctcaccaaagggttgtcaccttcacgctttgctttcctcatcgacaaactgttgggttttatgccctaaataaaactcattacaatctgattagttatcaatttagaagtgaagcatgtttacatgtatgttacatgtttatggtttaatacatatatttgatatatgcacaaaatcagttaaatccagaacatatagttattcacaattacagtatcgtcaatacagtggaatgtgattgtgattatatgattcaaaagatttggtccctgt

SEQ ID NO: 372846 - DNA, 565 bp, Cannabis indica
gtataattatagcatgatcttacttttatcacttcattatttgttattactcattgaacctatttcttaggatctccagtctataggttgtgttgccactatgagtgattcataaatctaagggcaacagtcccattcctttcgatgttttaagaactttctctctagctaaaccttttgtcaaaggacgagtcaagttatcatcagtgcgtacatgatccactctaacagctcctgttgagagaaactctctaacagtgttgtgcttacgacgtatttgtcgtctcttaccgttgtaataacggttctgaacttttgcaacagtcgcggtactattgcaatgaatcaacacaattggaataggtttttcccataaaggaatctcagctagcaggcttctcagccaacctgcttcttcactagcaatagctagtgctatcatttcagactccattgtagattgagccagaatagtctgtttcttagacttccatgaaaacagctccaccagctatgctaaaaatatagccactggttgcctgggagtcatctgataagtgttcca

SEQ ID NO: 372847 - DNA, 1023 bp, Cannabis indica
cacaggagaacaacttatgatccaacaacaaacaaggctttattacaacaagcgttggataagattgacgaactccgggatgagtctcaaatacgaatggcagcttatcaaaagaaggtggctaaacactttaactcaaaggttaaagatagaaaatttactattggtgatcaggtcttaagacgagtctcctcggccactcaggaacccggagtgggggtacttgggcctaattgggaaggacatacgaaatcgaggacgaaatcggctccggaacttacatgctcaaaagaatggatggaaccatggtgcctagggcctggaacgccaatcacctccaaaagtataacctatagtcgaaaaattatactcatgctccgtaaagtaaatttgtatcggacaagtatgtgcaacctctaaataaatatttaaagctgagtgccctaaaaataatttttatgacactcaggggggtagtaaggcataccacgcggacaaatgtaagacaggccaaagagtttaatgaagttaaaaagtttaacgaagttaaaaagaaaagtatgtatttatgtattaaagcttagatataaaagatgttcaaacccgccaaaaaagctctaaaaaaactattaagggcctagggacgggccttaaattgtctccacttaagaaaaaatataaattatctgaaagggggaaaaagggactgtaaataaagaaagatagtgataaaagcattcgtggttaatggttggcttagccccctgcgctcctctaggagggcatcaagtctcttctttttctcccacaagcggacaagaacctcctcaggcttggggtagatatcgagcttaaggttttgaccgttagtctgccaggctataaatgttggaatttattatacccggatcttagatctactcacaagtatgttgtttacacaccctaaatatgaactttgtaaaacgataaattaaacacatataaagttaagaaaaacttacattgatgcagcggaattaa

SEQ ID NO: 372848 - DNA, 728 bp, Cannabis indica
aaatagcaatcagaaagcacaagacatgaaaaatcaagaagctcaaaaagtaaagtaaaaatgcaaggtgaccacccgcatagagactcagaagtccattatcacctgacgtcgatcttatgtcagaaataacaaccttcccttttccagcaaaggggggagatggccgaacatgtgaaatgggctcccttatgcgaattgcatgttcaacaagcctgggtgtggctgggagtttcttcttcctattcagtggggtcgcctgctggtcctcggcttcatcttcaggattcaaaggctcctgagcatactgcttggccctgacacctcccttcaacttagcctcgcgcttaagttgaatcaactcatcctccttatgagctcgttcaggctggccagcatcagacttcctcttcttccccaccacggacttaggacaaaagtcctcggggtaaagcccgtacttcaccaaattatcaccggaggtcaactggataatatccctgtcttccctcggcagtcgggcaagtttttgagctctatccctaagagcaagactgaggggaggacggtgatatgtcagaatctacagaaaccgagtccgggtaatgctcggatccttcaccatgaagtactcatcagcaaaatgccctattttgctgatgcccttgccatccgtaccggtcaaccacttgaagcctggctgagagaagtgaagtaccccgacctgc

SEQ ID NO: 372849 - DNA, 619 bp, Cannabis indica
gattatttttttgaacagtttttatgctttaattttattgtgctcttaatgttaattttttttttattttcagtattttgtaggtaggggttttaaacttttggcttggataagaaatttcactaaattttctatttgtgtaaagtattgttttttatttttttttataaattatagtaaatattttgaatatatattgtaattgttataaaaatctgaaatatgttagtaaaatgttgttgtgatgtaaatttgaaatacattgcagttatgatattatatatataattagatataatatatatttattttgtagttatgatattatatatataatatatatatttataatatataaatattatatatttatatttataggcagccgattttgtgccaatatgtgcaaaacacggattgcaatccgtgtacggcaggtaggtcccacgttagaatagttttatttttaattatttaattaagttggcaaccgattattctaggtttgttaaccggttgtacagttgtttttttaattaaaaaataaaaggtacaattaaattactgttcacgttagttaaagtaagaaaaagtacaacagttttactgttcgtggcag

SEQ ID NO: 372850 - DNA, 643 bp, Cannabis indica
tgttcaagtcataatgatctccattaatctacactgaagattgagagtgagtgcttctatacatattcttctcttctacctttcatatacatatataatagtgtacgtgttgtaacatttatgtaatcaatctttttagtccttgtattattttacaattatcttgattatcttccattgatatataaaatctcaaacaatcaaaatcttatcccttttcaatggaagatgagataaatcaagattttaagaatacaagaataaaagatatacaaaatttttaacacattcacctcaataattggtaagtgttgttcaaaaaatttcttaaacgtttagattagtatgtaatttattttcgatagatctgtgtggttgttgtttgcattaatattgttttgcttggttttttttcgaatggcgagatttggttttctcaccaaactgggtttttttttaacaaattatcgatacctttttgattttatatcgatatcttcttgataattagagtaagaaggtaagggatgacaattttcgatactttttcggtatatcgatactatttcgatcaatttcattccaggataaaatacaacaaaattaatcacacaatgcaaaatcattgataaactatcgataa

SEQ ID NO: 372851 - DNA, 1100 bp, Cannabis indica
tactgctattgataaataacatagctaaatatatttttaaaaaaataaaaaataaagaatagattatatgtaaatatgtgcacattaattttgtatatattatatattcaacttgcactaaaaataatcaacaataataattatattatatttatatagatagtatactcatgtgaggtgtggtgtggtatgaggtgtttaattattattttttttgaaaaaactcttttttattaattaagaggaattaataaaacatatgtaacaataaaaaacttatatatatgtattgtgcttatttatttatttatttatttttatcattactttctttaaaatatttaatttttgataaatcaaaaaatatttgagtaacttaatgggaatggtcatagttgaaataaaagtataatattatgactagttattaagtaaaattaaaccttattgaaaatatgacatttgtcattaaattaaatagagagtgcaaaagagagtgtgatagagagtgtccttagcactcctcatctttttaatctgatttttgtttttagttttttttttttttttttttgttcaaacgatcttagaattatgtgactgattatttagcttggtttttctaattttggtactgattatgtctccaaacagaaaaaatgtcctgattgaattgcaagctattattttaacctattgctattaataaaattacatgatttattcaaaaaataaataaataaaatcaaaaacacactgtacttttatttgtttaaaaaaatttagaaaaaccttattttaaattcatagttaaattgagagtaatttacggtcaaacttcttaaattttaaagcttggcacaattagtccttagactgtaattttaggggctgaactctccaatctacaaaattgttttttttttcttattgttttagtacactttaatctgttaagtgtcaaagtggagtgccattgtatacacaaacttaatattaataattaaaaaatatttaaaaaattaaaatcaaaacaaaaaaattaaaaattatcttttttcttttcctttttattcccttcttaactagaaatttaaaat

SEQ ID NO: 372852 - DNA, 1134 bp, Cannabis indica
gctgatttgtttaagaaaaaataatcaacacgaggaaagcatgacaggaatccgagcataatatgaaaatatcgagctgtatcgggtctatcctctaaaaatagtggcacgacaagcacgatctatattcatttagaacacgacacagtgtgagtcatattttaaaaagcacaaaaaaaaatataattaggagacacacgaatctacaacatattcaatactccatgccttgaaaatctcataaaaaaagagtgctttcttgcaatatatctgtacttttccatattcagaatatgttatttttttgtctatctctaatggaaccctaaaatattaaatttgtgaagatttaggattaaattaattcaaacctaattctaaaccttattattatatataacattttgtgtagtgccccattaaatttagtggggtgctataaatcacacaaactttttttttttatattaattattttttatttcttatataatattatagcttttttcttacttttttttaattaatatgataatacaaaaatgttatatttaattaaaaaaaaaactattttgtgttacttattgttggagtaaaaaaaatgaagagatttaaaaatactaaaagatattagtgatgtctagcaccctattacacatcgatatttagtttaattaaatattgacttatgtagttaaatatattaatttttaaagagaattcggcgacatgtctacaaaaaattaaatactactggtatctaataacaatgctaacaaataatataatgtaaaatctacacatttttgtattaaactaagataattatgtttggagttattaattgaaagtgaaaccacttgaattcttctgctttattggtaaatgaaactgacaagacattaaagtacatcctacttctctgttgctatgtcacgtggtagagtactttctcatgttttcaataagagtaacttttttttttttttcataagaataacttctttcaaaaatattactttatggaagcactaagttcttatctaacctatccttttcatatttagattgatttgatcttgatttaagcttgaatataaaaagaacaaaatcaaagattcaacaccagaattt

SEQ ID NO: 372853 - DNA, 1187 bp, Cannabis indica
cttggagcgagcatgggcgatccgcgacaatcctccatctagtttctttctcttctcttgatttcttatgtttttatttgtgtttagtttaattatagatttgattatgagctaaactctctatttagggatttgatagatattgactgagattattctatggattaatgttatttaattgttctttctttctctattattgtgatttattcatatttgtgcttattacatgtgtttgattggccaccttatgcatgatctatgatctcaatacaaaatctgaaagtgagtattgagaatgctctaaataaataaacatatgttttgatgtgaaacgagagtattcacatagcttatgtggcttttagattattgcttaatgcgaattgtatgttgttctatctcagagatgcagtagttggcatgcaatttaggacctttatgatctgagaagagtttaggttaatttataatctatcatcacataggaggaagaagaatggttagctagtgttaacaattgggtaatcaaaacaattgaaatcatatccctaatttcacatccattgttaaccattttatttatttattttatttaatttagcttagtttatttagttcaaaattaatttattcgattgccaaatagaaacaagaatttaattgattggtacttaactacagtcctcgtgggaacgatctcacttacctgagtattacttgttaaaacgatacgtatacttgcgtgttgtatttatcacaacaagtttttggcaccgttgccggggactgttttagttaatatcaatatagttgaattctattctaatttggttttttttgttttaattttactaatgttttacttatgtgtttgaactgcaaggtaaatcgaaatgctataccttgtgaattttatccaacaacacaatgagccattctattctgcttgagggagattcaaggagctcggagagagatgttatcccaatttctcaagtgggtgttttattctattctcttacaatggacttgatgatgaaacaaaaagttgggtggattatggagcaatggtaactggggagcctttgttaaagagaggctgtgaagcaataaatttgttgaatcatatggcagattttgattacgattggtagtgggatccatcacttcagggttggagtcac

SEQ ID NO: 372854 - DNA, 813 bp, Cannabis indica
tttgtgacgaaatagttagtcagtaaaagttaatgatcttttacaactaaaatattattctgaaaataatttatttttacaattattaataatttatatgtaccaagtaatcatttagttaccttaaaacataagattaattattactatattaaatatatattaactactaatttcatccttaaaaaatgtgattaacataacttatatatttttttagaatatatatatatagttgttgaattagtagcaaatatataattaaaaaaaattaattttactaacaaaatatcgtaacaaatagttaattttgctattaaaattttgttgcaaaataaattaaattgaattataatttttgaagtttgaaatttatttttaatatttaattttaaattataatattaagtgtataaatataaatttatcatgtgtacaagagtgtacacataaacagtccatgatgaccgttaactggatcatgacaccttaaatttattaacatttcagtaatttggaagatttttaccgtcaaaatatgagcatgaaaaattaagtacaagagaaatcacagttggtagggtttagctgacaaaaaacaaaaaatgaatcttctatatatataagttttacaaaaaaaaaaaataataataaatcccattacttttcaatttcaaatataatatttggatggtgttttgcattaattaaaaaaaaaaaaaaaaaaaaactctggcttcattttaaatatgtagtttcaataattgattatttttttaaaatcaataatttaattttcttaaagaatgtacg

SEQ ID NO: 372855 - DNA, 825 bp, Cannabis indica
acttttgcaaaacacagggtccaaaatggtatttaccgttatttaagtttaatacttcattaaaatatcattattacaagtgtgatgcaactaaaagtttaaaataactaaaacaataacactgtcaagtaataaaataaaacaaaatagatgaaataaatatacaaaatatccaaacaaaaaaaaccactaaaaatatatattttatatttttatatataaacaaatataaataattatttaatatatatcaatgtaatttgattagatttttagattcacatctaataatcaatccaatctaattagaatctagcttttaacatccaatctaattcaattgtaattagatattcaatttttttaattggattaaatttgatcagtagggttcaattaaattagattaaatgttgtcaccactattcccaactaaaatatcgtaaaagtgtggattagatcagttacttcaaattagttaatttttaatttgaattatttttatttattaattttttttttcacataactaacaacaaaataaaataaataattgttattttatgtcctcaacaataaattaaaataaataaaaaaatcaaattcaaaggaagaaaaaaaattatatgaataaagaaatgtttaatttttttaagattatattataattataaataagaatgaaatatacatttcatctactaacttttgaaatatatttatatcatgtgtattagagtttttttttttttttttttgttaatgaaagtagataacttcattaagaaagaatagccaaatcggccattacagcattgttgataa

SEQ ID NO: 372856 - DNA, 412 bp, Cannabis indica
ttctggtacttatcttctgccgtaacgatgatatcgtctcggaataccttctctgcgactggagtcctcacattcgggcaggcgaccttggaaaggttggagtcatccaccgactgatgccccaaaatcagcttggccttccgacagtgctccgtcgtgaccaactccctgacatcaaggtcctccttgtcatacgtgacgaagatcttggctcgttgaaggaaaagttgggtaggcttggtccgcatataaggagggatcctaacccactccgtgagaagctccggatgctctacagcctggaacccggaggagaagaagaagcggtgacggtattccttcacatgcttctgatgattaaaagggatcgggccctcattcaaaggatgggcccggaagccgtaaaaaccgt

SEQ ID NO: 372857 - DNA, 926 bp, Cannabis indica
catggactttgaccaagacccggacccaggacctggctcgggattggagactcagaccttgactcaagacccaaacctagattggggtcccaaactaaaaattagaaccagaatcgcgacccaggactgggactgtgacccaagccccgaccccggtctcggtcccaaacctggacccggacacggactaggacccaagatccgaatcggaacgagactgggacctaagattggataaggatcttgacccacaacccagggcttggatacccaacccctagtgggcgtctagatcttggaatcgtaccaagacccgaacttggaaccacttccaaactaggacccaaacccaaacttggatccgagaatcgaaataagaataagaactggaataaggatcgtggaaccggaattagacctggacccaaaccagacctagacgcagaaccgaacaataagccggacccaagctgggatcaatacccagacccagacccgaacccaaacccagacttgcgccaggacctgcgacccagattccgtaacccaagacccgtgacccaggactggggccagaatcgagacctgtactagaacccaaacgcagacccaaacctagacccagactaagacccggacccagacacggactgaaacttggacacagacccagactcggactcgtacaagaactcagactcgaacccgggacggggacctagaccgatatcaagtatgggacctaaacccgaactaggaccaagacctgaaccaggactaggactagaatccggattgggaatgggagttgagacccaaaccatgacccaacgacatgagctagaactagacaaggatctgcatttggacttgggtacccaggacccaacgacccgacggcttagacccaacccactaatcggtgt

SEQ ID NO: 372858 - DNA, 626 bp, Cannabis indica
gagaaattactattctaaaatttacaagtgattccaggttaaacttttcatttcaaacctttctcaatcacgtagtttttttttctttcttcaacactttcgctcacaccattcttcattcccccaaacttactgtcaagcttatggtatcattcaaaatacaatgaggatagaaagcagtgttgatacatcttttagttcaatgggtgaagaaacgaaataggtttatgctcaaaagggttcactaaggatattcattttatggtaggcttgaaaagctcaaactatccaaacaaactgcctaaatcatgttcctagaaaatgttgtcaaggatttcacctcaagagaataagacatgcaagttctaagctattcaatcaatcttaccacaaaccacagtaaaacaattataacatatttcacagatcgtcaaattgcattcatacacaggctttacaagcatccaaactaatccaaagagttaaaagaattaagcacaaagttttaaaatttcaggacattccacaaataacaacagcaacaaaattgatctcatcttaattaacaacacactaaaccacgtcaactaaaaaaaactagactaaacaactaaacaatcaaacaa

SEQ ID NO: 372859 - DNA, 553 bp, Cannabis indica
ttcgaaaggttgggagcaccccgttacctaagggacgacctaaacagaagaaggggaacagacgagcagaatactacaacgaatgtgtagtctggagtcaataatcaaatccccgctcagaaagacgctgacgtagccaaacccgacaagaatgccaatgaagtcagcccagtcgtgcaagcccagcttgacgaactgaagaatatgtttcatggtatggccgggcagcgtaacaataatcttgagttagaccgtgcacgcaaaactcccttctcgccaaaaatcaacctcctgccactacctcacaagttcaagatgccaacgtggaagatgtacactgggagagaagatcctctatctcatctcaagtatttcgatatgcaaatggatctacaaggggtgcgaggagaggtatgttgcaaaatcttccccgcaactctgtcagaggccacacagcaatggtatttcaagtttgctccaggaaacgtttagttcatggaaaaccttcttttcggaattccatgaacaattctcttcctcacgccaactccca

SEQ ID NO: 372860 - DNA, 700 bp, Cannabis indica
ccacaaggagcaccagggggtgcagaaggagtattggctccagttgttccccccagagaggcccagcatattcccgccctgtcacctagacccaatgggagagtggttatgatctcaggaggaccccacatcggaggaactacccgcaaggagctgaaacggtacgcaggggccgtaaaacacgatgaggtttgggaagttactcaactcccagctcaaaggccccgggtaatggatcaacctattaccttcacggaagaagacgctaaaacggtgcgttttcctcaccatgacccgttggtcatagagacccccattgccaataagatcgtggccagagtcctgatcgacaatgggagttccgtgaatctgctgttcaaaaaggccttcactgcaataggcctaacggaccgagacctttcaccaagtggttcccaactcacagggttcaatggaacaacacttatcccaatgggaaaagtgaggcttccagtcaccctgtgtccggacaaacccagagcaccttcaagtactgcacgtttgtggtggtggactgcccaacagcctataacgcaatcctcggctgacgtgactttggtgcagtcacgtcaatacggcacttgtgcctgaaattcccaacccaggaggttgggatagggactgtgaggggaaatcaaggggaggccaggcagtgctataa

SEQ ID NO: 372861 - DNA, 1124 bp, Cannabis indica
ccttgataaaccggtacagactcgcatgtcttagtttatcaactcattacaagatgtccgtataagcgacttcaataggacgcagacatcctagactcgactagtctcgaatgcatcttaagcctgcgaacttatgcaagaatgtgaacaaccaactcgcactacagaagtcacatacattgttgtatttaatgaattaagctggaagctattcttcatttattatgtttacattttttagtttaattattgtaattcaatgtacaaatagattgataataaattcaatctctgtgtaaatcaaaggacacttgctttgtatataaaggagtgatccaacgtgaaatggaaacgagacagaaatccttgcagcagtggagtaagcagaccgtgatctgactgaatcactatactctcttgtgttctttgtatttccaatttttattaagtattttgtgtccttaatttgaatacttgccattctaggttgagtactcgcataaactcccctttatataattattatatttttattttggtgttgttaaaattccttcaacaacattaagtatatttttttgttaggaaaatggccctaagaccgagacaatagtttgcccttgtgaccttttgtaaagacaaaattattaaatgcctcgtagtttaatatatacttgtttgcttgcgttttcattcacaatttgaacaattatattttgatcaaatacaaggtactttaggaatttccattgctcgtatatccctttgatattatttaactagttaattatctactatgtgtgcgagcagtttgttatctgccatgcttttgatctgcgagctgttatcaattctgccttgcaataacagttatagtctatttcaagcaaacttgaatatacttttaatgattaatcactttgtatatttttgattgtttatatgaatagttagatcgtctactcatacactaggtttaagtacttttttcaagatgccttaatgtatcgtttaaagtagtgggctatatcatgtatttccagataaatttcgattaatcatacacataagcccctcaagtaattttaaagagtaacactttataattacttgaaaaaagaaat

SEQ ID NO: 372862 - DNA, 783 bp, Cannabis indica
atctagacaccgactattggtctgttccagtccccgttacccgaatcccgagttaagatctggatcactgtcacgggtctcggtctggttctggttcaggtcccaggtcccattttggagtttgggttcgggatcgagactgggttgcggctctaggtcccgaccctggttctttctccctcgtctagttccatgtttgggtctgagttcaggttcaggttcgggtcccgactccaggtttgggttgggatccgtgtctggctcccaattcgggtctaagtctgatttggggtgctggtcctgaaccggttacggttctggatcttggtccaatttcagttatgattccaagtccaagtcctcgttccagtcctggtcaacttccagttttggttccaattttgggtcacagggtacgagttcgagtccacttttgtgtttgggactgggtttaggtccggctgtgggttcgggtccttgtcagggttcgggtccagggctgggtcccaaatccaaacactataacgggttttgtccaagccctgggtccaaatccggatctcaatctcgcgtcctagttttgttccatttctggcgtcgggtcacgagctaggtcataagttcaagttcgcgtatgggtcgggtactatgtcctagtcctagttctgtttcccagctccctatccttattttgggtccatgtcctagttattgtgtgggtttgggtcccggtcgaggttcgggttcgggtttgagtcctagtctcggttcgggtttaggtct

SEQ ID NO: 372863 - DNA, 667 bp, Cannabis indica
gggctcaccacgcagagattgaaaatcttagtcagcaggctaccgtgctgatacgaaaagcctaccaaactataggtcagcaaccaacgaacatcattcccctgggtgagagggacgaagatccagcgatgaatacttcccagactgcaaatggtcagccgcccaatgctcgatcacgagttctcctcgtgggcctagcggtatgcgggcagaccttgtctagtaattcatcaggagaagtcatacctaatggttccaaccaaatcaaatgtgccattccacccgtaaaccaagcaaatcaatcgctaagacagctaggcacttatgtattcgaaaggttgggggcgacccatgacctaaggaatgatatgaacagaaggagaggagtagacgaacagaatgtcacgacgatcgtgcagcccagaacccgtactcaaattccctctcagaaagatgttgacgtaattcaaattcacaagaatgccgagcaggttagcccagccgtacaggcacagctagacgaactgaaagctatgtttcacgatatggctggacaaagaaacaattatcttgagctggaccgagcacgtgaaactccttcctcacgtgagatcaatctcctgtcattgccccacaagtttaaaatgccaacgtagaagatgtacac

SEQ ID NO: 372864 - DNA, 506 bp, Cannabis indica
ctaagaagaaaacattggataaaatacaacacagacagtttcaaaccaagagactcgtccaaaccccacctactacccaaaaaagcatcctcaatagctttatgatcaatggtttttacaccacggaaacaaacatcaatcaactggtttgattcctgggaaaacaacaatttgttgcaatcaccaaaacaatcaatgtcagtgattaaataaaactcctcggcactaaaccgtatacaatggctagcaaccttagctcaaaattctttaggattgggctggtacacttccctcaacagtaggctatgtacaacttgggggtggaaaacaaaatcaggtatatcaagaaaatgaccaaattgggtgtcacggaacatagacagtaaattcacagataaagtattctttatattatcaataacagaaaaattgctagtacaaaaacatttggatctgtaaaaatcagagggactaaatttgtaatcccagacctgcaagttaacaaa

SEQ ID NO: 372865 - DNA, 641 bp, Cannabis indica
gaaaggataaaaataaaaggatgttgagatatggaaattgtccacgtttcatgaacagttacattttaaactgatcccaagaaaataactgccaacctatattcctataaatatgggtagattccataaaaaaaagggacggagaattttgagagaaaattcgattattctgatattgtattctgtactcgaaaaatattattaataagaaagactcgtggagtatgaaaattttaactacaaaacctcgtataaatatttggagttactaatttttaagctgtttattattatatctgtaaagtatttattacgaaaaggttcattaattttggttaacgaaattctacgttaacagtttggtgcttttgttgagagccttagtgataaaactcagaaaatcccatccttataaatagaaatctatccatggatgataacaatcaaaacgatggaaattgccctgaagaaactacacatcgtcctaggaaaaagtcaatggattctcaaaggccccacactactagaacatcacgttcaaggagaaactatggtggtgataatcaaaacctagaaggaacgaacgaagataccaataattctacaggatatgtacctagaagtgaggatgcatatgatcc

SEQ ID NO: 372866 - DNA, 770 bp, Cannabis indica
tgattgtttttgtgtttgttgtgtttatattttttaaggttgtcaccaacatattttgttgtctaattaatttatatatttaattagtgttgttttctagttgtatttttgttgtatatttaattaatttttctcgctaaattgcagtttaccaacaaaataactacataattcaaacgatagatacaagtacattattaatatgcaacaacacacatacaactatattatcaagttaaaaagctctactcactattaaaaattaagtatgacagaagcctcatgctttacatgcaatcaaaaactaatgttttgtaacattgtttgttgcttttatagttgttgtaaagttgtaattacgttgtttgatttcattacttttttaaacatgttgttttcatgttgtttatatgttgaactttagtagttaaaatttgtagaatttcaaattttatatactcttgttttcatgttttaatatagatgttaaatacatgttaacaattatatcaaagaattactaaagtttatgtatcaagtattagtttaattgtaatagttaatgtttgtttatattttttgccttcaatatatatttatatatatatatatatatattgaaaaaatacaatagttatgtaatagttaaaatttaagaaatttttgaattttaacaactaaaattcaatgtaaaaataacacgaaagtaacatatttttaaaataaataaaagcatacaacgtgtttacaactctacaacaactactaaa

SEQ ID NO: 372867 - DNA, 570 bp, Cannabis indica
atgtcccttgtttcgcgatgacatttgtctgtcaggtggcgaaactatcccaagggacaggctagttaatttgtcacattatggtgactttgggtatcttatcgagggttgttgaaatgatggctgtaattatggttttatctttccaagatgtcacgtcatcgaatctttcgggatctatgcatgcacaacttgaaataatcaaatattactttaagttagcttacgtggcgagaaaaaatattattttgtcatatggaagttaaagagttaaaattatagtgtcaaaatttaaataatattgttagagattttattacaatagaagataaatcaagatatattacaactctattgtaaaataatacaaaaactaaaataagatattggttaaatatttgttaccatacacgtatatacactatatatatagcatatatataaaatgtaagaagaaaaagaatacaacacatgtaatataatacatatatataacaagagaataatatatatatacactcactcacaatctttagtgtagattagtgaggatcaccatgacttgaacaa

SEQ ID NO: 372868 - DNA, 539 bp, Cannabis indica
ttttaacaacctaaatattcaaaatttagttggttagttaaaataataatttaattatattaatatcttatttcacatattgttacatggatattgtgtttgttttatttaaattgtttattcaaactttttttaaacaaacttattatttatttgatctaaattgctatgattaacgttgttgaatctgattatttagcagttgcttctgcttttaatagtagtcatatttatcttaatgactttggttctttgttagaggatgttgcaagtttattctccagatttctaagagtgtccctaatccatgtacgacgaacgaccaatacggctgcacatggattagttgtgcatgctctttggatggatgaacaaattatttggctagaggactttccttcctttgtatcttctgtttagtcctttagcctgtaaaacattatttggtttttcaatgatattgatcattgtttgcaaaaaataaaaaacttgttaacagatccaatgatttgatttaatcatagtccaattgtcaatag

SEQ ID NO: 372869 - DNA, 511 bp, Cannabis indica
aaattttttacctaacctattgaaattgttagatttaagtacttttatataattttattaaaaaaaaattggcgtgatggaaatttaggggacataatttgttacatgttaaagatcatgagacatgatttagtagatattaaagttcaggggcatgatttagtataaagacaatcgctacattagtaaaattaaataaaattagacaaaaattcttaaatctaataatttcaataattttaaaaaaatttaaaaacattaaaaaacataatttaatatatgttaaagaataaaaattctaattaactaaaaagaataagagataattacacgaggatatttttacgtttacagaattttttttatatttttataattttttataaaaacaactagaaaattatataaaagtaatataaaaataatatttaaataacattaaaataataataaaaaataatatgcaaataataaaaattaaacaataaattaataagagtacaatataaaa

SEQ ID NO: 372870 - DNA, 542 bp, Cannabis indica
cccaaacccaaacctagacccgcgccagggacctgaactaagacctagactgaacccagacccagatcgggatccacacctggacccagacctggacctagacttcaacaaggactcaaaccccgaccaagacccagacccaaacccaaacccaaacacagaatccgagtgtgggtctttgtccgagtccgcgccctggtccagttacagttttgggtttgggtccaggtcctggtcctggtcctgttcttgggtcccgattcgcttctagtttttgttctactttcaagtcatggggtacgggtcgagtccaagcatcgagtcctggatcctaagtctcggggtgggtcctaggtcaaggtttgggtctggggtcaggtcccgaatctcgggtccgagtttggttctttgttcctaggtccaaccccagttcttgggtctgggtctaggtccgggtctcggtcttggtttaggtcccaggtcacatgtcccagtctgggtccaagtctcgatatgggttcaggatgagtttgggtttaggt

SEQ ID NO: 372871 - DNA, 760 bp, Cannabis indica
ataactaaagagaaagtctaaacgtgataatgtgtctacatgttttgtgtgcacatataattattctaattattactaaaaaatatatataaataaaataaaataataaaagtgctattcatggtcatgttttaatttcaatattattactttgtttataatacacacatctaaatgttatattttagattatatcactcaataaatataatatatatttatataatttataaaagttgggcaacaccgcgcgaagcgcggcttagttccctagttaactaataagacaaattaagaagactcaaaatgcataaataataataataataataataataatgatgatgatgataataataaaaaaactaactaatatttaaaatttttgctcactaaattttaacatgtactaaatcatattttttgaacttttaaagtcgttgaaaattcttcttaaactattgaaattgttagatttaaggatttttgtccaattttagtaaagaaagtctaacattgatgaaaattcaggaagtatgatttggtacatgtcgaaattcgagggacataatttggtagatagcaaaatctccggagcatgatttagtacataaacaatcactgaatcagtaaaattgaatggaatttgacaaaaatcctaaatgtaacaatctcaatagttcataaaaaaaaatttagacggacagaaatattcaaaagggcatgattaattggtacatatgtcaaagttcgggtggca

SEQ ID NO: 372872 - DNA, 633 bp, Cannabis indica
tgtggtgcaggcctttgaatcaagcatgttagttcttctgagaatatcatgggcatatttagcttggcataggtgaagattggaaccaattttggatacttcaaacccaaaaaagtagctgactggaccaagaatttttaaggcaaattgctgatggagattctgtataagttgttgaatgctgttggagttggcacctgtgacaagtatatcatcaacatagacaagaaccataataaatcgattgtctttgttgagataaaataaagaactatcagaaaccgagttggtgaacccccaattttctaaagcttgtttgagcttttcataccaggcccgaggggcctgcttgaggccataaatggctttctgaagtttgcatacatgattggggagttgaggatcctcatatccttgaggttggtacatgtaaattgtctctttaaggtcaccattccaaaatgcattgttcacatcaatctgttgaatttcccaaccaaagagtaaaaataattcgaattgtactagcctttaccacagggctgaaagtgtcaaagtaatcaacccttggagttttttgaaagccttttgcaacaagtcgggctttaagtttgtccaaggaaccatctgctc

SEQ ID NO: 372873 - DNA, 551 bp, Cannabis indica
tgccttctatgaggaattgcaaaagttctcactgacgtagtccacgccctcaaccaggaggtctccgtcagcatcgactggctccccagcctcgttgtactcctcgtagtttgggggttcaacctctgtctcttcctccgcgtcggaggaactaccaggacgtacatcgtcctgctcctcaatctcctggacctcagcgtccccttcatgatccccctccacctggacagctggatcctgttcggcgctggggaaagtggtgtgtcgagctacttggggatcagatgcgtcagccagacgcgttgttttctttgtacgggcaatcattctatggatgggtacagggtttgaagaatgtccttcactagaggaaggtgggctagaacgaagacgaggatgatcctcgtgcaaaagttgaagcaggtcttggtcgatccgatgttcgttctcccaaaactcactcgagttcatctataaaagacaacacacaagatgagtgtttggtcaaaatatcaaacaataaacaagtaaatatgccgaccaggagtact

SEQ ID NO: 372874 - DNA, 497 bp, Cannabis indica
cgagtacccccaaagttgagctcttcatcccctgcctcgggattccgaccattcccaatcagggttctccttgaacgtgttgtcgtcgtactaggaccaacgtcgggttgagttctctggggacgtgtagtccttctggacgacaaattagttgatcttcaagagcccataggctcttttccagaattacgattagtttcctcatgtggggtgttaatattctctcgattttcagccatgaaagagaaggttttttctttgtaaagatgggaaggcttttctgagttttttttttaagtaggctctcaatgaaagcacaaaactggtaacgcagattttcgttaaccaaatttgaggctcacaaaaatgattcaacacagaaaaactataaaagtatgaacactggatttttacttggttttgcagttaaaattctccatagtacacgagtcaatcttattcagatttctgagtatgtttttattgggttttgtgcc

SEQ ID NO: 372875 - DNA, 665 bp, Cannabis indica
cttataatttaataaaataaatttaacaaaataaataaaattgaaaataagatattttgaaggttaggatattatcaattttatttaataaaaataaaataaaatatcctaagtttaaaaattttatggttggaaaactataaagttttaattaaaataaatatccaataagataaagtatgaaaactaatatttttttttactcttataatttaatttaataaaaaatatattttaaaaataacaaattttaaaaatctgatatggttagcaaatttaaaattctaactagattatttataagttttattagtattttaatatcaaaaataagatcatttcaaattttttataataaaataagtaatatatgatcttataattaaaataaaaaaacaaacaaaaataaagataaaaaaaattcaaaattaacaataaggctagtttgtggaaaaatcaaattttcaaattcaaaggcttctaatatctaaaactaattttattcaaggctaattagcaatttttctcctcgaactttgacaggtactaaatcatgtcccctgaacttttttggccgttaaaaattccccctaaactattaagaatgttatatttaaagacttttatctaattttattaaacaaattctaacatggatgaaagtt

SEQ ID NO: 372876 - DNA, 641 bp, Cannabis indica
gtggaaggagccttcgtttttcctggcttttgttcaccttttgctcgttgaatggcttcttggagcttgatgaagccttcagctcggttgaggaaatcactcattgagtcaaccagcccgttcttccttatatccttccatagttcaccaaggacttcaatgccccctagtatcatggataactttacatcttcggttacccgtgagactttggtcgcttccatcatgaatttgctgatgtatgcccagagtggctcgcctagtcgttgctttacttcgatcaaatctcctagatgcaatgggagttgacgtggggaagagaattgtgcatggaattccgaagagaaggttttccacgaactaaactttccaggagccaacttgaaataccattgctttgcggcttctgacagagtggcggggaagattctacagtatacgttccgtagtactccttgtaaatccatttgcatctcgaagtacttgagatgggaaagaggatcttgtctcccagtgtacatcttccacgttggcattttgaacttgtgaggtagtgtcaggagattgatctctggtgagaagggagttccatgagcacgatccaactcaagatcattgttacgctatccagccatgccatg

SEQ ID NO: 372877 - DNA, 540 bp, Cannabis indica
atatattgatgattttatttttcatcataatatttcgatggttaataaattaattaaaaataatctcaaagatagaacaaaatgttattactatttatagaatgcgcttaatggagagaaataaacaaattataatgatatatttatagataaaaattagaaatgttactatttcgataacttttggtaacaattagatattacatgcatattaaaaaggtaaatacatattaaacaaattaatgtaaattaagaaaattaattaaaagacacggatatctagctttataaatttgtttccaaaattagtattgtaaataagtggaatatggagtgtagtaaatttcactatatatatagtacgtatctatatatatatatatatatataaatatatatatataaattgaattataagcaaggtaatactaaagttcagagaaattaatgatgataacttatttggtgtaaatatctttatatattaaaagtgcctatctaacggcattttttgatttaacattcttggtttaacagaat

SEQ ID NO: 372878 - DNA, 464 bp, Cannabis indica
aatttaaaatattataaattatttttaacaattatttttgattttatttattatttattttatatcttaaattaaaattgttgtaataaggaattgattgctttccattttagtaatggtaaaccgattcacacatcatatatttcctaaagtttgagaataaaaaatctttatattaaagttatgaatccagcctatatatagatacactcaaatttgattatgtgaattttggttaagaatatagtaaattacaatatatgcatttgtttctatgttaactttaatagaatatctattaattaacagaatattttttattaattttataatattattatatttatttaaaaataaaaagtatgtagatactttatataaatttaaatttaaaataattaaaatattatacatacttttaatcatatttttaaatttattagtttaactttgaattaaaataa

SEQ ID NO: 372879 - DNA, 547 bp, Cannabis indica
ttttgctcaaggagctttgaattcaaagctttggtctttaatgtcataatatgatttagtgagattttctgtgaattactggttggtttatgttgtatatgcattgtataggtgttctggaaagtacggatgcatttggatgagttttgagcaagttggtgcttgtttggggaaacctggtgcaaacgggctagccggtttgccaggcctgtaaaaccagctagccggttttggcagggtccccgaacaagccattttctcaaactctcgtccatttcagtgccatagttgggcgtttccctgtttccagagttagtgtaatccctagaaagtataacaaaagctagagtggtgggttcgggtttcccagattagggtttcgatcatgtgatttacgtggtttcattatgcgattagggcatccatttcgcatgactttccgttcaggtcggccagtacacttgaatctggaaagaaggtaagaactgtgtataatgtgtaatatgaatatttgagtgtatatgtatatatgttaagtgtatatgca

SEQ ID NO: 372880 - DNA, 533 bp, Cannabis indica
gtcctgggttctgatcctggtctgggttcgagtttgggtcctggttcaggtctatgtttgggtctgattcttggtctgtgtctgagttttggtccgggttcgggttttgtcctggtatgtgttcgtgtccaggtgcctgtcctagttgaggtccggggcacgtttcatgtctgcgtctgggtctgacttcatattcccaggtccaggtcaggtcctgcttcaggttcaagtctaaaattttacatcatggtctgggttccggggcctaggtccatggtctaggtgccccatccaagtccggttcataggtcctagtctggttccaatttcgggttcaggtcctgagtcttcgttttagtcctggtcgcggtccgtgttcaggtccaagtctcgatccctatctttgtgtgggtttaggttcgggtccttttcaaggtctagatcctggtctgtgttgcgagtgtcaagatccggtgagggcttaggaccaggtcaggtcaaggtcccagtcccgctcctagtcaaggttcaag

SEQ ID NO: 372881 - DNA, 934 bp, Cannabis indica
caaataaaagttttgaaaaattatgtataatttttcaaatattaatatatatatatttttaaattctcagtattatttttatactaaaataataaaaataaaataatttttttactactaaattattcaactctttatatatgatcttgatatatacatataatatagatataagtaaataaatgtaaatatataataaatatgtttgttttactataaattaaaattaataatttctttccattcaaaaaaaaaaaattcttttagttttataatattttctcaaaaaaattaattttcttttcatacataaaataataaatagaaaatatttttttccctactaaattattcatctaaaaaaaaaaaaaaatcttaaaaatagattgaactcaatatatataatatatgtaaataaacctaaatatataaataatattttagttgaaataatattgggtcacatcaaagtaaaaaaaaaataagagttttatttagggtaaatagtagcataagtagctaaagttttaaatttgtaagtggcataaacccaatatttatttttagcggtataagtacccaatgtttgtaaaactataattattctctaatttcatcagtacaaactcttttattttcataacaggccacatataaggtttaaattttaaatcattgggtctagacagaaacatatagtatcagttacttccaaatattcttttaataaattcaaaacggagtttgtattgacaaaattggaagaaaattacagttttacaaacattgggtacttatgccactaaaaataaacattgggtttatgccgcttacaaacttaaaactttgggtacttatactgctatttacccttttatttatagactttatgagcaacgcctaaagcatttttaaacaatgtgagattttttac

SEQ ID NO: 372882 - DNA, 597 bp, Cannabis indica
ctagaagaaagataggccgaagggtccaagggaacgcgctctggaggaccagaacccatccgggaccgacctaggaaatctcctaagttggaaaaataaaaatcctttgcatgatctcccaaccaggtcaagggcatcctaaacctaaggagacattcatcgaacccttcaggcctaaggctaccatattcgctaatagaagggacgtaatgtatcgctaccggagccggaattattggcgttagaagcccctgtattcgacacctagaccgtaggctttggcttgggagccctcctctcaaccgggctcccaattcgaagggatctctcggccaccgtttggcatctcctctcgatcgggctcccaacgcgaaggggcctcccagaagccgcctaggccttggtataagccttctcctgggccttccggtagagatactcctggtacttcttctccgcggtggcaataagctcatcctggaaggtcttctccgcagccggaaccctcacgttcgggcagataaccttagaggttagagtcctccaatgactggtgcggcaggattagcttggccttccggcagttctccgtcgtga

SEQ ID NO: 372883 - DNA, 510 bp, Cannabis indica
atcaatattcttcgcatcaatccttattcttttttcttccgctcacttggtgataggctagatttggaaagacaaataatgatgctggcctagatcaacgtgtattcaatgcctctacttcctcataagtagctgcaatatgggttgaaaatgaagacgaaaatcaaaatggaagacgtgatatctttctatataaccattctggtagacaattcaaagtttaatattactatgattgttatgactcacaacaatattcgttgttatttccacatggtgatattggttggcataaaggaattgaaaggattggagaaaaccaatcaagatccatcgaacaaactcaaacaacaaacccttgacaatcatcaatcgcagaagaattattagcagcagaagaagaaggtaatcaatccttaaaatatgtatatatatataaatcacaatttattcacatctaaattgttacaatttcttcaatttaaagtgatatagtatcaacccaagaaa

SEQ ID NO: 372884 - DNA, 626 bp, Cannabis indica
aacgcttgcaggagacaggggataggagctcatctattttagccttctttaaggcttgaatctctgaagtcctttagctcattcatctctacggccaagttagccctggactgcaagtccgcctggtgcaactcctctaaggaccgcaacttggcggccatctcgtctatggcctccttagcctcccaaagctcgcgcttggccttggcagtagcctcgccctccgccctcagcgcctcccggtgcctcgcctccagcctatccctccgcgggacctcctctcggagtatcgcctccgcctgggcttccctttgcttgacctcctcctcaagcttcgctttagcaagggcctcccttcgctcggcctcctcttggaccacccgcctctcagcggacaggtcccgcaggatcctcacggcctcgtctatgcccccgaattcggacaagacgaagccatgattaacgatggttctggagaggcggttggtctctgtagaaatctgaaaaaggagaaaagagagatcaaatgccttagacaaatattgaggaaagaaatgaatcaagtgcttaccgtggccatggcgttgctgatgtctcgaacttggtagacggagttcaaggatgca

SEQ ID NO: 372885 - DNA, 521 bp, Cannabis indica
agtgaaaattgagtttttttttttctcagtatgtcaagatgtgcactttatttttttccaaaaatttatttaataaaataattatcttcattgtttaatttatttgagaaacgtatttgtataatacgattgaattaacaggagaaacacatcttttcataccgagaaaaaaaaactcaattttactaccaaaaaattctacatgcgatgtctattttcagggtgtattcgacggttcactaattttattaaataaatatcacagaagaaattttttagtactgaaaattgaattttttttcttcacactttattctttttgtaaaatttatttaataaaataattattttttattatttaatttatttgagaaacgtgtttaattaaaattgattacttatttcattagtctatgtaatgcgattgaattaacaggagaaacacatcttttcataccgaaaaaaaaacttacgtttttacttactaaaaaattaccatctgtgatatctatttttcatgg

SEQ ID NO: 372886 - DNA, 715 bp, Cannabis indica
ttggagagattatttacaccaaccatttggttaggaataatattatcgattgtactacaataaataaaaaaaagaatatgtatgtctaatcaaaaataaaagaatatatgtagtaaaaatgatggtttatttatttatttaattattttgtaaaaaaagtgatcacatagtgattttttataccttaacatgtcttgattatcgattcgtaacactttgagggtttccattcaaaatgacaccacctataacaatcgtgcacgtgttaaggtggactaagcatgcacttaggctccactcagtcttacgccaataatattttttctttaaataaaatatacgtatttttcaataatttttaaaaatactatattttttaaaatagagaatttaataatttttattttcgtaaaacctactctatcttaagatcaaccttgctagccttgaagagtaaaaatgatgttgttactaaatatatatagagttttgagtgaaaaattttttggtggatttttttatttatttatttttttaaaagttataattccttaattgatgagatgctctacctagatttttatcttgattttaaaatattttgttttaatatagaagtatttatttatgattttttttgccttatagatgtctttaattttgtttgctatatatttaatatcaaatatatttttttttaaaaaaaaaactaaaa

SEQ ID NO: 372887 - DNA, 1215 bp, Cannabis indica
atctttatttaattttaaatcttttatttttttttttttgatgaaaactaatatacgtgtatatatagtatatatacgtgttaaataaatgtttttttaaaaaagatatggtgaaaggaaaggcaaaaagagaggagaggaagagactggtcttcaaatatatcattgtcaatgtcgattctcataaaaagaaaaggcacgctttgtttttctttcacttaacgtaacatatatgttttactctagaaattagagttatttttcacaattttttttaactaaaattggtttagtttttaagtttttaattatttttgaatttattaattttattttatttttatattttattatggttttttataattattttgttagaatatattgtttgttatttatttataaatgtattttaattttctaattaattttatgtattcttagatatgtttggaatagaaaaattgggattaaattaaaaaagggaaattttatttacaccccaaaaagttctaaaggcaccccattttaatattttttattttatataaaatttatatttttaattgtactaatttcttttaatttttttcttttcaattcatattcttaaaaaatatacctatccaacaaaaataaaagtgtattttaaatattatgacaaaaaaattaaaataaaaaattaatgtgaaaattttttaagaaaaaaataaaaaaaaatacacaggagttagaaaaaattataaaaataaaatcaaaataagtattgaaattaacataaaataatgtgaagaaaaaatttttaaaaaaataattaagattaattttaaaaattatttaagtttatattttttttaataatagggtgtatttataagtttaaggggtgcaaatatcactccccattaaaaaaatatgggagaaatggagttaaaagtggaattttcaaaagaaaatcagatcagccacttgcaatcaaaagttgactcgcatctcagcccgtccaactctttattgacggtccagagtagagagtgcttccccactctcggcagatgcaaataacgtaccagaaggccctctctttattcccttccacgcgcggtccccgcctctttcagcgtacaccccaacccccagatcgccacgtcaacgtcgtcagatcaatcagcctactgcaaccggccatgtggtgcctgtaagaagaaaaaaaaa

SEQ ID NO: 372888 - DNA, 527 bp, Cannabis indica
atatatatatatttgtataaacacatagatgattgaaatcatcagaagatctgatttaaaaaaataaaaataaaaaattaaagatcatcaagaaatcactttctcactaaccaaacaatccaaaagttttaagttcaaagcaccaaaccataacaaaagaaaaaataattaagattaattagaacactgaccacaccaattaaatatttaaattacccaaagataatacaaggctctcttattaaaaaaaatctttttcagtggcagcacatcattatcttgaataaccacacatcacattactctaggagcaagttttccatcttctcaaattactaacctgtataattcaaaattacacaccaaattataaatgagacaaaatattacaagcactaacaaataataatataaaagaacatcactctcacacactattattaaaacagaaacaataccattctctcattgttcccaatgaaaaatgtttgaccttctcgatcatccattttcaaagaaaaaactca

SEQ ID NO: 372889 - DNA, 552 bp, Cannabis indica
aagaccgaacaagctccctgggagaatcctgctaagtatactgcatttactgccctgacggaggacatggaaagtgtttacatggccactcagtcactagccccattccaagaagccccacacccagtaaaaagatagtcagcaagcgagacatgaccaagttttgtcgatttcatggagactacgaccacgacaccaatgaatgcaacaatctgaagcgggaaatcaaattcctgataaggaaaaacaacccacacgtacaaaagtatgtcaaggccgatcaaaaccagaggagcgataacaaccaagacttgctacgaccaccagtagatggacaccctgcaagtcattattggaggcctgcacatagctggagattcaggcaaagctcgggagaggtatgcccgaacagtacaacatgagcaagaagaagtaatcctggtcgtagaagagaggaagcaagaaatcccatgggctagagagcccaccataacattcaatgatgaggatgctgtcaaatcagattttcgcacagtgacccgtttgtcgtgg

SEQ ID NO: 372890 - DNA, 1097 bp, Cannabis indica
agacaagaagaacgtgagatatcctcacgtcgatctgctggtcataaccattcaactcgccaataaagaggatcaagagagtgttaatagataatgggagctcggtaaatatcatttataaggagactctaaagaaaatggggctcaaaaaggccaaattaaaaccttgtatggtaaatctttgcggattcaccggagacagcatcactagccttggtataattgagctcgcattaactttaggcgaggcacctttaacagctactattatgtaagacttcttggttgtcgacctgccctcggcttacaacatattgttaggtcatccagcactgatcggactaggggcagtcagttcgatcaagcacctatctttaaagttccaagtaccatatggcgtgggagtggtgcgcggcgaccagatgctggctcgcgattgctatcacatagagttgcagcatagaaaggccggtcatcaattgatgacgatcttggcaggagaaaatgagaagaaagatgaagatcttgatccctgagttcaagatgaaaattacctcctaaaaccaattgaagaattcgaagaggttattctcgacccaagaaatcccacaaaatgtgtgtacattgggaagaacctggatgagtagctcaaatagcaactaataagctttttggaggcgaaccaggatcaattcgcctggagtcatgggatatgatagggattgagcctaagattatctgccatcacttaaatgttgatccaaactacttggcgaagagacaaaagaggaggcccctggattccgagaggtaaggggcactaaaataggaagttgacaagttataagtcaacgattttgtacgcgaggtgttttatccctcgtggatgccaatcctgttctcatctcaaaacctaacaaaacttggagaacttgtattgatttttctaatctaaataaggcgtgtccaaaggattgtttcccacttccccggatcgaccagttagtggatgcaactgctggacacaagcttatgtcatttatggacgcatattctaggatataaccaagataaaaaatgtacgtcccagatcaaga

SEQ ID NO: 372891 - DNA, 1082 bp, Cannabis indica
attaaaattgaattagcaacataattaattttaaaataaatagaattaatttttcattggattatttaaaattaatttagaaaaacacacttagtttaatgaaatattctagatagaaatttctattaactaatttatattttttaatatttaattaagtagaaaaatatatttaagttaaaaattaatttgttaattaattttagaccaacttaaattgggatatttttcttataacttaaattagaattaataattaagttgattttattcaagatagttaattattttttttctatttcataaaatttaattaaataagcaaaatatatttaagttgagaattaatttgttaattaattttgtaccaacttaaattagaatattttcttaaatattaaattagaattaataattaagttacttttattctagatacttaattatttttattttaataaatttaattaaatagaaaataatacttaaggtggaaattttttcaatttcagatcaatttaaaatagaataatcttcaaaatatattttattttattttaatagtctttttttttagaatttcgaattacattttttttaatgttgatatttcaaaattattgattttgaaaattaaattaaagttaaaaattaatttgttaattaattttagatcaagttaaatcaagtaatttttattaatgatttatttaaaataaatagactaaaatatatagttttaattagaaaataagtaattagtttatgaattttctagatagatattttctaggtaactttttggtatttttttagatatatttaattaaataagaaaattaatatttaagttgattttattgtagacgcttaaatatttgatgtttttcttaagatatttaattatataggataattatatttatgttgaaaattaatttatttaattttagattcaacataaattagaataattttttctagttttattttattttaagtagaatttcgaatatgtatttttttaatacatccgatttcaaattctgtcacatatatttatagaaaattaaatttgagtt

SEQ ID NO: 372892 - DNA, 565 bp, Cannabis indica
aagtttgctattcatatacaaaaattttgtcgcctagcaactatacagcaaaagcctcgatgtcttaaagatcgtacgctccaggcctaattgccccgacatgtacaatcatcacctgctcgctctcgcgacgcctcagctttagccttgcccttacctacacatggaaatagcactatgagtcgacagactcagtaagaaaagcataaataataacataccaacaacttggactatgattggacgcccatacccccaatgttaaccctatccccgtgacccgcacggtgctgcgtctagaacattcgtacgaaagtactattgaccattatatcagcctatactcggtacgctagttatactctaggtgtaccaatgtgatactgtcaagtagtacggtactatcgaccaaaatatcagcctatactcggtacgctagtcatactctagacgtaccgatgtgatactgtcggatagtacaaaagccaacatacatatctaatgtaatctaacaagcttaactaacatgcacactaaacatgtatatacatatgcatactgttat

SEQ ID NO: 372893 - DNA, 477 bp, Cannabis indica
tatgaaaaaaaattagactaattttttttctggatgctgaaacaagtcaatggtgtatcagtatattccttttaagggagtgtattgtataatcaccttatatttatattttgagtaatttactgtataaatctgtaatttaatttttaattataaatagataattaaatttaatttttaagataataatatttaaattatatttataaaaaataatacttatggccccgtttgggggaactttttaaaaagctaaaattatttttgaaaaaaattataagttaatatgtgtttggtaaaatttaaaaaatagttttttcaaaaatttaagtgaaatttataacttttaggaaaagttagcccaccttaactttggaattttagctacgattttggtttaatgaatttttcacttgacccaattgtcctatctaattttaaaattcctcatttaccaattaattttaggatttctta

SEQ ID NO: 372894 - DNA, 545 bp, Cannabis indica
gacaatataaatatcaataatcacaatatacatttcacatatgtaatagtaatgccatttacattattgtctatttgacataacctatgtgttacggtcacacgcctaattacgtctgtgtgacatagacacacgtgttaagctcatacgtctatttacaataagaccttagatcgattcatctcggttctaattaccgagtctaaccaaattatgtcttgaacggataattctttaaatcaatatataaaacatggcatagcatttaaaaatccataatcactagggtaataaccctagaccatataactgctcactttagggtaataaccctaatcctgattcttaattaatcacatttataatattcaacatgagtgccaccacgcttaactctacgtgctaactactatcttacctaatgtcccaagtacatggagattccaaatccccgagtgctcatgaacaagtgccggtaatcctagtcacaattcttaggatttcacaaatagggttaatcctaaaattcactttcaataatcaca

SEQ ID NO: 372895 - DNA, 526 bp, Cannabis indica
gagagagagggtcgtgcgtggtcagcgagagggagagagagaagttttgatttttgtttgggatttgtttttcaaatggaaggggtattatgggaaaaaattaaatgtagtcatatatagacaattttaatagatatagatttagggaaataattttagagtgttttatggatagtttttcaaatttccctattattattattattgttgtttttttttagcaatatgactatttaccttagaacaccccaccatatatattatatatataattttacacttaaaaatccacataagacactacaataataaagggtaaatatttttttagaccttatgttttacaaaagttaccgattagactttctgttttgttaaatgacaaagtggaccatgtgttttccaaaatgataaaaataggctcctgaactgattttttgtcaaaataaatttaatcataatcggatctaaaagtgttatgacaaaactgtttatattttctgtatctgtttgtattttcaagttg

SEQ ID NO: 372896 - DNA, 643 bp, Cannabis indica
aagaaaacaaagaaccctagctgccctaggatttttcgagagagagaaagagagagttgcaagagagaaagttcttcccccttttttttcctaatttttgtaaaatgaataaaacttagcttttctaaaaacaatttcagctaaatcaactaataaaaatcagatcattaacaataaatttaattcactaaagacaaaaagactaatggccaaaatgacaattttacccttttcccacaaaacagcataaaagggcacttaggggtaatttgggaaagtctaaaaatcccaactaatcccgacattcccaatgtctaaaatattatcccactatactaaaaatactaagatgtgattctaatagccatacaccacgttccaatgttgtcaggcacaaaatatgcaaaattatgaaatttctatatgtgacataaaaatgcattctgaattcaaataaatcatcataaataattaattcaatactaataaataattttcataatgaaaaccctaattatttgctaatttccagattaaagctaagcggtctttacatgtaaaaacctatttgaagtctctaagtctgccagaaagactgaatgttaaagttactggaaagatacttactcagtctaaggaaagt

SEQ ID NO: 372897 - DNA, 729 bp, Cannabis indica
ataaattctttttaaatgagtgagatattataatataatagatttttcatttcatttatagcaaaacttttattcatgtatatttaaattaaatatttttatagagttaataaatataatactcacatagtttatgaataatgttggactcttacaaaaattaaaaatatacgtcacttagaagacatattataaaacaaataaatagtacaaaaataatcataagatgacatctcatttgatttgtatatttccttatgtatagaaaaaataaaattcatctagtttcacttaaaataatttagtttaaacacttttttagagctaacaaaaatatagaatagtatatgtaaattttttaaaataaaatcaattcataataaattatatattactatgtattacataatagattgtatattagatgaaaaataaaaaatttatagaggaaaaaaataaaattaaaaaaataaataaaaacttatagggtaagaaattaatcgaccacccataaaaataaatcttagatgaattaatatggcatagtaagaataatatttataacctatatgaataagacctacataatttataaataatgtgagatatttagttctaatatatttgaagaaaaatttttagtgcatagtttttgtttgtgtagttattttttaaatataataaaaaatttcactaaatttaaaaatagaataaaaaaaatctaagatg

SEQ ID NO: 372898 - DNA, 363 bp, Cannabis indica
ttttttaatgccatgtattttatgaatgtgaaatcagaggttaaccctatttgtataagtctcggaattgtgactaggattactggcacttggtcaggagcacccagggatttggaatctctattactgcgggacatcaggtaagacagtagttagcacgtagagttatgtgcggtgacgcttataatggaaatgatatatgtgagtaattagtaaccgagactaaggttattaccctaacatgagcggtttaacagcctagggttattaccctagcaatatatgttgtgtaaatgttatgccatgttaaatagatgagtatatagagattcagagttatgtgtgttggaaatttattttacc

SEQ ID NO: 372899 - DNA, 674 bp, Cannabis indica
aatttaataattttattttttttattttttttctaaacaatatttcaatttttttaatatttactaaaattgaacaattcttatactatacattttttttctaaacttttatttgttaatatatatagatggttgtattacattatatataatagtgaacaataaaataacacatgcaataataataatcaaataaaaagtttgtcaaataaaaaattgaataataaattttttcaaataaaaaaaatacattataagtagatgaaaaattttgtactaaaaaaatatctgaacattttcgatttactgtcgatctcatccaaattttatagtttatgacaactttaattataagatacttcaaacgtactataaacaatcgaattgctactcttgtaataacatgattgtattattatttattattaatttaacttttaaattaatttaataatttaaaaattttattttaaacaataatgtatggaatatactataaaaattttaagattgtaattataatagtgagtaataaaataatacatgcattaataaataatattcaaatgaaaagttatgactctttgtcaaagaaaattctgcataataaatagataaaaagttttgtactaaaaaaaaatctaaatgatctcgattaccgttgatctcattca

SEQ ID NO: 372900 - DNA, 655 bp, Cannabis indica
gtgagtgccatactaatcggagaagaaaatagcatgcagcacctagtctattacatcggtaaaagactcattgaggccgaggaccgatacccgttaatagaaaaacttgcttactgctttattctagcaacaaggaagttaaggccttattttcaagctcatcctcttcgggtatacactgaccagccactatgtcaaatactacaaaagccagatgcttctggacggctactcaagtggacggtagagttgggccagtacgaaatccctttccaactccgaacaacaatcaaaggccaagccttggcagactttgtggtagaatgcacaggaaaaaaagaaagtatacaagaaagcaaccccgagccggtacaaacacctcagccaactcacaatgatgacaagccgacctagaaactacatgtagatgggtcggctacaaatcaactatctggtgcaggaattgcccttgtcacgcctgaggggcaacacatgcaccctgcagtcaagttcggattcaaagcatctaacaacaaagtcgactacgaagctctaatcgctgggctaagactagcccaggagatgaaggtcgaacacattaaaatctgcagtgattcagaactcggtggtaaaatcatgtatctggagaatatga

SEQ ID NO: 372901 - DNA, 595 bp, Cannabis indica
tagctagtaaataaaaaaaaagaagagaaaaagagataatcttggtgaaatgggctggactccgcggcctagtcaatacgaggaggaaggcgaggaccgagacgcgcctcaagcatggcatcaagcttcttcttcttctcccgaaattcggcaataacctcctcaggcttaggatagaagtcgagcttgatgctttgaccatttgtctgccaggccatgtagacgccgtcgtcgaagcgcttgacgcaacacttgcaggagacgggggataggagctcatcttttttagccttcttcaaggcctggtctctgaagtccttcagctccttcaactccacgaccaagttggccttggactgcagtctgcctggtgcaactcctctaaggactccaccttggcagccatttcgtccatggcctccttagcctcccaaagctcacgcctggccctggtgacggcctcaccctccgccttcagcgcctcccgatgcctcgcctctagctcagcctccctccgttggacctcctctcggagcctcgccttcgcctgggcttccctctacttggcctcctccttgagcttcgccttagcaag

SEQ ID NO: 372902 - DNA, 609 bp, Cannabis indica
aacaactttgttatatggaacaatgtccgaatagacatggaaggttctctaagaattcgccggccctactagctagtggaagaaacctatccttaacacccacttattttggatataaaaattgtttaggtgttgatagttgttgagcacaatataaggtgttcatgctcacctttacaaagcatagatgattgatcaccaatatgcgaaagaactagattgatcggctacgagattaccataaccattgattcaactacttggttatatggaacaataaaatggacaccgaagtatggagaattgatcagaatacgcaaaaatatgcattgtaggggctttcattgtccgaatggacatggaaggttctctaagaatttgctggccctactagctagtggaagaaacctatccttaacacccactggttttggatataaaaatcgtttaggtgttgatagttgttgagcacaacagaaggtgttcatgctcatcttaacaaatcatggatgattgatcacaatatacgaggtactagattaatcagctaggaggtcaccataaccattgatgcaacaactttgtatatggaacaatggaagaatttca

SEQ ID NO: 372903 - DNA, 573 bp, Cannabis indica
taattacccatagatcaatctcagccgtcagatcaaataactctctcatctgacggctgccgtacatcacggattacaatccgtgaaagtacaataataggacaaaatcatatcccaatgaatataatatgaataaaatataaacaaattttgtggtttgacataagaaaagcatgaaactgggacaaatgctcatatatagaacgatttttaataatcttcggacgaccacactaggagcacaaatctcagtaattgtctattgtgttaataacgaaattgcttttaggtagagcccaatacttaatgtctaagtgaaaatataattttaaataattaggaagtagacacaacatccttattatataaaattatatattaactaaaatttaccttaatggacataacttataattaattatatggatataataattttatcccacagggaatttattgtgtttaaataattaagataatatgttacattaaattctcttaatttaccccacagggaattatgaaatttaatttaatagtgttgtcacaaatttaattaagatatataataaa

SEQ ID NO: 372904 - DNA, 1211 bp, Cannabis indica
attgttatgagagctttatattggattgtctttatgaaatacaagcaaataagactaaaaatagtgtagcatgatcagtgtgtaattattaattcatcaattatcgaagcgtcaataaaattgacaatcaactatcatgcaacaacatagagacaaaaattccaaaaaaaaaaaaacgtggccatatccatgatgcgagattaatgcgaatttaatttatttttcgcgattggatttgaataaactatccgatcgagattgaaattctgaaaaacaatgttaatgcaacaattagaatattagctattgtagtgatacatattttttttgaattatatataaactctagatctatttcttataagtctacatattatgaatttgtatattccaaactagctttttttttttctgtagaatccttcatcaatcggtaatgattaattttaagtttgataattttctccttctcatgtaattttatcagaattaatgggatttcttcatctatcggcgttgattcatctttgttaagctccttcgatcacaggttggattcatttctctaatgcgaggaatgtgcggctgcaagggaagaataagaggcattcttgttttttttttttttttcttgggtttggataaaaatttattagaccagtattacttttttgaactataagagaaaaaactccaataaaaaatagataaataattaactacaaataataataaataaatacgtttaagatatttaaagactctcaccataatatttacaaaattatatataattatccattatatatataaagattaaaaacatattaagttgacatataaaaagaaaagaaaataaaataataatcacttaccattctacactactcatatctttgagttggtctattttatataatccatgtaaaatttaaaaaataaaataaaaatagatatggatacaatttgttaacttacaataatgcttttaataaaattaatatttaaattaagggataattacataaggcaccatttttttgtaaaaaaaattatattcttacgtttaatgtattttttttttttttactattttttactagtttccagtaaaaacaacacgaaaacaataagaaaactacataaaaagaccgcattttctgtaaataaaatcaaaaaattcgtaaaaatatttaaaaattctgtaaaaa

SEQ ID NO: 372905 - DNA, 472 bp, Cannabis indica
gtcaatacccggctaccatcacagatcaccactccggactgttcttggtcacttttggatgtgtaggagatcttagaaaggtattatttatggaaccttggcactttcagaaccaccatattgttctcagccctccttctgcacttcaaattgcctctgccgaatcactgcatttatcaccattctgggttcaattacataggcttcattcttgagcaaatcaagagtaatggctgaatgggcagacaatatagtaggtacctatatcgatgttcatgaggactctttaaatgagggttggggacccttccttcgctttcgtgcttcgatcgatatttctaaaccattgctgaggggaaaaatggtcaaattgagagattctcgggaagaattctgggttgaatttcgctatgaaagactcccagaattttgctttgaatgcggaactattggtcatccttttgaacattgt

SEQ ID NO: 372906 - DNA, 669 bp, Cannabis indica
ttttcttcccttggaattttctgggaacgtagcttttgaactgtgtgagcagatcatgtatttttgctccaatatgttatcatcttttctccctaagccttgtattctccagatacatgatttaccaccacttgtgaatcattacagattttgatatgttcggctttcatctcctgggctagttttagaccagcgatcaaagcttcatattcggcctcattattggatgctttaaatccaaacttgactgcagcgtgcaggtgttgcccctcaggtgtgacaaggccgattcctgcacctgacagttgatctgtagccgacccgtccacgtgtagtttccaagttggcttgtcgtcattgttacttggctaaggtatttgtactggctcagggttgccttctgatatgctttcttccttgcctgtgcattctaccacaaagtctgctcaggcctggcctttgattgttgttcggggtgggaaagtaatttcatactgacccatttctactgcccacttgagtaaccgtccagatgcgtctgacttttgtagtatatggcgtaatggttggtcagtgtacacccgaacaggatgagcttgaaaatagggccttaacttccttgttcctagaatcaagcagttagtgagtttctctatcaatgggtatcgg

SEQ ID NO: 372907 - DNA, 509 bp, Cannabis indica
aaaagtgctatgacaaaactgtttacattttttgtatcttttcgtattaagcattgtcttcaagttggttgtattaaaaaaaaagttgccaaaaattaagctcagggtcttatttttactattttagaaaatacagggtctattttgtcatttaacaaaacacaaggtccaatctgtaacttttgcaaaacacaaggtccaaaatggtatttaccctatacaaaatacttagtcaaactcaattttttttttgtcaaaaaactttttttcttaattttttctttcagccgatggaacaatgtccaactcatacaatgtaaaaatgagagatttttttaataagaaaaaaaaactaagcataaaaaactcaaatttttataatattacccatgaatgagtaacacccattaagagtgcactcatataattatttatcaaaatatgaatgataaattatttatttttatatattaaataaaaacttaaagtaattgagtaagatataaatc

SEQ ID NO: 372908 - DNA, 786 bp, Cannabis indica
acaacaaccttaagacacaagaggtacaacaaacaacatgaaaaaacacacaaccaaagcaaaaagatcaccaaaaaaaccagaagaccaaaacaaaatgcaggatctatcccgggtcagggacccattccgtgtcatccagaagcactccttcatccatggtattcacagcaagttcaccaacagagccatggtatcgcgcccactttgcagagttgtgtgccatgaagttggccccccggctaatcttcttgaccttccaattttcgagcggacgaacaattgtaaagaacctttccacagctccattcagcaactaatgatcctcaccgtgcaatgcattaaagtgtgttaccaccaacaaattgtcgcagaagaacaggacgttgttgaacttgcatcgcaccccgaattcagcagcactcactatcatcaaggccttgaccaatgtgggatttgttacattgagatgcaccgagtaaatggcctgaattcggttgcaagagtccctaaacactgctgctccgaaggctgatcagcattaatagaaacatccgtagtacacgcaatccatcccataggaggagttgcacttatttcaacattctttgaaagaggttggggagaggatgagtgatcatggaattgacgcctcacgattcgaataacctcattgataggggtaatgttggatccgtcaattaccttgttacgattgttccataccaccttaaatatgcatagggccccaattaagaaagtgtcaaagtccagatcgtgggaagg

SEQ ID NO: 372909 - DNA, 658 bp, Cannabis indica
agtgttatattattgaagtatttttagaagtaaaagtactaaaaataacatataaggaaaataaaataaaatattatatttttaaatgttacgaaatcttttaacatatttaaaaaataatactattaaaaatattttaatataatttaatttaataattattacaaaaaaaatcgttaataatttataatagagaaatgttaaaagggcactctagcactttcctatgttagtattgctattggtccaactaagtatcggatcctatatagtttaatataatagttcttaagaaatatcattagccaatctcaacgtgacatgtcaagaaagtactaggcactactggtgcctaacagcgcaatgctttacaatatttgatagtggtgttagataatctctaatgtacgttagccaatcctacttttagaagttctatgatcagtaccatggtcggccattttagcttattactttcttatcatccataatatatacatacatatatatatatatactagtaaaaaaactacgtgcgaggcacgtatactaaatttatgcttagttttttttcctatgttatttgaaagtgatacaattaaaaattaaagaaaaaatattattaattattaggtgagatttagtattatgtgtatct

SEQ ID NO: 372910 - DNA, 821 bp, Cannabis indica
tgggtctaggatccggtcctagttttggttttgggcctgggtttagggtttagggtttagggattaaggattcaggttaagggtttagagcttaggaattagggttttgggtttaagggtttaggtttagggttagggtttaatttagggtttagagtttagggtttagggtttaagctttagggtttagggtttaggatttagggtttagggttcatggtaattaaaaataaacataatgatcattacttatcattacttataagtaacaatgagtaatggtaagtaataataaaattaatataagtaatgattagtagtgataagtaatgataaagttaatataagtaatgatatgtaataataagtgttattcgcattttcaccaaaatgatgcgtggatactaattaatgaaggacaaggagttattgagccacataagtgcctttccatgtgcttcgagaagatagcagcataaaactcgcaaaacatgtaaagaccgctcatctttaatttggaaattagaagataattaggatttaattatggaaattatttattacttttaaattatcaatttatgattatttatttgaattcaaaatgcattttatatgtcgtatatagatatttcataattttgtatgttttgtgtccgacaacattggaacgtggtgttgggctattagaatcacatcctagtatttttagtatagcaagacattaaaattagacattgggaatgtcgggaatagtcaagattttagaatttctcgaaataccccttagtgtctgttgaccgagattttcggcaactatt

SEQ ID NO: 372911 - DNA, 849 bp, Cannabis indica
aaaatttaaaaaattatatatataaattaaattataactattatttaatgatactaagtaataaattgtattaaattttaatcttactaatttttcatataattttgtatagaatattaagtgtacaaaccgatcgatctcacccataattaccaaattctatttgtttttataatggaaccctgacacgatctatataataatattctaggcttgactcctattttgaggatcatgtccaacaaatcccataaatatgaattgttcgtaccaagtctagaccacagaacatgatcaaaaataccctattcacaaagtatttctagaattcgattacaacatgatcgaattttgatttgaagtctcaacaatgcgcaaactaaatccaagctacaccaacttgtgtaaaaattattaaatccacctcaactttgtgtctttcttgagtttttttaacacaaacactaaattaattattttccataagtattaaagaaagggcattttacaattttgtatactttattttaattaattacaaaatatgtgcaaaaaaaacttataatcatttgctcatacacttttatatataattaaaaactttttttcaatttttttcataatatatatggtaataattattgattaatatatatatggtaatattggttatgtttatttttatgtttacaattataataaacatactaataatataaaacattttatatatgtgtttattggctatgtttatttttatgtttacaattataataaacatactaataatataaaatattttatatatgtgtttattttattttctattaattaaacataataatttaa

SEQ ID NO: 372912 - DNA, 595 bp, Cannabis indica
aattggattggatcggatggtgattttctaagtccaatcactaattagattggatcgagtgaggaaaaaaaaggttagattggatcggatgcccacccctactagattctgtaactattacccttgacttatatacatatatttatatttaattttttaattttatgtatatatgtttcataaatattggatttaaatgtataagttcaaaagagaaaaatagataagacaaaagatgtttatattttgtattgaaaaatgaatatggattacaatgaaatacaactacttacaatgaaaagatttctatgtgggttttttgattttgtaatttaggttgcttcgttagttgttatgggagtttctacgtggaattccgtaaaatattaaaaaaaaattatttttaaatgtaaaaataaaaaagtcccttaaaattatcccttattcttgggataagttaaaaaataccacttttttgtatccattaattaaaaaaaccctgatcatattatattttattaaaatatatccacttttcaccctcactctctacttaagtctagcatataatttatattaacttaaagggtctaat

SEQ ID NO: 372913 - DNA, 558 bp, Cannabis indica
ataaacccaagaatttcagttatataaggcacactttatatagaatagatatatatatggaacacttcgttaattatccatgaatagttactaaacaaatttaactataaatattaattttaaaaatattaaacgatcaaaatttaatctaataacgaatattaattgagaaatttgaatttctacccttaatttaactacttaattaaaaaaaaattaaaaaaatatttcttttcacattatattaacaatatgttcattcaaaaaaacaatatgttcatataaatatatataagtcaaactcaacttttacttatcttttttttttgctaaaaaatatttttaatttttttttcaactggtagaacaatctcagtccatatgatggaaaaatgaaagatttcttataatggatagaaaaattaaacataaaaactgagatttttctaattttacccattaagggctcgtttgaatgctgtattaggtcgtattgtattgtattatattgaattggatttatatgtcatattttttatataatactatattaaactt

SEQ ID NO: 372914 - DNA, 759 bp, Cannabis indica
ggatgggatgctccttctccctatgaggtcccctggttcttcgacttgaagtctaacccaaaagcaaggcaggtcagggtacttctacttctctcagccaggcttcaaatggttgagcggcacgaacgacaaggccatcagcaaaatagggcattttgttgaatgagtacttcatggtgaaggattcgagcatcacccggactcggtttcagctagattctgacatatcaccgtcctgccctcacccttgcacttagggagagagctccaaaagttgtccggttgccggaggaagacaggaatatcatccagttgacctccaataataatctggttaagtatgggctttaccctgaggacttttctcctaagtccgtggcggcgaagaagagaaagtttgatgctggccggcctgaacgagctcataaggagaatgagctcattcaacttaagcgtgaaggtaagttgaagggaggtgccaaggccaagcagtttgctcagaagcctttgaatcctgaagatgaagccgaggctagggctgaggctgagcaggtgaccccattgaagaggaagaagaaaatcccatccacggccaggcctgttgaacatgcaattcgcataagggagcccacttcacctgttcggccatctcatccctttgctggaaaagggaaggctgtcatgtctaagataagattgatgtcaggtgatgatggacttctgatttcctgtgcgggcggtcaccttgctattttactt

SEQ ID NO: 372915 - DNA, 556 bp, Cannabis indica
ataattacataaattaacaaattaaaaaaaatttagttgtatttttacacgttaaaaattatttatttatttattatttattatttattattattatttattatttattattattattatattattactattaatattatatataattatatgaaaaagctatcaaaaatataattttaaatgagtttaataataaaaattagtataaaattttacataaattgaaaaaaaaaaatatttttgtttttatattatttattcatttatagtaaaacatacaattttttttttaaaataattaaatattatatatattgttctcgcttctagccaacgacagtgagtcaaataataaaatgattgaataatgtaattaaaagaaagcaaaaataataagtaaactaaataccatattttaaaaaggtttagccccgtgagtatggtaattagcactgaacatttcgagcgagttcgacccgaacccgagcaacccgcccgaacccgaaccggtgaacccacaatttttttttaaaaaaatgtttgggcgggtcgagtt

SEQ ID NO: 372916 - DNA, 928 bp, Cannabis indica
aatttttcatacattttccccacctgcattatcaaattttagaataattctatataatagtaaatacataatacaaaaaaaagttaaaataatatttttaaaacttacataaaattagtaatcaattctattaactaatcacacaataccaaaattgttaatagaatcgtcctaaaacttaaattccatgtatatcgtaaactaaatataaactaattacatatgcaaaagataacaataatcataaaacttgttactcatgtattataacaaaagtagtaaccttgtacttaatctataatcaaaggcttcacaaattcggcccactcatcccgtactgcattgatctcctcgttactatatggagcgtctgacttgaactgtaaaacaaaagataaaaaaacattaatcattatattaaaagtataattaaaatacaaactaaataaagaagagttattcatgtttacatgatttctcaaaagacttgcaagattaacaaccatcatgaaactctggataatcttcataacataataaccacattacactccattcggctgctgtcgacacgtgtactagttgatttttactggacccttgtttcgtatatttttttggatcctgtacatgtccacagcactaaacaaataagaaattaattaatgaattgatttgtaacataatctaaattttaaaaaattataacttacttttggatacaattcataatgtcagttgggataaagtcattcatcgagtcaagatatgcaacactttaagtattggcacgaatcataattgtcatccagtggtcactatagaacaaaacatgttaattcatgttgggttttatgtcctaaataaaactcatttcaatatagtcagatttacttattaatatagatcagaaataacatttaatgtt

SEQ ID NO: 372917 - DNA, 603 bp, Cannabis indica
gttgtcatcaatctgtctggaaagcatcggtgatggcgctgagtcatggactagacccgcaaaaaacataatcaagattaatgtagatgcagcactctttgatagcaacaataagtatggtttcggaattgttgcccgaaaccatcatggtcaccttgttgcagcacaggccgattgccatggcggaagatatgcagctgaagtcattgaagccatggagattaaagaagctctcagttgggtaaagaccaataattggcaatatgttcaaattgacacggacagtcttgtttctgtacaagctatttgaagcaaccaagcaatgaggtctactttcgggcttttaatcaaagactgctaacttttgttatctactctcccaaatgttaatttatttttcattagacgatcagcaaactgagtagcacattatgttgctagacattctcggtatcaatctgatcgtagcatttctgatatttttatttatggtaaactcttacatcttttgtatttagaatgctaaagtattcaatgaagttgatatttcatctacaaaaaacttaattataaggtttttttttttttttgtttaaattacta

SEQ ID NO: 372918 - DNA, 528 bp, Cannabis indica
aaaaatagttaattattattattagtggaggtaagtaaggtgagtaataaaaattaaatttacaaggaaaaaataaataaaatattgaaaaatagagtggtatagaaaaaattagagtgctattattagttgagtaaataccattttagatcagtattttgaaaaaaattaccaattggaccctctgttttgttaaattacaaaatagactctgtattttctaaaattgtacaaataggaccctgaacttatttttcgtcaagataaaacttaataataatctgatctagagatgttttgacaaaactggttatattttttgtatttattcgtgttagaaattgtcttaaaattggatatattaaaaaataaaattattgaaaattgagctcagggtcttatttttactattttggaaaatataaggtctattttgtcatttaacagaacaaatggtctaattggtaacttttgcaaaacacagggtccaaaatggtatttactccttgttgacctcgcttttggcca

SEQ ID NO: 372919 - DNA, 529 bp, Cannabis indica
gagttgcttgtttacctctttgaggtgctcgacacgaatcagtttgctctgttagctatgctatggtggtgggtgtggtatgatcggaattcggttctgtttgggaaaaaataatctcggttggatgtgattgatgtgttggcaaaggaagctctgaaggagtttcaaggtattggggctagttgtgatggtcggttgttgggtgcggcgatcactggggaggttaggttgggtgtggggggtggtggtgctggtcaggggcggttggggaggggaggggcaagtgtgggtggggggcggtgttcacctggggtgggtgaatttgtgttgtctgtggatgcggttgtcactccaggtaggtgctttcgggttttgggggagttatccgtggtggtgggggggtggtttgggcgtcttgggcggtgggtgccgtgggggatttccaggtggcggtggccgagctccttgctctccgtgtgggtctttcatgggctaatagactgggattttctgtggtgcgtgtggagtc

SEQ ID NO: 372920 - DNA, 381 bp, Cannabis indica
tctccttcttgttggttggattcttcacaatcttccacactatgattgagataccacttgatgtgtgtgggcactactctatcactagggtatttcaaaattgaagagaagaaaagagaagaagaagggcggctaggaggctaaggtttttctctgagagaaaataagatgcaagtcatagtttcctgaagccatcactttctatttatagaaagccatctaggtttaggttagaattgtatggcattaaaataataaaaatataaatggtaaaatacttgcatagtggccgaccatgatatggataatgggcctcactttgcaattttgccattttgtcatttttcaattccattttctcaaaataccaattttccaatt

SEQ ID NO: 372921 - DNA, 515 bp, Cannabis indica
aatttttttactaaataattcattaatgattaattttaattatctaattatttttctaaatatatatgtgtattatttttctaggcagagagaaggttgaggagtttggctagtacccatcagtaattgtggagctgcacaaatctaccttctttccaattttcatatttgggatattaataattaaagacagaatttgtgttagtgtgcttttgctttggtttggtttgatttgctatgtataataaagctacatataatatattgtgagtgtagccccaaaaactatttgtggatttgatccctttaactaattttgtggtgatgcatgtatgtgggcatgcatggtggtgataaaacaatatatatttcatacaagcatgtttctatattttaaaatatttgagcatgaactaaaattacattagtattattaataactatatttgtttatttatttttacacctttaacatatactagttggaacaacacgtgctacgcacgtgtaatctt

SEQ ID NO: 372922 - DNA, 841 bp, Cannabis indica
ttgaaacagaattccaactctccgacctctgatcagtagtgaacgaacgagcttgataatatttctagggtaccgactgatgagacttcggttttgtaactggctttgggcctcaccttggcttctcatattggcctaacacaaacaaaataataataataaaaaaaaagaggtttttacaaaaatacgtgatttttgagtaaaaatttacaattttattatcacacggaataaaataacctaaaataacggtaaaacaacaaaataaaataattaaaaataatagtagaacaagtaaaaaataaccgtagaacaacagtaaaaacttaacacagtaaatagtatttttgaaaagaaaaaaaaacaacagtatttttaaaaaaaaaataccacctcacagtaaaaaaagttaagaaatttcaacatatggtgtaaaaatcctatatttttaaatatttgtatatattttacattatattatttgagaactcgctaatttacgtgagtaggtttatttttttgttgttgttcaaatgacctttgaatacttcataatttagtgttctgaagtcattcgactttgttgtatgatattcttagctaatatttattatttatattgttatgtatactaggagtatataattttgttagcataatatatatatatatatatattaatataagtatatggcatgctgcatattttaaatgtaagtgcaacaaaatatttaaacattattttcaaaattaaaaactactcgaaatttttcaaaaatttacaagcactacaagaaatgtaacttttatcagtcgtatttcgcaaactggactggcaaag

SEQ ID NO: 372923 - DNA, 555 bp, Cannabis indica
gagagagagaataggaaataggatgaacatggagagagaacatgtatgtattgggtctcatctttatcatcatcaattttaaataaaaaaaataaataaataaaaaatcttgtcacaaggtgacaacatcaatcaaatcaaaattatatatataaattagagagaaaacatgtacgtttatgtatatatatcaacataaaacctattttcgtaatagatttggcacaaaaattataagtgatctaagaaaaatgatagaaacaaaaataacatcaggtttttacgtggttttgcagttaactctacatagtccatgagtcaatcttattcaaacttttatagatacagaactagggttctttacaatcagtgtattcttttctctctcaaggattttctgtccccctttctgtataatctacccctatttatagtaatatagggaggccgttaattacattcaaatacgaatcccacaataatattttcttaaaattgtgggccttaattacgctccatgtaaataaatgtagtcattatttgaaaatcacacag

SEQ ID NO: 372924 - DNA, 623 bp, Cannabis indica
gggctggacaaaacaggttagacacgataatatgacttgaaactcgcacaatagttagcgagttttgatttgccttaaagtgggttcgggttgactcgtttatcccatttaataaatgggtcgtgttcatattaacacgactaacacaaaactcacctattaatgatctatttcaagtttattttagtactttaacatgttataaatatgttaaatacttcataaatatattattagttgacatatttaaacaaaatatgcttataaacaggttacacagattttatcgtgtcaacctgtttataaacgaatcatgttcgagtttcattttctaacacgattattaatcggatcatattcaatcgagcatatacctaatatacctccacacggtatgaatacgaacccgcaaacacaaattctcacccctattcgaactcccctcccccaataaaataaaaaaaaaaaaaagtgaaaaaaaagtacctcatatgtcgtggttacacctccactatgctccagctccatagtcccataaaaccaacaacacaacagtcttaaatattattattattatttatttatttattaaaaaaaaagacaaaaataacaaaaaaaaaaaa

SEQ ID NO: 372925 - DNA, 644 bp, Cannabis indica
cgccccgctggggacctatttagtattttactttatatttctaataatattttataatttgtaatttatgtttgaagtttttaatatattagtaattctttatatgacatttaaaattgtattttgggtagtaaatagtttactgaataataattaatatataatattttaatttttatgtagtttaatatttatatatatatataaatttttatgaccctaagtggattcaataagtatatcaactactttatacttgataagagtaaaagattacgtcaagggatcaagaaatcaagaccctatacaaaagatgacttcaaaagctcaaagtcagcataaaagtcaaagtcagagtcaactctaggggaaaagtcaactttgaatcaaaacatgcaaatcaagctagtaagcttatctacatcaagactacacacactcaaatagtataagtttacttttgttttgttaaagtaatttgcatattacactagggtttgtaagttcaaattttgacccactcactaacctgtgcgacaagttttctcacccaatagttcaaaaaaagattttaattgattttttaaatcacatatcatttaactaagagaacgaaattagaatttctgaaatcggataatcga

SEQ ID NO: 372926 - DNA, 659 bp, Cannabis indica
gagcttgaaagcggcacctaataaattcaaatacaaataaatttatttaagtcacaaattatgatagtaagatttgtgcttaattgagttaatataaaccttggaattgtctcaacagatgattcgttgcagttgtagcagttaaaacatgatgtttgattgtcaagatctgctttttgacggcattttatgcaagtcatgtaccagaagggttgtcttaaattcttgatggagattgatgcattgatccaaaaagtagtttgctaataaagcataatatagttattgaaataaagtatataatattatgtaaagccaaaaataattataagcactataaatactgagaaaagaaactaattagttaattaaaagttaaataaagatattgtacgtacctcttgtggaagattttgaatgccattaatagtaatgatattattatattgaggagttcttagaacagtttggcttgggaagagtctcttctcattgataatggcagaaaggtattcttcattgttaatgctcctattaatttataggattaaattattagatatataagaattatttatagataggtgtaataaagaataatttataaaaaataagtatgaattagtttaccattgacgaagctcatttatttgtagaat

SEQ ID NO: 372927 - DNA, 1098 bp, Cannabis indica
tatgacattactttttgtagtataatttaatatcgtacaatttctgatcattactttataataaagtcttaataattaagactgtctttatgttaatgaaactataaagtaatcaaattaagcacaaaatttaaatacacttgctgaccagtattatatatagggatattatttgcggtataaatacttatataattgacattgttgtatttaaaattcttatgttaattgtttagtggcaaaattccttaaatagtaattttgtcacacttaaatttcaatgtaaattttttagcaaaaaaaatccctatgtactcatttatttcagagataaatgttgcttcaaatgtgtaaccattttgttgccaaagatgaactacataagaatttttaccactaaaaaattatataagaatttaagtgcaataaaagaaactacataagaatttttaccactaaaaaaattgtataaagatttaagtataactaagtgaattacataaaaaaaattgcagaaatttcctacatatacaccaatattataagtaatgaaatttacttatacatgtataataataaaaaataaaaaaaaaaaaaaacctagcgatgatttagaagaaaaattcttgcaaaattattgtggaaaacagttttacttagaaaatgtctttttaattggaagattacttataacacaagttacaagttaatttcctatttaattaataccaataaataggatggagaatatatttggattgcatgcaaaggaaatatatagtataacttattagggggaaatttatttaacgtaggacaccattattctcagtatattattttttctttgagtgatgttagaggcatattttgacatctaaaatttaaacaattattatatgtattccaaactgtatatttcgagaaatttactaattaagaaaattatatgtaaatattatatgtcacaaccattcatgtatatttgtatttttctttatacaggatgaggtgttctcccaaaataattgtattgtatagggttcatttggtacactgtgttgtattttattgtattatattatattggattgtatt

SEQ ID NO: 372928 - DNA, 1262 bp, Cannabis indica
ctcaacgacgtcatccgtttaagatttttgtttttatttattaatttactattattagtttaattccaactaatgttttatggggttagaattataaggagttcattccttaattaattttaatgttgtgatcatgtttaagtgttgaaactaatttagtttgtccattagtcttgtcttttgacacggttctttaggcttgtcttttgatatggttttttagtcttttccttttagttttttctgattcgagtcttgtcttttggcatgggttgtgtaactcagaatcatcatggtgctatggtagaagcattcaagaaggggaagattggacgtgttcaacctgaaattgctgagataataggcattaaagaagcattgagttggattgcaactcatttgtgggataaagttatgttggaaacagatagtttggtgtgtgtccaagcgagcggtattttatgccttcacaatttgtgttttgtaaaacgatctgcaaataagttggctcattgcttggcaagagactcttgtttctctacaggtcgtgtgcttcagttggagggctgttcctctgaagtgcgttatattgttttgatcgaatttattaattaatagatcttatgaatttttattaaaaaaaaaagatagattcaagtattatttttctttttcagattattaaaattttatttgttttagctttttttcatgacatctctatcacattaattgtaattttaatgttactaatagattattgactaactaagcatactcttaggtgccgtttggtaacatttttttaatcagttttctgtttttaaaattgaaaaagtaaaaatatttttaaaaaacatgtttaataaaactgtttttacttttcaattttttaattgagaatcaaaattttaaaaacaaaaaaaaatcacttttaatattttttttaaacaatttttttttcttaatcaatatcttggacttcaatcatgacccggacccaaatctcccactgtcctagcgctgaacccggcctctggcttgaaccaaaatccgaccccagacctagacccgacgtaaataaaataaaaaaataaaaataaaaatgaactttacagaacacacttttgttttcagtttttaaaattgaaaaacaaaagtgcttacaaaacgcatttttatttttcaaaagcaaatttttaaaaacaaaaattttactttcattgtgattaaaaaatttgaaaacaaaagtgttaccaaac

SEQ ID NO: 372929 - DNA, 343 bp, Cannabis indica
ttccccttcccccggtgtgcacaatcagcaatttcttgggcgaggacagcccctacgttagcatcccaacccattctaatgcaatatagcatccaggcgcggtctctgctgacagtcaaatcatgtgaggtggggcataaggcagtttgcacgaatgtatacagacatttcaaatcgttctccaagtcagtgcgccgaaaacgaagatttccataattatcgaaatcccattcggaccctgtcttggcaagcaccggcatcatgtcacccacagtctcgtcgctcacttgccctttttgagcggagtattggcattcaactgacttttaaccaaacaagttgt

SEQ ID NO: 372930 - DNA, 449 bp, Cannabis indica
ttgtcacctcaattaatgaattgccacatcctttttttttctacattagtttcaacaattagccttgctacttttgctgcagcaaagttcctgtaaaacttcaacaaaatcttgcattttctctattaagtcattttcttaaccaaaacccaaataaaatttaataattcccactaacaactccaaattacccaaaagaacataaaaacacaaaataacatatattctcacaaaatgggaggaaaataactaaatataagttaaatacacacataaattaagctaaaagaacatgacaaataactctttattcaagagttatcaacataaaatatgaaaaacgtgaaatttcatatacaacatgaataacacacctagaatttaaatatatctacataaattcataaatcataattaaaaatctaatttcaaaattaagccctaattat

SEQ ID NO: 372931 - DNA, 400 bp, Cannabis indica
atacacattcgtagagacccatctttctttttgacaaatagtactggagctccccagggtgacactctaggtcgtgtaaatcctaagtcaagcaacccttggagttgaattttcaattatttaagttcagctgcagccattctataaggggctttagaaaccggttctgctctaggtgccaaatcaataacaaaatcaatttccctctaaggtggtaaacccagaagttcatcaggaaaaacgtctagaaattcctgaaccaccttgatgtcttctggacgaacagagtcaggccgagtggtatccaataccacggccagaacccctagacaaccatcacataacaattctttagctgttaaaactgaaataattgggatccaggaaataagattaccat

SEQ ID NO: 372932 - DNA, 678 bp, Cannabis indica
taaattctattaagtccaaaacatatatatatttattcataattatagtgtcgtcaacacagtagaatataatcatgattatatgttcaaaagtttaagttccatgatttgtcaatacactggatttagactgacatgataattagtgataaggtatacttacacattggataagtgttatgtcctttccagggtattagcaaagtataccagttagagctgaacatcgggcgggtttaccgagtttcgggtttacgggtttcgggttcacgggtttcgggttcaaaaaaatgaaaccgaacccagacccggatagggcatggattggcgggttggtaggtttcagttagccgggttggcgggttgacccagtcaactctttaaaaaattttaattttttattcaaataattatttttttattttttatttattaaattaaacataaataatatatcaattttagggttttttatttttaattctttttattttttaattaatatatataatgtaattaaaaaaataaaaaatatatataatatattaaatatgcgggttggcgggcgggttcgggttcaaaccgaaacctggtactcctaaaaactcaacctgcgaacctgcccgaaaggtaccgggttgaacccaacccgcctgaacatttttaaaaaaaaattgt

SEQ ID NO: 372933 - DNA, 268 bp, Cannabis indica
ttcatcatcattggatcggaattatttcatgatgccatccatcttcctaagaagaaaagcctgacttatgtccattcttcgcaaatgcaaattgaattctgccgtttctgtaggagcaaaagtggaagcagatgcagcagcaggatcattcgtaataccaggtgaagcagaccgagcctttctctgagcagttccttgaggagccttcccaggtattttgaaagtggttccaacagcaggcatctcaattgattcattctcaagaatc

SEQ ID NO: 372934 - DNA, 534 bp, Cannabis indica
gaaccgctaccgagatttcataaaaccgtgaccgaaccagagaatttaaaaatggtccaaattaatcaaatcattccaccgaattcatttggtccagtctcaaataatttggtccgaatttgttaggattcggaaccacaaattacagattatataaacacccctaataacagtacacgtctttttccttttcttaaagaaaccaacctagtgtatatggtatggctttaatttcaataaatatatctatttgattaataataatcgcaaattatggtatatcaattcgattaagtttgtatatttatgtgcctatttaagtttaatatatataagttgtatatgtatatatacagctcattatataataatacatttggtcaaatatatgatttatttattttctctacgacttcatgtatatatattaagtattattatatatttactttggttcaaacaattaaattcaaattttagttttggttttttcttaagaatgtctaatgtattttaaataaattaattaaaata

SEQ ID NO: 372935 - DNA, 969 bp, Cannabis indica
gtaagacagtacttttctttctctcagtaggaatatttttgtttttggcatgtggagaaattataataaaaataagagaaattcctgtttcaaataaataaataaataagagaaattatcccatatactatttttttaacctttttgtttttcaaatttacggtttggctttctaaagtggttgtagcgctagttgcaataagagtttctgtacgatcttttgttgcaatttaggttacagcgttagttgcaataggggtttctatgtaaaatttcgtaaaaaaatgaaaaaaaaaaaaactgttttgaagtgtaaaaataaaaaaaagtatattttatgtatagaaataatttattgagaagaatagtgacgatcactagtaagatatatagaacgacgaaaataactttaaaaaaagtagggactacaagtaaatttctcagatgacaatagttttaaaactatataatgagattttttttggtaaatttattgattattataaattttaatttaatttttttttcaaatgattttaatttaatttattcaaacaatatgtattttgaaaattaattttataataatatatatgtataataaataaaaatggaaacgaactttacagaacacacttttgttttttgtttttaaaattgaaaaataaaagtagtcacaaaatttttaaaaataaaaattttactttcattttgtgattaaaaaattagaaaacaaaagtattaccaaacggcacctaagtttaaaattatttgtacaatataagtttatgcgatatatttttataacttaattataaactaaataatatataactgtacgcgaaacacaatttaaaaaataaaataaaaaaatgttcagtttcaaacataaaaaaatccttattttctttttttgaaataaaaaaaattcgtacatagtttaaatatttccagttaattgtatttcat

SEQ ID NO: 372936 - DNA, 597 bp, Cannabis indica
aaaaaaaaaaagaaataattaatgtcttttagataataatcttcctaaaatagtactttgtaaaagtggttggattttacaccaaatcatactcgatttgaaactttatatgacatgtagattatttttgctttccaaaaagtcatttttaagattaccttaccatgtttcccaaataagagttgcacatgtttctaattcagtgaattctgatagatgtggtccattgaattatcaatcaaaacaatcatacaaaatataattgcattaaaaatagaaaattacaaaatataatcaataattttcatttttatttgttttttaaaataaattttgaatgaataggcacatgcaaactttacccaaaagtcataggtagaatattaaatattcaacgtcaccatggaattgatagagagtgaagcggactaaaaaggtatgattggtggttgatgtgtggtcgatatctatttttggtgaccaattagtggcataaattaatatcaatcaataaaaataaataaatatatatatatatatatattatatattctctttctcttttaagatttctccatctatttttttttttttttt

SEQ ID NO: 372937 - DNA, 536 bp, Cannabis indica
taatttaatttgataaaataattcaaagaaacctaaatattttaaattagttttgatttttgaattttaaattttgatgagatttttaagtttttttttaagaaccctaaatgttcagaatttagttggttagattaaaataataatttaattatattaatatcttatttcacatttgttacatggacattgtttgttatttatttatattgtttattcaaaactctttttaacaaacctattatttatttgatctaaattgctatgattaacttgttgacatatccaatgatctgattttaatcatagtcctattgtcaatagatcttataaataatttttgtaacaggtaaattgtgtccttcatttatctgtgtaaacctagtaagtccatccaaatcatttgacctgtgtgagcctatatgtttgcttatgggcttagatgcatataggaagtccatttaagttttactaagtaaatgcactaggttgctaaaataaaatttcacttaggtaattttatttaggaacaatta

SEQ ID NO: 372938 - DNA, 506 bp, Cannabis indica
tctctctttctctatcactctcgttctatcactctctctcgatctcgtctctctttctctcttggttgggttttcaaaacccttgggtggcctctccaccctcactgaaattgatacaatacccagacattaatagaacaaaattttgaatacaaaatacccagaaattgatacaatacccatatccatatacaaatttgataatatacccagaaattgatacaacgcccatacacaaagttttgaacagaaaatacccagaaatttcgactcggtcttcttctccactgagattgagttgcagcaccaacaactcggaccagactcgccacagtagggagggttcttgggtggaacttcgccggctctggtggtgaaagaccaagggaacgtgagtttggtggagggttcttcttcggtggtggtggaatcgtctcgaccttgctctggatatggatcaaccttcatctcgactggttttctctgtcggaccaaatgggtctgga

SEQ ID NO: 372939 - DNA, 712 bp, Cannabis indica
ttttttttttaaaaaataatcttgttcaaatttaaataatttgctaagtatatcatatctttttcaaatatgttattttttgaaatatattttattaattagaattataagattaggaatatgttagtttcaacatttaatcttattggatatttttttcattaaaattatattttggcaaaaataacatgaagttttgaaaagttagttagtttaggtttgaattgaaattttagggtttcaaaccataatttttttaaacttattttattttattattttttgtaataaaattggaaatattctaaccatatcaaaatatcttatttttcaaatagtttattttgtaatatttaaatttattaaattatatgacttagaatataatattaggaatatctaaatttaaaattaaaaatattctataataacctaaatttaaaattctagttaagatatttttttttttaaaattttaattttttttttaaaatttttaaaaatttagtagatatttttaagtcctactttccaaattttcctagatcattacttgttttggtttgtattgttttgattatttaattatatatattcaaaataaatttttttacgtaacctattatttattttgatctaaattgctatgattaacttgtagacagatccaatgacctgatttagtcatagtccaattgtcaatagatcttat

SEQ ID NO: 372940 - DNA, 545 bp, Cannabis indica
cgacttagttagacgttgggaatgtcgggattattcaagggttagaaatgatcgaaatacctctaggtggaaattatatctttggtgtgtgcatgggcaaaattttttccatttagttattttgtcctttagtgattacattagaattagtttataggctaattttattaggtttatgttagataattagagatttatctcatttttacaagaaatcaagaaaatacattaaacttctctctcttctctcgagccttcaagaaaccagcaagggtttgcatttcttcagcttaatgttgagtaatttaacaaatttagggtgtatccaactcaaggtaaaattcctagcaccttcctctttgtttctcttaagttctagttaagttcttatgcatatttttgcaattagggttctgtgttgttgattagtgtttgatgatgctttctgaagttaaattaaggttatttatgttgatttgagctaggtttgtggactgttgtgatgattgaccaaggtttgagtttaagaactcaagctttgctct

SEQ ID NO: 372941 - DNA, 516 bp, Cannabis indica
aataaaaaaaaaaatcgtaaaaatagttaaaattccgtgaaaccgtatttttgtaatttttttgttgtttttgtgtatttgtgaaataatccttaaaaaaattggttttacaaaaatacttgattttggataaaagtttacaattttactaccacatggcagaaattacatgtatactgccctcttttttttttcccttttatactgtaaacgtaaaaaaaatgagacttccatcttccactcacggacagaaccaccacagaaacaccagaacaattgaaaaacaatcattaattcccgcaagattgagcaaaaagagtgaaaccgacgttaaatcactaaggaaggaactctgtcatctaaggttggttgaatactcaagttgacaagagttgacaagttgtcaagcgaatgagatgagagcatcatgtttattttttatagtgtttcaactagggcttggggctgaattatatggatttaaaaaaaataaaatattgggcaaaaaataacata

SEQ ID NO: 372942 - DNA, 635 bp, Cannabis indica
tttttattattattaattattttacatttcaaattaaaatagttatattgaagaattgattgttttatgttttggttatgctaatccgattcatatattttatttttggtaaagtttaccaaatgattgtggtcctttagaaatttatatggtctctaatctctttactattccactttatatattactctatttatatatataaaggcacactcaaaattggtactattagttttaatatagtaaattacaatacattattagataagtcatgttgtattaattataagtggaagtgcacccatcaattcttaacctagaacatttattattttagtataatttgagtgtcacaattttttttagaattgtgaaaaagtattattgatatctaatatttttttagtgtcatactactattagtataattaaatatcgtgtttcatataatttaaaaaaataatttttaaaaaatatcactaaccaattatgagacattacttataaaaagtgctgagcaccactgatacttaatagcaatacttttatttcttttagcacctgcatattttatatacaaagaattgagtaaaaaaataattatataggccccaaaattttattttgtactctaa

SEQ ID NO: 372943 - DNA, 588 bp, Cannabis indica
ttagaaaactgccatcttagacgtcgattcgaggaagtaaaccagtgtaatgccgagttggagcgtgaaatagctgccgtaaaggcagcgctgggagatgatacccaaaatcaacctgaccttgggaaaagagattcacaggccaaacctcacagctcatagaccaaggggcagaggataacccagagatatactcaagaccctcaggaaatgcaacctgagggaactgaggaaaacttggagacacaacttgagatacgtggaacatcggacgaaaattgccaacccacaattcaggctcatgagaatgaaactcgtgcaaacccttgtaggaagaaaaaggtgagtcaaatcttgagaggaagggcaaggtccgaccacaatcatgacaagagtgatctacgagaacatctgaacctgaagaagcctgacctctatcaacaacttggttcgaggaagaaggattcattccatttgcgaatgagggagttggagaataagttcagagtacatcaagtcacgaaacctaggagacaatcggggcgcgatactgttggaaaacttgatttggaggcctcgagatcaaag

SEQ ID NO: 372944 - DNA, 974 bp, Cannabis indica
tatccctctcgtggcgacgagagtgggtggtggtgaatgttgaccgctgttaatggtgattcactatggttttggaatagaaagaggtgatagaaggatagagattgaaggagaaaaagagattgagatatttaggcgaatttgaaataaaaagtttattttggaatgaatagaaagatttgttagaatttaaggataagatgaatgaggttttatctcaaaattaattgaggagtagctcatttatcttatatatcacaatttatttctacacattagcaataatgtgggactaactcttaataaaattagcataattttcatgatggggtccaatagtatgttaattttgttgtttgagatcccctttatagtgtagaaactcaaattttcctaacttttttttttgaaaaatacttatgaccatgtattttataattacagcatctgattttttaaaatacttctaaaagtttattataatcaaaattaattgaaggaaaaaaaatcaagcacgtctgcaaataaacggtttaaatcctaatttacgaactgtaaatttttttccaatttttcaaaaaacttgtagataatatcatgctatgagtacaataaacacaatcattaaaagagcattattattggacaatcagtggtgtccagtactttttataggtaacgccccactattagttagtaatattctttaaaaattattttcttaagttatatatgactcgatacttaattacatcaatagcggtatgacacctataataaaatgcttggcaccagtgacacattttagtaattctcttattaaaagtatatatatgcaaaaagaaaacaaaaaatgggtaaacaactccaaaaaaaaaaaagcttaatttagtgacaacctttaatcataacatattatgatttttatgactaatatctttacaagcgtttttaaatcgtcaatatatgaatga

SEQ ID NO: 372945 - DNA, 507 bp, Cannabis indica
gtattttgggcgaattctggagcaacaactaactttaaattattcattatttattcattagcctcgattttttatttatattttttagttgatcaataaagtgccacatataaatatagtattaggtcaaactaataattcttttaagaaaaaataattttaaaaaaacaaacaataattaaaataaattcatattattcaaaaaaaaaaaaatattatatacatattaagtgaaataaaattaatttttccatcttcttccagccatattatctttacagattaacaataaactttttttttgtaaggagattaacaataaactttgattctcgattcaaatgctatttttcaattctattttcatatattcaaaattctacattccataaactttctactaatatttttcaatcaatgaaacgaaaaagcaaattttaattcccgtatgaaaaatcaaactttcaatctcaataatcaatagatacaacatcaaattttaagttc

SEQ ID NO: 372946 - DNA, 707 bp, Cannabis indica
aatttgttgtgactaaatttaattttagtcacaatatttgttgtgactaaaactaaattagtgacaacttgtaactaaatactatattttagtcacaagtaacattttgttgtgcctaaaagtcacattttgttgtgactaaaagtcacatttagtcacaaaaaaattatgttgtgactaaaaagttgtcactaaaagtaacagttttttgtaatgttagtttagagttatatgctatttttaagagtgttggcctttgggtctcataatttatatattttaatctaactacccatgtatgatgcaaaaggaatacgcaggttcatacattccacttttctttatttcattgaaaaaaaataaacaaagaacaagaaagtcaaggttgtgtttggaagaaatgagataatgaaggttctgaacatcttataatccttaaggtataatttttttgctttatttttctatatctcttttttaaaactgaataatgatttctgtatataatatattagacataaacacctacttgtcttttcacctcgcaaagctcttcaaagaacgatgagtattcttgtatttaataatactgactgctctaacttcatcagtttatagttctaaattattccaaaacaagttgattgtatcatgaattttaattacttttgtcattctataaaaagttaaaagttttaattgtattt

SEQ ID NO: 372947 - DNA, 584 bp, Cannabis indica
tgtgaagaaaaaaaaaagaataaatattacttattctttataacattacttattcataataataataattagaaatagattgatgttgtttaaacagttaatttttttttaattattgagattattaaatatttaattttattaatataataattatatatgtgctaaactaattcgtatttttaaattttaatatgtaccaatttatatcttcaaatttaacacatattaaattactagtaaaaagttacgtgcgaggcacgtataccaaattttatgctaggtattttttattatattaaaaggtaatacacttaaaaatgtttatctcatcttggttcaacccaattttatgttgttcccataggattgtgtgttagatatgagcttagaagaatagtattcgttagaataggtgccagcaatggcggtgcccctgatgtgagttttatcttttgggaaaaatctagctactccgacattacaattacacctagcctttcaaaatgagcatcatcaaaaattcaaggattataaattgaaaaaggatatcttgttacttttggtgtgcccaacaaattctc

SEQ ID NO: 372948 - DNA, 541 bp, Cannabis indica
tttttttatggcacaatatgacattgcccgtattttaaactgcttacaatgtataaatcagtcacaccacactgtaccaaaatatacagtttgaatcgaacacatcgcatcgcactacaccgtattttttgtagtgtgatttatgcagtcataaaattttacaatgcgagcacatttttagaaaattacataaaactatcataaaatagtcaaaaactcaccgtcccattgcgaaaacccttatattatttaactcatctcttaaaattaaactttaatacataatgtagactaaatttagtacatgttaaaaatactttaatctaaaatgttgtagcataaaatataatttttaacttttattgttttagggttcgtttggaacatcgtattaggttgtattgtattgtattatatttttttttttgaaagattgtattgtattatattaaattagattatacattatatttttatataatactatattaaactttaattgattatacaaaaatattatatatttaggtgtccataaaag

SEQ ID NO: 372949 - DNA, 777 bp, Cannabis indica
gatgtggtatttcctctctatgtgtgttgcttctcttgtggctttgaggctctttactatggactatagcaccagtattgtcacaaagtaaaaccagcggtttttccattctaggaacaacaccaagtcctgagaagaactttcttagccaaacaagttccttaacagcctcagcgacaaccatgtactcggcctccatgttagagtctggtattgcagttctcttagcgcttctccaaacaactactccacccccaagagtaaaaacaatcccagatgtagactttctgtcatcaagacaagtctgaaaatctgcgtcggtatagcctatgggatttaaagcaccacccttgtaaactaacacataatgcctagtatttttcaaatatttcagaatatgtttaactgcagtcaaaagttcatcacctgggtttgtctgatacctgctcacaattcctactgcatagcatatgtcaagtctagtgcataacattgcatacattagactcccaactgctgaagcataagaaacccttctcatgttttctatctcttgatgatcagtgggacactgttccttagatagatgaaaaccaaatctagaaggcatctgtgcccctttggcattggtcattgagaatctctccaaaaccttatcaatgtagatgtttgagagagagcaaggggtctgttcttccagtttttgatgatctgaataccaagaacataagcagcatcacccaaatctttcatttcgaattgagtgtcaagccattc

SEQ ID NO: 372950 - DNA, 614 bp, Cannabis indica
caaaaatgcaagcccaaatcatccaacaagataaggaaatacagaggttgagatagtagggtcctctagcagtgcctccactataagtgccttctacttttgttccagcgatgcaagtagaacaacctgttgttggtaaccatatggaacctttgtataacaggttttgcaagcacgggcctctagtttttctaggaggtctagatgtcatgaaagttaaatagtggctcacaataattaggacaatttggaattttatgggggtcatcagaattgactgattgacttgtgctaatttccagttcccataaagatgcactcgtgtggtgggagatggtatatgttacctaggatgtcactataatgacattgggaagaattgtaggatttatttaatgccaagtagcactaaaagaaaagagttcacttaactggtcagggatggaccatgttagtgagagaatatacaacaaagtttgatcaattagctaaattggcatcggaaattatgcccacagacttcaataagaaggaaaaatacttggacgggtctaaattccaagattaggcatgatctagtgattacaaacaatgacacaactagttgcgttgag

SEQ ID NO: 372951 - DNA, 352 bp, Cannabis indica
gtagaattaataattttatttcaaattatagtacatatataaatattatatgtactcgaaaataattttaatatgatatagtattaagaattgtttattggtttttactattattattttttaaaaatatatgtttatacataatacataaaatgtattttgaaagtaattaattttctaatcaaactcaaattttatcaaaataatttcaaataatataatccttaatacagaggtcaatataatacgtataagataggtataacaatgaaatttattattttattgtacatataaaatatatatatatggggaacactttttaatgggtattacccatgaatggttacta

SEQ ID NO: 372952 - DNA, 884 bp, Cannabis indica
attattatcttatcttcttaataagtcaaaaaaataaaataaaaagagagacaatgtggatgtggtgacgtgcttttgcttgcatgaattctcctcttttgttccaaaataaattatacataaatatataatatatatttaattatagaatttataaatatgcatgttccctccttttagttaattaattaattaatcatgtgaaaattaaagccaatataaaatgtgtgcttgtgtctaaaacatgcattattggagatgagcagtactgtaatttttaattattatttaataagagattacaagtcaatgaaattatatattttatttatatatattatattatagtatattatattgtgttttagtggtgtacaagaatttaactatttaattattcactttttcagagacatacacatgatacgtgtctttataataaaattaattaattaattttcaaaaaattaatacttattaatttaggtatcatcgatacaaattaatgagattattttataattaatatcattcatttatgcatgcatatatatagttactctaatccctaaataactactcccaattgggttaattaatatatatattagcaatcatgatgagttaattagccgatttaaggctttcacatatacaccaataaaaatattttatataaatataatattaatccaaaataaaaaatccattagagggcaataattagaattgaaaatgaattgtaggttaattattcagccgaattattaggtgaaaataatctgttttgtcaaaatataacagctttaatttttttgtttttatttatatatattttaagtttttcaaaagaaaaaaaatgtgtgatctcatttttcttttag

SEQ ID NO: 372953 - DNA, 503 bp, Cannabis indica
agacttagttaattgattttgattaatcaattataattctaaagttagactatgtaccctctgcagcaagatataccaccgcagctggtgggtctctattttctggctctggcggctccggttgatgtctcagctgacgaagttcttcattctgcctacgaatagtttcttccagtgcagcaaagcgctcttcccatccctgtggtgctcgcagtagttcattgatccctccattctcttggtctctatctcggccttggcctcggcctcgaccccgacctcgacccaatcagactgaccttctaggaggcatgttcagacttctacaccacacaaacataaaaaaatatcaagaaggaacattttgaccatcacctttagatgagaagaatatcacaacatgcacactttaaagacaacttaatcgtaagtaataaccatttacaatacagtgagtcgagctcgtctcgtggcaatgaactttacatgttagggctaaccac

SEQ ID NO: 372954 - DNA, 524 bp, Cannabis indica
tctttaaagtccttaagctccttcagctccacggccaagtttgccctggactccaaagtccgcctggtgcaattcctctaaggacttcaccttggcagccatttcgtctaaggcctccctagcctcccagagctcgcgtctgtccttgccaacagcctcgccctccgccctcaatgcttcccagtacttggcctccaacctatccctccgaaggacctcctctcggatcatcgcctccgcttgggcttccctttgcttagcctcttcctcgaacttggccttagcaagggcttcccgccgcgtagcctcctcttggaacgcccgcctttcagcagacaggtcctgcaggatcttcacgacttcgtccatgccctcaaattcggacaaggcgaagccgtgattaactatgttcttcgaaaggcggccggcctctgccgcaagctggaaaaggagcaagagtgagtaaaggccttaagagaaataatgagaaaaagaagtaaaccacggaatacttaccacagtca

SEQ ID NO: 372955 - DNA, 551 bp, Cannabis indica
aagttaagggtgcatcagtacatctcttttaaggaggtgcattgtagaatcacccaaaaattaataatacataatattgattttttgttacaatgaaatacaagcggttaattttaactcctaaaaggatgatggcccacatatatttaaagaattatttcataaatacaaaaaaaaataataaaaaaagttataaaaatatagttttacggaattttaaatatttttataattttatttaaaaaaatacagtctttttatattacactcttgttaatttattattaattttttgttaattgtatattatttttattattgttttaatgtatatagtttttttactattttcgtgttgtttctataaaaaattatataaatatattaaataaataaaaataaattttttataaaaaataatgttatatacaattatctctatatttaatactttctttatataatttataagggacttaatttatattttaaatattttcttgtgttatatgttgtcacgtcgtcgaacaaaaaaaaaaaaaacgaaatga

SEQ ID NO: 372956 - DNA, 603 bp, Cannabis indica
tgtcactgttgcaagtgtacatcagcaccgctaagtcgaatcttatttcggtatcgatttgtgattttgttaagaaactggtgactcttattcactacacctaactttattacagactacacacctaacgagtgtacatttgtagaactaagtagaaccctagttcagtatcgcttagtgggtgactctgatacactgcacctaacttgattatagactttgtgtcactagaccgctaaacacctatagtgatagtgtcaatattacgagcgtatatcggcaccaataagtaaaatactatttcgatatcggttagtgatttcgttacgaaactggtgactacaataccctacacctaacttgattacatacgttgtgtcacgggacccctaaacatctaaagtgatagtgtcactactgcgagtatacatcgacaccacaaagtagaaccctatttcggtatcggttagttatttcgtttcaaaactggcgactccaatacactacacctaacttcattacaaattttgtgtcaagggacccataatcgtctacatcgatagtgtcactactgccagtgtccatcggcaccactaagtagaa

SEQ ID NO: 372957 - DNA, 530 bp, Cannabis indica
attggaacaatagaaaaatgtaataatatttttactaaaaaatttaagcataaaaataaaaagctcattatatatttttttattaaagagagttattttttttttcatagttagagtttatttttttaagactcattctttatttagttaaagaatatatttagagaacatggttagagatatttttagtaattaaacaaaagaagtgccaatactaataaatcctattgtggtacatgctaattatttgtcgtgcttaaagtaataaggtacacaaaaagttcatctatggtaaaacattctcttatactctccttatggactgaattgagattaattgtgatattaagatgggagaagagatgtatggcagttttagctataaacaaaggtatgcataaattgattcaatttaatgataattgatcgatttaattataactaactaataaatattagatatttaattgtgatcggatcgtattaaatgttatttttgaatatctaattggatcgaattggatgttgga

SEQ ID NO: 372958 - DNA, 523 bp, Cannabis indica
tagatccgttgacgaaaaactgcgtcaacagtttggtgctttcattgagagcagtgaacacaagtgttaatcaccccttaccatcacagtgagtacaagacggacgaactatgaggaggaggaccatgatgaccccatgaacgaaggaaacaccatggaacaccatgaagagtaccaacatgctgagcccgctggcgaagggacctctcgacgtccaggaaaacaacctatgcctgacgacgaaggtcaggtccaagatgcaggaagctcatcatcaccatcccatggtgtacggcgaactaccaatgtccatgaggtgttcatggagaacaaggcattgcgccaacgtttaaatgaaactctcaaactcaacagagagtggcaagagaggtatggagcccaggaggccacaaagccacaaagaagaggaacccacgggcgtcctggtacagcaagaaggggacaaccccgtgggagtcgttcaacacgttaccctctcgaaggtcaagagaggtctaggtca

SEQ ID NO: 372959 - DNA, 604 bp, Cannabis indica
cccccaaaaataaattaaaataaattgtagaattaagatgaatcgttagaaattgtacaataaggaatgactgagaaaggaagaaccatacctgcaaaccctcaaaaataaattaaaataaattagaaatttaacccgttaatctccgcaaaaaaaatgttattttttaataaaaaacttaaaaaaaaaataaaataaatttaaaatacggtttgttagagagatatgtgactaacatgatttttttttaatttaaaaaagatcgtttaatttttgggtttaattaaaaagattgtttaattttttgggtttaattattgggtttatttattaacgagagatcaaacctattaacatcgttaaatttaacagaatattcttttattttgaaggtatattctgttaaaccaagaaatgccgttagataggcacttttaatatataaagatataacaataatttggtaatgattttacaaattatatggccaaaaaatatttatatattaataaataaaaaaattgggaccatatattataaataaatatatattatatgttggccaccttagctttatgagctgttaaatgttacaaacaataac

SEQ ID NO: 372960 - DNA, 753 bp, Cannabis indica
attggataacttaacaaaactaccatatgacttacgatcttgagtaccaaagattgtatatggaaaaagttgattgtcagaaatacaaagattattagtcttttttaatttaaatttttaatgtgtcctatgtcatggaccttcatttatttatttatttagataactgtatttcataatcaaatatgttcaaactaggcagcaccattcaaaaggtctggctgtatatgctattacaaactcttaaaccagtctaaatctatacttgttaacttttttagacattatggttcgaattcttatttttccattcacttctatagtctttacaattaattacgatagcttttgtgtatagttaattaatcaatttattaattaagctaaaaatcaggcaatttttacacacagcattggcaaatatggctagtaaaccattcaagcaatcatgtaatttcggtgaagtgaaaaatatattaaagacttttaaaagaattctgctataactaaagaaatcttgaacaccaatggttttggttttaactattgtataaacacaaataattgaagatgttgttggtgtttgagaaacatataaggtaaaggtattatagagaaatttgatggtagtgactatagttttgttcctatactatgcacatatctttttagccattgatttatatgatttttaaaagtcaagattgtataagatgtatatgtttgtaggttaataaaaaaaaattaaaaaaa

SEQ ID NO: 372961 - DNA, 402 bp, Cannabis indica
atcaaccagtgatattgacttaaaaagacacaacggtaagattatgatatctttactaagatcaatatcggtcccagtccaatgtaaactcaatacatccaatactagcatactttggaaatattatggaaagaacataacacttatcaaaggtgtaagtaagctttattgctgactatcacatcactgtaaatccagtgcactgatgaatcatgggacattatcttttgaagcatataatcacaattaccttccattgtgttgaaattactgtaattgtgaataactatatgttatggacttaatagaaattgtatacattaaaccataaacatgaaaactacatgtaaacataagtgacttctaatattctattgataacaaatcagattatattaaaat

SEQ ID NO: 372962 - DNA, 445 bp, Cannabis indica
acttgaacctaggacccagctcctgacctggcaccagaaatggaaccagactgcaactcaagatccgcatccggatctggaccaagggcttggacaatacccgtagtcggtctctgcattcaagacccaccccttgactcgaacgctgacaagcacccgaaccgacaccaggacgtgaacccagtagcaaagccaaaagtgtacccgaacccgtaccataagaccttaaaattggaaccaaaatcggactccaaatccgacctaaaccacaattgggagccagacacggatcccaacccaaacctggactcgggacccgaacccgaacctgaactcagacacaaacatggaaccagactagggacagagaaccaaagtcaggacctagaactgcaccccagtctggatcccgaacccaaactcagaaatgggacctaggacctga

SEQ ID NO: 372963 - DNA, 910 bp, Cannabis indica
atgttcctcccgtccgtgagtatacccgccttaggcctatagggttcgatgaacggctccgtaggtttaggatgccttccacccggtgggggaatcatgccaaggagtattatttctcccacttaggccattatttaggtcgatcccggatgggttctggacctccggtgcccattcccttggaccattcaacccatttatcctctagttggttccgtccctcggacagctttctcggggatgatgaagccagtgctatgattcgggactttgctagggccgaattagagagtcagtgtaggactagcttgatagctttttgttaagtgtatgatgtcctcatggatgttctaacacgacctattttctttttgtagcatccaggcccgtggatgaacttttggccactcttgctagagcccacaggcctgatgcttctccgcctcctgctgcttctcagtcggtcactcccgggaggtcctcctccaatgccccttcgtgcattattgtcttggtggacgaggaggtggttcttgaggaagttgaagaaggtgaagaagagcagctgagcgccctcgagcgcaagcgtaagggcaagatggtggaggaggagccttctaagcgcccctagagggtggacactccgaccccgagccatgactccgggattccttccgaggtggaggaatacaaagtgcctcacggcatagtgttgactccggtccctagtgacgaggagaggcagaatctttggatagccaaatacaactacgccctcgacgagtacagccgggggcatgctgaggtggaggccctgaagagaatcttacgggaggaataacaaaataccctcaacgaggaggccttccggaatccgtgggacctgaacatggacccgctgacggactgg

SEQ ID NO: 372964 - DNA, 1296 bp, Cannabis indica
cctgtctgacccaacaaattcacagatgctggatccgacattgcaggacccaggaagttcaagggttccacctgttgtcagtcttggacagacaggaagcgtggtgcatggtgaaatagctcctgttactgaaactgcaactggtgtgcaagagactgggaataacagttccgcacacagcaaggtcattcataacatgactgttccgcctagaaccaacgcccagactaccatcagagatgcaaccagagtcatagcaacactctgcatcatgatcaagatgatttgcgtgctgtagtgaatctcacgtttgacgaacagaggcgtatgttcgctgaatggagagacaaagagatggaggcattaagggctcaccatgcagagatcgaagattgtagtcggcaagctaccgtgctgataaaagagcctaccagactgtaggtcagcaaacgccgaacgtcgttcccctgggagaaacggaggatgacccgacgatgaatacctcccagacaaccaatggtcagccgtccaatccccagtcacgagttccactcgtgggccaagaggtaggcgggcagaccttgtctgggaattcatcaggaggagccatacctgatggatccaatcaaataatggagttattccgcctgtcaaccaagcaaatcaaccgctaagacaaccaggctcttctgtgttcgataggctgggaacgacccatgacctaagggacgatctaaacaaaagaaggggaacagacgagcataatattgcgacaatcttccagcccggagcccatactcaaaaagacgctaacgtaatccaaaccgaccaaaatacggaacaagtcagcccagccgtacaggcacaacttgacgagttgaagaatatgtttcatggcatggccggacagcgtaacaatgatcttgagttggaccgttctcgcaaaactcctttctcaccagagatcagtctcctgccactgcctcacaagttcaaaatgccaacgtggaagatgtacactgggagagaagatcctctttcccatctcaagtacttcgagatgcaaatggatttacaaggagtacgaggggatgtatgctacaaaatcttccccgccactctgtcggaagccgcacatcaatggtatttcaagttggctcctagaaagtttagttcatggaaaaccttctcttcagaattccatgcacaattctcttcctcacgtcagctcccattgcatctggaagatttggtcaaagtaaagcaatgaccaggcgagccactccgggcatacat

SEQ ID NO: 372965 - DNA, 507 bp, Cannabis indica
agttaacgataaagccaaggaacttgcctgatgataccccaaaagagcacttgagtgggttcaacttcatgttgtatcttttaaatatagagaaacactcttccaagtcgtcaacgtggttctttgagagtttggacttgacaagcatatcgtcaacatacacttccatattgactccaatttgattggcgaacattttatttacaagttgctggtaggtagcaccagcattcttcaacccaaagggcatcacattgtaacaataaagccccatgtcagtagtgaagctcgtgtactcccggtccgccacattcatgggtatttggttatatccagaatacgcatccatgaaagacataagttcatgaccagcggtagcatctactagttgatcaatgcgaggaagtgggaagcaatccttgggacatgccttgtttcaatcagtgaaatcgatgcatgttcgccacttcccatttggctttggcaccaacacggggttcgcaaccc

SEQ ID NO: 372966 - DNA, 652 bp, Cannabis indica
tttaaaggcgcatgattcaaagagagttttaaggataataactcaaataacgaaagttatgagagttgtttgaatatagcagaagcaccattagatgaacatatagaagagattaagcctataactaaagagaaagaatcctttgaagtggctaaaaatttgggtacattggatgcttgctcaacaaatgataatctcaattgggtgaatgaagaaacatccatcctcaattatcaagttattgaagatcaaatcacaatcaaagatgtggatggtcatgaggaaactaaacaaccaattgagaggttatttgaggaaagtgagaaagaggtgtcattagtggctgaagaatcacatgtagttgttgatttgaggtcgtaaacgtcactatattatgaagaaccaatggacccttattttccactaatactgtattcgccatattgtattctctacgagctaccaacagtttattcccaagctcatcatccaaagtctcatgttgttggtgtgaattttggttcaaactcatcgcatgccaagcttgaggttatttttaaaaacaactttcaagttgtcttgcatgctgcttattatgggcgtcaaccacttgttaatgtggcatgtgttggaagttattttaccaggaact

SEQ ID NO: 372967 - DNA, 788 bp, Cannabis indica
ctcctgagcatgccatcccccaagaagcataaagacgtgcagagcctaaccggaaaggttgctgcccggagccgttttatctcccgatctacagacaagtgcattcccttcttcaacatattgaagaagtgccaaaagtttgaatggtctaacgagtgcgaggagacattcaaaaagttgaaagaacacatggccaagcctccaatcctgtcgaaacccgttcttggagagcacctgttcctatatttggccgtctccgagcacgcagtcagcgctgccttagtccgggaagaagagaaaactcaacatcccgtgtactacgtcagcaagcgcatgataggagcggagacacggtaccccatcatcgaaaaattagttttctgcctcctaatggccttaaaaaaattaaggccatatttccaagcgcacccaatcaaggtgttgaccaatcacccactccgacaagtcctgcaaaagccagaggcgtccgggaggctcctcaaatgggcgatggagttaagtcaattcgacttacactacataccccgcatctctataaaagcacaaccgttggcaaacttcatcactgaatgtaatgaagccgaggcaaccgcgaatgtgccggtaccatcggtccgcacatggagagtattcgtggacggagcctccaacgaaaacgaattcggagcgggggttgcaatgatatccccgaccggacttcgactccaggcagccctacggttcgacttctcagcgtcaaataacgaagctgagtatgaagccctgat

SEQ ID NO: 372968 - DNA, 576 bp, Cannabis indica
taaataagcgtaatttttaaattacaaagatttatatagcatgtgtgaatgtaatatgaactatatgttgaataaaaatattttcaggtttggtgactttggagactcgatcggggccagaaatgtcataacaagcttaattaataaaattaatgggaatattattataagttgataatgtaggtattagggtacttaaaagtatgtaggatttaatgtagcgccctaaaaatagaagtttcttagtagctaagaaatgataagataattattaataataaagtttttattaatattattattatattattatcattattataatattaactttaacaaaaaaaacgatcattttatatatatattaagttatattagaacagtaagaacgaacaaaccttcgttctgttgggttttatgctctaaataaaactatttacaatctgattagttatcaatataagaaatttaaagtgattgatgtttgcatgaattttacatgctaatggtttaatatgtttattactattacacacaaaatcacttaaatccagatcatatgtttattcacaatta

SEQ ID NO: 372969 - DNA, 1268 bp, Cannabis indica
ctcaacgacccgaactaccagaatccgtgggatctaaatttggatcccttgtcggattggttcggtcgtttcctcgggcccacactagctccctttgccgcggagatgaccggcgagtttgcgtcccagcttacccggtgtgcacccaggcggttcgctgcttgtgcatccttgaattccatcttccaagtccaggatctcagccactccctcaccgtggtaagtattttgtagtttacttttctccttatttttttccttaaagattcttactcatacttgtatcctttcccagcttgctgctgaggccggccgcctttccaagaacataattaatcatggcttcgtcctgtccgactttgggggcatggacgaagttaagaagatccttcaggacctgactgctgaaaggcggctttatcaggaggatgccgagcgccgggaggcccttgccaaggccagtgaggaagaggccaggcggagggaggcacaagcggaggcgatgatccgggaggaggcccttcggagggataggctggaggccaggcaccaggaggagctgagagcggagggcgaagctgctgctaaggccaggcgtgagcttcgggaggctagggaagccttggatgaaatggctgccaaggtgaagtccttagaggaagttcaccaggcaaacttggagtctagggccagcctggccgtggagctgaaggagctcaaggacttcaaagaccaagccttgaagaaggcaaagaaggatgagctcctttctcccacttcctgcagccggtgcgtcaagcgtttcgacgatggcgtttacatggcctggtctacaaatgaccagaatatcaagcttaacttctatcccaaacccgcggagatgattgcaaaattccgggagaagaagaagaagcttgatgccatgctggaggcgcgcattggtcctcgccttcctcctcgtatcgactaggccaccctgagttccacccagtacaaccaagattttactttctttcttctctttttttttttatttacagctaattatcttgtacttaagacaatttctatttacatagctgttttttttttaaagggggagacaatatttaaggcctgtccccgggccctttgtatatattttgacctgcccttagggctaggatttttatatatttatatatgatcttttttgatgcacatatctttcttttggacctgccctttgggtcaggatgtttatacatatgcttttcatttttcttttt

SEQ ID NO: 372970 - DNA, 700 bp, Cannabis indica
ttacaacttggtatcagagcagtcgtggttttaaaggtcttgaagaatggtcgaatatgtacatttgttgcgagcacaggtcgactcatggtatagtaagtgtttatattatatgctattagattacctgcctaggctattataagatgttggaaaaatagctagtgataattttgataagaataggtgtatggtatattcatattgatattgatatccgtctgagttttaaacggtcagaagatttagactaaatgtgtgataagttatgcagtaagggcaatcgaatagtttgattagcgagctatctaggctcagggcaaacggtaaggaagagaattccttattcccataatgctgggaacatgtaaatgctaatatgcaagatatgattagacaacaagggaaaacatatccgacatctgaaagaacaataggctcatcttgtgtctgttcttgtactaccgacacttcctattgtaccactagatgtggtggaatatatgaagccaatttattagtagatcatgaaacaaaaattaaatgaaccgccaattatgggacaggacaaaaaggttctagggtggtcaggatagcggtcaaggtgagaataagaaatggtgaccttatcctgagtgtttagatacaaaaaggcgtcatttgaaccaacgtagagccagatctgttggaaattatttta

SEQ ID NO: 372971 - DNA, 505 bp, Cannabis indica
aaaattatcttatatgacaaattaaataattataaatttaaaattaacctagatatttttataaatatcctaaccataatatttttaaatttataagattattatttagtggaatatttaaattgtttataaattataagaaaaatgatatttatggctatctaatatcatttacttattaaaaatttataaatagtattttaaatatttttgtagaaatttgaaaaggctgaatttaagatattttgacatataatttgaataattattatttgtttattatttttattcttaaaataataattgcctaaccatatctattttagaattattttattttgttattttaattttattaaattataagattagaaaatgatattgaaaatatctaattggttattttcaaatcatttatcttattagacatttaatttaatttgataaaataattcaaatacacctagattctttaaaattagtttaaatttaaattttgaaaaga

SEQ ID NO: 372972 - DNA, 659 bp, Cannabis indica
acagtccaccgtggcacttaacggtaatttttggacggaggtgtgcagagcaaaacagaatcagggtttaggtagtttagccgccaaaaattcggttttttgtggttaagtgttacaaaccgtaaagttgaggtggtttagccgccaatatcccttaaaataattataaaaaaatcagttaattgttttttcatataaattttttttatataattatttattttaattttatttaaataattaaaactataaggatttattaatatatgatatttataagaataataagacaccttaaatatatattttttctatatacttctgtgatatgagactactgtgactgttaaatttttaagttatatatatttcatcaaatatgtgaatgatagatattatttatttacacatatttttacatttttcaatctttgcaaaaatatttaaaataaaaaaaattaatttttaacaaataaatcatctatgtctatatataaatataaaataaagcactaaagaaaatgaggtgacatcctactatattttgatccattttaactattaaaaccagcgctagaccacctcccacgttgttatcaatcctttattattacatttcaggagccactgctccgttagccgcctctatgttgggtttt

SEQ ID NO: 372973 - DNA, 538 bp, Cannabis indica
cagcctttctggatttgacgagcatgtcatccacgtacacttccattttctaccgatctaatctttaaacatcttgtttaccgatctttggtatgtagctccagcattttttagaacaaacgacatgactttgtagcagtagagacccatatctgttcggaaacttgtatgttcttggtcaagcggatacattttgatctgattgtagcctgaataagcatccatgaagcttagaaattggtgcccggctgttgcatctacgagttgatcgatccttggaagcaaaaaaacagtcttttgggcatgctttgttgaggtctgtgaaatcaatacagactcgccatttcttattcagcttgggcacgagtacggggttcgcgacccaagccgagtaaaaagcttcaattatgaagttgttgttgtgcaacttttcaacttcatctttcagggctactcctcgttctttatccaggaatcttcgttttgatgaactggctggatgttaggatcgatattcaggacgtgggaaataatagaa

SEQ ID NO: 372974 - DNA, 496 bp, Cannabis indica
agaaaaaaaaaaaacaacaacaaaacaaggctcaaaccaattcaaacaaatctaaatccaacaaataaacaaatacacacacatatatatatatataaacgtatatacgaaatcgaccccaaaattaatatttgaaaaccctaaatttattttcccacaattatttgaaaaccctaaatatatagagaaagagaggagatcgggaaagagagaaaggtgatcgatattgggggagagagaggagatcgaccgtggctaagatcgatcggcgctgagatcgattggggctgagatcgatcggcgctgagatcgattggggctgagatcgatcgtgctgtacgtggcggttctcggtgactgcacccgagtcggtctgcaacgacgacgatgacggtgctggcttggtggttttgggcaacggcgacggagcttgcttggtggtcctcggtaactgcggcggccatgtacctgcaactattcgagagagagagagaga

SEQ ID NO: 372975 - DNA, 571 bp, Cannabis indica
cccaactgaagacagtcgcgagcccaggttggaatcaaatcgccccctgacggaaatgtgattgatctagtcttcttggaggatttaggcagaaaatgttgaatattcttgacgcctccgcatcttcgtctcactccgtattttaatttctctgaaccacgacaaccactccattcgtctcctgctccgacaagcttccgactgtcgttctccccagtgaaagaccccaagcagtcgagttctgcaactgaatgcagattggaaccattgttttttccagtcgacacccacgacattcattcctcaccattgaactctcctcaatttcttctacccaaatttcagttcactataaaaaaaaaaaaatcttacttttagtcacaacaaaatttgtgactaatgataaaaaaaaattgtggctaattataaattatcattattgtgttgtgactaaaaggtctgtggctgaaagtatttgtcacaaaggttaacaatttattgtgactaaatgtgtttttagtcacaatatttgttgtgactaaaactaaattagtgacaacttgtgactaaa

SEQ ID NO: 372976 - DNA, 1011 bp, Cannabis indica
tatatgatatatatatgttattttttttaagggcaatatccacaataaataattaccgtagcaaaattttctttggttcattttgaatttttttgatcaagctacgctaacagagaaatgttgctcttattttttgtatatagtatgtaagatattacaatttatatgatatatatatatgtattttttaaggaaaatatccccaatatatatttatatattttttctttttattcaagtaggcaacatgtgtgaataaaaaaaaaatataattaagctcaattactaaaaaaaaaaaatactcactctagtaattgtcatattttacaaatttcaaaaaacttttagaattactatctaagtaactaaatatagattaaactagtttaatacaatatttatttattcacataattagcagcagaatttgactcaaaattttacaaaaaggtaagaaatttatcaaacttaacgcaagaatatactcagtaccccccaactaaaatgagtacaagtgtacctcaaatgtctaaatatgtatatgataagaacatgaggatgagaaccgaaaaaatagagaatatgtgcagtgatagatgttgattttctaacaaaaacaaatggtagaaaataaactaaaatactgaaaataaagaaagcaattaaagataggatcagttgtgaaagaattcactaaccttggtaaatcggatcgtgaaagtagcgtctcctccactttaggtggtgttaattctaaaaatggtttcaagctttgaccattgactttgaatacattactagatttagaattttcaatttcaacagcttcgtgtgaaaaaacagtacgaacagaaaatggaccagtccatttagaacgtaaggatcaaaaggaatgtcccaatcaggaggtcgaaataacttttgtggtccagcgagtgattgtgattctctaggaattttcacagatcgatcagctaactgaagtgtcatagatgtgttggaaattatttt

SEQ ID NO: 372977 - DNA, 541 bp, Cannabis indica
ttttttttttttgttttttttttgttggtgtttcttattatgttttgttgtgtatcgcattgtaatatttttttaatattgtttatttgtttttagtgtttttttttaaaaaatttatatatgtttttgttaatcttgatgggttatttttgtttatttttttaatgtatttttttggtggaagaattgctccatctataaatgtcctttctttggtatttttatctttgttagttgttttttttttcttttgttgttttgtgatttttttattatgttttgttgtgtatcgtgttgtaatgttttttttaatattgtttatttgtttttagtattttttttaatttatatatgtttttgttaaacttgatgggttatttttgtttatttttttaatgtatttttcgctttttattattaatttaaaactgtttattatttttaatcgttaattatttttttatgtcttatatttaaaatattacatctgtatatttttaataaatcatcttctcatcgatgttattgttttgtttatttt

SEQ ID NO: 372978 - DNA, 446 bp, Cannabis indica
actatttttttttaagaattttaatattaacttataatttatatccattttaattttgtattattattaagtacaatactatatttggtattgacatgtattaatagattgtgtaaagatccgggtccgggtccgtgtccgggtcttaggtcctaggtcttgggtctcgggtctcgggtcccaggtccgggtctagatctgagttcgggttcgggtccgggttcgggttatggtccgggtctgggttcaggtcccagtccgggtttcgatcccttatccaagtccaggtccgtgtccggtccgaattttgggtttcggggtctcggtccaggtccgggtccgagtctgagtcctgtgtaccgggtctcgggtctggttttattcgggtccaggttcgggttgttggaagtttattttaccaggaacttagatctactcacaagtat

SEQ ID NO: 372979 - DNA, 1043 bp, Cannabis indica
ttttgctatatatactatcattattaatttggtgaatttattaattagtttggtgagacttatcgttcttctaccttttttctacgtggtcgactatattcacatgtgtctttattattgtttcctaaatatttgctattattaatattatttattagtgttaattatctaattggaagaattcaattcataatttaaatgagtagcttaaaataatataaataaattaattaagtttttttttaaaaaaaagtcacccataaatttctcataaaccaagaattcaattatatagacacactttatatagaatagatatttatatagtgcagcaatcaaatcagcatatatgaaggtgagtgagttttctagaaaaattatttctgtgttcatgaaactttttaatatatttcatttccttatatacgtacatatattaaaattattttgttatgtgaaaataaattaattgattatttgatttcttgttaatttgcagcattaatattagctagggttccaacttttggtcataataaggtattacactatcccaagatatatatttttggtaaattgatcggtaaaaattctatatattggcaacaaaactccattacaattgtatacaaagaaaagcacaattattctcaacttctccaaccaataaatatcatccctataagttttatctctcttttaaaataagaaaagcttaaacaaatttctttttgaatactgttgggtgtacatccaaagtcccatattggctagaaatgagaaggatcttgggtatataatttaacgtccccgcttcaagcctccattgggcccttacacccacggaataattagctcttatacacgagtacgccactttggctgcttcctcgatcgatgactgaccctacagaccaacacaagtgtttccagcatgctttgtcctcacttacacgcttcctaggaaaacttcccaggaggtcacccatcctgaaattactcccaggttaagctcgcttaactgtggagttctttcgtgatgg

SEQ ID NO: 372980 - DNA, 996 bp, Cannabis indica
caatacgacctaatacggcgttccaaacgagccctagatggtataattagtgtttgttcattacttgggacacttagttttgaatctgattttccccagctctattttttatttttatttatatataaatatactcttttttaaaaaaaaaaaaactacaaaatattaatttagaagaatcaaactacatataattttttttttgttgaaaaaaaaattgttatgctaataatttattttgaaatatatttaatctataattaactcaaatttttacattaaaaaaacaaaaacaaaaattataaaatctcatattgttattcagatgctaaaatttgttccaatctatataataactttatcccaaattcaagtaaaaaatgtgttataggatttttatttttgtaaaaaaaattattattttaaatttcagtataattttagttagcccactttaaaatttcagtataaatttcagtattttaaaatttagcttagttataagtaatttgggcggaaaagaagtactctatccactttttgatataataaacatatattattcgtatttttgtacgtgatttaatttattatgcttatttatttataataatttgactaattttatttttttataattgtagaaaaataaaagtaaggtcaagagatcattaccattcatcaaaaagacttgaagttgttatggaccattttaaatttttaatgtatagttttaatggatgactgtaatatttgatccttaatattttgtgaataagttaatgtttgaatttttatttaaatttgatttttttattatgaaataaggattataacccaaaccgacccaactcaacccaaaccatgaagtaaaaaatgggttagattagacaaaatgtagtacgtggttgggttatgaatctccaaccttatgttattgggttgggttaattaaataccttaatccggccaactcagtccatgcacaactctagt

SEQ ID NO: 372981 - DNA, 691 bp, Cannabis indica
atattttaaaggtagtttaatttttttttttttatttttaacaaaaaaaaatatatggcaaaactacatagcaactaacctaataatttaaatcgcaattaagatacacataacaacacacattaaaattattgtaaattttaaaagatatattaaataataatatatgaggtaattttttttattattatattataaaaattggaaaattttatttacactttgcacccaaaaacttagaatcgcacccatttcaataatttttatatcatttaaaatatatatttaattatattagttttttttttaattttaatcttttaattcatattcttaaaaaaaaaatatattaaacataaataaattatattttaaatattataataaaaaaattatataaattttattaaaaaaaaataaataaaaagctacacatgattaaaaaaatagaagaataaaattaatgtaagtcttgaaatttatacaaaataatgtgagaaaaaaaatcttaaaaagatattatgaataatttttaaaaattattttgagtttattttttaaaatatcaaagtagaattgtccgtatgatattattttttgtaattaattacattttaattttttattatgaggatgcatttgaattattatttgaaattacgtgtaactattatttttttattttaattta

SEQ ID NO: 372982 - DNA, 603 bp, Cannabis indica
tgtagtgttatatttagtatttagttgtgttaaatttggcgcacacttttttaattgcattaacatattttgtaatcacattatattgtcattaataatatttttaaaatatttatttattaataatattttgtttattaaagtataattataaatattgtaataaatatagttttaacttcctttttataataaatgtagcattatttttagggtaaattacggcataaattcctaatgttttttattttatacacttaaatacctaatgtttatttttggtagcaaatatacttaatgttacaattctcttacaccgttaccaccacttccgttattaattcataaatatggacacgtggagggcctaaatgcattacatttatttattttattttaaaatttaatattcttaatatcaaaaattaaatattacttgtcttttaaaaaaaataagagagatgcaatactaaattaccataggtgagtgaaccagtgtagtatatggaacatgattatcgaattgaagtgccaatatcatgtaaaaattgttatgagaacaggcatgttttcttttttcttgaaacaagtagcatttagttt

SEQ ID NO: 372983 - DNA, 1290 bp, Cannabis indica
gaataattatctagtagccttcctggccactttaacatccagtctcactggtagagttagtgactccagattagtttttacacttctcttaaaattactactccacccccagagtaatcacaatctcattagtagactttctagtatcaacgcaagtctagaaatataatttggtatagtttaagagtattaaaataccacccttatcgactaacatacggttcctctttttgatcttaagacttatttgatagttttccaatgttcctttcttacctacacaaaactcgcactaaacagcaggtatctggtctaatgcataccagagcatacaagagacctctcactgttgatgcttaaggaatcctttccttggcctttatcttttctagaatagttgaaactattccttaaataaataaaatctatgtctaggagccaaaaggcttcctttagaattatccatgagaaaaatgctctagcatcttactaaagtaagttctttgcactagagtaattactaggcatacaacaagccacaagtttagataatctcaaacctgctatactaggatcgagaagttttgttaagtccattcaatagacttattatcaaaatttcctttcttgtccttgtaattgaaagtttttggttactccatatgaatggttttataaatagttctcttgactttgcttcttagttcctattttgattatcaattacttgtttaaactatatagttttatcacaagtgtcttttaatccataacaaggcgagttccttgaaaccctccactacgacaagatatcatgattttctgtctaggaacattaatggtattgtcctcatcaattgtgttaagacaacagaggcagtgggaccatcttatatagaataagatgataaaacactttggaattacaaattctcctctactttgctactttgttttcagatttagtcgcattcttagaaaagcagtatttattgaaactaacacttacttatcttgatgactataggatggtccacccctaatcactttagaatagcttttcttagaaatcagtttcttggtgatttttccaacgacaatgctaattctgacgacttttcggcgccggcaggaacttcagcgacttttccgacaccggcagctactctgacgacttttctagtgccgatagcaaactccggtgacttttccggcacgagtgacaactccggcgatcaatatagtctaatttattttatttttttaaaaaaataaatatgaaaggaattt

SEQ ID NO: 372984 - DNA, 716 bp, Cannabis indica
gtcttcgacaccatcgaaaatgagtagctgaagagaaagaaaaaaaaaattaataatttgttgaatcagtcagttccatctctcatggtctctcacatgtttgttggagggcattcttgttttacagtccataatagtgctaatgtatgttactttttataaaatgggtgcttgatttattttggtagcttcttcaatatctatttcaaaattatttatacattaagatcgttattatctaagctttataatataaatatcctataataccagtttgattgatcattaatattagtgacctggcctttttgattgattatttaccaaccaataaaaacaatttacctatgtgattagaaagtatgcagttaataattaaagaagaattgattgtcaacaagctttcggcaactgatagatagggtgtgtctttagtctagtgtttttactcatactttctttagaaaaaattaaagttatacttttatgagtagtcacatgagttgcttcattgtttcaaaattacatgtcaattcacagtaaaagcattccatagagtggcagttgatgagtaattagcggtagtcataaataaagaagatggaaagggttgacacatttatcaaacttcattcatggaattgtaacacgttgttgagaatcatggagttccatctcaaaaccaaggagtagcccatgtttttatatatggctca

SEQ ID NO: 372985 - DNA, 846 bp, Cannabis indica
ggaggaggaggagagggcggcggcaatgtgtgagagagagagaacgagaagagaagaagagaaagagggaatttaggtttttttttaatttttattttttttaaattattttttttaatttaattttttaaagaaaaagaattttttttattttttatttttaaaataattaatttttttttaaaatatttatttacgtggaccaataaaattgttccacgtgtacattgtgtatacgtaggcattccaccatagcagttaacaaccaaaaatggatggaaagggctaagtgctaacagaacttgggtttaggaggttttaaacccaaaattttaaaattaagagttagttgcaaaattctggtcacttaagaaggttatgccacaaattacctaagatattattatttctattattaatgtatacattcattgtatttctaaaaaataatttattatttcagctgttactaacttaaaaaagaatttaaaagtatgaagttgtaacaaacaacttttataaaaaaataaaaataaaaaaataaccgtacaaaaaaaaagaatcaaattgtcaaattttagtgaaaaaaagtttcgtagtacaaaaacaagctctaaagttgatattggtttttataatgcaatgtgattaatgctttggtgttattttgttgctttatgtatgctatttttgttgtttttaatttagtttttttaagttgtttcttttctaaatatattattttaataaattttaaaactttaatatgaataatgcttaggtagagtcacaaaaaataattgtacatacacacatttttttttcattatgtgtcactcccatatt

SEQ ID NO: 372986 - DNA, 472 bp, Cannabis indica
tgtgcgctggtaaaactttgacctttttgccagtacagtttgtgaaatgcgttggtaaaaataaagttacttttaccaacgtagtagtgaattgtgctggtaaaagtgacatttcttgtagtgtatttagcgatattttgtatatttagcgatgtatttacgatgtgagactaaaaaatacaaagcacgcgctaaacatcgctaatcattatgatatttgattgtgatttaatgatatttagcgatgttttctagcgatatttagcgatttagtgacatttagtgatatatcgcgatatcgtgcaaataaaaaaaatgtaaaagacaagcgatggggttgagaactttgatgatggatgggaatttcaggggtttgatgagggtggttgagcttgtggatttcgaggtttcagggtggagacagcaagacttagagagagagagagagagagagagagagagagtagtttag

SEQ ID NO: 372987 - DNA, 399 bp, Cannabis indica
agcctactttacgtcttttttttttttaatgataacttcaatatcaagtatcacataactttatgtctttttctaaaatgataattttaatatcaagtatcacataattataactaaagagtattgctattagacaccattagtgtccaacacatttcataagtggcaccctacgattggtaagcgatattctctaaattttttttaagttatatgggacctgctacttaattaccaatggttgtcttttagcatttctcataactaaaatatcacattctttatatttttttttattttttttcattaagatatttaaaaaataataataatttttttaaaacacattaattaataataacagaacaaactaatgaattttctccaatgtcttaaaaa

SEQ ID NO: 372988 - DNA, 1017 bp, Cannabis indica
gttctggtttctgttgcatcttttgtcatcgtagtttgatttgaaaccagattgtgtcttcaattgactgcagaatcttttaatgtggccaatctttccacattgataacattatcgattgtctttggtctttgtctttgatcttgatggtgactggctgttccttgatgatcctctctttggacttcttccaattgcaagataagcttcgtctttcctagtctccttcccgagttacaattcaaagtcttttgactttaatgccacatgaactccttccaacgagattacattccttcgatagttgattgctgctttaacttcttgatatgcaattggcaatgatatgagaaatatgattgcttgactttcttcgtctgccttatgatcaatgttagctaaaccaacaattatttcattaaatttatcaatattatcatctaaggaaagagaagaattcattctaaacccatataatttttcaagaagtattaatcttgctcgatatgatggtgcaatgtacatctgctctagttatttgttccacaatccttttgcagtctttttttgaagtagctttcttctaactccattggacgggtacatgatgatggtgtagtatgccatctcctccatctctgcaatttcctctgacttcttctcagccagcaacttttcatccccaagtaccttcgccaccttttggtgcacaagtatacccttcaaactctctcgccaaagtgaaaaatcagttgatccattgaaacctagccatcgacatcctccttcaatctgtgttcttgtagaattccttgatgaattcttgataagttcttggcgcggaagcaagtgatctttgaatctcccatgatgatcgaagaaccaagctctgatttgtagaaaatttagctctgatacatagaaatcaacctctgtaatttaagcttcaagattacacttaaacaaacaaaatttaaatcaaaacaaacagaccgagaacaaacaaaccaacaaacc

SEQ ID NO: 372989 - DNA, 551 bp, Cannabis indica
tcccatttaactattcatcatctcttcttcttttcttctgttttttttttaaaaaaaaaaacatccagttattctcttaggggcagtttttaatggttatttaaatcaaatttatgcagtttgttgttgttgttgttgttgttgttgttgtttttattataattttctctctatatttttccccatttatttgttggtttctcatataaatactttgcttgtttattatctatggttattactctatcaaagtcttcttctccagttgtaaaaaatcccccaaaaatgcctcagaaaaacttgtgtcgatcctcaatgggtaaaaaaaatttaaggaacatccccaagccttacctcatcagttccaagcaaacgcaaatttcttggtgaaacttcgaagaggaggatgtccaaacgtcctcgtcccgtggttgaaattcagactcagattttgagttgagccaaagttccaaagtctcccaaatctgataaggtttttttctattgatcttgtgttgttttagggtttttttcaagttgattatgtttcc

SEQ ID NO: 372990 - DNA, 1038 bp, Cannabis indica
tttgaataaacaacacacattacgattcaacactaaccctagccaaccctagaggtcttgtttgagatctggccggtcctaggttttaatcgtgggagttggccaaatctagggtttaaccctaggaagctagcctgttcatgcctgggtttagaaaccctggccggttgttggttgcatcatgggaccttggccgaccctcttaaggcttcggaaccctggccggtgtaggccttgctgtctcctggtcacttgcaattcaccaagtttcatagacctcgcttgggaattttcttggggggtgctaccaggcgtacgcatgtggaacttaaaaagaataactttaagaagttatctttgttagcaagtggttttaaacacaattggtcttacgtgtaacaaagtcttatagcttaatgtttgcttttgaaatcacgttttggctacccctacccaagatgtcaagcagaggccatcgctgaagaacgaaaggaggccatgttgaaaagtgatggatactagctcttttatatttttctacctttgtaggacttactgtgcaaaggccaccattgaagtgtgatgggtggccattactgaagggtgatgggtactagctcttttatggattactgcacgatgaaacgttagaagaaccgctatacaaatttgctagtgagagcacttatcgagatgttctctattccagtattttagtagaagagccaactccaggttctcattgtactcgccaggcttgtatgcaccttttcttattatcttataattatgtgtcaaccttttcaatttggtccaaacttgcttgttgtaggatcattgttgtcaaggaatattctttagagcaccaagtctcttacggagaatttcctctctttgacttttttgctgaggcacctggcaacattttactggcaaacataccgttttaagttggcttggtctcttctttttttcctttgtcaatggattaaagattagcttacttcttggtaatagtagacaaaatgtatgagagtg

SEQ ID NO: 372991 - DNA, 609 bp, Cannabis indica
attatacattgcatagtttattatttgtaaatttttaattaattaattttcttaatgaaaataaaatgataaagtttttaagtagaactaaataaacatgcaatatagttgctattacctaatatttaataagactatgtcaagttcctataaattatcataaagttttaaataatttaagatactaaatcaacattcaaacagcttggacacatgtttgtttccattctatatagtctagctattagagttgtgcaattgtatacttatattttatatagttgatgttgtattatacttttgatgctaatgtaaattatgtgatatacttcgatgaaaaatgaatgtatattgagcaatccactactcacaaaagtaatacattttaataaaatataacataagaatattataaaagaatataatcttcaacttatatatcccatcaataattaagtttatagtcaccaaatataaatgtatagatgtcaatcgcaacaataactttggtgtcgtttggtaacacttttgttttctaattttttaatcacaaaatgaaagtaaaatttttgttttaaaaattttgtatttgaaaaacaaaaatgcgtt

SEQ ID NO: 372992 - DNA, 586 bp, Cannabis indica
taaaggagacttaccaccggagccggaagtgctggcgtccggagcccagtgttcggctcctgagccgaaggctttggcatgggagcccttctctccgccgagtcctcaatatgaagcggcttcccagcgatcgtttggcttctcctctcgaccgggctccccacacgaagtggcctcccggaagctgcttgagccttggagtaggctttctcctgagccttccagtagagatagtcctgatacttcttatcggcagtggcgatgatctcgtcccgaaaggtcttctccgcggcaggcaccctcatgttgggacagataacccgggaaaggttagagtcctcaacggattgatgcagcaggatgatttttgccttctggcaattctctgtcgtaactaggcccccgacgtcgaggtcagcccggtcataagaggcgaaggcctgggctccggagaaagacctgagtaggcgcggtccgctcgtaagggggaatcctaacacactccgtgaggagttccggatggtccacttcccggaacccggaagagagaaaaaacggtggcgatactccttgacatgagtttgcc

SEQ ID NO: 372993 - DNA, 584 bp, Cannabis indica
tttgccaatccccttttgccaacacatcagaagtaaattctattttaccagtgcaataccaaatttttgccagcataaaaatgtgctgacgaaagtgatatttcttgtagtgatatcgctaaacttcatccttagcctcagatttagtctattattacaaatacttcgctaaatattgtaaaaaactaaaagtccaaaaaaaaaaatcgcaaaaaattcaaaatttaatttttgggaagaaattcaacgaaacataaaaactaatgtatagatctattagagcaagaaataaacgagaggtgcgtggtggtgagtggagctcgatcgtacgagattaggtgttctttcatgggagaaggaatagagagaatgagagaaagaggagaaaatagagaaattgaaatgagagagttatttttaaatttaagtaataattaatagctatatttttattatgtgtttaattaatagatgaattattaaatctatacttacatttaaacacggtaaagtaaattttccttaactacactacatcatattaatctgaaaaaaatggtactgattataattcatagtaaaaa

SEQ ID NO: 372994 - DNA, 460 bp, Cannabis indica
gcatattaaagtattggaatgcgattccaatgaaacgaccttttcactattttgatggaatgattattctattttgaaatggaaggaaagatcattccaatgtattatgagaaaaaaattaataatttttttatgtattttaaattttattctatactattcctattcctattcttattttgatatttttatttctctaacgaaacgccacctaaaatctttaagctcgtcaataggaatataaatcctcgagaaattaaaaaaaatataagagagaaaatggcatgaaaatcgagaaattcttagtgatgtaattcaaaaaatttccaaattttaaaaaacttcctttctaattacatatgtttattttattttattttattttattttaaaaaaaagcctatttatgtaaagttttataaagaattcaagatttatggaagggaaattttatttacac

SEQ ID NO: 372995 - DNA, 603 bp, Cannabis indica
aataaattataaatttgtgatttatacttttagctacagatatttttatagtcacaatataaaaataataatttataattagtcatattttttaacttttagtaacaagttttattttgaataaaagtaaaaatttttatatagtagaagatgactcaacaaacaatatgtgtgtggatcaatctgaaaatataagagatactagctagtagttaacatattaattataaaaattgaacacatatctctaattaatatatattggacttttttggggttaagtcaaaggattttgtttaattaattaaaattggatgtggtaacctttgtttgaattaattaattaattatggatttagtttaaggaaagtgcattagatttggaatctaagacacttgggagggatgattgcttgttcctctcttttttggaggcagcatgtgatcagatcctttctcccatcatcttcccattctttccaactcgacatgaactcaaagcatcttcaactttttcaaataaataataatatttatatatttattcccaaaatccaactctatctcatcattttatacctatatatacatattataatataa

SEQ ID NO: 372996 - DNA, 552 bp, Cannabis indica
ttgatcaaactgtccatagtaaaatatgaaaaacgaaattgcatctttttcttgacagtttgaaaatataagtattgtaagtcaactatggtataactgtcatgaaattgtaatgcaacaattatacgtgttgtgaggcaactaatatcaaaccttaaaacaactaataatgcccttatgtaatacaaacaaaacttactacaatcgagttttctatgtacgagtcgtgtattgtcaattctgagctctattttttttttttaaatgataataatattatagtaccacaactattattcaactaatatacaatttaaatgcaactagaaatagaaaatttgaatgggtatcgtgatgaaaaaatttgtcagtatttttttgtcactaatcaacaatcaattgcaccttaataatattatgtagaaaaacaactgttagaattttgtaaactaactttataacaaccaaatgaatatattaataaaactaaccatgttataattttttaaagagttttgtgttggattgtcgatatgaaacacctgcaaatat

SEQ ID NO: 372997 - DNA, 593 bp, Cannabis indica
ggcttaattatttcttttattattatatggtatctattatgtcatatatatattttttttattattatcattaattttaaataccatatttttattatttttctataccaaccctaatttttttcaatttcgtttttctttctttctcaatcgcttaagtctcttgatttctaagcctgcccaagcaatggccgccactcctattgctggtttgctccccattcccttcttcctgatgaaaaaaacaagtttcttaaggaaaaaatcagtttcttgataaagaaaccagtttctcgatgaagaaaccagtttattgatgaaaaaaatcaatttcttgatgaaggatctttggtgattgattttgattgcatgagaaactaagcaatttgaatcgcaggagacagaaaaaaaatcttgcgtggttggagagagtagtttgattttaagtttctttttattattttatttctaagttcgaaactggtttttcacattttatattttatttttagatttattattgtgcattgtgtgtcgttttgatttatatttgtgtagtatttttttttttgtgtcgcttttttttcccattt

SEQ ID NO: 372998 - DNA, 517 bp, Cannabis indica
ataataaaaaaataatataatatcattatagatttgtgcaaatattttctgaagtaaatatattatatttgttaataataaaggctttttcatttttatacttcataacagtttttttttttttgcatttttacgaaattctacatagaaactcctattgcaactagcactgcaacctaaattgcaacaaaaaatcgtatagaaactcctattgcaactagtgctgcaaccactttagaaacccaaaccgtaaatttagaaaaaaaaaaagttaaaaaatagtatatggggtaatttcccttaatgatattgtatttatatgaatacaactaaagaattattgaaatgattattactcatgcaattgaatagtgggttttgaatacccaaaagaattttaagaaaactaaattgcatcaaaataatgttcaacgtcattccttaaagtaaattcaataattttaaataatcaagaatattaattcaaactcaaatattttcagaagaaattagaaac

SEQ ID NO: 372999 - DNA, 537 bp, Cannabis indica
attaactaaaatataacaattgaatgtgaaaattaaaaaataaaataaaaagaaaatattaatggtcggtttggacgggttaatctgaccaaaccactaatttcattgggcgggttagtactattttcttttttcttaattggatgggttatacatagatttttgtaactcgatctttacattgggttgaataaaatgtagcataaaccgattaacgtacacccttacatataaatatatttttataagaaaaatattacaagtgtgttttttattaaaaaaaaaaataattaacaaataattttacattatgttttattatttttttttttattcttttaaagtatttcttttgtgatataaataatttcccaagcctctacattagctattttatctctgttgactgaggttttcggcaaccaataaaataataagagattaaagagctgtaagacattaagagaaggatttttatgtggttggggcgttaatgagccttagtccatgagtttgtatatttatgagtgtatttaa

SEQ ID NO: 373000 - DNA, 562 bp, Cannabis indica
ttcgatgaggggatttgggtgatggttgactcatgttagcagtgaggaactcctcatctttggctgccttatttattaaaatagataattccaaagcagtctactctttgaggtcgttaggggtctgaggttggcccctgccattgacaccatggatgctttggaaattggctatcaagccatactggcacagcaactcggtagtcaccaagtcttccactttcgattcctcctctaaaaaggcttcagagaaggttatcgactgcctcaactcattcgttagcacggtttttagggacagactctaaaaaaaaaaccaaaatcagaactagaaatgggattaccttttaaattatcataaaaagttgcaaaaggatgagggttatacctggaatcttgaagtctagagacagggctagaacacgcttcatgggaaagctagttgtaaagaatcagtactcacaatggtctaggcagtgggaggaggtacttgttggggaccgagtacgtttgtacttctagtagtgaagagagttggttcaactcattgtaaagattatag

SEQ ID NO: 373001 - DNA, 724 bp, Cannabis indica
ttatggattttgaccattttacccctagctttagaaatgcccaagttatagctttaagggtatttttgtcatttgaaagaaataaaagataggtggctgccctaggtttttgacacctagctaggttgatttcagcaagggaaataggttttcccaaccatttatttcatttagtgaaattaagaaaaaaaaaaaaattgaagaacaactcttgtctccctctctctctcttcgaaggcagctagaacaaggggaaggggctgtgattttcttggatttcagccaaagattcaagggaaattcaactaaggtaagctctagcaactcttagccctaattcttgaatttaagcttaggttgagtatgtgaaattgaatttcaggggctgttaggttttgaaaggtttagggttcgaattctagagttagtttgagttaatctaagtccctagcaactggttttgatgcttgatgttagttctaagcaagcttgagttttgaaactcaagctttgagctttaatggcaacttgagatttattggtttgttctgtgaattattggttggaaatggttgtttatgcattgtataggtgtactggagagtttgataaagtttggttgagttttgaggtcatgggggaaatttttgggttcccagcacagaaccggaattccggttctgggggacctgtggcaaccggtcgaccggttggtgacccagaa

SEQ ID NO: 373002 - DNA, 577 bp, Cannabis indica
atacattacgtccttctgttcgcgaatatgtcagccttaggcctgtaggattcgatgaacgtctccttaggtttaggatgccctcgacccggtggggggatcatgcaaaggattattatttctccaacttaggagattatttaggtcggtcccggatgggcttctggacctccggtgcccgttcccttggacccttcggcctatctttcttctaactggttccgtccctcaaacagctatctcggggacgacgcagccagtattaagatccagaactttgctagggccgaattagagagtcagggtaggactagcttgattgctctttaagtgtttactgctttcacaaatgttctaacacttaattcttttctcttgctgcagcagctaatcccatggaggcgatcttagccacccttgccggagcccacagtcctgatgcttctcttcctccaacttcttcccagatggtcacccctacgaaggcttcttccagtgcccctccaaacactattgacttagtggatgaggaggaggtacttcctgaggaagctaaagaaggtcaagaagagcaatg

SEQ ID NO: 373003 - DNA, 743 bp, Cannabis indica
taatacacggtccatgttcaaagatttgcctatcttcaattatgcaacaaagttttcgtatgtgcttatatcactttattgtgttaatttatataatctttaaacataaatctctctcaaaatttattataaatcatgctttgaattaattgttacgtatccatttgctgctaaacatatctttttacttcactctttaatatatcattttccaggtatatgatgaattttgatgaaaattaatttgtttggttttttgctcaagatagtttgaagaaactttcgaggcagattgattctatgaagtttgaacaagaacaacgtcaggctcaagttttcaaagctattggagagagtggagttttatttaatattaaagtatatgcaatatctcttctcttctccattgataaatgattgcgggtggagaaactaagtaaaactctatatgaagagttgtcccttatcattttcttgacttctccaaatttggtgttaaatcaacaccaaaaaactctatatatttcttttcctattacaatttggatattcccattctaatttatatcgaatctagctgagaacgacttccactctcatcaactcaaaactcatttatatctcatctcttctctctcttttcccatcccaataaatatatatatcactactacaaaaacaccctttagaggcggtttttaagccctttaggcgtcggttttcgcgaaattcgctaccgacgc

SEQ ID NO: 373004 - DNA, 665 bp, Cannabis indica
tggagtagtaatttataccatttctattaagttgggaactgaataaaaggacaatatttaattgaacttgttaattgatcaagattataaatttataatagtgttatatattttaatttgggtacttaatttttgtttatgtactctgtctagggctataactttggttattaattgattttgctcatttttctttttgtgaaatatgtgtagcctttcgaaaatattgtttattggttaattaagcagaggtttcattttgaggaagcttgggcagaaaaagaggaatgccgggatctggtattggctaattgtgttggattggtttgatcttgatattgtaagagaaagaagaaagaacaggaaaaaagaaagaaagagagaaataatctattattgattaagcatttgttataatgtgtatttatacaaaaatgaagttttaattgaaagtaacaaatattaactaactctaaccaaaaccaagacaagtaagaaccgaacttaactactaactaacaaataacagtcaataattgtaatgtcctatttcatagggacgtcacgtgtaattcagagacggacacagttatttgagtgtgggggctatagcccccagtaaaaaaaaagttaagtgtaaaaaaaaattaaatatcttctattta

SEQ ID NO: 373005 - DNA, 614 bp, Cannabis indica
tgatcttccagccaagattggaattctctcctttgattagcaagactttcagtcatggcctctcgagcctagttttgctcttggtgcacagtttgaaactggccttgcatctggcctatcgcgtctcgcatttgatccatctcggggtcaattcccttgatgtcaacatggggttcattccacggcgtaaaaatgccagggccgcggccagtctgagcttggcccacaccgtcagtaggtgggacaaaatttctaggattacctcttccggtggcgccattagtagcgccgcctcttgcagcagtggcattggtggtatgcccagtagttgtctgtccagtgactgtagttcgaccagttgctccatggccagcggtttgagcggtggtggtagtgctgccgttcctggacaggggggtcgtcctccattgtttccggcgaggttgctcgctgatggaacttggtgggcactttccatctcttcgtcaggttgctcttgagatcttcgggttaacaacattttttccggcgaaaaacttaaagattttggctaaagctctcaatgaaagcaccaaatgttgactggatttctagccaaccgatgcagagtcgta

SEQ ID NO: 373006 - DNA, 677 bp, Cannabis indica
ataagggactgggccctcattcaaaggatgggcccggagaccgtaaaaaccgtccttaagtttatctccctttttagggatggaaacaagttcgtaaaagtataaaatttctgccggactgggtgagccccagctccgggcagcgtaaaaaatgaacaagcctgaaagcaggcggaaagcttgaggaataagttgatatggcgcaaggccgacaaatacaagaaagttaatgaaatagtcttgaagagggagcatggccctgaccaagaggtgtgtctggctccaggctccaaaacccccgtagttgtggttgggcgtctcctcatcccaaggcagccggtggtaagtcccggaggttgaaggcttgatgcctgccaccaccacgatctgctccagctgatgggcgcaggtcagggtagaacgaagctcagctggttcccacccgttggcacgggacttatgcccctcttgggccacaagactcttcatgacctcctccagggtggccaagcgtttctctcccttctttgaagacttagaaccggatgcagacattttggttctaaaaaagatcgaaaaaaaatccagcagtcaggccccaaaccaaaccctaattcaaaaagggaatgggggtcccctaaccgctggaaagaggccccctccggacacttgccaaa

SEQ ID NO: 373007 - DNA, 494 bp, Cannabis indica
attctgcatgtcaacaatcaatatttttctcaaaataaatgtgtatttcaacgaaaatccactccataagcttaattatcaaaccattctccactaatgtaatcacacataatttaaagatcaataggactttataggcttataatgtaaggttagggtgaaaggtagataacaaggttcatttatgctcaaatcacaccatagcatacatatacaacgttatctcaaataattcacatttgtttctcgagcgttcattgccctctcgtggttggtcgtggggttgccactccctatgttgggctatccttccaccgtttccaccatgatcaccattgttgtttctcgagtttcctccactgcttcacctaagacaaacattatggagtcatcacgtcccatatagtgatcgggtaggacttgttcatccgtagggagcggtcgattgttgttgtggggaaccctgttggaagggtgactcatagccctctctt

SEQ ID NO: 373008 - DNA, 678 bp, Cannabis indica
aaaaaaaaacaaaataatcaaaccataccttcgatttagacatggttcggcgtggataggtgggcttgtcgtcgattgggtgggtcgaaggccgctgcgccgtgcgccgtcaccgtgggttgaggcttcgggttttcggtgggttgaggctcacaggctaagagagaggaagagagagggggctgggtccgagagagggggctgggtggtcctcggtggtcgttggaggtggtggaggtgagccgtgaaggtgagcttttgggtgagagagagagagagacaagctttagatttggtttggttcaaatgtgaggggtattatggggataaaggaaaagtagccatatatggtctatgatataacattgagattttttctattataaacttaaaatgtaataaatttacatttatgaccctaaaaaaggaaataaacaaaaatagaaactataaagttgttaattacaaaaatgccggccaagcaaaacggaacaccatcttcttcgtgacccagccgcagccttcttcgtgacccagcgatccaaccccaacaacccaatctcaaccatctttcttccaaaaccagcaaaatcaaaatctaaaaaaatgtagaactcctaggaaacaagctgaatcccgaaaatccaaaatcaaaaacgaaaaggaaaaaaaaaaaaa

SEQ ID NO: 373009 - DNA, 289 bp, Cannabis indica
tcgggatgctcatggtgctcaatcgcacgcaccaggcttcggacaaggaagccgtgacgcgcgcagacaaaggagacgatgcctatctgaagctgtgtcatgctcgtgtcttaagacacgggatgctgcacctcgcccgcacgttcccctgcatctcgcacctcctgaggctgcacctgccgagttatcttggccaaggaccctgcagcgtccctctcccacgcgcggaatgggctgctttgcagcctgttttgcaggcagctgggagattagccccaaaaatccaatt

SEQ ID NO: 373010 - DNA, 643 bp, Cannabis indica
tttgaaaattaggaaaaaaaaaatcacgaggtgtgacacctccattcgcacggggatgcccgtgaaacacgggtgcacgtggcttcagacaagccttatgtccgagttttcttggtcaggtgggcaagtttttggctgaaggctccttatctgcgctcgggaatgctgcttgcagcctcccctgtccagcaaacttcggtcagccatcatgcatgcgctcgcggatggtatgcaatgcataccatcggcaccaaatgctcaatttttttttctaaatttttttattttttcatgctttttcatggaattaattttgaattttttgtgtaattttgtatttagatttttatttttcaaatctcaaatctacagaataaaattaattaattttattttaattaattttagatattagtagattttgaacttgaaaatggataaaatctcatatttgcttaattggttaccttatttttaaaaatttgattattttatcttacttttaaatttaaggtcagatattttatattttagattatttaattaatttaataaaacgtccttctttgaaatttaaaataagatatattttaatctagaaaattttaaaaatctaacgagatattttgtcaactttcaaatt

SEQ ID NO: 373011 - DNA, 954 bp, Cannabis indica
agttttacgcacaattttggtcctccaaaaacatattatcccaactgaaggacttggttaaaatgaaacaaaggctaggggagcctttgaaagactacatccaaaggttcatgatcgaaggcacaaaagtcaaaggcctaatggaagaagggtggtatacacccatactaggaggtatcctacatctgagtgacctttggagagacatcagaaaaaggtcaaccaataatatgagagagtttatagatggggctgacaattttataagacttgaaaaagcattctggcaggtgcaagttggcgagcaaaaaatagttgctcctagcagctcacattccatagtggggccagcaatgctacccaacttcaaacctacaacaataatagggggggggggaataattcaagccaaggaaatggcaagaaagggaaattcaataattcccctagaaagtaacaccctcgagaaaaggaggagaagttcacatgcttctctatactggtggacactcccaatgaccatcctaatggccacacaagccattgtttcatacaagaagccacctctaatgaagaaaggcatcagtaagagggatccaacaaaattctgtgaattccataagaatttcatccatgacactaatgagtgtaagcacttgaaggaagagatagagttcctaattaaaacgaacgaccgtcacctacattggtatgtccaagccatctttaaccttgcataggtccaacagaataataacccattgcccccacaagttgctggccatttataggtcatcattggtggaccccacatagttggggatcaaactaagtgttagatagatatgctcaaaacttcgtcatgagcaaagaaataaagtcctagctgtagaggaaagaaatctaaaataaccatgaatagaagagcctgccatcacattcaatgaagaagat

SEQ ID NO: 373012 - DNA, 638 bp, Cannabis indica
gtattcataaatgatactcattaaaagtccacccatatatatatatatgaaaatatatgtcaagtaggtacaaagttgggacaatataacattccacatcacatgttcacataccaatagtacccagagagttgcgcattataattatcacaaagaatatttcccttctgttcacttgtttgtagtgagatgagaatgaaaggaattatttgtatccaatcctaaaactaattaataatatatgcgtttagccaattgatatgaagtataaataaaattaagtaatgagtggagtaactaattaatgacacaccgaaagtgcatgaaactcaataataaaaaaaaaaaaactgttattcataatagaataattgtcgcaaaagtttttaaaaattttaggattcatgtagattaatctctaattttaaaagttagcggtaatagtcctcaaagtgatattttttagaataattagcttttttagtccctgtacttatgacacgatactatgatgccccttaatttataagtgtagttaaaaaatacccctaaaatatatcagttggaatagtataatccttctatctaattctgttaaaattgactaaagttgaactgttaaaataataatgtggcat

SEQ ID NO: 373013 - DNA, 779 bp, Cannabis indica
atcattagtgtcaaattgtagcgtcactatgtagagatatgattttctcccacgtttttttgtcaagagtgttaaatgctgatttttttgaagctgtccatctgcaatgaaaagccttaatttgaggcatgaattttgaaaaatagtggaagtattagagcaataatttgaggcttcattttcccatgatggaacattaaaatttgtcccaaatcaaaatttctataaccacaaaaagggtatttttcactgtatttagaatcttagtcctgcttaatctcctaataatgcttaaactgggttcgagtctcgttccaggtctgggtcttgggtctcgggttcaagttcgggtccggagtttaggttcaaggtctaggttcgagggttcgagtccgggtcccgggtcttgggtctgggtccgagtccgggtcctggttcgggtccgagtctggggtctaggtcctgggtccgggtcccgagtctgggtctgggtcccgggtccgagttcatgtcagggtcccgagtcccaggtctgggtccgggtctaggtcccgggtccgagttcgggtccgggtctgagtcctaggtccgagttcgggttcgggtctgggtcccagtcccgggtctgagtttgggtccaggttcgggtccaagtttcgggtttgggttcgggtccgggtcgtagatttgtgttgaccctaaatcctttgtaaatattataatacaagctaatacagactatttattatgtattaaataatactgtaacaccctaacta

SEQ ID NO: 373014 - DNA, 811 bp, Cannabis indica
taataatatcatatgaaaacaaataaatgattaaaatgaattatatgtatatgtgttaatattattgcttaattaacattcttgagtcttcacacactccatatgaccctacctcactacccaacttgattcaaaaatttggaatttttatgaaatgaattttgaattaatttttattaattaatcttaaatttttttctatgaggagaaaagggtcaaacatataataatgaaaatttttacaatgcattccattaaaagaaatatgctaatgtaactgatgtatttttatctgttttagcatccgaaataattttttagttcatatttttttttgttagtcatttacattataattatttaagacatcatgtaaaattttaaaaactttaaacaaatttaacacaccaaaaacataatttaaacagtatgttgcacgcatgacgattttattttgtatgcatgtaagataggttgtttgaacattattttctatattgtaaattattctaaaatttttaaaattttgtaggatatcttacataactataacgtatacgaatataaaaaaattggactaatttttttttctatatgttgaaataggtagagggtgcatcagtgcattctttttaaggatacatagaatcactttataattattattattagagtattgatattggccattagtggtaccccactttttataggtggcgctctacgatttgttatcgatatttctaaaagttattttctttaataacatgagtctcgatacttaattacaccaataacaatatgacaccga

SEQ ID NO: 373015 - DNA, 673 bp, Cannabis indica
atataaagctaggagactaaaagggaaactaccaataaaataggaaactacaaaatatctaggaaatatcaattaccctaattcttttacaactaatatacaactaatattctaacaataaacaaatacagcaacaaattattgtcaatttgtgtgcggtttttttttaaaaaactatcttaaaaaaataattcaatttttttatcttataaaaattacacttaatcaagcaaatcttttttcttttactaacactaacagtgtagttaaaataaagttttaatcactattgtgtatgaatctttttcaaaacaaattttaaaagtattaacattaataattattaactattgtttccacaaatgcagaaacaaatatagatggcaaacaagttttaaatatacaaattgacaacacaaacttttcaaccaaatattgctcaaaccaactccatttatccaatccccaaaaaattaaaatccaactaaacacaacaaatagattccaaaaatacctaaattatattacaatgcaaccaacttcatttaaacaatgcaactctttattgcaccaaaaatacctaaatcaaaataccaaatgacagattccaaaaaaactaaaacgaaaacccaaaataaattacagtacaatgcacactaagaatcagaacaca

SEQ ID NO: 373016 - DNA, 604 bp, Cannabis indica
ataatttttctatttaattaaatctcttaagaaaaatagcaaatatttaagtgtctagaaaaaattaacttaaatattaaatttctatttaattaaatatatctagaaaaataccaaaagtctacctagaaaatatctatctagataattcataaactaattatagattttctaattaaaatataatatattttagtctatctattttaattaatcattattaaaaatttcttgatttaagttgatttaaaattaattaatattaatttttaactttaatctaattttcaaattgaaaaaatttcaaaatatctacatttaaagatttgtatttcgaaatgtatataaaaatgaatcttacaataaaataaaatatactctgaaaattattctaatttaagttgatatgatattgaaaaattttcagcttaaatatattttcttatttaatcaaaattcatgaaatagaaataaataattaagtattttagaataaaatcaacttaattcttaattctatttaagttctaagaaatattgttgggttttgtgccctaaataaactcatttcactataattagattttactaattaataaaagat

SEQ ID NO: 373017 - DNA, 639 bp, Cannabis indica
cggtttgtaatttttatcggttttttcggttcagtttgggcggtttacaaatttttgtgtgccctacattctatagagtgttcgacaaatgatactttatagcaatatgctcaaacttaacatgtacacattgacctttccttttcgaaaagtatgacatttttattagaaaataattatacatattaaaaaattatatcaatttaaaatggggcaaatatcatttggtacttatattttgtcaaaatatataacaaaaattatttggtgtagtggtaaaatgtcttacttttaactaagagatcatgagattaattcctttaccattacataagtactagaactattatttttataatagttaaactatacatataggagccctaaaaattaatttcgccttaagtctcatatactttaggaccgaccctgtttggtcattaaatatcaataagagtaagactaaagtattctttgttataggtaattaagtattttggacatacctatcaaaaatttatcatcaaagtgagtccaatgtactgaatatgtatgattttaaagtaaagagtatagatgattttaaatgcagaatttacactgaatatatggatttaattttttttatttaaatatggc

SEQ ID NO: 373018 - DNA, 528 bp, Cannabis indica
tgtagtgctcaagattcacatgatgcctccatggattatgtggacaaagctctcaaggtgaacatggatgctgcgatttttacagatgattttagtttcattttagtaattagagttagagatactaatggtagtttgattgaggaccgttaagtgtgtaaacaaggtgtaattcaactagaattggttgaagcaattggtcttaaagaggccctgagttggattaaacaacaaccacacaagaagatggtactcgaagcaaactgcttgttgctggttcaagctctttgtcactgcttgtctgttggtggcgaaccgctggtgttcctattttcgagttgaggattgtaagtctgttaatgactttttcttttggttttttttattttttgttcaaacggtctatagatagggtcgcttattttttagcaaaagcgtcttattttatatctgactgtgtgtttaacatgagtgacatttccaataagattaaggatgcttgttatttgatttaaattaatgaaattt

SEQ ID NO: 373019 - DNA, 516 bp, Cannabis indica
attcttcatccttactttccttccattttactcttcttctttcctaccaaacacaattaagataacatttttttatatatattttctatgttttgaattaaaaaaaggaattattacatagaaaatataaattgacactttatttacaaaaatatctccataaggtgtggacaatatttatacttttatgtgattttaattaccaaaatatcacttattacactatcatttacacaatcagacgatgattgcagaatggttgctgcgtagttgtgcggtagttgcatcagacgaaggtttcaatcagacgatggttgcagggtggttggccgaaggtggcatcagacgaaagtttttgggtggttgctggatggttagccgaaaattgcattagacgaaataacggttagcaaaatatttatgcaactgtaatgcaactataatgtaactgttgtgaaacattaaaaatcagaataatgttttcacgtacgtaactctatctacatgtctctttat

SEQ ID NO: 373020 - DNA, 531 bp, Cannabis indica
aataaaaaataaatatcatctaagaataataatataccatacaacaaaatagaaatatactgtgcaacaaaatctatatactaacaacccacaacaacctataaaaaataaaaaaaaattaacataacttcaaattaaacagaattttaacaaagctaatatagatatactataatatttaagtaattcacttctgattctaaaagaaaatatataaaaaaaattattaatttttttatgtggcaaaaaaaaatataaataataaataatataaaatgattatttctctacaaattttaaaataagaatatttacttatatagtgttacaatataaggtcatttactataatttttcttcattcaatttcttgtcaaataaagagcatattatatagaaaaatttcacttttgatgattaataaaacaccacatatcaattttgactccccttactaatttgtattaattaattccttttgattacatgaactatccattttacccttttttaaaatttaaaagaaaaaaa

SEQ ID NO: 373021 - DNA, 659 bp, Cannabis indica
aatcagacctagacccgaattgggagccggacccagatcccaacccaaacctagactcaggacccgaacaaaacccaaactcatacccaatcatggaacctgagtaaggacacagaactcaacccgaaactcgaactcagaatcgcaaatggaactagaaccgaacaaggactaggactacgaccaagacctaaacccaaaaccgaacccagatcaaaacctatacagagacctaaacccgaaccttgactaggactcgaacccaaacctagaccgggacccaaacaaaaacaataaccgagacctggacccagaatcaggatagggacttgggaaacaaaactaggaacgggacgtagttcccgatccagacccgaacttgaacgtagcacccagctcgtgacccggcaccagattgtaacaagattcggacccgagatttgtatccggatcttgaccaggggcttggacaaaacccggagtcggtgtctggatttgggacccagcccagtacccaaacccttacaacgacccgaacccacacccggaccttaacctagtcccaaatccaaaagtggacccgaacccctaccctgtgaccaaaaattggaaccaaaaccggaagttgatcgggactggaactaggacttggacttgga

SEQ ID NO: 373022 - DNA, 485 bp, Cannabis indica
tcgggtcccgagtcccgagtcccgggtctaggtccggggtcaaggtgaggtccggatccgggtccgggtcccaagtctgggtcatttgtcctgggtcctgggtcccgggtcccgggtcttgggtccgggtttgggtcaaggtccgggttcgagttcgggtctgggtctgagtctgggtctgagtcccgggtccaggtccaggtctgggtccgaaaaccggggccggggtccgggtccgggtccaggtcccaagggatccaagttggagtccgagtcttgaatttaagttttttttaaataaattgaaatcgggttggatcagatccgatctaagaaaaaaaattaggtgggtggagcggatctgatccaagatccagtaagtatctgaatgtttcggatcagaggtgatccgtctgatcggaactcccatccattccaactaaatggatctttttgacatgcctattcaaaacaaaaatcattaa

SEQ ID NO: 373023 - DNA, 1047 bp, Cannabis indica
tttttggattaattcaaaatgaatactaatgtttactaatcgctttggtgactgaggattcaaagccttcggtttattgagtctagaagaaagatggtggaggagctcctttgttccgttgacgagggtggtggcgatctacaggaaggttttttagctatttttttttttggtaattttaatcaactttattatcagatttttcttcatttttgttatctttattatattatttaattacatatatattaattaattacatttattatttgttcctttgacgagagtggtggcaaaatatacggtatgatttttagtatttttttggtaattttttaattacctttattattagaactttttattatttgctactattatatttttttaatacttttatataataattttcttttattgcatttattataacattacgtttctagacagctctttaatattattatatgaatttatttagttttatttaggtgttttcttctatttatctataagatgagttaagtaatattttccttttatatttattattatcaaatctattttatgaatatatatttctatatttagtattacattttaaaataatattaatgttttttaggtggtcaaattaatttcctttttatttttattctattttatttaattttgtttaaattttatttgatacagaactttagacaattgattgttatattttctctaattaatcttgttaagattaatttttagtttttgttataaaatttgataaaatattttaatatttttattctttgttggttttgatgtgtttctttttactagctattcaaatagtattaatatatgtttaaaattatttatgagaccacatgggtttttgcactatttttcttgatagttttaatactttttacgacttatgtgccttttatagtttttgtgccatttttttatggcttgtccctatgtgtttaaggtagttttgtggtatggtcatttggaaagagaagcgatcctgtttgtgcccatgatttctat

SEQ ID NO: 373024 - DNA, 592 bp, Cannabis indica
gttgtgaactaaagtatgtatttttgtagtaataataatttatatttatattgtgattaatattttatttttataagtaaaataaattaatttctaaaaataatttctcaaaattatcattctctaataattaaaaaaagaaaatattaactttttttacttaaaaaaaaaaaaaaaaaaccacttgttggtaacctactctagcaagtcactaaattgccacctcatcaatttttttagtacccattaatgggtattacccattaagaaataatccatataaacatatgatttttggggttgagcaatggtcagtttagtaggttttaattaatataaaaatcaaaaattcaattttcgatttagattggtataattcgaaaaccgtccgaccaatccagaacctatcactgttttgaatcttggtttggacggtttaaaacgctcaaacagaactttttttctttaaaatatgatccaatttattgtataagcacattattctatatcctacaactataaccatacgaattaattgttcaaaaactaattgttttatttttttaactttaatattaataaaataataata

SEQ ID NO: 373025 - DNA, 917 bp, Cannabis indica
ataaagtagtaattagaaacaacaacagccagaattcaacgtatgtaagattatatattatcgtatcatgatcatgattagttgctttatcacttttttctttttgtctaagcttcttgtaattataattataaaatacgtatgcacaaaatttgctacaaattattattatcctaatccaataaacaaaaagaagatattgtgttttttttcattgttctttttttttttctcttgaataataataaaccgatcaatgtgttggaaattttactatgcattcaaattatttgacaatgaaaggaaaaatttatatatatagatgccaaaaataagttgtgataattacaaaaatctggtttttggtcgctaattaaagattttaaagatgtaatcaaaaaaaataacaatcaaatataatatatgtaacacaatttttaagtaatattaattaatattacctagctctcacaaagacttttaattactgagtacacttaattgatgttgcattaagttataaactttttttttttactaatatgatatattatgatcgaaaatacagtgtagtacttttttttttgtataaagaataataaaaaagaaaggaatatataatcttcactaaattattatggtatatagatattgtatgccaaaattaaagagagaatagatcgagaatgatgagactattggtgtgtacgtacactttaataaaaagcttttatacacatatatatacagtactcaacttctactattgttggttttggtgatgtacttatatattatctcatgatgatctaactttaaatattgtttagaaaagtcaatattggaagacaaaagaaaactatactattaagaattaaattttggttcaatatgtagaaaccaacaaataatatata

SEQ ID NO: 373026 - DNA, 659 bp, Cannabis indica
ctttaattttatattttaaaaaagagttttttttttttcaatattacacaaagcaattttatttataaaaataccttttaaaaaattatttatacaattactgaattgtcactttagcctaaacaccaaaatttaaaataattactgaaaatgaaaaaaaaaactaaaaaatccacgtttaagaaatcatttagttacttttgatgtaaataaaatatcaattaattcttaaaaaaatttactttaaaaattttatcttaaacacatttgattacttatgattaattatttttaatatcataattttatttttaaattttatgttattttattgtttaagatatctttacatttcttttttgagaatatactcatttagtatttgtattttcatgaaaaatatttggtaacatgtgttcttaataatatatataattttaaaatactggtaccaaataaatattattaaaaacacagaatacttaatttgtatttaaataaaacacaagatactaaaagtgttaaacactttttatttttttttttattttagaaatttataaacatattttgagatgtgggaagtatatgttttagttactttttaattttattatgaataattagctttttttagtccctgtacttatgacactata

SEQ ID NO: 373027 - DNA, 1378 bp, Cannabis indica
tgttcatacaaaaatatttaactcaaatttaactttttcttttctaatttttcttgctaaaaaacttttttttaaaaatttttttttacttgatggaacaatctcagtccatatgatataaaaatgagatttttttttaaattagatagaaaaatcaggcataaaaactcaaaattttctaattttaccgattcatgggtaatacccattaagaatgctaaagaatacaaatgattttatatatatatatacatatatatatatattttaaagaatacgaatgatttggttttttaaaaaattttatataaatattttcttaattaatcaatcatatttataaagctaataaagaattataaaaatgagagaatttagaagagaataaataatgttatttagagagattttaaagtatcatgtcactgcctcattacttttttttaaataaaaatataaatatataaatagatagttacttaaaaatatagttctgatgtatagtaaaattataaatatattattttatttcatattattattaataatttatttattaaaaactaaatgcacaattttattaattattatttaaaattatttattaaaaaatttaaaatttattaaatgtagtactttcaattgctttgttaaaagatattatttttattaaaaaaaaaataaggtggtatagaaaaaaattacggtgttttccagaatacattattttcatatctcaatcattcaaaagaatatattgttactattgtatctcacttgttgtctcattgtatctcacttattttcatcacgtatctcagccattatcattatagtagttctttagttatgagaaatgctaaaggcaaccaatcgtagtctctacttcatatatatagatgtagatttatatctatatattgattaatatatgtatatgaacgaacacgattaattatatttgatttaagttttaatatttttttttggaatttatttttattttctaactttgttttaaaatattttatatttttatagaaaattaaaataatagtaaaatatcaatttataaatttatgcttttttatagaaaaattattaaaataatagtaaaatacacttcaaaaaacaactacttttagtgacaactttttagtcacaacataaattttttgtgactaaatgtaatttttagtcacaacaaaaactacttgtgactaaaacatagaatttagacacaagttgtcactaatttagttttagtcaccacaagtattgtgactaaaagacatttagtcacaacaatttgtgatttttgtgactaatatttttagccattgactttttagtcacaaacataggaatagtgatttgt

SEQ ID NO: 373028 - DNA, 617 bp, Cannabis indica
gctggtttcctcttaggcaccctacccaattctttgttggaaacttcaggcacgagtgaaatattgatgtgacagcttttaagtcatacaaagtcgatcgccctatcattacgttaaaagctaaaggaacatttagtatcaggaaccgtgccatgacagtcatgctcgtcggagcttgtccaacaatgagtggtagacgaatttgacctagaggtgcgaatccttgaccaaagaaaccataggcaggctggagacatggggttagaaccttgagttggagtcccatttttaataagcggttatgaacaagatgttggaagaggctccattatcgatcatggttctgcccaccatttgattggctatctggacttccacgaccagcgtgtcgttgtgcggaaatttaattttgacagcgtcttcatcgttgaaggttatggtcggctctccagctcgtggaactttgggcctcctttcttccacggccaggataacctctccttgcttgtgctgcgctgttcgggcatacctctcccgggctttgcccgaatctctagcaatgtatggacctccaacaataacttgtagatgcccatctaccggtggaggtagcaaat

SEQ ID NO: 373029 - DNA, 636 bp, Cannabis indica
tcttctgcaatcataagtgcatacacaatgaattcagcataaccaaaatcaggggcttttctctatcttctttctctatctctagctaattgatagctgctgagttcctgttgatcttcattgtctttcctttctgttgcctcagttccatctggaacaacattagttggtgctataggagcaacctgctccacctcaatttggacattctcatctaaaccagcttcattgtctttggaagtgctcttggtttttatggccatttcatcttccttgaaaatcacatctctactaatcaaacacttcttgaatccaggttctaaacaccacactctatatcccttaaccccttcagggtagcctagaaacatgcatctcaatgctctaggttgcaacttatcttgtctaacatgcacaaatgcaatacatccaaacactttcaagtgatctaagtttgggggtttacctgtccataactcttgtggggtcttgaagtttttcggcacagatggtgatctattgattaggtaacaagtagtttaagagcttctccccaaaaagttctgtccaaaccagctcctagtaacacacacctaaccctctcaatcaaagttctattcattctctcagcaacac

SEQ ID NO: 373030 - DNA, 558 bp, Cannabis indica
tttttattttaattaagttttttttctaaaaggaaataaataaaagggcatagtccaatctattcttaaaccaaacacaggattactttcagcataatccaatcttatccagtccaatatttttcagtccaattcagttcaatcctgcgtactaaacgggccctaattattttgccggataaaaattccctccaaatgctgaagtatagatcttttgataagttttgtggtgtatctattctatataaagtgtgcctatataactgaattcttagtttatgagaaattcatgagtgactttttatttttatttaataaaataataaaatattatttatatataataaaataataaaataaaaataaaacaaatcccattaatatttgaactgatatttgatgataattattcgagagtcacagccatctttccttctttattcgaaagtaatatataggtatactgatattgagtattattgagtattattggcttttcttttctaaaccttttctccctggttttttgcaatataacgaaagggtagaaaaaaaaaa

SEQ ID NO: 373031 - DNA, 755 bp, Cannabis indica
attaaatgatcacaataaatattttattttctatggttttgcaatgcataatactcaatagtaaacctaattaggtttatagagctctaattagtttgtcatataaaaaacattaggattcggtccccaagactaatctcaaacacttttctcttccattcccatctaattgaataaaaatttaataaaaagaagattagttagtggaagaccatctactcataatctattctcatacataatatcatcattatcatggagttaagtattattttccattttattgattcaacatatagagtaactttgataatttgacatgaatttaaaattcatgtgtatttttagatctaattcttagaagggtatcatgagcattgattaggattattagggttgatcatattgattgtaattattaatttttatttttatacacatttaattttttgttttttttaaaaaaaactaatattatttcatggtttcgaattatattttgtatcttttcattcatcatagttatatatgactgttgtatggtatgattaagattaagaaataagacatatatacatttgtgaaatatgtttcaattttcttaatcgttcattttcggtatgagaagatatgtttatgtgcttcatatataaatatatgattcaagtcttatggttgatttctttatagaatcctatattaacattgtgttgaaagagcttctttgaattcgtttttatgttctttatttttgg

SEQ ID NO: 373032 - DNA, 540 bp, Cannabis indica
tgatccccttcattggagacactcataagaacacaatcaacacatgatcccctactttaaactgtacatttctatacttcgaatctgcataactcttttacctgctctcagaggcaagcattctagctttaatcttcttaattgcttcattggtccgttgtacagattctggacctaggtatttcttctcccctgtttcatccaaatgaatgggagatctatactttctgccatataacaattcatagggagtcatccctattgtactctgataactgttattgtacgagaactctatcaacggtaggtacttactctaggagccctcgaaatccataacacaggctcgcaacatatcttctagtttctgtattgtcctttcggactgtccatcagtctgaggatggaaagctgtattgaattttagttggtacccatagcccgttgcaaaatgtgccaaaatttagaagtaaattctgatctctatccgaaactatagactttggtactccatctaatcttactatctccttaacgtat

SEQ ID NO: 373033 - DNA, 520 bp, Cannabis indica
gttacagttctgggtctaggtttaagtctggttacggttctaggtctaagtccaagttctggttatggttccagtcccgttcccgggtcccagtctacttctgatttcgattcaaatttttggtcacaaggtacggattcgagtccaagtttgtgtttgggactggttttaggtccgggtcttggttcgggtcctggtcttgttctagttcgggttccgggtcttgggccgggtcctaagtttaggattgggtctgacttcggggttgtgttccgatagtgaagtccttgttttcgggtccagggttgggtcccgtctctcgagttttgggtcttcatcccagttctggtgcctagtttctagtccaagtcctcaatcaagatccggatcctttgtcaaaatttgtgtccatgttcgggtttggggctcaagtcccccatctaggtctagatcttaggtcctagtctaggtccaagttcaggttcgggtttgaatctcaagtttgggtccgagtctaggt

SEQ ID NO: 373034 - DNA, 861 bp, Cannabis indica
atttgcatcctactttcactactttttctatattgagtaaaagaaaaaagaaattagtaaaaccacttttatttaaaaacaaataaaaatagttatcaaacaagttttcatttttcaaaaataaaaattgtattttcatttttgtggtttaaactaatcaaaaacataaattgtacctcagattcaaatactcttatttttgttaaatctatatatctactatataataagaatgcaaatgacaagtggttcttgtccttttgtgtttttttaaggtttgtttttttactttttttttttaattttgttttttaataatatttttcctaataaataatttttgtatttgttattgatacttttaatgtgtttaatgttatatgatatggtacttttttttttgtacttcttttaatttgttttaataagccaattatgaaatacctcagttaaatttgaggagtgaaaaacctcaagagattggcaagtgttggattacttgggagtgttcttttttgacatccaacgggcaagatttcaccactctctagcacgggtaaaccataaaaaaccaactgtgactaaatgaatttatattgcctaattaagatttttactccgaactttgatatgtactaaattatgttttctgaacttttaaggtcgttaaaaatgtcctctgaactattaaaattgttgaatttaaggacttttgtctaattttagtaaaaaaaagtctaacacggatgaaatttcagggggcatgatttagtatatgtcaaaaaattcgagaggcatgatttggtagatatcaaagtctgggaaacatgatttagtacataaacaatcactgaaatagta

SEQ ID NO: 373035 - DNA, 720 bp, Cannabis indica
aagtgatttggatgaactcattttaaaccaaaattcttcaagaaaatcttgttggttagggatttttgttgaaactgttcttccagtttcttccaaatctgggcaggggtttcttccttgtctattaatctgattatggcatctgataagttgaaaatcatgattccagttgcagtttccaagtattcttcttgttgaatcttggtagtcccttctggccattctataggatcattaagcactctcaacagtttctgttgagccaagagtgacttaatttttctcctccaaatcctgtaatcaccagaaccatcaaatttgtcaatgtcaacctttaaattgctcataattaatgaatttaaataagatcaaataaagataagtaataataagcaatttagttataaagattattataaagtatcccagaaatcctttgttaaagatttcaagttgatctggttgagttcttgaatttcttgtttgtgtttcttgatttcttgcttgagttttcttccttcttgattagtttgaatgttgatctttctccagctttaaccaagctctgataccattgtaggaaatttaaaattgtgattttacaattctgcccctacaccaacaaaacaacactaatcaataattaaggtcaatttcgacctttcactgttcaatgacttttcaaagtcagaacaccaaaacgactgcgttttgtatttg

SEQ ID NO: 373036 - DNA, 586 bp, Cannabis indica
tcacattagtacgactagagtatgactagcgtaccaagtataggctaatattatggtcaataatactgtaatacttgacagtatcacattagtggactagagtatgactagtgtaccgagtatagactgatattatggtcaatagtactgtcatttgaacatgctggactcaatacttgtgtgggacactaggatagggttatgattgggtacattggcacgtattatattctgggttataattatgccattgattatgcttttcttattgaatctgtcgattcacagatattgtttttatgcgtagtaagggcaaggcaaaggttgagcagccgtgagatcgagcaaatgaagattatacatgtcagggcgattaggcttagagcgtacgatctttgggacagttggttgtattttgtcaagtttctaggcgacaacctttgtattatgcatatgaaacatttgtaattattttctaacgggattccggttatatatatgtatttattttggtatttataagtaattaaataaagttttaattaatcacatttttcaataaactcgttaattagcaacgagctgc

SEQ ID NO: 373037 - DNA, 723 bp, Cannabis indica
agcgaggtcaacattttggtgctttcattgctctttattcaaaatccaatcacaaatacgatggtgacaaactcgtaaaggcctgactgatccaacaaattcacagacgctggatcctgcattgcagaaccctagaaacacaagggttctgccagatgttaatcctggacagccagcgaacgtggggaatggtttaacagttcctatagatgaaatcgcgcctggtgtgcaagagactgggaataacagttccgcacccaaccagggcattcataacacaactgttttgcctggaaccaacacccagacgaccatcggagatgccactaaatttcaaaatctttgtgatgctctcagatcaggacaaactacgccctgtagtaaatctcgcgttcgacgaacaaaggcgtatgttcaccgaatggagagatagagagatggaggcattaagggctcaccatgcagatattgaaaatcgtagtcggcaggctaccgtgctgatacaaaaaagcctaccaaaatgtaggtcagcaactgccgaacgtcattcccctgggtgagacagacgaagatccagcgatgaatgcttctcagactgcaaatggtgagtcgcccaatccccggtcacgagttcctactcgtgggcgaagcggtaggcgagcaaaccttgtctagtacttcatcaggagaagtcatacctgatggttccaactagataaatgg

SEQ ID NO: 373038 - DNA, 466 bp, Cannabis indica
agatttaaggaggaagacttaatagattagtattgcactattgattttgtattatcttaattataaatatgtattgtctcatcgtaattatataggattaataatcaattcatttacttttattttaaagatctaaagaggaagacttaataagttagcactgattattgattttgtaatatctcaattgatccatcaagtatgcaacatagtattttggtattttaaaaattggatattggcaagaaaatcacctaaactttatgtggttaacacttaaccatcaaaattgattttttgacgacaaaacctaccaatctcacattctgttttgctatttatacttccgtctaaaactctcaattaagtaccatgatggattgcctacgtatacacaagagtacacatggtaaaattttagtggtctacgtaattttaatttttaatataataaaaataatataaa

SEQ ID NO: 373039 - DNA, 705 bp, Cannabis indica
agtaaacgaaaatggactaacacaacattccctgtaaaaaaatgatttttttttgaatacccacagtgaagaacgaaaagtatgaaaagtagaactgcagaaacttacttgtacaacccaccgttgagacccatgattgtaataaccacaacaatggcagaagacgagaaatatacaccacacacttacacgaaaagaagtgaagaaaatagaaaatataagttttacctaagctgaaacgaaaatagaaaaggagagttttgcctaagctagaaacgaaaataagaaaaataaaaaacgaaaataagaaaacgaaaatgaaagaaagtgaagaagaaagtagaagtgtggaggacagttgatatgactagtgtcagtttcaactttttcaaatttaataaattttaatttcaaaaacataaccagttaccatttttttttaccctaaatacccctacatcaaccccagtcctcagatcaaataatcactccatccaacgactgtcgtacatcatggaataaatctcctaaagtaaactaacgggacgaaatcgtgtccctataaaaatatgatatatacatgtagagcattatatatatgtagagcatgtgatataatatatattagtgagattaaatatttggaattaactatttctatgtatttatatgagacatgtatatataacatatattatgtgtata

SEQ ID NO: 373040 - DNA, 513 bp, Cannabis indica
tccaaaaagaaatggttaataatagtagtaacaataaataacagaagcttatctcttaaatgtggtggtggtggagaatatccacacaatcgtgtgttttagtttcatgtattcggtcagtttggccatatttttaacaccatacacataaccaatccaaatataacccaataaaacagagtaggcaaagaaactataacaacaaacaaagtacatttttttattttttctaataaaatgtcatataattttttattttaatttttttgctttaatatttaaaatatattttgtttttattttatattaaatatgattattctttttaacattagaatttaaatttaaactcattgaaatagaataaatgtttatttattttaaagaattattactataatcctgttaattattgtagttactaaaaaatatatttttatttattatttaaaaaaaataaaaaaatagtataatatttataaaataaaagtaattataaaaaaaataaaaaaa

SEQ ID NO: 373041 - DNA, 623 bp, Cannabis indica
gaaaataaaaaccaacctggttttcaggttccatccatctccatggattaaaatcaagagctccattagtacactttttcatctaaatgtactgcagaaagaaatggtaccacaaagcaccccttggggataacataatctgcacaccaacaattaaaaaataataataataataagaaattaatttactaatagataataattgtatataaataaattttaatattgttttgttgttactttcatataattttcttgtatttttataaaatactgtaaaaatgtaactttaatataaaattgtaaaaattttataaaaattagtattatctcttttttttatcatcaattaatataggtaatttgcggcataaatacctaagtttaactcctagttgcaaataaatacctaagtttaatttttagcggtaataatacctaagttataattctggaacttttgtaggtacctaactttaaattgttaagtaaattgtcacgtggtaatttctaattggtccaagtcattaaatttttattttttaaaaaacaattaattaaaatataccaataagaaaatgacacgtggataatgacataatattttaacggttaggtaccta

SEQ ID NO: 373042 - DNA, 602 bp, Cannabis indica
cacatctatatttcattatttatttatttatatatatagcattttagatatatatatactagtaaaaagttacgtgcgaggcatgtatatatatatatactagtaaaaaggtaatacacttaaaatgtttatctcatcttggttcaacccaattttatgttgttctcataggattgtgtgttagatatgagcttagaagaatagtattcgttagaatgggtgccagcaatggcggtgctgatgtgagttttatcttctgggaaaaatctagctactccgacattacaattacacctagcctttcaaaatgagcatcataaaaaatttaaggattataaattgaaaatgatatcttgttacttttggtgtgcccaacaaactctctaacggatgacattatatttcgcatatcccaaaactgtttaaaagtaaagcaatatagcaagggaatagaagacttactcaaataaataattacttgaagcaacaaaggataactcgctaatagaacactgaatattacacccaaataacaaaaagtgaggaatcgcagcagagaggtcatgaatcacgacatagaagatgaggcagtaattcaatag

SEQ ID NO: 373043 - DNA, 584 bp, Cannabis indica
acgaggtgattcatcactgactgagtaatacgaggtgattcatcactctgtgtattacgaggtgattcatcactgctgtgtattacgaggtgattcatcactctgtgtattacgaggtgattcatcactctgtgtattacgaggtgattcatcactgctgtgtattacgaggtgactcatcacagttgtgtattacgaggtgattcatcaatactgtgtattacgagatgattcaccactgctgtgtattacgaggtgattcactactgttgtgtattacgaagtaattcaccactaatgtgcattacgaggtgatataccactgctgtatattacgaggtaatttatcactgatgtgtattacgaggtgatttatcactgctgtgtataacgatgtgatttatcactactgtgtattacaaggtgatttatcactgctgtgtattacgagatgattacttgactgagtattacaagcaactacaagatctttgttacgaggtgttgaatgttaccgaaataacatcccgataatactacaatacctcacttcatgaaccttgtgatctttatttagatgagat

SEQ ID NO: 373044 - DNA, 738 bp, Cannabis indica
aacatcaacttagtataatacatatatatgtatatattaaccaaattcatacatatatttttaagaaacagagaaaataatttgaagtattatatatagaaagataatgatagagatgtgtggaagatgaacacccggctctaactttaatggctgaaacaaggatggaattaatgtcaaaatattactaattaacgcggaaagatgtcatttttcagtactatatagccagctttgatggttagattaagtatgattatatttaattataaggagaataacttgtaaattaaaaataaataagcagacactactacttgtttggaagtatatgtagactaaaatatgttgaaaataatggaaaaacactcgacagtacacatttttatttatattttatagatacacttataaatgtggccacaatctatacgttgcttcttgaaaaggtaagaggaatgaaatatatttaaataataataataatattaataattatcagagaagtagaaaataaaataatcattaagtagtatattattcatatatagactttatatttacagcaattattaatcaaattgatgaacgtgtctactaagatttaacttttttaaatgttaccaaaaaacaaaattttaatttaattattttgcaatcatgtggtgtgtatttggatagagtttaactaaataaaattgaacagatatcttaatttcattcgatttggaagtatat

SEQ ID NO: 373045 - DNA, 706 bp, Cannabis indica
taaaggggtggtagttattgggatgtttatttgttcttatatttttagcatcgatttataatagcattaatgcttagcgtctgttataaattgaccctaatgagtgcttattatcaacaattttacactcaatttcaatagcatcaattctcgtaaaaaattaacattttgatcgatgagaatatttttttttttaattgtgagtggtggttaagcgaataaaatgaaatggggatcaagataagatggtaatgataaattattgaatatgggaaattttggtgagaaaagtaattaatgtttattggagaaatcgaataatatttaggattaacacaccatattttgtgtttgtaaaagttattagttggatcatctgttttgtaaaataataaattaaacttcatattttacaaaatggtacaaaatagtatcatgagcttagtttttaattaatttttttaatataaccaacttaaagataatttttagtacgaataaataagaatattatatacctaattttatcataacaactctagatcgggttattatcaacttttattttgaacaaaaaaatcagtttagagtagtatttgtataatttaaaaaatataagatccaatttgttatttaataaaacagagagcaacaatcaaataacttttgcaaacacatggtctaaaattgtatttgtcctaaatat

SEQ ID NO: 373046 - DNA, 869 bp, Cannabis indica
caacatctatgttgagaaagaaaatgcttatctaagaccccaaccttgaaccctgtctcaaactcaggacttggacttggaatccactcggactaactacagcctcaaaagaacaggtcccaaataagcattccccttcttaaactcgaactcggattggggacccctcattgctcttaataaatgatccttcatgatcctcattatcatggtttagataagatcatcatcagaattactaagaaatcaaacgtttgacatatctgtccatggatttacatagggattaaacgttggatttttcgtaaatcagttgcgagctttgtaaatcaaggcaacatttagcataagcatattgattttacaataaataaaatgtttgatgtatttataaatcaagaaaatgcttatttaggaccccgacattaagattaagctagaaacattaaattttttgaattcgagcaatatttagaaataacaaatggataataattgatggtgatgagtattatcagagttaaatatattaactgagttttttacttcattcataacaaaataagaatgtgattgtgttgtgcttctaggatgtataagtaaaaagagttatcaatgagagagggagtcaaatagatgagtggttcttttcgagacacttgactttgactatagtggataggtaaatttaaaaaattagggactttaagaaaactagaaaatagtgaagaaaaaataaaacaattgtacaagacactacaccttaatctatagtagggtggttcatcaaccgactcacattgcacaaatcgcatgcacctcaccacaccgcatagaagtgcggtttgaaatcctttgcagtgcggttg

SEQ ID NO: 373047 - DNA, 506 bp, Cannabis indica
atgggattggtcattgtcatgttggatactacaaataataataaatagaaatcaactaaagtttaaaacaaaatctcattcagaaattattagcacatagaaagtaggaatgacaagcgaaaatactaaagcctacaatcctaaataatttctaaggttttcaagaaactgatatcagtgtctcgtttcctattaaagtcgccaccactagggtgatccatactaaaataaacacatacaaaaaaacttatctttagaatttctacggcgttagattgctaatgaacgttcctccattagggaggattactcactaaaacaataactatgtaaaaacaacaatggaaatcgaataccctaatattaataaagctcattatttaaaatgtattttcttctaatatttatttcaatctatttattttaaatatatatttaattaaaatttctaatttataataaattttaatttaatatttataaaattatacttagatggatatgaa

SEQ ID NO: 373048 - DNA, 538 bp, Cannabis indica
tttaggcaataaactcgagaacagggaaataccaaaagagaaggcaaaataacaattgataactatgtaaatactagattttgataactacgtaaatactagattttatttagttcaaatttgtaatcactatctagttggtagttagtagtacttttattggataactgtaaatgtataatgtgtagagctttgaattactttgcttatttttaaattttttattttccggtcatgtatgaacttgagatcatattcagatttaaatttataattgtaaaaaataagggttggaacccgacccaacccaactcaatacatgttgtattgagttgggttgggttgtacataaaatataatatgaataagttataattttcgaaacagatttaatggattggcccactaaaataccctcaacccggccaacccaacccactgatcagcccaagtgactaatatctttagtcatgggcctttgagtaataatataagaatgatgatttataattagtcacaattttttttacttttaata

SEQ ID NO: 373049 - DNA, 522 bp, Cannabis indica
gagaattgggttcggcttatcatgaagtgtgtgaaatcggctaactattgtgtgactcatggtaataacgaagttggcccaatcattcctacaagaggtataaggcagggtgaccccttatccccatattctttttattctttgcgctgtaaggtttcacagtctttactgaaagaaatatgaaacaaaatggttggcttcagtgggtgtaaagtggacaaatggtgctcctagagtactcccatatgtctttttgcagacgatagctacatatactgcaaggctactgaatctgaggctcggcggattattgaagtactatccaagtttgaattggcttctggtcagaaggtgaatctagctaagtcttcaatcttttatagcactaatactttgaactctataaaagatcgaatcaactccattttgggcatggtcacggctactgaaggaagtttgtacttgggtcttcctagctctatgggaagaaacaaatcaacagccttgggatttttgaaaaac

SEQ ID NO: 373050 - DNA, 451 bp, Cannabis indica
gaccaagacctagaaccgaacactgacctagcctgagacccaaactgagactggaactcgagctcggacacggtcgtgtacccagataggagctgagacccagacctatacctaaatgtgggacacgatcccaaacacagacttggacctagatatagatccgaatacgaacttggagtcggaccaagactcacactaggatcgaaatgcttgacctagatctgcactgagatcttgaccaagacccaaacttggacccgcactcgggaccccaacttggacctgcacccaaacctagacccagatcggggtccgaacctggacacacagtcggacccgaactcaaaaaccacacctagaataagaccaaagctagacccggacctggacccaaacccgaacctagaccatgatttgaaccaacgacttagacccagaactgaatccagac

SEQ ID NO: 373051 - DNA, 640 bp, Cannabis indica
gaatgtcgagattagtcgggaatttagagtttttccaaaataccctaggtgatttgtgtgactctttagtatgggcaagggcattatagtctttttgccttttgagttttgtcttttagtgaggatttaatattatgtttaaatctaatttttagtggctatatgctgattattaagcaagtaaatcaactcttttattcttttattgaaaaatcaagaattagacaaaagttgcattttctctggtctctctctctctttcgaacccacctagaagcagctaggcttgggttggttcttttgcatttaaagctggttttagcaaggaattactgatctcaagttattggtaagattcttgtagctttctctttatttgcttaagttgtaagaaatgaatttttgcatcctttgaagtgttgttgttgtagctgctgtagttagttgttgttgtgttctgaggtttagatatgggtttttatgttgatttatgcttgaattagaggttgttgaagggttactcaagctttgagtttttgaactcaatcttgaagctttaatggtgaaattcgtttctgtgaatggatgattgtttatcacttggaatatgttctttgtggtctatatagcaggtctagag

SEQ ID NO: 373052 - DNA, 583 bp, Cannabis indica
ggagtagagtcggtgtcgaaaaaagtcgtcgaagttgctgccaacgctagaaaagtcgtcagaattggcatttcgtcaaaaaaatcaccggaaaattaccaagaaactggttcttatcagtaattggttcttcatcaagaactagtttcttggtaattttttcggcgactatgccaatttcgatgacatttccaaagtttgctgtcggtgccgaaaaagtcgccggagtagctgccagtgtcagaaaagttgtcaccggaaaaattactaagaaagtggtttcttcatcaagaaattttttcagtgatttttccagcgacaatgctagttccgacgaattttttggcgtcggcagcaactccgatgccttttccggcaccgatcgctactccggtgattttttcagcaccggcagcaaacttcggtaattttttcgacatcagtgacaaataaaactacctaaacaaataaaaacattaaatatgtgatttgaaaacctaatttacatatcaaataccataaaaaaaacctaaaacaaaaaataccatataaattagtcaaacttaaatgtgccatatttatc

SEQ ID NO: 373053 - DNA, 817 bp, Cannabis indica
aggtacaaaccgttcatacatgcaacacttaattaagataatatatacataatatagttatatcacaaattatattggtaattatggatagagtcagagaagaacactcgtggccctactcgtggagatggggtcaaacgttcataaaaaaatgatacaagtgagaaataagtttctgataggaaaggtgaacttagagttcatgggccaaatgccactatattaggaaacactgttagtgtaaaagtacgtcatcatgctccacttcagtatagtggttgggccaaaattcctgcagaagataagaaagttgtatatgcttgcatcatggtatccatatttttaatataatttttatgtacataaagctataattttatgatttatttaataattatctttttttaggacatctttgacatagattttaaaaaagatccatacctcgaaactcatttgaatcactattgtcaagtgtgatatagaggctaccataacaaatgccacagtaaatacaaatgtcttatcgaggaaggtaaaaatccattagaaatcgacctaagaagttggtgctaacaaacgaagactgggaatggatgtgtaaaaactatttctctaatgaagaatggaaggtatcataacgtttctttaatttgtacacatttaatacttttcagttcttaatactgacatgaaatatgttatgtagaaaaagtaagttacaggttcttaaaatagagcaaaagatttttttatgcattatggtggaacaaaatccttattcaatacttacatgaagaggtagtatttttttttt

SEQ ID NO: 373054 - DNA, 450 bp, Cannabis indica
ggttgggttggccgggttggtcggcccagcacaacccatgcacaaccctaagcttaccttgtctagataggtggatgcaaagaattaaagtaagcaaattttagaggaaagtcatggcagtagcccttgccagccttgtctactagggctgtacaaaaaaatttgtaaaccgcctaaaccgaataacccgcccaaaccgaaccgaaaaaaccgataaaaattacaaaccgaaataacccgaaaaaattacaaaccgcccaatctgttaattgggcgggttgaaaataggtccaacccgcccaattaaaccgaccaacccgaccaacccgattttgcactttatttttttttaaaactttttagtttttattatatataatataaatgattaaatatataataatataaagttatatacttaattattagttttaaagtcatatatatggt

SEQ ID NO: 373055 - DNA, 536 bp, Cannabis indica
ctaataaatgaagatttggtcaaaaatacaaatactgtaataatggtggatattcttattgatattattagaaattatggtaaagattttgattgatcaatatcactaattttgtgggattttttggcattgattttcttgtgttcacacttggtattccaccccatatgaagcctttaaaaggaggcttcaactttcattctaatcacaccaacaaaaagagtcactcattaaaagctctcttgtcttctttttctctctcttttttgtaagtcttaaggtgatagagagaagatattaattcgagtttgctagagtagtgaaagtagtgtagttatcttctcgttaatcgttgtatcctggaaagtggttgctcgctgatcttctagcaccgctcaagtataggggacaaatctactttaagaaaagtgtgtttcatgtgtctcaactttcctttgaattattaattttatatcttatcatttgtatttatatttttattcttcaataattaattaataatatattgttatatt

SEQ ID NO: 373056 - DNA, 551 bp, Cannabis indica
aaataaaattccataataaaaatctaattcctaaattctctctattactatcttattttgaatttaattaaaaccaacaaaatataggtacgtaatcttgtacgtatatctctcattttaattttctaattttttttattaaagttaattatttaaataaataaaaatccataataaaaatctaattcccaaattttctctattactatcctattttgaatttaattaaaaccaacaaaatatatatacctaatcttgtacgtatattagggctgaacattaggacccggcaacccgaaaaatccgaccaccggccccgacccgatgccgaaaaagccgaaaaaactaaaacctgtattgtcgggtcgtgtctgacccgaagaagcataatttcggtatcgggttcgggtttcaaaattccattgaattttattcaatgtgcacccgagacccgaccaacatatctattctatataaagtgtgcctatataactgaaattcttggtttttgagaaatttatgggtgactttttaatttttatttaataaaa

SEQ ID NO: 373057 - DNA, 513 bp, Cannabis indica
ttagttattcgccatgtcccctctgtccgagagtatacccagtgtagacacataggattcgatgagcgcctttgtaagtttagaatgcgttccacctggtgggggaatcacgccaaggaatactacttttcccatttgggccatttcttgggtcggtcccggatgggcttaggacctccagcgcccattcccctggaccattcagcccatttgtcctccagcaggtttctcccctcggacagctttcttggggatgatgaagccagcattttagtccaagactttgctaggggctgaattagagagtcagggtaggactagttttattgttttcttgttgggcgcacgcctttttcatgattattctaacactttgtttattctttgttgcagcagccaggccaatggaagatcttctggctacccttgtcgaggcctatagccctgacgcttctctgcctccagccccatcctaactggtgacccccgggaggtcctcgtccagtgcccctt

SEQ ID NO: 373058 - DNA, 538 bp, Cannabis indica
taataaattataataataaaaaaaaaaaactcacataatttattagtaaaattagtaaacatttaaattattaattacttattttaaaattacatttttagttattttttaagtttattctagaaattagttccctttcataaatataatatacaaagtaagcataaatatgaaatagttttatctagtatacttaataatttgaatattgcttaattgttggtaaactaaatataaaaaaaaacttttgaaaaaaaaaaagaaaaaaaaactgaaaaaaactaaaatgctacctttgattcaggctagcaaaaaaatatatgtttctcacatatcaaaatgattatcttaaagtgtagatcacaatgtgtaagttttgagaccaaataattattagtgtagccaaaaaaaaaaaaaattaaatataaaaaaagaagaagaaagagaaaatattataaaatctaaaatattaaattaaatatatgtaataagtaaaaaaactagtgtaatataagacaagataatgatacaaacattg

SEQ ID NO: 373059 - DNA, 695 bp, Cannabis indica
ttcaaaaaatcataactaatcactatagggttcggttttcagaagtgaagaaggggaagagagagtggcggctaggtttaggaagaaggctctcagttttctctgaaggaataagatgcatcatcctttcttgaagccatcactacctatttatagtcaaccacctagggttaggttacatttatttggcattaaaataatgaaaaaataaatgatgaatagctacgtaactggccggcctatgtttaggataatgggccccacttttggaattttgttgttttatcatttctacatctcattttctcaaaaaagccaattttcaaatttaaccacttaaatgcaaattctacttatgtaataactaaatttaattattaaataatattgtcatttaatatatttattaattagactaaccaaagtctcttaattaacaaatgtaccctagaaactctttattcacaatttagcacttgcttagtgaaaattcacaaactagacgtagtctaattttagaattataattgattaatcaaaatcaattaactgagtcttacaagtagtattgtcttaactagtatggggaccatgggcctatatatccgagcttctaataagcagatcaagacttaccaagtaaattcattgacttattaattccttgttgctatccacgcatagacttagaattg

SEQ ID NO: 373060 - DNA, 653 bp, Cannabis indica
tataaaaaaaatcattaaccatatagagttttaggcagatgcctaatagcaatttgattatcaagatattggcttaaaaatacttgtcctcgtttgctttttagagagatataattattaataacaaacttaggtcacttcccattgttgtgtcagattatgtttatctcattcatcaactcagctctttctagtagtgtgtttcagcattgaaggggtggcaaaacgggtttcgacacggcacacgaacacgaacacgaattttacgggttaggccgtcagggtcaaggaaattagacgtggaccgaaaacggatcaacacgacttgacacaaaataaaaacagatcaaacacgaaacgacccgcttaacacgaatgtaacacgtttgacatgatttttttgaatataataaaataaaaaattaataacaataatataattatataaaaaatatagatttagtgatttaatattaaattaaaaaaatttaatttaattttctttaacatgaaattaaaaaaaaattatttttttaaattttcattatatatataacaaactatatatacataagtatataaattttctaatggagcttaaatctatcatttttttttctacaattctagcttaataatagcaaaacgggtca

SEQ ID NO: 373061 - DNA, 514 bp, Cannabis indica
atattgtaaggttaaaccctcaaaataaataaaataatgtttcacattattattctcttgctaatattaacccattccaaatagttacttaatatttggagagaaaccaaaaacttaaaaaattttattaattgatcagtataactagaaacaatatttttgatagtggcacaaaattggggagaaacaatattaaaaaagatactatcatcaacagatagtaaataaatgtgtaatatcaacatggatagaaaaattaattgatatattacatggagagcaatttgagtactaaagaaagatgaatgagagggaatttgttttacttaattttatttttgtttgttttacaaattttttttcctttcacgtttctttttagaggtttgtttattagtatatcatatatatatatatatatatatatatatagtattatagaattatatataatatagcaacaaatagatatatatactatatatacctatctgatgattaataatattgtatg

SEQ ID NO: 373062 - DNA, 702 bp, Cannabis indica
gtgactagtttggccatccgtcgcatttttcattgtcgccgagcaaaaatcataaaactataaattttgcatataacataaataatacacttagaatttaataaaatcttcggaattgagaaattataactctaatgcccatttttaaaaatgagatccataataaatataaactcatgcataataattaaatatcaataattaatgttaattgtctttactaatccataatctaatcatgcggtcattacaagtttcgtcgcaaatattcctaaaaaaatgtgattatatgaaaggtgcatttggtaatacttttttaattagtttttttttttaattagtaaaagttaaaatattttcccaaaatatgttctataaaactgtttttactttttcaatttttttttattgtagaaccaaaatttttgaaaacaaaaaaatacatgtttcaatttgtttataataagttttttttttctttaattcaatatttagtactccgaccttaacctagaccttgggatccaaatttgagcccgatcccggactggaaccttgaccctggccggactcggaaccccaaacctaaaccccagtcctaaacttggacctcagccccagacccgaaattggacacttgacccggtcccagactcgaacttgaccctgaacccagactcgaaccttggatcccagcaccag

SEQ ID NO: 373063 - DNA, 879 bp, Cannabis indica
cctctaagtttttttttttttttttaaagagttttttttacaaaaattactttatttttttgtttgttcgttatttttgtatttttactattcatactttttttttttttaacattttttactatattaaattttcaaaaatactgcctttaaagttttaaagttataaaaatactgtgttttagtaaaacaaaaaagagtaatttacggcataaatatctaagtttaatttttggcggtaataatacctaagttataattttgaaactttgtagatacttaactgttaaatattaaatcattatccacgtgttattttcttactggtatatttaaattatttatttttaaaaataaaaatttaataacttagaccaattaagaattctcatgtgacaatttacttaacacttaacagtgaagtatctacaaaagttctaaaattataacttaagtattattaccaaaaaattaaacttacatatttatttataactgaaaattaaatttaagttaaattactctaaatattacgttaaatttgaaataatatttattttatgataaatttgcattacaaaacttttgtcattttaacaaaaaaaaaaaaaaaaagaaaaaacgacatgtgattgagatcgagtagaagccattaaactcgccacctcagcgcccgcatcacgtgtatttctcctcctcctgctccactgccactggtaggtagcaggaggattactgcaactctaatcactctctctctcatacttcaacaatggccatctcactctcattctccccgtctttctctctcctctccgcttccaaaacctacaattcacctctctcttcaccccccgctacgtctccattatctcgttt

SEQ ID NO: 373064 - DNA, 529 bp, Cannabis indica
gattttttattattttttactttttgttaaacgaagtgtatttttgtaattttaaaactttacaagcgtatttttataaataaaaattttaggacgtaaaattgtaaataaaacataaaaaaattaatatttttgaaaatttccttaatatttaaatgaagagaaaaaataaagaaattaatgtacaatataatataaaaaatttgaggtaaaataaataaaaatgaggtttgaatttgataatatatttgaaagaataaagttgagaaacagttaaaaaatattcttttagagctcacgagaaatagaaagataagttgaggaatacctgttttttgtactcattaataaaaaatatcctcatattatattttattaaaaagtacctacttttgtgagtgagttgtctaatatacattcaccttccacttaagtctaacacataatttacatcaacttaaagggtataatatagacatcatctataaaagtgagtatatcttaaaaaatataaaaataaaggtaaaaa

SEQ ID NO: 373065 - DNA, 642 bp, Cannabis indica
ataaggagttaattacttttgtttaaaaggaaaattaaacaactgggaagatgcagattaacagtgctactaaccaaccgtatgagtttgactaataatatagtattcttttgatatttgagggtttctattgaaaagacaaaaattgattgaacagaagagaagtttggtcacaaaagcctcaggaaagtaatactaataaggagacataataagagacaaaggaagagtgatgatgtggatttctagtcttggtcctatatgtcaaaacaaaacaaggtatcaatgacttctgcatcaattatttctatccaaacaaaaagaagagtttcctgttttccaatctcattagcagattaaaaacttaaaaccctaagtacagtacctgttttccaatgagtgaatatacataaaacttcaaagtgagcagtgcaaactccaaatctaatgaattgagtaacattttgttcttgaaaattagtgatgcattaggggtattgaatatagtcatataaataaagagcagagaaaaacccaattcgattaaaaaacatcaacgaagatttctcactaaccatacttctcaatcatatatggagaagagattgtacatggaaatttttttacaaagcttccaaatgc

SEQ ID NO: 373066 - DNA, 724 bp, Cannabis indica
aaaaaaatcgtatagaaactcctattgcaactagcgctgcaactattttagattcccaaaaccgtaaatttgaaaaaaaaaaaatagtgtatgaggtaattaccttaaaaaaaaaaaaatctctccgagttttggctctttttttagttaatttccgtacttttttttttctttctttcttttctctgtatttttcttttttatttttttttaattctctcttttatttattgtttctcaaacttaattttttatttttgtatgtatatatatactaaaaaaaattacgtgcaaaggatgtataattaatttatattacgtgctttataattaaactaggcaatatagctgcctcaaatgataaaatagaaatcaaaatttaaaatactttctgatagtatttaaagtttttgattcattaatagaaattagttttactaaaaataagaataaattgattttataattcaaataaatatgaggtcaatataaattatttaaatatttttaatagacttttattgtgagatttaaattattatcataaataattttaattaacatatattaagtccagtttactttaataattttttttttctttgtccttaattaacaataaaaaaaaacaataatcaaacaaactagtaataaaaaaaccaagtaattcttagatgtgatttattagaaactaggcaacataaccgcgcttcgcgcggtctta

SEQ ID NO: 373067 - DNA, 1154 bp, Cannabis indica
catcaacaactagcttaaaaatctcaactacagtttaattttaaccaattataatttttttaaaattcctttcatttcgactgaatccacattttctaagctcacttaagaataataaatcttactttaccagcatgttcaatactcaaaggcaccaccaacataaccataacacatcatgaccatacatagcctacaaatattagcccataaaaagaaaaaaactaaatcatttgttcatttatacacatagggaatgggaggaaatgaacaaattggtaaatagaattatatatgaaagaacaaagcccagttgaaactcaaccatgttataaacgagagaatgttatgacaaacatatttaaataaagacagagagggcaattgaattgattaaaagaaaaactttaaacaccgacaacaacaagcagaccccaatgaagattattaacataaatgggaaaaagaaaaaagaaaaagaaaataggaagagagtcgttcaagtgagcgagaactaacatgtattgaagcaaaccaaaaaaagaaaagagattggtaatgaagagagataagagagagagcgggagagagagaaggacctgaggaggtaagaaattttgacgatgggtcaagctgcaatctcggtatttggattgagcaaaaccaaccagcaccgagagagaggtggcattgtgttgtggagaaatggacactgcaacactgcaattattcagaaaagttgaaaagtaattcatttttatatttattaaccaaaaatattttaatatcatatctttatatattaaaagtgtctatctaacggcatttcttggtttaacagaatatactttaaaaaataaaaaaatgtttgatctcccgttaactttcaaaaatatataaataattaaacccaaaaattaaacaatctttttttaaacgtttaaaacaaataattcaatttaaaaaattaaataatctttttttaaattaaaaaaaatcaatcctagccacatatctctctaacataacaaaccgtatatctcaatgtttcatatttttttattagttaaactttaacaaataaataaaaaaattaaacaaatattaatattgttacacattaggcttacacgattttttttaaaccctaaaaa

SEQ ID NO: 373068 - DNA, 562 bp, Cannabis indica
taattttaaaaatatcaaattatcgaattttgatctaataacgaataatgaaatcacaaatttgaatttctatgcttaatttaactacttaattaaaaaaaatatcaaaaaatatctctttttacactatatcaaaaaatatgttcatacaaaaatatttaagtcaaactcaacttattcttttcttattttttttgctaattttttttattattattttgttttaccgatggaacaatctcaacccatatgatataaaaatgagagatttttttagttagatagaaaaattaagcataaaaactcaaaattttctaattttacccattcataggtaatacctattatgagtggacccatatatatataaagtattttatattattagtatgtttattataattgtaaagataaaaatactacactaaaataagtatattttctttttattgtttctatatattgattattttctaatgagttagtgaactaattttctatcgaagtataattttttaacagatttacatcaaaaatataaaaactcaacaatattacatca

SEQ ID NO: 373069 - DNA, 688 bp, Cannabis indica
tagttagagtgagaatagtaagaaatagaaaaagaaaattagtttgagaatacaattaaaaaaggagagaattagaaaaaaaaaaaaaaaaataacctgagagtacaaaggaaagaaaaaaaaatgagcaacggacttaaaaaaaattcaccaagactaaaaaaaattaaaagagaaataaatgagtataaatgtaaagtttgaaaaaaattaaaaatttggggaaaaaaataaataaaaaaaataagatcataaataatttttaaaaacatatttggtcatattcatgcgcgtgcatatcttaattggccacttagttgatttattttttttttttgtttttggaaaggaaacttagtagttttttggaaatgtatgatatatcatttaacccccataatctaatcatcatttttattttaaaagttcagctggcatgcttaacataaccaacttataacctattaacattttttcaatactgacacaaaaataaaaaatttataaactctagagggtgagaatatcaggctataaatatatatttaattatgtgtacagagtcaaaccacatcataattaaatacctgaaaccttctcgaccagtggcggactcagaatttaaagtgaggggggcgtaaataaattaaaaaaaaatataaagtgtagttagtggaatttgaacctt

SEQ ID NO: 373070 - DNA, 448 bp, Cannabis indica
gtcattatcttattggtatatttaaactaattttcttaaaaaaataaaaattaaatggtttgaaccaatcaggaattactacgtgacaatttatttaacacttcacagctatgtacctatagaagtaccaaaattataacttaggtgttattagcgcaaaaattaaacttacatatttatttgcaatcggaagttaaacttagatatttatgccacaaaatactcttaaagatatattttatgtaaaataaaaatattgaaaaaattttagggtgctaataaaactgccattttttaatcttagttaacatttattttaaaattttattaatttaattatattgataactaattaattttttaaatagttttgaaatgtgataaaaaagaaataaacgcatagctttaaagtaacaaaaatgtaatataaaataattagtatataaaa

SEQ ID NO: 373071 - DNA, 542 bp, Cannabis indica
tttatacctcggtcaggatccttgcgacttgagatggatgacccagttctcctcttccataaagcatttttatcttagatacaaaataagtgaatagtcattagagcattgagatacttactagttgtagagttaagaaagtgaggctattgtgatagtctggctaagagaagaaagcggttgggcaaatccttttatacctcaggcaggatccttgcgacttgagatggatgaacaagttcacctcttccaaaaagcatctttgatccaatggatggaaagttcaaaaaatacatttaatgctcacccttggcatttattattcttcattgcacatctcgtgtactgtacgcattaaaggaggggtcatctcaattatcctaccaacattacaacttttcctaagaaatgtgccctcaatgcgcacctgttgccaataattgcattataggcactgtatgtgtgccaatggtacctgcagttaatgatgttgaccaaaagtgaatcactcacttattttgatgataaataagttttgatta

SEQ ID NO: 373072 - DNA, 553 bp, Cannabis indica
catcccatccttgggaggcgtagaggacgaagagggcagataaatacttgatgcccttgggagtgatctgagccgggcagagaccaaagaagtctgccacatccctgaagtacttatgcaagggcatcagcgccccttactggtcgtgagcccccgaccaggcgcacattcccttataaggatttgtggcacgattgtcgtgggcgggaatgtagtagtccagctcgcccaggtacccgtcctggtcgagagttcaaaggtgtgcctctgaaatcctggacggaggacttacccacctatcgtacaagccaccctgcctcctacgacgaacaaccttagcaagctcctcactgacgtagtccacgccctcaaccaggacgtctccgtcagcatcgactggctgcctagcctcgttctactccccgaagttagggggttcaaccgcttcttctccctccgccttggaaggactacccgaacgtacctcgtctagctcctcaacctcctggacctcagcgtccccctcaccgatcctcctccatcgggacggccg

SEQ ID NO: 373073 - DNA, 518 bp, Cannabis indica
attcccaaccactaacaatgatttgatagtgagtcatcgaagaacaaagaagatcactaaccaacaaagaaataaaataaaataaaatcatgttacagagacaaaactaattggagtaacctaaacaaaaaagacactcaaaatcatatcacagaaacaagattaatcgcagtagtaaaaatctaatcacattaacaaaactaaaattctcgaccaacccacgcctaagcccaaaaagagccggtgggctgactagaaacaaaaaaaaaaaaaaaacctccagcagttaaaatttatgaactttttgaaacatgtttttagttatataaataattcaaaattttaggaaaaaaaaaaataaaattaaaaaattagatgagatatatgaaaaattaaaatatacatttcagaaatttaaattataatttttacaataaataaaagaattatatttcacaaataaacaaaaaaaaaaataattaaaaatatagttgtacgaaaatttaaatatttttacg

SEQ ID NO: 373074 - DNA, 941 bp, Cannabis indica
aagaagatcatggtggatatgatgttcatctccccaaaatgctcaaagatcattgtaagagctttcgagagagaataagttattctcgctcacaagttaatacgacaaaaatgggagtaggttattaccaactttaaggtgtcgaacctctctaaaatccagtattttctttactttaaattatttactttctattatttaattattctcaatcgatttattttgattcattgttattggctaaaagcaaagtcaacaaagtctatttttaatttaacttttaattaattaattaattaattaacatgtgatcaacatatgtcttttagttggcattttacaaatctagttagtacataaaaatgaaaaggacttcgactgtaaaaaaaaataataacagaaaagactgtaactgtaattataaataggctaattaggatttttgcctctgaattttgacatgtaccaaatcatgcctcctgaactttcaagatcgttaaaaatgccccttgaacaattaaaattgttggatttaaggatttttgtctaatttcattcaattttactatttcagtgattgcttatatattaaaccatgctccccagactttgatatctactaaatcatgtctttcgaactttgacatgtactaaattatggccactgaactttcatccatgttagactttcttacctaaaattggaaaaaagtccttaaatccaacaatctcaatagttcacgggatatttttaacgaccttaaaagttcacgaggcatgatttgatacatatcaaagttcaggggcaaaaatcttaattagccttataagtaatgattttttatttattgaagcgtttatatattacaatgcataatttaaaactcgaattcagaacctccaacacaccctcctaattgccactttaacttaactcaagt

SEQ ID NO: 373075 - DNA, 1099 bp, Cannabis indica
ggaaacattgtaaattatcaattgtttatatcatatcgatcaatgatcctctatagacaatctataattaatagggactaaaattattgtttttaccttttaattatattttatcattcaaacacctatttgatttaatgatgtttcagtaaattgatataatcatttaaatgagctttccatcattaatggcttcaacttagctaaaagaaaactatcgttttacttataacatataaattagatatttatatttatgattaacattcttactcaattatgttgttgagttctcaatatgttagtatgagctagtccgtgtggcaagctggtaacgaacaagtcaaataactcaaataatataattagcttaaagcttaatcatgtcagaatttagattaaattgatatacgataaactaactgatattgactaagaatagatatactaaaagttcaaatcatataattacaaatacttttttattgtgatgacatcactataattgtgaataactataatttttaattagagtttagatattaaacatatactcatgtaaaacaaaaagcgtgaaccaaacaattgaatactcataaataactttctattttattgaattaataaatgaaattgcatagaaaatattttatgtagagcataaaacccaccatcaaaaactgttggtgaaggggtaggctagaacgaggaacagttgagagatcaattcaacaaagagagactttcaaataagaaaaagtccacgaggctctaaaagctatgtttggcgtaatccttttggtctcctttaggccaacccctattaaactggcaattagcaatgaattagagttgttgtgtgcgatgatttgtgacacgatcgcaatttccaacttagcaacctttgctttgaaagggcgtattagagatacccttttcagaaaggaaggctatcttttctaagcattctcatcgaacaagcaagtcagtatactaccactctttgattgtaaacccttgttttaaaactgatgtcgatgcaattttcgacaaaagtatgaattgtgacttgtggtccgtgatgtgatggtgatacctt

SEQ ID NO: 373076 - DNA, 823 bp, Cannabis indica
aagtttgttatctagatttttaagagtttttaatttgtgttgttcatgaattagctatgtatgtttttttggatggataaacaatttgttatatttttttgtaggatgttagtattattttgaaaaagtcatgtattttatatttggtttgataagtaaggtattctgaactaaatcttattatattttcaatgaataatttttttttataatttgttcattgttttaaattttttttaaaaaaggaaatttatatggggacatttcataatataataattactaatatgtgataaattttgatagaaatatattttcatattttaatgtaataatatcaaatatttatttatttatttattttttgtttaatatccgtattctttttctttaaaagtaaaaggttttgcgtgttcaatgagttgttagaattttttggttcaattttagtatttaattgaatatttgtcggtgaatagtgattacaattaagtatatatttttaccaaaggtatgaaaaaaaatatagcaaatttatgagtaatttacagtaaatataaatttttttccaaatagtgggaagaaattttttacatttatactatattattttttaatatttttgtgtattgaattttttataatgtttacttttttttttttttttctttttgtagttccattttttttttcctttttctactttttttccttgcttgttctttttctattttttttatttcactattattttttttctttttattagatataaatattatgtataataagattattttttctaacactttttttgtttttc

SEQ ID NO: 373077 - DNA, 525 bp, Cannabis indica
cacggcctttgctaatctcagtcttgctatcaaagcttcatattcggcttcgttgtttgaagttgagaaatcgaaccgtagggttgcctggagtcgaagtccgcttggggatatcatcgcaacccccgctccggatccattttcattggaggctccgtccacatatactctccatgtggggactgacggtactggcacgttcgtggttgccacggcttcattacactcggtgatgaagtcccccaacacttgtccctttatggagatacagggtatgtagtgcaagtcaaattgacttaactccatcgcccatttgaggagccttccggacgcctcaggcttttgcaggacttgccagagagggtgattggtcaacactttgactgggtgcgcttggaaataaggcctcaatttcctggaggccattaggaggcagaaaaactggtttttaaatgatggggtaccgcgtctttgctcctatcatgcgcatgctgacgtagtacacgggatgttgagttttctctt

SEQ ID NO: 373078 - DNA, 481 bp, Cannabis indica
ataacagagactcgtggactaaggctcattaatgcctcaaccacgtaaaaatctcgtgcattaacttcttacagctttcttatatattattattatattggttgccgaaaaacctcggtcaacattttggtgctttcattgagagctgaaggaagcgtttgcaagtaaacagtaatattacaaaacaacaatggtggagactcgcaacatacgtcaaccccatcctcctcacgacgcccaagatcctgacgatgaggatgtggcctcaagagtgaatgtgggctttgcggaaggagaaggaacccacgacaatgaatacgaaggaaacttcgatgagtacgacgcctatgatgaaggtagctacacagagctagtactcttgagacaaaaggatgccgatcacgaagccgaaatcacagcccaaaaagaacaaaacaaaaagatgcaagaagtgatgcttgccatgcaaaaggccatggag

SEQ ID NO: 373079 - DNA, 660 bp, Cannabis indica
atctcgactgtattgtaccatgttgttgctcaatcaataaagagaatttggtggtgttccaaaaccgagtagagtcatagatcacatttaatctatcagacttgaaccagtatatatcttggtgttaatattgttatttattgctttcatctgattttaatactctgttcatcccttttctttgattactattttttatttgctattcttgtcagtcattgctaactatttgacgattaacttttaattgatttaattctgtatattagtcctaattttttcacaatatctcaaaaaattataagcgcacatcctaatattacaaaagatataaacgtaattttaaaaatatatttaaatataattaatataatatcaagtacttttttacaattttttcttcaattaaaaaaacgaatcatattatttgacattatttttctaatttcaatatatttaaagaaatcatatttttttaatcacttataatttcttttcaatttttttctaataacttttatacaatttttttttattttgtttttctattttaatatttaaaatatattttattttaatcttatgtatacctactttaagaatatgacaaggtagaagtcttttttttttttttttttttttaaaaaaacttttttagtt

SEQ ID NO: 373080 - DNA, 551 bp, Cannabis indica
aaaacaagatgcaccttgttgatataggtagtaccaatcaatccatttaagctctctttaactatgtagtctcatacctacacagtctcagaatcatctcacttgaccttccccaggcggtgtgggattgcacaacatacccgctatttccccttacggatcacggactactgaatgtcacagttttcaataccatattggtttggtacctaataattagttggcactaatattaatatgtacttatctttagtaattttgattagaattttaatttttttttacttttaatctgataatttaattagatattttatttgtatttatttaaatataattaataaaaataaaaaatataattaatctattaattattggtgacccagtatatatataatatgatgatatgtcagagagaggaaaaaaaaaagaaaaaaagtggtgactcaatacatatacatcgagatagaaaataaaatgtcaaaaaaaaacaagaaaaaaagaactaaagaaagtgtatgcgtcagttaacattaaagaaaatatataca

SEQ ID NO: 373081 - DNA, 553 bp, Cannabis indica
ggcctggggaaccctgccaaaaccggctagccagtttgcaccaggtttttccaaagccattcattccttgctcaattcttcaccaattaccatgaaaccttccagagctcctattcaatgcataaacaataaaacccggccagtatttcacagaacaaatcaccaaatcacaaattgccagtaaagcttaaagctttgaactcaatgttcaaagttgcataaaaccaaccataaacctcaaaaccagctactatgggctaaactcaactcataataaccctagaattcgaaccaaacaaatatcaaaccctaacagctcctataacacaatttcactacttcaactaattcaaaacttgaaaattagagaaaaggatcattagtgcttaccttaggttgatttccccccttgaatccttgctgaaaacttagaaaaatggaaaagaaaattggttcttgcccttggtttgtcccagccgaaataaagagagagagagagagagttcaagaggaaatggcttttccttctaatttcctttttcttttctttttt

SEQ ID NO: 373082 - DNA, 875 bp, Cannabis indica
caacaaaaaccaaagaggtacaaagcctaactggtcgaatcgccacacttagcagattcgtgtcaaaatcaacggataaatgtgtcccattcttcaacatcctgcgaggaaacagaaggttcgaatggacagaagaatgtgaaagagctttccaagacctaaaggcacagctcgcaaaacctctcgttctttctaaacctctggacggtgaggaactggggatatacctagcagcgacggagcatgccataagcgccgtactaatcagagaagaagacgacgtgcagcatccagtctattacatcagtaaaagactcatcgaggctgaaggccgatatccgttgatagaaaagctcgcctactgcctcatcttagcaacaagaaagctaagaccttactttcaagctcatcctgttcgggtgtacaccgaccaaccactacgacaaatactgcaaaagccagatgcctctggacgattactcaagtgggcggtggaattggggcagtacgaaatcaacttccaaccccgaacaactatcaaaggccaagccttggccgactttgtggtggaatgcacaggaaaaactgaaagcatcccagaaggcgatctcgagtcaacaccacagccgagcaacactgaaaacaagccgacctggaagctgcatgtggatgggtcggccacatcagctatccggcgcaggaattgcccttgtcacacctgggggcaacacctgcatgcagcggtcaaattcggattcaaagcctccaacaacgaggccgaatacgaagccctaatcgctggactcaaactagcgaaggagatgaaggccgagcacatcgagatctgcagtgactcacagctagtggtaaatcat

SEQ ID NO: 373083 - DNA, 599 bp, Cannabis indica
agagaaagaactaaagagtaaaagacacacctacacacactccactacacacagcagccagacaggaaactaacaaaccaagactaacccaactaccacagacaaacgacactcgcaccacttcgaatggacaaaccttaaccagacacacaaaaaacttaggactcctcacagaccaggaaacaaagaccaagggaaatgaacaccaggagagaagcacagtagatgaccatgctctcttcttgaaatcatagatccatagacctaagatcaaccattgatattgacttagaaaaatataacgataagtttatgatatcttatccaagatcaatgtcggtcccttccaatgtatactccatacatccgatactagtaaactttgccaatttcctggaaaggacataacacttatcttaggtgtaagtataccttatcgtcgattatcatgccagtcgaaatccagtgaactgacaaattatgggaattaaatttttgaacatataatcatgattatattctactgtgctgacaacattataattatgaacaaatatatacatatttatatatgttttagacttaatagaatttataca

SEQ ID NO: 373084 - DNA, 550 bp, Cannabis indica
taacaaaaatataaggtttcaagaatcacctatatgtttggctcatttatttgggttttgattcacacatataacacaattaaattattcacttcccaataatttaatcggaagataaaacttgaagaacatataataaaaaaaatgtatttgagtaatatagaattctcacattaagattgtagaaaataatcttatgaaaaatctaagaatgacaatataccttttgtttggtaataatgcaataagagattaatcataaaattataatattaatgtatatttatcctaatcatattcacatagaaaaagcatgactatttctatataatactaaatagataaatatattaatatagagataaaaaatagaagaaaaatatactactcaaatgtataaactttaagcacttggtgaatcaaaacacaagtaaatattacctcacatataagatcatcctttaccttatctaggaaactagccaaaaatgctagtcattctcacaataatctaaaaagaaaatatgagaagagatagataaaataaaac

SEQ ID NO: 373085 - DNA, 729 bp, Cannabis indica
aaaaagaaatatagtttaacacaagcaaatattaaaggaaaaagtcaagcattgggagcagcaggaacagattcatccgcgactttgctgaccgcctcgttctcgacttcctccacctccgcgacctcagtctcctcgagaagattccctccaccaccttgagttggtgtgggcgacatagcgcgaaaagcctcggccatttcagcggcttctgctccaaggattgagaagtcgaagtttggaatcttggagagagtggtgtagatgtagtccgagaccgcctggtcatactgctttttcccgttctccttctcagtttccaagtcgcaagacatctcttcgaccttcgcctgtgcattcttggcctctagctcgacttgctccttggccttgcggagttcctcgagctccttgtccttagaagacgcatcttgcttcagcttcttattgtcttcttgaagctgagcaatatgtttcttcgcgagttcaacctctttgaacccggtagcaaaagccttcgagaacatggccatgaactgcgaagctagctccgcggagcgaggcagcagctcctcagtaggagtcttgtcaaccttcgactggaactcatcgctgacaaatctctcctgaaggtacagcacatggcgagctcgaaccgctgggtcgatcacaactttcttccctttctcttgaatgcccttagcaggcctcttggaagaatctgcgaca

SEQ ID NO: 373086 - DNA, 428 bp, Cannabis indica
aggatattttatatatatttatatatatgatctttttttatgcatattttttcttttggacctgccctttgggtcaggatattttgtttttacttttggccttttttacatctgtccgtgtggtatgccttagtaccccctgagtggcatgaaaactttgtttttaaggcactcagttttatttaaaattcagaggttgcatacacttagacggtacaaatcctttaaacaaagcctaagttaacatatttggactattggtaatatttccggaggtgatcggcgttccaggcccttggcacaatggttccatccatcctttttagcttataggtttcggagccgatttcatcctcgatttcatatggcccatcccaatttggcccaactacccccactccgcgttcttgggtggctgggaagactct

SEQ ID NO: 373087 - DNA, 1531 bp, Cannabis indica
gtatttgagtttcctaatctcctttccagtataagtgtaatttcatctccacccaagttttaacatgagcttgcgtgcaatagtctttttttttttttttttttttttttttctaatcttttctttggatataagctaatctcacccttatattttaaagactattaactttattgaaacagatgatatctttccttcttttctttgtcaactaatacattatctgcttaaggcattagaaatattccctgtacttgtggtatgcatgtgtatgttttgtttctcatgtttgcgctgtgcattaaaatttcttcagaagagagctgcaggtttctgaaatttcgaattctaaaattgtgcaggttgacagtggtttttctggcatttgatgtcttctttgccatcttctgtgttgttttggcatgtttaatcggcattgccctttgttgctgtttgccatgtattattgcaattctttatgccgttgctgggcaggtatatagtaaacatgaaatcattagtctacatattaatattttcatatgtaagatcctttctctgtaactttggtttttgttcgttgttacaaattaggagggtgcatcagaagcagaccttagtattcttccgaaattcaagtatcaagtatcaactaccgaggaaaagccttgtgcgggagctggaaaaatggttcctgtaggaacaagcagcgaatacttggcgactgaacgtattcttttacctgaggatgctgtatgtgttttcattaatactgcgtacttcgtttcttatttctcgttgtcaatgctgttttacattttttcacctgaacttgaaaaatctacctactttttatcataccttggaagaatatagtaatgaaagatttctatattgcttcccgattcaatttaacatcccacttcctaacattggcttttccgagatggtttgtttttagttcaataatttgttttctggttattgaacttgaatgtcaatagaagaatagatcttataaattccgctgttatttatttcttttcttaaaattgattacatttggcattatattttcaggagtgctgtatatgtctcgtcccctatgacgacggagaagatctccacgctctcccctgcaaccatcattttcattccacgtgtattgtgaaatggttgaagatgaacgcgacgtgtccactctgcaaatacaacattctcaaaggaagtgaacaggtttagaggaattatataaaatatagtgatctgcctatatttgatttcagtcttcccaagtgtttgttattattatgtacataaaatgtcaaggcagaaagaagagcaaaagcatagtgctatttttattgagtcaacagattttctattttagatgattttggagatctgttagtgcttgtttctgtatatgctgtttcatgattgtgacaaaactcactcagcaatcactttgcagggctccaaaatcatgcttgtcttttttgtttttgtgtagacaggaggaaatgattgt

SEQ ID NO: 373088 - DNA, 714 bp, Cannabis indica
aattggggtggggcatgtctagctatttttagacccaaaatatccctcttttcctctgcatgtcggatgagcgctgaaaatccttctgcacatataaggaaaaggtatggcgaaagtggatctccttgtcttaagcctctagtcggtattacttccccataaatttgcccatttaattgaaaagagtaccgaactgagtagacacatttcatcaatttatccacccattgttgttcaaaacctagctttagcaacattctctctacgaaaacccactcaacccgatcataggctttgctcatatcaagtttcattgcagcaaaatattgtttcccacttgtatgccttcgtaaactatgtagcccctcataagcaactaaggcattgtctgttattaaccgacctggaacaaaagcgctctgtgtggcacttattacctttgagagaaaaggctttagtctgttgattaaaactttggagatgattttatataggacattgcataagcttatcggcctgaaatcactaacagatgttggttcctttattttgggaataagagttactattgtagaattaatcaatgataattcttcatttccctcaatacaatctatcacggtcctggttaccaatggtcctattatatcccaatactcctggtaaaattttgcgttcataccatcaggtcctggacttttatctgtagacatg

SEQ ID NO: 373089 - DNA, 596 bp, Cannabis indica
acatcctggttaatttttgaaattaaagctgttgaaactgtaacatcagaattatactctgaatcttctgtagttatcattttttcttttgtgtctactatttaaatccttctgaactgccatgccactgttttgtatttttcagttattgcaaaaaaactactcttgtttgtgattcttgttctacaataattttatcatacatcttatttattgattatttgtgttaacatctgttacctttaatgcagtgcatgcatggtccaaaatgtaagctaggaaacttctgttcggttggtagaagaatacaagaagttaacattttaggcggcctcattctgcccgtctggggcacaattgagaaagccctttctaagcaggtaatctgttctcatttgctcaattgattttattatgttaaagaaaccggaagcttgccatatccaatgatataattatcatctacaaaagaaacaaaagaaaatataattatcgtctaccattgtttatcccatcccataattagtatatatcaatgatgagataaataatttaagttttgtatatttcttttatctttttttttttctaaaaaa

SEQ ID NO: 373090 - DNA, 594 bp, Cannabis indica
attagcaatataggactaactctaatagtttccaccatatccaagcactctttcaccataagctcctcatagttagctttgttaatctgtacactagcatcattgttgatgtacagatttttagcatttgacctccgaattctacctgccactaggaagaactgatcgaacagttcaaataattttttaagctcttcgatggttattatatttataccgccgccaatgccgaccaacaaaactaccagtttcaatggtgtggctgttgtggaagaaacaaaatttttaggcaatatacaattcatctatatatacacctggagcttggattgaacgaacgtgagaagagtggctgagattatgtgcctaatttcaactccattgatgctcgccttggaggaagacagcgacttcagtggtggtggctaatagcgtcagcttttgggtgagacaaatcactttgtgcgggtcgccggagctagtgaatgaagttgggaaggtggaggcgtggagctgttgaagtgtaaagcaggtagggtttgaatgatttatttaaacattaaatatgagctttgaaattaactttacatacat

SEQ ID NO: 373091 - DNA, 745 bp, Cannabis indica
tcatgttccgtttgttgagctcgcagggtcatcagtacgtttggaacgtctgcgcccttaggtaatcgcctcttgtagacatcgcatgttgagctggttgaacctagacatgcgaatttatatcggtttgtcagggctattgggtcgttgggaccaaattgcatcatagagagttggtctctatgctttcgcagaaatatagaggggatactcgcacatgttctgacacatgcgagttggatctaccctgcataatgtgaattacggttacgtggttcgacttaggtcgtactcgcagtatctcgctggttttatcctgggcgaggtctaaacttcgagaagtctctcacggacatttcagctttcattggaaatctgaatacacgtgtcctttaaataggagtctggtctcgagtttctagtgagagaaatctcactataacaccaatcaatggtttcaaatatacatcgatattatgcccgggttgttgcgggcctgatatcattaaagaaaacatgttaaatttcctcttcatcactaaacagggaagaagattgtacataactaggaagacaggccatgaactatgacgactacttagagatctacgttgatttactccatccgcagacagaccgagacgaatgtgtcttggttcagatttgaattcagggtttatgtagtttacttttttccaagcttgggaatctgcaggatgtctgagttttccatctttcactctct

SEQ ID NO: 373092 - DNA, 706 bp, Cannabis indica
ataggtggctccagtgtttttcagaccaaatggcatgactgtttagtagaagtttccgaatggggttcagaatgctgttttctctacatcttcaggagacatctgaatttggttatatccgctaaacccatccatgaaagaacacatctcacaatttgttgttgcatcaattaaagtatcaagatttggcaatggaaagtcgtcctttggacaagctctattaagatctcgataatcaacacagattctcattttcccattctttttctttactggcactatgttagccaaccatatcagatgtttgcatgtgcgaataaatcttacttttagtaatatttcatttctgccttgatttgaagttgtacctttggcctgtaattccttgaggttttctttactggtttcgcttcctgtagtgtgcttaatttgtgagtgactagtttaggatctagctcaggcatatcttcgtatgtccaagcaaacacatttcgatatttgtataatagctccatcaattcagctcgtataactacaagtaagtgttggaaattatttgctgaatctccttttgctgataatctttctctaatcactaaggtaatttcgaaattcaaaggaagaaggaagagagagagtggcggctagagaagagagagtgaaggctcaggtttttctgattcagaaagtgtaattttcctgaagc

SEQ ID NO: 373093 - DNA, 976 bp, Cannabis indica
cggagtcacctgctcttcctcggcctcatcttcaggatttaaaggctcctgagcatactgtttggctctggcacctcctttcaacttagcctcgctcttaagttgaataagctaattctccttatgagctcgttcaggccggccagcaccagatttcctcttcttccttgtcacggacttaggagtaaagtcctggggataaagcccgtacctcacaagattatcatcggaggtaaactggataatattctgatcttcccccggcaatcaggcaagtttttgagctctatccctaagagcaagagtgaggggaggacggtgatatgccggaatctgctgaaaccgagtctgggtaatgctcggatccttcaccatgaagtactcatcagtaaaacgccctatttttctgatggccttgtcatccatgccggtcaaccacttgaagcctgactgagagaaatagaagtaccccgacctgccttttttgggggtggacttcaaatcaaagaaccaggcaacctcgtgaggagaaggagtaccccatccttgggaagcgtaaaggacgaagagggcagacaaatacttaatgcccttaggagtgaactgggccgggcagagaccgaagaagtccaccacatccttgaagtacttgtgcaagggcatcaacgctccttgctgaccatgggcccccgaccaggcgcacatccccttgtcagggtttgtggcacgattattgtgggcaggaatgtagcagtccagctcgcccaggtacccgtcctggtcaagagttcgaaggcacgcctccgtaatcttggacggaggcgttacccatctggcgcctaaggcaccctgccttctatgaggaaccgccgcagcaagctcctcactgacgtagtcaacgccctcgaccagaacgtctccatcagcatcgactggctgcccaacctcattctaccccccgtaatttgggggttca

SEQ ID NO: 373094 - DNA, 472 bp, Cannabis indica
ttacacttctccaaaattactattcctctttatatgtgtattccttaagggtacgggattctttactttttagcaactacatttgtgctagtcaggaagaaacactagtagttaatcaattattggtacactgccaaaaactgtatagaactttccataggctgaataagtatctttcttgcaactttaacattcagtcccactggtagaattagaggcttcagataggtttttacacttctccaaaatcactgctcgacccccagagtaatcaccatctcatcaatagactttctagcactaaggcaagtctagaaacatgatttggtgtagtgtaagagtattaaaataccacacttatcgactaacatatagttcctcttcttgatcttaagatttacttgattgtcttccaatgttccattcctgaattaatctgataccaactcattactcccactcaatagcaggt

SEQ ID NO: 373095 - DNA, 1431 bp, Cannabis indica
attgaattccttataaggaaaaataatccgcacgtgcagaagtatgtcaaggctgatcagaatcaaaggggcgacaacaaccaagacttgtcaccaccaccagtagatggacatctacaagtcattattggaggtccgcacatagctggatattcaggcaaagcccgggagaggtatgcttgaacagtacagcatgagcaagaagaagtagtcctggtcgtagaagaaaggaagccaaaaatcccacagccaggggaacccaccataacatttaatgatgaggatgttgtcaagatcaaatttccacacaatgacccgttggttgtggaagtccaaatagccaacaagatagtggccagaaccatgatagataatggggcctcttccaacatcttattcaagaccacttatgaaaagatggggctccaactcaaagatttaacccctgtcttttggccgtatatggtttttccagccaaggagtcgcacctctaggacaaattcgtctacccctcactattggacaagctccgacaagcataactataatggcacaatttttggtattggacgttccctaagcctttaacgtcatgttaggccgactagctttgtatgacttaaaggctgttacgtcgatattccattcatgactgaagtttccaacaaagaatggggtagggtgtctaagagaaaaccagcaggttgctcgggaatgttataaccttgccatagccaaggctaagaaggaagtatcctctagccatagctcggacaagggaaaaaatgtttctaagaagggaacttcccaaggtatggatgaagatgtggatcctcgacttggggacccaagcaacaatgttggacccgtggaagaactagaagagatcgagatcgacccagatattctgaccaggaagcttaaaattgggaaaggttttttgctcgaagtaaaatcagcattgataaaatttttgagagcaaacctggacgtttttgcatggtcacatgatgatatggtcagaattgatccttctgtaatttcgcacgtcctaaatattaatcccaacttccgaccagttcaacaaaagcgaaggctattggacaaagagcgagctctaactctgaaggaagaggtagagaagctacgaaataacaacttcataattgaagctttctacccggcttgggttgccaatcccgtgctggtacccaagccgaacaaaaaatgcgagtgtgtattgatttcacagacctcaataaggcatgccccaaagatttttttccactcccgagaatcgatcagcttgtggacacaatagccggacacgaaatattaagcttcatggatgcttatcgggataaccaaattagaatgcatccaccggaccaagaacatacaagttttcgaatagatatgggtctgtattg

SEQ ID NO: 373096 - DNA, 775 bp, Cannabis indica
ctcccaagtcacaaagagctcttccaacatctcgacccccaatagaaattggaattgtaaagctgcccggatctttcaatttgggtgggattttacttctcaacatagcactacagccctccgtcaaagcgacagtttcaaactcgccaagcctccttttccttgtcaaaatgtcctttaagaacttaacataagttggcattttctctaaagcttccactaatggtatattgatgtggagctgctttaaaacatcaagaaatcttcgaaattgaccatcatcttgttgcttcttgaaccgttgaggaaatggtagaggtggcttttgcaaagatttttctgcagcagattgctgacctaatgctgtaacatctgggggaatttcagcaactgaaattgctggttttttcttcatttccccctctttttggattgaagagggctccttactacctgttgcagccacatttgactcaaggatttttccacttctcaaggttaccgccttacaatgttctttgccatcacttcttgggttttcggtgtcactaggcaaagtgccttgtggtctattcttcaaatcattggccaattgccccaattgaatttcaagattccgaagagatgttgcctggctttgaattacagcgtcattcttgaccatataatctctcattaaactctccaaaagaactagtttgaagagccttgagattggtgtggttgttgaggtcttggttgttgagagaaactcggtggaaatgattgtttcctt

SEQ ID NO: 373097 - DNA, 534 bp, Cannabis indica
cgcacattttgatagggttgtttgtttcatagacctctctgctcgttcagtcgcatcaattgttgcagctgtaatcgaacctttttatcgggcttctgggattggaatcgatggcaaatttagagaagaatggttaaggttttggacgtagccatggctatgtttcctctctacagcagattcacatcaagaattaatggagctttcaatcgtgttggactttgaaaacgttttagggtttaggcttcatcactaaatcgctttaccaaaaaatcgcaaaactcaacagattagtttggattttgaaactaacaaacaaacgaggagcagggagagatggttaacgtcccgttaatgttccgtctgtttttattaaaaaaaaaaaaagctccgttaaaaataatcgttaaactaagaattgccgttagataagacttttaatatataaagatattagattgaaattacatgcattgcacctatatttaatttatttttattaacatattatattttttatttgttttagatttg

SEQ ID NO: 373098 - DNA, 408 bp, Cannabis indica
tgaatcggtgccatattttttttatggaataactcattaattgcgtaaggactagagtatatctgcaacccacagactgtaaagtcttaggcgaggaattgatgtacgaatgggtacttagagtataaataagaaaccatatgtggctaaaaagagaatagtgaggcactagagaagaataacacatacctcagcttacaaataagcaaactgagtgtaaaagtcgaactggctcggagtacaagaatgcgagacgaccatctcgctacgagaagaacttcctgtagtttcatccaactaatggaaggtcgagactcacaaccctggcaagtcaacagatttccttatatctgcaatcgacgtaaacatatcttgtcgacctcaaaaagaaggatggttccagctcgc

SEQ ID NO: 373099 - DNA, 636 bp, Cannabis indica
atctatagaggatctttgactaccaagattgcaacaatggataatcataacacatatatatcttggtacatatagaggggtctatataattaagagtacaattctgaatctatagtggcgtaaggaagaattaacaagttaggaaatttactcggtaaattttagatctacttattggaagctctattatataggcccacagtcccctcactagttgagatagtactgcttgcaaactcagttaattggttttaattaatcaattataattctaaaattagagtatgttttatttatgaattttaagcaaggacttaattgtgaagaaaagagattttggggttaatttattaattaagagactttgcatggtctaattaataaatattataaatgataattttatttgataattaattataattatttagtaaatagttttgacatttataggattgaaactgaaaaatatggtattattgaaagaagaataaatggttaaaataaagtggcgaaattgtaactagttaaaggccctttagtggacggccactatgtgtaatttttgcccattattttattgtttttaatccttataattcaaacctaagccctagttgaaacactataaaagga

SEQ ID NO: 373100 - DNA, 744 bp, Cannabis indica
ccttgtgacaacctttcacctgtctctcgaatatagtttcccttcgtgaccgcatctgtcacatcacgaatctaggggcatgtgttatagtgagatttctctcacctaaaaactcgagactagacccctatttagaggacacatatattcagatttcccaaagaaagctgagatgtccctgagggactcctcgaagttccaaacctcgcttaagatagaatcagcgagaggtagagagcatgaccgaagtctaatcgcatccgagacaagagagtagctcgcatatatcgaactataagcgagtatcctcctcgtgtccatgtataaaccaggagaacgactctccgtaaatgcgagttggtcttaagaaccctacaacctttataaagtaatatagactggcgtgtctatatcagcccgtcatgcgatgtccacaaaaggcgactgcctaaggacgcagacatcctaaacataaacgataaaatcgcgagtatatcatcagaatatgaacagtcaacttgcagatttggaagacgcatgcgttgataaacttagtcactgccgttcatttattaatgttaacgttgtttagttaattattgtaattcaatgtgtaaaaacggattgacaatgaatgcaatccttgtataactaattgggcacctgctttgtatataaaggggtgatccaccgtgaaatggcacctacgaaactcttgctacagtggactaagcagactgtgat

SEQ ID NO: 373101 - DNA, 524 bp, Cannabis indica
ctcccctgctaaagcctgacgaaggaggggtaggagccccgccactcactagagtcctaaccgactccgacatacatccaactgctccttcattcgtagtgctgtctccaccatctcagcatagatggtcttgtcgtccgtagtgatcattaggtcatgcttgatcttcacattaagtccatccaactatttttcctttttactgaaatcggttggcacaattcccgaggccaacctctccaaccgatcaaactgagttgtgtactcggtcacactcatcaaattcaatatcttcgtaatcactattagccactgctcggcttccatgacgtccggacctcccagaaaaactggaggtgcctgctcgcagaaccttccatacaggggttccattctttttgccgctactacttgttcggcctggaccacaggggcaggtgccactggaacttctggcaccggcactgcaggagcaccctgctacctcaacctctggatctcatgatcttgctcctctattctgg

SEQ ID NO: 373102 - DNA, 881 bp, Cannabis indica
tcggttcaaaaatgtcatatcaaatgctaaatactttttttttacttattgtgtcgcttataaaatgaagcacaaatagtaaacaacactcaaggttaaatatctactgttattattattaatattatttatttttaaatttagcactaattcagtaacataaacaaacaagagaagaggcaaagcctaatttaataccgtattcaatccaatatgtcattatatttaggtagtggtctaagttttttagatttactagacttgcagcagtcatcctttccatcaccataggcaattttgcaagatcttttctccaagtcatcttcgtagggatcagaaaagtatttatctttctcttcctcttcctctttacgtgacttccggtccaattccaatcttataatatattccaataaaaattattacaagtataaatcaacctctgcctctggctagcctctaacaaaatttagaaacacatatataacaccgagttagagaaaaatacttacataacaactcgtacacattggactcgagtgatattgccaacattattaagaattcaaacaaagcacatctccaagtaatacatttgagcctccatttagagaaccaaacaatagtcacatcaaaataaggggttccttaaataaaaatcttactgtttacaagtataccattgacacttatttttcttaactattttgcaatgaagtataattttataaagataaatgtatatggtgctttactttcatgtcttacataataaaaatatatgtatatatatgtatgtggcttttttaattgtaattaatgataaagtgttcataataataacaattattttggttggagcagagcaagagtttaagtta

SEQ ID NO: 373103 - DNA, 503 bp, Cannabis indica
tttcccctcgattacaagaacctattataaaaaaaaggtggtgggtataactccggctactgattttagcggagaatacattgagtctcaacgtctattaaggtataaatatgctttctattcattttatttatgtacattggtattattttgttttgtaaatttttttagaatttttttattttattaatattatattgtgtgtgctctagaggtggtcggatttttgtagcattttatcgccggattgcgtttataaggtaaatatttattaacttgatatataatatatatgtatatattttctgtttcattattgaatatgtgtttatatatatgttgtgtgtatatactatttgtgtatttgtattgtatatatatttgttgtgaatgagaatgagaggtagtaggaatttaattagtttagagttaaagtttttaaaataatggtagtggaaattagtaactagtttgctactttgtttaataactagtaagtaatt

SEQ ID NO: 373104 - DNA, 963 bp, Cannabis indica
tgtgctgtgagaaaaaagcagctgcagcagaactgtagaaaaatgttgagctgagtgtttaggtaaattattaaatttacaaagtactgtgagttgttaatatctattataatgataatgataatgttataaaccaagttaataaaaacaaaaaaaaaaaaaaatttattttatataatattttattttctatatatatatataatttttttttttgcaaatataaatttatatgcatttgataaaaataatttatagtaattttatgttatatattatcaaatataataaaaaaaaaaaaatagaaactcaagtacataagaaaaattttaggttgatgttgtttgtcaatattaaaataaaatataaattatttttttttttaaaaaataatagatttaataaatatttattttattataattagtttattttaaatatttttattttttaatatataataaataagtaaatatagtttagtaaaaaaagaattattatagtcttttaattaaaacagttttttctaaaagttgggttaaagcagctttagcttttcgctgtagtttttttaatttttttttaaaaaactcttttttaactgcttaccaaatacatttttattacatctttttcaaaaagtagcttttagctttttttaaaaaagtgtatcaaacgggccttaattatgtttgaaatactttaagattagttaacattggaatattagttaatattggaataagctaatacataatcctaataaaattgactaagattgataccaatttaatgttaatgaccataaatataacgaaaacaaatattgttggttaaattaattattgaatttataacacaataatagtctatctaacgtattatttagtataattaaatattaaaatacatataatttaatataataatttatataaaatattactaacctaatataataat

SEQ ID NO: 373105 - DNA, 652 bp, Cannabis indica
gcgcatccaattgcgccggtaaaagtgtttttaaaatctgacctaagtagcaaaaaacgagcgtttaagtaaatacttttaccggcgcaataaatacttttaccggcgcacagttgcaccgctaaaagtattctcacttatcacatcaaaatccacacgtttcctttaacacttttaccggcgtaatggtgcgctggtaaaagtattcccacctaccaaggaaatccacgcaatgaaatgaaaggcggcaaacttctcgcgcctattggcacttcatttggtaacttttaccggtgcatattcagtattgcgccggtaaaaccttttaacaccggtgcaataatgcgccggcaaaagtgaagcctaaatgcaagtgggatttcagattttgctctatctcgacaacctttaccgacgcatttgacgaattgcgtcggtaaaaatacattttcttgtagtggaaagatatccaggttcagatattgataatgctctgctacagaaaggaatcaagggctacatatctgaaggaaaggagtcatattattccgctgcacccaatttaaggtttctcaaactttatatgtgtttattttatcgttttagaaagttcctatttagggtgttaatcagcatacttgtgagtagatct

SEQ ID NO: 373106 - DNA, 629 bp, Cannabis indica
atgtcttagctgttccagttaccactgttgcttctgaggcggctttctccactggagggcgtattttagatccttttaggagctcattgaatccaacaactgtggaagctttgatatgtctgaaaaattggtggagccaatcacatcaacctatagttgttcgtgaatatgaggaggaagaagaaagtctaccgacaatcgaagaccttgccattggtatgattatactctatcattatctactatctagtatttttaactttatattttatatagattataattattaaattaaattaagtcattaaattttatactaatagttttgttattaaaattacagatagtactcccactaacaccgccgccactacttcttcagcgactgccacttcatcaatgcagtcaactaacttcacttagatcttagtaagtagtagtaaataataactaataagtattgattgatcatttgcccatatcttctatatatttaagttgatttcatggttcaagctagctaaatcttgtcgtgtgtttccattttgaaatacagatgatgtcctgacggaaaaagagaggagtcgaagccaagtcacccaacaactttcaagtcattatatggactt

SEQ ID NO: 373107 - DNA, 697 bp, Cannabis indica
cattcccctgggagaaacagaggaggactcgatgatgaatacctctgagacaaccaatggtcatccgtccaatccccggttacgagttccactcgtgggccaagaggtaggtgggcagaccttgtctgagaattcatcaggaggagccatacaagacggatccaaccagaataatggagttattccgcctgtcaaccaagcgaatcaaccgttaaggcaaccaagctcttctgtgttcgataggctgggagcgacccatgacctaagggacgatctaaatagaagaaggggaacagacgagcataatactacaacgatcgtgcagcccggtgcccatactcaaaaccccgctcaaaaagacgctgacgtaatccaaaccgaccaaaatgccgaacaagtcagcccagccttagaggcctagcttgacgagttgaagaatatgtttcatggcatggccggacagcgtaacaatgatcttgagttagaccgtgctcgcggaactcccttctcaccagagatcaatctcctgccactgcctcacaagttcaaaatgccaacatggaagatgtatactgggagagaagatcctctttcccatctcaagtattttgagatgcaaatggatttacaaggagtacgaggggacgtatgctgcagaatcttccccgccactctgtcggaagccgcacagcaatgg

SEQ ID NO: 373108 - DNA, 508 bp, Cannabis indica
aggatttgctacttttaacatatgaagatacattggtaactgttggtatgattcatctgtctttcctcttaccaattctatagctttttctcttgatctccaagcttttgagtaactcatagatactccataatcatcaagcatatctttcatgatatcatttggtgtgtgcactctcttgattgtcgtaaattttgtcttgatgagctctccaatgacattgcaatttgcttgtctatgatcctccatgatgacttccaatgagcatgtgtgctctttcacatacttcctaactttgaaatattcagtatgtttgaatgtagaagctctaacataccatttacagttctcatccacacaagtgacaacatactctcttggttctgatctctttgttctaaattgaaagttgttgatcatggcatagtagcaaagtccagatttgaacatttttttatctttgaaaagttgtccttctactaatgtttgcaacttgtgagtttcaatg

SEQ ID NO: 373109 - DNA, 902 bp, Cannabis indica
tttctgaacagcttcgggacccaagaactttctttcacccacttcatcccagtgaatgggcgatctacactttcctccatataaaagctcataaggggccatcccgattgttgcttgatagctgttattataagagaactcgatcaggggaaggtactttacccatgatccctcaaagtcaagcacacatgcccgtaacatgtcttttaatatctgtatagtcctctcagattgcccatccgtctgaggatgaaatgccgtgctgaactttaactcagtacccatagctcgatgtagattctcccagaatcttgatgtaaacttcagatatctatccgaaataatgtactttgggacaccatgaagacgaacaatttctctgacatataactcagcatactggtcaatggagaaatttgtccgaacaggtaagaagtgagcaaactttgtaaacctgtccactatgacccacacagagtcaaattgtcccgtggttctaggcatacctaccacgaagtccatagcaatgtcctcccatttccactctggtatgtttagtggttgcagcaaccctgcaggtcgctgatgtttcagccttcacttgttgacaagtaaggcactttgcaacatattcagcaatgtcgttcttcatgcctggccaccagaacatagcttccaggtcttggtacatcttcgttgaccctggatgaaccgaataaggagtcgtgtgagactcatccatggtctctttcttgatgttctcatccataggcacacaaactcgacttccaaatctcaacattcccgtttcatccactgagaaatcactagcctataactcgggtttttatcaattccgaatcttgctttgtgcttctttaattctttaattctctctagaa

SEQ ID NO: 373110 - DNA, 1054 bp, Cannabis indica
gtgcaccatcaggggtttgcaataaacttgttattttatcatgcaaaaatgagtctttggactcgcctatttatgattattaaaataattattgcaatagactcactaaataattaagcaaaaatgaacgcacgtagctcgccaatttgcgattacttaagaatgagcatagttggcccaaataattatgcaaaaaatgagcacacattgggctcgccaatgaacgaataaatgtatgaagagcatacttggctcctaaatagccatgcaaaaatgagcacagacagtgctcgccaatttgcgattagataagcataatcgtgggcaaaaatgaacactattttcgacttgccaattatttgtgagcgtatgcaaaaatgagcattatagttggctctaagtatcatgcaaaaatgagcacacattgggctcgccaatttgcgattatgaaaaataggtattgcaatacgctcataaataattatgcaagaaataagtgtcatgtttcactctattttgcaaataaaatgagcacatgtaaaatcatagattcaccatgcattcagatatatttctatttctcttagaagtgaacgaataataatgtatcaaatataaaatgattattttgactaaagtattggacttgattaaaataaaggagaaagtgcacctggtaatttgtaggtgttgggctattcgcacatatagcgtccgagcattgattgattccttctcgttcctctaatgtatagtgcctctttacttttatatattcgatatataagagtgtggtatttaccaagtgggccatcgggccctaaaatgagacaaaaaagtcttttgcctttggtaattaattcatcgtccgaaccttttgagtagggttcgattctttcatttttctgagacgttagccagcaaacctttcgggtttgtgcgcccgattgaatcggaatggtgcctaagcgaggcattggccatatttgcgatgtgctaataggtaaaaataattgagcactatcgcgagcttgccatatacttggtattttag

SEQ ID NO: 373111 - DNA, 720 bp, Cannabis indica
cctgcttttgaaattttgtgtccgagaactatgtcttctttcaccataaagtggcacttctcccaattcaaaaccaagtttgacttttcacatctgattagcaccttctccagattctctaggcaatgatcgaatgaagatccaaagattgaaaaatcatccataaaaatctcaatgcaagattcaattaagtccgaaaagatagccatcatacacctttgaaatgtagcaggagcattgcataacccgaatggcattcttctaaaagcaaaagtaccataaggacatgtgaaagtagtcttttcctgatcctccggtgctatggctatttggtggtatccagagtagccatcaagaaaacagtaatactcttgccctgctaacctgtctaacatctgatcaatgaatggcaagggaaagtgatctttgcgggttgctttgttgagttttctatagtcaatacaaatcctccagccagtgactgttcttgtgggaatcaactcattcttctcattcttgattacggtcatcccacctttctttggaactacttgtaccggactaacccatttactatctgagattgggtaagccactcaagcatctaaccacttgaccacttccttcatggggggattgagtctgcgttgagcatcaatggttggttttgttgggttttatgccctaaataaaactccatttcaatgtaatctattttat

SEQ ID NO: 373112 - DNA, 521 bp, Cannabis indica
tagactcgtgtgtctaggttctaccagcttgtcatacgatgtccatagatgcgactatataagaacgcagacatcctaaacttaatcaaatgttaggtccatcttaagcccgcgagcttatactagaatatgaacagtccactcgcatgtcagaagacacatacgttgctgtatttagtgaatagaaactgttattcatttattgatatttacattttttagtttaattattgtaattcaatgtgcaaatggattgataatgaatgcaatctttgtataactaattggacaattgctttgtatataaaggagtgatccaccatgaaatgagacctacgaagctcttgttacagtggactaagcagactgtcatctgactgaattactataatcctttatcttcttgttatttccagttttctagtaagcattcacgttcccagcccgagtactcaccattttaagctgaatacttgcaattgttcttcaaataattttttcttgttattaatattattaca

SEQ ID NO: 373113 - DNA, 559 bp, Cannabis indica
ttcaatgtttgattttacagttttcatggggtcctcttcttaaagatgtgtcaagacttgatgataatggatttaagcaatcacaaaggttctttttttaaatttggttcttatgttcttgagattggaaaagcttttctggtatctaatcaaaaaccccatttcacaaaacaatttatctgagaagattaggcaactaattcaggagggtcagtataaggaagcaacaaattcatggggtgaacttgaaggtgttataagctctaacagcaatgaagtagtacttatgaacataaaatgtggaatcatttgtatgaacattatatgacgtcatgaccttaattcttttcttcttttttgttgttgttgtgatcaatttcaggacttttataactttctattggattcaggaatggactcaatttcatcatcttcaacaacagtacttcaattgtcaaaagagagtgctacaagagatactcaagctatcttagtgtattgagatcatcatatattgcattcattatttacttttaattgtcaaaattataaattatat

SEQ ID NO: 373114 - DNA, 515 bp, Cannabis indica
ggggcattgaagtccttggcgaactgtggaaggatataaggaaaaatggctcggtcgactcaatgagtgatttctttgaccgggccaaaggtttcattaagctcgaggaagccattcagagagtagaaggtgagcaaaagccgagcaaaacgaaggttccttccactggaacgtccgcccaacttccccattattccaccagttcaagtggcaagcgttcaggcaacaaccacaagcaaggaaacgggaagaaaggaaagttcacgccaaacacactgcattcactatcttaactgaagatatagagagtgtgtacatagcaactcagtcgttaattccgtacaagaagcccgggcccatgaagatagatgccagcaaaagggacatgaagaaattttttcggttccatggagactacgaccacgacaacaacgaatgttacagcttgaagcggaaaatagaacttctgatcaagaaaaacaagctgcactgacaaaagtatgtcaaggccaacc

SEQ ID NO: 373115 - DNA, 600 bp, Cannabis indica
tcacatagagcttttaccatgtccgccaagcgattaatctcttttggaagtgataatatatactcctcttcttcaattggttggggtgagtttcgacaacaaggagggtattggtgactccaaccttgaagtgatggatcccaatgccaatcgtaatcaaaatatgccatatcattcaacagatttattgcttcatggcctctccttaacaaaggctctccagtaacctctgctccataatccacccaactttttgtttcatcatcaagtccattatagaagaatatagtaaaacacccacttgagaaattggaataacatctctccccgagctccttaaatctcccccaagcagaatagaatggctcattatgctgttggacaaaattcacaaggtataacattgagatttaccttgtaggtcaaacacattcagtaaaacatctataaacttaaataaaaagaaaccaaattagaatagaattcaactatattaatattaactaaaacagtccccggcaacggcgccaaaaacttgttgtgataaatccaacacgcaagtatacgtatcgttttaacaagtaatactcaggtaagtga

SEQ ID NO: 373116 - DNA, 332 bp, Cannabis indica
aaaggtaagaaactattgaatttgattacattcttgacgtagttaacatattatttaggaaaaatgataaggaattttaattttaggtttttatttgatagtaatgtgttgttttgtgattgtaatttttaacaaaaaaactctcatatcttgaaaaagttcagctcctagtttaattttaaggttttatattgccactgaatgtaacttggaactttacatttgaatatgattgtgtttgctgtgttgtggctacaatttataggaaaaaaatatcatgttttgaaaaaagtcacctgctagttcgatattagggttttatattgcctctg

SEQ ID NO: 373117 - DNA, 672 bp, Cannabis indica
aaactttgctattatctacaggatctataggtacctcaatggtgtcttccgcggcttgggctgcggcggcatgatcgaggattcttggatccaaatctggttcgtctatgtgcggcacctcctcgattctgaggatctcctggcgaggaggtggtgcctccaacaggtagataacatttactgtccttttctccgcgagcttgactgctgtgttgtagcattctcgcgaatctgcttggactcctcgtacagaacctactccagcgggagtagggaacttcattgtgagatgatagatcgaggttatgatcttcatctccttcaggatcggtcgaccaatcacggcattatatgcagaatactggtcgattactgcgaagtcagccattgacttggctgttaccggggcagttcccaaggtgattgggagtttgatcattccttttaatgctatgacgtcgccagtaaagccatagatgctcgacgtcacaggccgcaggtccttctcctgcaatcccatttgtttgaaggcttggaagttcaacagatttactgaacttccattgtcgacgagtatgcggtggacattatctccgccaatattggcgatgataaccagtgcatcggaatgcgggtgatggacccatctcgcatcactctccataaaggtga

SEQ ID NO: 373118 - DNA, 784 bp, Cannabis indica
acacctatttacaaggcttaacagatgagtaagaacgttccaactaggatacgaccatgtaccatgtaccacatgcactcagtatacctccgtactagtgtaagtagggtatggaccgcaccttgagtactgttaagtgttgtaccacaaacaccttgtaccttcccgtacaagtgttggtaacaccacgtcgtactttcagatatcatacactttaccaatgcactctgtaccgcaaccgtacgagtgttggtagtgtatgaatcacaacatataagcatgcatatacactaaacatatacatacattcgcatattcatatcacatattatatacagttcttaccttctttccagattcaaatgaattggtcgacctgaacagaaagtctcgcgctgaatggatgccctaatcacattttgaaatcaagtaaatcacaagttcaaaaccctaaaccgggaaacccgagtctacaactcaaggctctgctatactcactagggataatattaacctaggaaacaggaaaacacccaactacggcactaaaatggacaagaattgagaaaactaattttttggggaaccctgccaaaaccgatttaccagttttacaggtaaaaccgacaaaccgattttataccagtctccctaaaaactcaccaatttgctcaaaacttgcccaattaccaccaaactttccagagtacctaaacaatgcatacacaacatattccaaccagaaattcccaaaaaaaagtcactgaatcaaattatgccatta

SEQ ID NO: 373119 - DNA, 649 bp, Cannabis indica
ttcttcacagtcttacacactatgattgaggacttacttgatatgtgtgggcatggactcaatcactaaggcttgaaattgtttgtgaagagagggtatagtgtttcaaaaattaaagagaaaaagaaggaagaggtctcatcaaacctagagagaaaactagctaggtttttagctttggagacattagttggataatgagaccataaccttccttttatactattctccgatagggttagggttgaattattaggaataaaaaaatgataaaatagggtaaaataacacttgatggccagcgacttaatgggccccagacaagtttgggctttgtcatttttctcaactattttaatctatttttcataaataccactttttgcaacttcaaccctataattgccaaaactatttattaataattaaaataaatatcaaataaaattgtcatttataatatttattaattagactccataaagtctcttaattaacaaataaaccccaaaacactatttcttcacaatcaagccttatcttagtgaaaaattcataaactagacatagtctcattttagaattataattgattaactaaaatcaattaaccgagtcttacaagcagtttgtctgaactagtatgggg

SEQ ID NO: 373120 - DNA, 1254 bp, Cannabis indica
gtgggagcgctaaatatagatattgaatctatagcttctatcaggacatagaggtgaaacgatgatttccgtcgagcttggctaaatagaggtaaatggaagagctcttatttcagtgattatatttcactgaaatatcatttacaggaagctaagtgttttaaggataaaatacattgaggagtgaaacagtaaagttattcctattcggtgtaaatcaactagagaggatctttgattattgagattagaacgatggttaaatgtttgtagcgtatctatatcgtggaacatatagagcattctatatgattgagagtgcaattccaagttctatgagtggatgcaacaacgaattaataagttagggactttacttggtaaattctagttcggcttattggaagttttgttgaataggcccatggtccccatactagttgagaccatactacttgtaagactcagataaattattttaattaatcaattacaattctaaacttggactatgtctagtttatgaattttcactaagcaagggctaaattgtgaagaaaagagattctaggttttatttattagttgaaagcctttattaagtcaaattaataaatatgttaaatggaaattttatttggtaattaattttaatttttaaataattagtttttgcatttagatggttagaattggaaaagtggcatttttgagaaaataagggaaaattggaaaaatacccaaatggggcccactaaccatggccggccacttaaaggttttttccacttaatattttcattattctaatgcctaataattcctaacctaaacctagtggttacatataaatagatagtgatggctcacacttaaagtggatgaaatttcttgtcttcagaaaaattgagccacctgttatacagtcatagccgaacctccttccctctcttttcttcttcaagttttcatacctttgagtgatcgagtgagtgcccacacacatcaagtggtatctcaatcatagtgtggaagactgtgaagaatccagaatcaagagaaggacacttaggctcaaatcttggtgatactctgcgacagacaggatacaagggttagagatctgagcggaaggagacataaatattccgctgcacccaatgtaaggttttctaaaactttatatgtgtttaatttcattgttttagaaattcatattaggatgttaatgaaactacttgttagtaaatctag

SEQ ID NO: 373121 - DNA, 1377 bp, Cannabis indica
aatcagaagaaacctaatcttcgcgaacagcttggtccaaagcaagagaatccaatccaattgcgaataaacgagttggagcacaagttcatgagatatcaaaggggggagggggaaataggtaaatcatcgagatatgactctgacgaggagcttgagctatatcacccagatattatgaataccccatttcctctgagattcaaaaacccgcacgtctcgtcctatgacggaaccacagatcaggtctcgcatttgaataacttcaacatgataatgccagcgagtaacgtgacgaacaatttacgttgtatttgttccccacctcgcttgttggagcagcgagtagctggtttaacaagttcactcgtcattcaataagtttcctggataggcgacccgaagcggcctcgctaaccaatataaagcagcagcctgacgaaacacttaaggcgtacttaagtcattttagcacggctgccgctagggttagaaacttggatgacagcacgcaacttacagcccttcaagcggggatctccactgatccattaaccacgggggcaagttgtgggatgatttacaaggatttccggtaagaaacatcactgagttcaacgagagggctcaggtgtttatccaaaaggaagaagatcgaaaggaaatgaacttgttgaaaacaagctcgggaggtaaacccagcaatgtttcaacagggactgcttccacgagaattgataactcggggtgtctggtacgaaaagaaaggatggaattagggaactgtcgaacgatagaagaaaacaaaagaagcatgacaaatacgtgccagtgtatactatttataccgagcttaatgaaactcgggaaaatatttacctcgcacatgagcagaaggtagctttcaccaaacccgagcctatgaggaattcaaggagcaaaagagatcctaaaaatattgtaaattccataaagatattgggcatacgaccgacgaatgtcaccaattgaaagatgagatagatagtctcatcgctcgaggtcattttaaacaatatgtgaaaagacagggccagggatacaaccagccctgtcagcctaataacccaaacaaccaggggatacaacctaatcctgtgcaaggagaggacatcctggttatttcgggagggccatatattgcagtgaaaagcaataacgctcaaaagagaaatgtgaaggacataaagaacgagcagtcggtctttgcccagaaccttccaagaaggtgaaaacagaggaaccccctattacgttcactaaggaagacgagatgaacgtgagataccctcacgtcgatccgctggtcataaccattcaactcaccaataagaggat

SEQ ID NO: 373122 - DNA, 691 bp, Cannabis indica
agaaggttgtgatcgatccagcgactcgagctcgtcaagtgctgtgtcttcaggagaggtttgtcagcgatgagttcttgtcgaagattgacaagtcatcttcagaggagctgcttcctcgcgctgcggagttagcttcgcagttcatggctacgtttgcgaaggcttttgccgtagggcccaaagaggttgaactcgcgaagaaacatattgctcagtttcaagaagacattaagaagctgaaacaagatgcgtcttctaaggccaaagaattagaggaacttcgtaaggccaaggagcaggtcgagcttgaagccaaggcgaagattgaagagatgtctcgcgacctggaaactgagaaggagaacggcaagaaacagtacaaccaggcggtctttgactacatctatactattctttccaaagttccagacttcgatttatcgatccttggagcggaagccgcagaaatggccgaagcttttcgcgctatgtcacccacaccaactcaaggtggtggagggaaccttctcgaggagaccgaagtcgcggaggtggaggaggtcgagaacgaggtggccagtaaagtcgcggatgaatctgttcctgctgctcccaacgcttgatttttcccttctatgtttgaactatatttcttttgaatttgctagttttttttatgcggtacagg

SEQ ID NO: 373123 - DNA, 670 bp, Cannabis indica
aagacgctgacgtagcccaacccgaccagaatgccaacgaagtcagcccagccgtacaggcccagcttgacgaactgaagaatatgtttcatggcatggccgggcagcgtaacaatgatcttgagttggaccgcgcacgcggaactcctttctcgccagaaatcaacctcctgccactacctcacaagttcaagatgccaacgtggaagatgtacactgggagagaagatcctctctctcatctcaagtattttgagatgcagatggatttacaaggagtgcgaggagacgtatgttgcagaatcttccccgcaactctatcggaggccgcacagcaatggtatttcaagttggctccaggaaagtttagttcatggaaaactttctcttcggaattccatgcacaattctcttcctcacgccaactcccattgcatctgggagatttggtcgaagtaaaacagcgaccaggcgagccactccgggcatacatcagcagattcatgacggaagcgaccaaggtgtcacgggtaaccgaggatggaaagttatccgcgatactggggggcattgaagtccttggcgaactatggaaggacataaggaagaacggaccgatcgactcaatgagtgatttccacgaccgggccgaaggttacatcaagctcga

SEQ ID NO: 373124 - DNA, 730 bp, Cannabis indica
tttctaactttatatgtgtttattttcattgttttagaattcatattaggctgttaatccaacatacttgttagtaaatctagatcctggtaaaattatttccaacagcttctgcatcggcctgagttaacgcaaatgcccttgttagagcgggtttcgctgcgatcttctgttcttccttcttgagttgggggcaatcccttttatagtgtcctggcataccacactagaagcacccctgccctctacactctcccagatgatgctttttacaattggggcattcaaggtaagtgtatcgggtttcggagctaccctgatgattgcctcgaccctggttccctcggaacctcttgttctgacctgaaccattgaatgcagtaggtgcctttcttttctggttagtggttgagccactacctcccctactaaagcctgatgtaggaggagtaggagccccaccaacaacctgagtccctcgagactctagggtgcacttcgctgccccctcagctcaaagtgccttacccaccatatcagcataggtggttttgtcattggtagtgatcattaagtcatgtcttatctttgagttcaacccgtccaggtatttctctttcttgctaaaatcggttggcacaattcgtgtgaccaatcttgctaagcggtcaaattgagtcgtgtattcaataacactcatatttgtcttctgagtcaactgagtgaattc

SEQ ID NO: 373125 - DNA, 394 bp, Cannabis indica
tcaagttgaactactagatctagccctttcggtacaagatctagcttaggaaattgttattcatggccaaggaacaacaatctaatgaaaatgaaactcacttgaatgaacaaaggcaaaaatactaaaataagcttaaaaattaatcatacccaacatagaagttcatagccattcaagcctcaaaagtctaactcatattcaattttactactaagtacaaacaataataaagaaagtagaaaaagaaaactattaaagaagggtaaaagaaaaatcaaacactaaagtttggtcccctctcctttcttctctgttgtacttctgctgtagttaaagctcctctaaaaaaaatggcagctgcacgttatggaggaagatggaggtgtacttc

SEQ ID NO: 373126 - DNA, 691 bp, Cannabis indica
acaaaaaatacaaagtatggaagttaagaagctaaaaaataagtaaagcgcagagtgactgcccgcccagaaaatcagaagtccatcatcacctaacatcgactttatctcagccataacggccttcccttttccagcataaggatggccgaacaggtgaaatgggctccctcatgtgaatgttgtgttccacgggcctgggcgtggccgggagtttcttcttcctcctcaaaggagccacctgctcagcctcagcctcagcctcggcttcattttcaggattcatagactcctgagagtactgctttgcccgagcacctcccttcaacttagcctcttgcttaagttgaatcagctcatcctccgaatgagctcgttcaagccgagcagcagcagacttcatcttcgtccccgtcacagacttagaagaaaagtcctcagggtagagcccgtactgcaccagatttgcatcggaggtcaactggattatatccctgtcttccgctggcaactgggcaagcttctgagccctatccctaagggtaagagtgaggggaggacggtgatatgtcgaatctgctgaaaccgagtccgggtgatgttcagatcctttaccatgaagtactcatcagtaaaacgccctattttgctgatggccttgttgtttgtcccgctcaaccacttgaagcct

SEQ ID NO: 373127 - DNA, 510 bp, Cannabis indica
aaaattgagaaaatgaaaggcccggggaaccctaccagaactggctagccgattttacacgtacgtgtaaaaccggttacccggtttgcaccagttcactcaagaaatttcatttcttgctcaatcctccaccaaatgcaaccaaactttccagagtacctaattagggtatacacaacatattccaaccaataaaccaaagaaaaactcactgaatcaatttatgccattaaacacctaaacttgagtttcaaagctcaagcttgctcaactcaacctccatagctcaaattcaataaccagaactaataatcaacttaaaattaacataaaatcagaaccctaagcattaccaaccctagcagcccctctttcacaaaatcattacatgaaaccaaattcaaagcttaaaaacaccaagaacaaagaactagggattacctcaacctcaagaactcttggattcctagctgaattccagaaaatcacagatgagaagcttggttcctc

SEQ ID NO: 373128 - DNA, 594 bp, Cannabis indica
cccctctgtcgaaagattacttaagatatgggacagttttcgttcccacgttctgtgtcttttatttttcctcaactttcgctgcttttgagatacttgcacccgatgtttgtctaggagaatccttgaaatttccatctttggcaaacatccggagggggcctctttctagcggttaggggaccctcattccctctttaaatattagggtttggtttgggggctaactgctggattttccttttacagaacaaaatgtctacctctgcatcaggaaccaaatcttcccgcaagggggcagttactctggctaccttggaggaagtgatgaagggcccggttgtccaggagaaatacacgtgtcgatccaatggttaggaggcggatgagcttcgctcaaccttgacctatgcccatcagttggagaagatcgtgaccgtggctggtatcaagtcgtccgcttttggggtttttcactgcatgcctcgagacgaagagacgcccaaccacaactatggtggttttggagcttggagtcagacccacctcatgttcggagccatgatcccacttcaagattacttcataaatttt

SEQ ID NO: 373129 - DNA, 712 bp, Cannabis indica
gcggtgtgggatcgcacagcttacccggtatttccccttacggatcacgggactactgactgtcacacgttcgtttgttgatgggtcgtctaacgagcacggctcaagggcaggaatcattcttgtcacctcgaatgggtatagaattcattcaaccttaaggtttgggtttgaagcgtccaacaatgaggccgagtacgaagccttattggctgggctgagattagtaaaggagtttggtgcgaaagcaattcgttgttttagcgactcccaactagtagtcaatcaggtattgggtaagtatcaggcaagaggattaaaaatggcagcttacctctcccaagtgccaaaacaactccaacaatttgagtattactccatagaacaagtacctcatgaacaaaactcgaatgccgatgccttagcacgtttgaccaccactaaggatgctgatacactcaacgtcatcccagtagagttcctccctaaaccgagcattaatgtggaggagaacgaggaggctaacatggagctggtcgatactcaaataacgtggatgactccacttattgattacttaaccactgagagtctcccttctgataagagtgaagcaaggaagttactgtataaggtaccaaggttcactttgttggatggaaagttgtacaaaaagggatactcaatgccattattgaggtgtgtgacagtt

SEQ ID NO: 373130 - DNA, 1039 bp, Cannabis indica
agatcctggtaaaataaaatccatcaatttattaggttaaatttgaaaatatggtaatattgaaaagaagaataagtggttgaaataaagtggcaaaattgtaactagagattggccctttaaagtgtacggccaacaagtattttttgcccaatattttattcttttttaatccatataattcaaccctaagccctagttgaaacactataaaaggaacatgatactctcactcatccaacttttgtcaacttgactattcaaccaaacctagatgagagagttccttctatagagatttcacctccttcattgttcttcaccatattcaaaagccttagtgatgagtgacgtgcccacacatagcaagtcaagtactcaatcatagtgagtaagacggtggtaaccaaacccgaaggagagaaagagatccaggttcagatcttgatacttgttagtaaatatagatcatggtaaaatattcccaacaaatcaacaatcaaaccctttcttcattgcatacaagccaataaccatctttaaatgctctttgtctttaaaaaactttcctacatgtaactccccgcttggtgtgccacccatagatatataatgctatgatcctcgatgtcttctcttgtatacattttctccttgaatttaccgtaacttgttgaagaagaaaatggatcgctaaatccagtcacattggtccctcgagcatcagtaggaccactagcatcattggtctctttagcattattaggacctatactgttagtggttcctctagtattactggtttttcctagacgacaactactagtaccaggtgtttggcgattttctctacggggcattctttcccgtgtcggtggcctcggtggtatttggtacgatagtggagtcaagttcaaagctacaacagccgggacctctgtaccttggtcgtctcttacgtcatcattgccctcaacataacattcaaggtctagaccatcaaaaaaaccatcaatgaagggcatttgtgctacaatat

SEQ ID NO: 373131 - DNA, 651 bp, Cannabis indica
taactcgcgtataaaattgaatactaacagttcttgagagctaggaaagtactaaacgaggaatcgcgacgccttggtagaagtacttaaacttagaaaatggatagataatataactattcatatgagcaaattaataatatacaaagtgataagatccttaaagtatatttaagtttgcttaaggcagaatataactgttggaaattattttactaggatcttagatctactcacaagtatattgtttaacatcctaagtatgaactttctaaaacgataataaacacatataaagtttaagaaaatcttacattggttgcagcagaataatatgtctccttccactcagatctctaacccttgtatcctttctatcgcagagtatcatcaagatctgagcctgaatgtccttctctttgaatgtgatccttcacagtcttccaatgtatgattgaggtaccacttgctgtgtgtgggcactactctatcactaggagatttcaaaattatgaagaagaaaagagagagagagagggtcggctatagagagaaagaggaaggctcagttttctgaaagacaatcttaagaaactgttatttttgactgagccatcactttctatttataggcaactactaggtttaggt

SEQ ID NO: 373132 - DNA, 538 bp, Cannabis indica
cagcaaagtatcatttttggttttatcatgatgatgatgatgatcatcttctctcgatctcttcatttctcactagctaattctcttctttacaacaaataattgaaaatggaaatgaaataatgtttacaaatgcactactcgtttgttctatatatatagttaacctaaaaccaatccttctcctaataggagtacttaaaatttaaaaataaaaatcaaaatcattcaaataaaaatatttatattacatagtaaaaaaaaatatcattgtcctaatagcactaggaaatatttaaattaaaaaaatcaagttaggtttctgaaaattttaaacaatgtaaaaatcttcaacattaattttgaaaaataaaattaaaaaaaaaaacattacaatgaatatatatttgtaagtttactatagagctaataactcttaaaaaataagttaataaacggctaatgaaattatttgtatgacattattatgtttttttttcaatgaaattattccttgttaaaaaaatatatataaaaa

SEQ ID NO: 373133 - DNA, 595 bp, Cannabis indica
gacaaaagtccttaaatttaacaatctcaatagttcaaagagaatttttaatggccaaaaaatttcaggggacacgatatagtacatgtcaaagttcaggggcaaaaattactaattagccttaataaataaaccttaaaattctatttctttacaatcaagccatatcttagtgaaaattcataaactagacatagtctaactttagaattataatcaattaattaaaattaatttactgagtcttacaagcagtattgtctcaactagtatggggaccataagcttatataaccgagcttccaataagcagatctagaatttacaaagtaaattccctaacttaataattcctccttgcaccactataaattttaaattgcactctcaattatacagaacgctctacatgttccacgatagagatacgacatgaaaatttaaccatcgttctaatcccaataaccaaagatcctctatagattatttacaccaagtagggacaaatttattgtttcacccctcaatgtattttatcctcaaaacacttagcttcctataaatgatatttcagtaaactaatataatcattgaa

SEQ ID NO: 373134 - DNA, 632 bp, Cannabis indica
acaaagaacttatcaatcatgattataaacataaaaaccagtttcacaaaaaaccgaaacaaatcaaaccaacaaaaccgaaaataacacatgatttgggcaaaaaaacaaaatgataaaataacaaacattaaaaccaatttgaaaaacaacctaaaaatgaaaatcataaatatgggctaaagagggatactaataataaagtctacaaatgaaacttgaatgaaaaattaaaataaaaataacagataatgaaaatgcccaaaaataaacaaacaatgaacacaaaaaaaattctaaaaatcgaaactacctaaatcaacaaataaaacacaaattaaaaaccagtttctagtacttactaaaagtttatacctaataccaacacaaatcatacccaaaaaaaaaaagttaaaaaaagacaacaacaacaacaacctgatgcttaaaaaattaaaaaattaaaactaaacaacaaaatactaaaacataaaaccaaacccaaaacaaaaaatacttaaaaaatccattatgaacaaatacaacaacacacaactcacttcggatgaatcatttttaaaaaaaaaacaacaaactaaagacattgatatgctaatcacttaaaagacata

SEQ ID NO: 373135 - DNA, 808 bp, Cannabis indica
aatagttgttcataagttgttttcaagtaaaataatagttgtttgggatctgcaaacgagaaaagatgaattcttattaattactgaatgcttcaaaatagttgtttaatagttgatttgacagatttaaatagtcgtccagatcaaaatgttacttgcaaaagttgttgctagaaagagttgttttttagttattttgacagattgaaatagttgtttgcaactactgaaactgaaacaagtaaataatttacattatttcaggatacggaactattacaaattttggtacaaagcaatgggtattgggatgacaacaaaaactatgttgaatatgaatcaagtggagaatcaatttccaccaactgcacttttgatgaactactgagaataatgatggaagaactccaatgcaaccctgaatcaatacaaatacaactaaaatatcaactgaaggaaggaggccaaccactacaaatcaaggatgacaaaagtctgttgttctacataaagctattaaccaaagaggttgatttcacaaggtacccattgtgtgtgaacaaaatcagcaacacagcaccacctaaccaaacaatggtgtgcaacaatatgatgatggcatcgtatgacaacaactcagcacaggcagatttgcagcaacctggaaacaacccggcaacaactatctgcgcacacaattggatcagttcaagatgatacattttttttagaaacagggaccgtgacatcagaatcaaccatacaacaaccagaaaacaacagagaaaaaactacagtagtagatgaa

SEQ ID NO: 373136 - DNA, 653 bp, Cannabis indica
tagtctgagtcccagatctagacaccgactactggtctattccaggctccgttactcgaatctcgagtcaagatctgcatcactgtcacgggtctcggtctagttttggttcaggtccaggtcctttttttgagtttcggttcgcgatcgagactagggtgcaattctaggtcccgaccctggttttgtgtccctagtctggttccatgttttggtcagagttcaggttcgggtttggatcccgagtccagatatgggtcgggacccgggtctggctcccaattcgggtctaggtttgatttggagtctgggtcctggtccggttacagttttgggtcgaggtcaaatttcagttatgattccaagtccaagtcctagttccagttcttgtcaaattccagttttggttccaattttgggtcacagggtacgggtttggggcaacttttgtgtttgagactaggttgaggtctaggtgtgggttcaggtccttgtcaaggttcgggtccagggctgtgtccgaaatccagacacggactatgggttttgtccaagccttgggtcctgatccagatcccaatatcgggtcctagttttgttccatttctggtgccgggtaacgagctgggtcctaggttcaagttcgggtctgg

SEQ ID NO: 373137 - DNA, 1089 bp, Cannabis indica
atatgccaatcatttttgattcggtattaccagcaaagcatggaatggctggtactcaagtggaaccattgcatggaaagatttggatccaagaaccttcagactttcagggaggttcaaatatgaagaatgcttcttgggctgaaagccctgaggaaattattatgagacctcaggagattatggtagagggtcagaatattacctgcctgaatccagattatggtgaaagtggtaggagctccatgattgagcaaaagaggaaacctacgtcatcagtggtgggtttaagacagaacaagcggttccgaaggtttcaaggcaagggaggacgccagggttattcttaccctgaatgcccacgttgcatgaaacaccatcccggagaatgcaaccgaaaggtatgttttcaatgtggcaaggttgggcattttaagaaagattgcccacaggtggagaaagaagaacaagagcagaaagcggtatttgttcctaccccggtgaatgctaatgctcaagctgatgatgcagcaagcccttctgtagtggcaggtcagttccctgtaaacgacttcttttatattgtgttgtttgattcgggagctacacgttcatatgtagctatgagaataattcatttttgagtaggccttgggatattttagaaagagggtttggaaccctaatgcctagtggggaattggttatctctaataggcgcattaggtctatgccgattaggatcgaagatagggaattgagcgctgacctcatagaattggaattaactgagtttgacattatactgggaatggattttctgtccaagtattcggccagtatagattgtaagcggagaatggttatttttcagccaataggtgaagatccatttgtttatgttggatcagttcaggggtctcggatcccggttatttctgtattaagggctagagatttactatgcagtggttgtgtaggatttctagcggtggtaattaactccagcagacctgaaacatttgggcctgaggtagtcagagtggtaaaagattttctcggcgtgtttcccgaggagttgccgggatt

SEQ ID NO: 373138 - DNA, 468 bp, Cannabis indica
agtgtagatctcccatccactgggatgagacaggggagaggaagtacttaggtccggagtcagtgcagcggaccgatgaggcaatagagaaaataaaagctagaatgcttgcctcacagagtagacagaaaagttacgcagatcaaaaatgcagagatgttgagttccgagtaggggaccatgtgtttttacgggtatctccaatgaaggggatcaaacgtttcgggaaaagaggcaagttatgccctagatttataggacctttcgtgtaaagaccgcttagtttaatttggaaattagcaattaatcacgtttaattatcggtttattagacattgggaatgtcgggaatggccgagaatttagaattttgtcccattgttattttgtcttctattgattttaataattgaaaaatatatgtttaattgattactatttggcagaaatgaagttgttatatgatga

SEQ ID NO: 373139 - DNA, 601 bp, Cannabis indica
cagaagcagacatttttctattctgtaaaaagagtaagattccagcagttaggccccataccaaaccctaaattaagaaaaagggaatgggggtcccctaaccgctggaaagaggccccctccggacacgtgtcacacaggaaaccctgaaaggattccctggacaagagtcgggtgcaatgaattcacagaagacggctttacgcgataaagaaaacagaaagaaaaaagtctgtcctatgccctaagcaaccattatacgaagaacgtatggccttctacacaaaagaaaataataacaacagaggcgtgacaatagcaatcctatcactagagcagtaaactcaaacagactatatgaaggatttaaacacttgcatgcccagaaatttcgaatgcaaacccagaaaagaacaaacagataagtaatagcatgccattcaataataaagcaaaggatgcaaaaaacttacgatgaagtgttgaactgggggtcctgctgcgagtcgagtaaagacaagaaggactggtagcaacgagcgaagaagaactggaaaaatcgcaaagtgtttaaaggccatgttctaggtctgagattttc

SEQ ID NO: 373140 - DNA, 576 bp, Cannabis indica
tgttattttctgaatttgtgtgtgaatgtattgaaccaaatgatttacttctgtttattgatatttgtagtgtcaaaatgaacaacccacaccccaacccactcctagtcaatgcctttgacaatgaactctttagtgtgaaaatgctccctggaaagagcattaactcacacctgttaatgattaatctgatattccaaaaagcaaacttgcttggaataaattatcaaaaaaacagtgtgttcagttcatacttaatagtcttcctccttagtataatggatttattgtatcttatatgatcaacaattttaactctcccgacatggataagctagaagcagaattgcgagctcatgaacggaacttgattgcaatactgcctcccggttttgcaaacttttgtaagaggaaaaggattaaggatgaagcttctaacaatgctgcttcttcaagtacaattgatggtaatactcttcaatgttcaaattgtgatgagaagggacatcaggaagaacgatgtcccagatttctaaacaattcgaatgaaggtaatgcttttgtctttgaatcatg

SEQ ID NO: 373141 - DNA, 563 bp, Cannabis indica
catatcgtttatcacttataaaaaaaagactcattgtcgttggctaaaagagaagtcaacattttggtgctttcattgagagaaggatcgcagatcgctctttttgacattcaacacgatggtgcaaactcgtagaggcctgtctgatccagcaaattcacagacactggatctgacattgcacgacccagggagttcaaaggttccacttgctgtcaatcctggacagacgggaagtgtggtgaatggtgaaacagctcttgttactgaaactgcgcctggtgtgcaagagactgggaataatagttccgcacacagccagggcattcataacacgactattccgctaggaaccaatgcccaaaggacgatcggagatgcaaccgaattgcaaaatctccgtgctgcgctctaactcatgcagggtcatagcaacactctgcatcatgatcaggatgaactgcgtgccgcagtaaatcttgcgtttgacgaacagaggcgtatgttcgctgaatggagagacaagagatggaggcattaagggctcaccatgcagagatcaa

SEQ ID NO: 373142 - DNA, 1068 bp, Cannabis indica
ttctgggaggaaatcctggaagagccaacaaccggaattctggttcctacaggcctctctgaaccggaattctggttcagtgcaggaaacactaaaaattccataactcgaccaaatcaaccccaaactaattcaaaccttccagacctgttctatacaccctagagaacacattcaaggcaacaaaataactacccaagcacagaaacaaaattcaccattaaagcttcatgtttgagttcaaaactccaaacttgcttaaacctaactaaccatcaataaaacctacttgaatccacataattaaacatatttaagcttctaaaaacaacaacaactaatcacagcaaccacaacagcaaaaacccaattcatgcaaaacatccctttttcttaaagctcaagaaacttaaaaggatagtcatgagcttacctagagcttggatttccctcaaaatctgcttgaattcacaaagaaaactccaaaccccagctgccctaggattttcgagagagagatagagagagagagccttgaaaatgagttgattttccttttgttttttgataaaatgataaaaatgacttgtttacatgatatactcagcttagtatctacttaaaaatctgattattaacttaaaataaagtccactaaaggacaaaacacaaatgggcaaaagaccattttgccccttccacactaaaaggcataaaaggtcactaagggtattttgggaaaactctaaattcccgactaatctcgacattcccaaagtctaacactaccgccccgctatactaaaatactaaaatgtgattctaccgagccatacaccgcgttccatgttgccgggcactgaacatgcaaaaatatgaaattctatatatgacatataaaatacattctgaattcaaataaatcatcaaaaataattattttaatatcaataaataattttcataattaaccctaattatctgctaatttccaaatttaaactaagcggtctttacagtcaagataagatttttgatctttattgaaagtaaataagattacaatga

SEQ ID NO: 373143 - DNA, 589 bp, Cannabis indica
tcttgaagttcttcttccatccctggttgctccgctacatcttcctcttcaaagtaaggaagaaaatcatactcttattcttttatgttccaattccaagaatcttcttcatcaaacttcacgttacgactaatgatagttttcccggtaattgggttgtacaacttgtagccttttgatcttgagtcatatctaatgaagatgtacttctcacttttgtcatcaagcttcgttctcttctgatcgggaacatgaacataagcaatacttccaaagactatgaggtgagaaattccaggttttcttccactccatgtttcttgaggtgtcttctcatgtacacttcttgttagagagcgattcaccaagtagactgtgcaagctatcgcttcagcccaaaactcctttggcattcttttgcttttgaacatgctgcgagccatgttgagtatggttcgattcttcctctctgccactccgttttttttggggggatcttggcactgttaatggacgacggattccatgatcctcatagtatttgttgaactcatttgatgtgaactctcctcctcgatcaaatctcatg

SEQ ID NO: 373144 - DNA, 770 bp, Cannabis indica
gtcacccggggctcctgaagaaatttcaccgcaccctcggctcttaaagccttttcaaccatctctgcatatgtggttgcctcagtggtagtaattaccaaatcgtgccgaatcttcgcactcaaaccagctagatatttttctttcttgctgaaatcaattggcacaattcccgctgcgagcttggccaaacggtcaaactttgtcgtatactcagtaacagacattcctttagtttgaaccaattcagtgaactttttctgctttgcagtacggacagcttcgttataatacttagagttaaacaactcctagaattcttcccaggtcatcactgtgacgtcccgagtgagggttattaactcccaccacacgagagcgtcttcctgaaactggaaagtggcgcatgtcacccggtcattaacaaccacccctataaaattgagaatacgctcgatcactgagagccactgctccgccttcattacattcagacctcccagaaacactggaggtgcctgcttctgaaatctttgatacagcggctccatacggttgccaacaacaggttgctctgctggcaccgctggaactgccacgcccgaaaccacttgaggaggcacggcaggaggacccttctgcctcaatctctgaatctcttcatcttattggtggatccgatcttgcatttccgcaaatctttgctcctagtcaggaggagcttgaggtgggtttacagggccaccaccctgagctctgccacggccacg

SEQ ID NO: 373145 - DNA, 836 bp, Cannabis indica
tcgttggaaagctcgttccaagatctatgtgaatatctgtagtataaatgccaattttataataagtggaaattgatttagggattaaccctatacttgtgtatctcgagattgtgactaagattatcgacacttggtcaggagcacccggggatttggaatctccatatttatagaacatcaggtaagatagtagttagcacgtagagatatgcgcaatggcacttatatagaatatgatatatatgagaaactaaaaaccaggattagagttattactctaaagtgagcggtttattggcttagggttattaccctagtaaattgttaatatgtaattgttatgccatgatgtatatagatgtatattgaaattaagggttatgtgttgaaggcataatcagattggactcgataactagaatcgagatgaattgtttaaaggccttattgtaaatagacgtgtgagcgtaacacataggtctatgccatatagacataaataggcatgtgagtgtaacacgcgggcctgtgtcatacagacaaatattaaatggcattaatatttatgtgatgtgttaattatgattattgataattatactgtcttgctgggcttggctcatgggtgctctactgtgcagaaaagggtaaatctgtttctgatcagccatgagtgcgggagctgggcaatgtatgtacatgtttgggccacactagactaagcgggttggagtctaccggtgatgattttttgtaactctattttgctgcttaggtcggctattgggaaaagacttgtaataacattttgtaaaatatttttgggatcccaa

SEQ ID NO: 373146 - DNA, 766 bp, Cannabis indica
gttatcctggccgtggaagaaggaggcccaaagttccacgagcaggagagccgaccataaccttcaacgatgaagatgctgtcaaaattaaatttccgcacaacgacacgctggtcgtggaagtccagatagccaataaaatggtggccagaaccatgatcgataatggagcctcttccaacatcttgttcataaccgcttatgaaaaatgggactccaactcaaggatctaaccccatgtctccagcctgcctatggtttctctggtcaaggagtcgcacctctaggacaaattcgtctaccactcactattggacaagctccgacgagcatgactatcatggcacggttcctgatactaaatgttcctttagcttttaacgtaatgataggccgaccgactttgtatgacttaaaagctgtcacatcaatatttcactcgtgcctgaagtttccaacaaagaattgggtagggtgcctaagaggaaaccagcagtctgctcgggaatgttacaaccttgcagtggccaaggctaagaaggaagtatcctccagccagagcacagacaagggaaaaagcatttccaagtagggaacttcccaaggctgggatgaagatgtggatcctcgacttggggacccaagcaacaatgttagatctatagaagaattagaagagatcgagatcgatccaaatatcccgactagaaagctaaaaatcgaacaaggtttgttgctcgaagtaaaatcagaattgataaaattt

SEQ ID NO: 373147 - DNA, 1274 bp, Cannabis indica
ttgatgggtctttcgttgaagactaggtatggtgggcaaacgttgtgtgcagtggcactggatgcagggagtcatatctttttgatagcttttgctatagttgacagtgaaaaccacaattcctggacctattttatgagaaaattgaaagaaatgatttgtgatgttgagaacttagcctttgttttggataggcatcaaagcattgttcgtgcttcgaatatcgtgttccctgatgcacaccacagtgcatgctaccaccacattattatgaacgtcaaccacaagttcaagactgacgtcttcacaaataacatttacacgtgtgcctacacgtattcaagatcagagtttcacagagaatttgagaatattcgggcaatgagtgttgcggttgcacaatatcttgaagaaattggatttcagaaatgggcctggtcgtactttccaggggtacgttacaatgtaatgacgagcaactgggcttagagcttcaacaacacaactaaggacgcaagaggcttctcgatcactgctgctgtagcatcctgaggtccaaagtccaaaagtggtttgcttcacgaaaagaaaaagctgacaagtggacgaaacccctagcaccagaaatgaaggaggacttgacattgcaatttgaaaaaggtcagtatttgaacgttgactcatgtggaccttacatgttgcaggttcaccctggaggaacagttcagaccggtggcgtaatggacttgtaggaacagacttgcacttacggcttgttctagtgcatgaagtttccttgtcctcatgcatgtgctgcatctcaggagcgaagtattagcgtgtacacactatgctcgccatattacacaacagaatattggaggaggacatatgaaggtacaattatgctagttggtgacgaggatgattgggaattgcctgatgacataaagaacatgccagttggagtgcctgttaagtagcaaccattagggcgacccaagaagcaaaaggttggaagaatcaagaacaaccgaactgcttgtaatggtgaaaggattatcaaatcacgaaattgtagcaagtgcggtgccaaggggcacaacagaagtacttgcccctaccgaggttaaaaatgaatgttgactttaatattattatgtgttgtactattcccattatgtattccatgaactgcttgtactgttatgtgttaaacatggacttttagtttttttttgagtctattattgtaattattgttgggttttatg

SEQ ID NO: 373148 - DNA, 516 bp, Cannabis indica
tcgaggtcgcacactgatacttcatcgacgtcctccataggttctacgagattttttcggatcccacacggggatccaactcatcttcttcagccatttctggctcaatagtttctcggaccatcaatacgggcaggtgggcagcaacgttatagcattgcctcgcctctccttgatttcccctcaccgtccctatcccaacctccggagttgggaatttcaggcacaagtgccgtattgacgtgactgcaccaaagtccaccaaggccggtcggtcgaggattgcgttgtatgttgtcgggcagtccaccaccacgattggcagtacttgaaagtgctctagggtgtttctgggcagaaggtgacgggaagcctcacttttcccattgggataagtatttgttccattgaaccccgtgagttttgaaccacttggtgagaggtctcggtctgttaggcctattgtagtgaaggcctctttgaacagcaaattcacggaactcccattgtcaatta

SEQ ID NO: 373149 - DNA, 885 bp, Cannabis indica
cccgaataagcatccatgaagcttaatatttcgtgcccggctgttgcatcgacgagctgatcgattcttggaagtgggaaacagtctttagggcacgctttgttgaggtctgtgaagtcaatacagactcgccatttcttgttcggcttaggcacgagtacgggattcgcgacccaagccgggtagaaagcttcaatgatgaaattgttgttgcgcagcttttcaacttcgtctttcagggctactgctcgttctttatccagcagtcttcgtttttgctgaactggccgtatattaggatcgatattcaggacgtgcgaaataatagaaggatcgattccgaccatatccgcatgtgaccaggcgaaaacgtctaggtttgctctcagaaattttatcaattccgattttacttcgagcaacaaaccctttccgattttcagctttctggccgggatatctggatcgacctcgatctcttctaattcttccacaggtccaacattgctgcttgggtccccaagtcgaggatccacatcttcatcctcgccttgggcggtttcctacttgggaatatttttcccttgtccgggctctggctggaggatatttccttcttagccttggccactgcaaggttgtaacattcccgagcagattgctggttccctctaagacaccctaccccgtttttggttggaaacttcaggcacgagtggaatattgatgtgacagcttttaagtcatacaaggctggtcggcctagcattacgttaaaggctgaaggaacatccaatatcaggaattgtgccatgatagttatgctcgttggagcttgtccaactgtgaggggtaggcggatttgtcctaggggcgcaactcctt

SEQ ID NO: 373150 - DNA, 611 bp, Cannabis indica
agagacagtgtctcgagattttttatgacttctggaaagctaatcctgacgcaaattttgattacttaggtgactccaaagacatgtttctcgtgtactgcgcttctcaggtggctcatggtgaacccaaggcgaccacttctacttctggccagaacgttggcgtgccccccgctcagacaacagatcctctagctcctactggccctgaagacccgaacaaagagcctgggactccagctgtctaaatacttctccttttatctttctttctttttatatatctatccaaccattaggacttttttaagacatcatgatcggccaagcggtctttaaacttggaattattttttattttacagacaataggctgaccaggcaacttttaatcccggtattacatgctttttttatctttaatgaatttcattctctgtttataatcatggtgcaactgtgtttgttttacctttaccaaatgttttgtacaggtataggtgccccccaagtgaccgagcagacttattactcttggtcacttgttttttgcaagtatacttttttatctgtttggggttttgggttcgaccaaaccttttatatgcact

SEQ ID NO: 373151 - DNA, 831 bp, Cannabis indica
ctcttgaattgaaaattaaagaacatgagactgatttttgtttaaaagatgaagaaattattctattaaagaaggaacttgaaaatttcaagaaaaatattcaaatgcttaaccttggatcttctatttttgaggaagttcataatgcaggtcaaagaggctttgctggtcttggatcaaatggtactaaaagttctggaaaaaaaaattgtaaaatctaatgttctaaccaatttacctgctgctgcaaatttaagatctgctgctacaaaaatgtcatctgcaaaagcaaagtctccagtaagttcaaaaaggataagatatcatgtaagaaggtttgttccaatctgtcatttttgtggtattaagggacatattcgacctaaatgtttcaccatgcaaaatttatacaaaacatgttattttggtaatttgaaaatttttcaaaagaaacatagtgttttgaaacaaaaatggattgaaaaagaaaatgtctagctggtttttctgataaaagtgctgcttctcaaatgtggtattttgacaatggtttttctagacatatgacaggtgacaaggatattttagtgaatatcagaccaatgcaatgtggtgaggtcacacttggtaatggtttaacaggaaatggcattagtatgggaactctcaattttgaagggttactaaggttgaaaaatattatgcttgttgagggactaaagctaatttacttagcattagtcagatttgtaatcgagggtataccgtcaattttgaccatgatcattgttttgttcttaacagtgataaacaatgcattttacaagggtt

SEQ ID NO: 373152 - DNA, 875 bp, Cannabis indica
gcatggtcacatgaggatatggatttaatttcacatgtcctaaatattgaccctaatttttggcttgttcaacaaaaaagaagattgttggacaaggagcgagccctatcgctaaaagaagaggtagaaaagttgcgcaacaataatttcataattgaagctttctactcggcttgggttgcttatcccgtagtggtacccaagccgaacaagaaatggaaagtatgtattgatttcaccgacctcaacaaggcgtgcccaaaagactgctttccacttccaagaatagatcaacttgtggacgcaatagtaggagacgaaatattaagcttcatggacgcctattcagggtacaatcaaatcaagatgcatccaccggaccaagaacatacaagtttccgaatagatatgtgtctgtactgctataaggtcatgccgtttggtctcaaaaacaccggagctacataccaaagatttgtaaacaagatgttcaaagatcatatcggacgaaatatggaagtgtatggggataacatagtcgtcaaatttagaaaggttggggggcatatagatgacttggacgagtgcttcaaagtcctcagaaaatataacatgaaactcaatcccctaaagtgctcctttggagtcggctcgggtaagtttctaggctttatcatcaatgcctgaggaattgaagccaatccagagaagattcaagccctcctggatatgaaatccccaacaaaaaccaaagaagttcaaagtttgactggtcggattaccacactcagcagatttgtttcaaagtcaacagacaagtgtgtcccattcttcaacattctgcaaggaaataagcaatttgaatggatggagga

SEQ ID NO: 373153 - DNA, 485 bp, Cannabis indica
cggtatcatattacctttcatgtacatataacacacctttattttcagttcatacacaagagggtctatatccaactcttcatacaaaatatcattcatcttttctaaagtagtgtcaacctcaaacattaacatcttactttttggattattgaatatccagttgaaaccttcaactgcccaagccccatcatatagtacaactacaaacacatttgaatctgcaaaccaaaatgaccacaaattataaaaaaccaagatgtcgcaagatatcacgaacctatcgccacatatcgcgaaccaaatccaaaaaatgtatgtcgacaaacgtcgctaacgtgtcgagaaaaataaaaatatccacaatataacacaataattctatgtatcgcgacttgtgtcgcgacatatcgatacatgtcgttaaatgtcatccctaacctcatgtcagctcttaaatcgtaaatgtcgctaaccatgtcgaa

SEQ ID NO: 373154 - DNA, 675 bp, Cannabis indica
aatggcttcttggtaagtttctggctctccccatcagtcagcattacatactcatgaggattgtatcttgaagttagtttacgctctcttgtggatctccttactggagtctcaactggtggtggtggaggtgcttcttgatcttgttcatcatggttcacctgcttatgaacattataatcaatattctcaccacgatcttcttgttcacttgcttcttcattaacatgttcatcatggttttcttgttcatctcccccatgatcatcatgcactatgggtgaaggaactgagctagtactcacaggaacattagtagggaaattttgcttctgaactttgtcactgtcttcaaacatgtgatcttcttgttcattggatcccataatctgtacccaaactcttcatgactgtaccccaagaaaataaatggttttgccttatcatcaagcttggatctctcatctttaggaatatgaacaaatgctctgcacccaaagattctcaaatgaccatatgagacatctttccctctccatactctctcaggcacatcaccgttcagaggaactgaaggagaaaggttaatcaaatcaactgcagttctcatagcctccccccaaaaggacttaggtagcttggcatgggaaagcatacacctaatcatttcttcaa

SEQ ID NO: 373155 - DNA, 1144 bp, Cannabis indica
tatgcgagtattgtaaatagtataaaataaacacagaaaagtatagtggttcagcaggagcttcgggcttggcctgcctaatccactgttgaaaagagtactctagctctgtttctttattcagatcagcccccctttgaatggagggggaagcctctacttataggtagtaggcatcggttacaaataatggtcataatgagaccgttacaaaataataatgataatgataataattggcttattaatcaaattaattacaacggttataaaatatgtgtaacgtttgtcatgaatgctccttgaatgtttgactgttgactttcgttgattggtgtatgtatttgcgtctttccctattgatactgcgacttcatcaaatatgcgaggtgtgcctttcttaatatagcgagatctcttttagttaatattgcgagatcctttctttcggtactgcgagtactataatattgcgagtcaccttcaatacaacgagttctctatagacaagtctttctcgcggggagggtaaatttatgcctataacacatgcccctagttcttcagtatagcttgctctgtgctggagaacttaaaatagtccaagcccgcgtttgtcgatgatcatgatgccttattcatgttgtgcgtcacattttcgattggttatctaaactcgcaggtttcttataagaccatcgcacaataaaaatgtgaatctcgcgggattcttttggatgtgtgaaccgctcgtggttcatattgatgcatggacctcgcggggttttcatcggtgtatgaacctatcggggttcttatgaaccttgtgaggttctaattgatgcatgaacttctcggagtttgcactgatgtatgaaccttacggggttcaaataaatgcacaaacctctcggggtttgttttgttgtgtgaacctctcagggttcttaactcatggaatgcttgcgactaaacaggtcgcgtatcgggcattcgtgtatgaacctctcgggttcttatttcatggaatgcctgcgactaaatgggtcgcgtatcgggcatttgtgtaggaacctctcggggttcttatttcatggaatgcctgcgactaaacgggtcgcgtatcgggcattcatgtatgaac

SEQ ID NO: 373156 - DNA, 806 bp, Cannabis indica
gatccaaaggctcctgagcatactgcttggccttaacacctcctttcaacttagcctcgcgcttaagttgaataagctcattctctttatgagctcgttcagcctggccagcaccagatttcctcttcttcgccgccacggacttaggagaaaagtccccgagatagagcccgtacttcaccagattatcatcggaggtcaactggataatattcctatcttccctaggcaaccgggcaagtttctgagctctatccctaagagcaagagtgaagggaggacggtgatttttcggaatctgctgaaactgagtccgggtaatgctcggatccttcaccatgaagtactgatcaacaaaacaccctattttgctgatggccttggcatttgtgccggtcaaccacttgaagcctggctgagagaaacagaagtaccccgacctgccttgcttggggggtagacttcatatcaaagaaccaggcaacctcatggggagaaggagcaccccatcctaaggaagcgtagaggacgaagagggcgaataaatacttaatgcctttaggagtgatttgggctaggcagagaccaaagaagtccgccacatccttgaagtacttgtgcaagggcatcagtgccccttgctggccgtgggcccccgaccaggtgcacatccccttgtcagggtttgtggcgcgattattgcgggcgagaatgtagcagtccagctcgcccaggtacccaacctggtcaagagtttgaaggcatgcctccgtaattttggacagaggacttacccacctggcgcc

SEQ ID NO: 373157 - DNA, 967 bp, Cannabis indica
aaggtggttagaattggtaaaagattatgactgtgaaatcctatatcatcctggaaaggcaaatgtggtggctgatgccttaagcagaaaaggacctgatcaaatagccaacatggttatgatttcctctcagctagcctcggaaatgactagagcaaacattgagttggtgactgaggaattatttaatctgacacttcagtcagatttgttagaaagaatcagaatggcccagttagaagatcttgaattggtaaaaatccgagaagatgtcttagcaggcaaagctaaggacttctctatttctgacagtgggatgctgttgtttaaggcacgggtgtgtgtccctgatatcagtgagcttaagaaagaaattttggaagaagctcatactaccccttactcattacatccaggaaccaccaaaatgtatcaagatttgaagccctatttctggtggtatgggatgaagagggatgtagtggactatgtcactaaatgtttaacctgtcagcaaatcaaagctgaacatcagcgaccagcggggttacttcagccattaacacttccagaatggaagtgggaagacattgcaatggactttgtggttggtttgcctagaaccacaggaatgtacgattcagtttgggtcgtggtggatcgttttacaaagtcagcacatttcttacctgttaaggtaacctattcagtggatcagtatgctgatttgtatgtaaaagaaattgttcgtcttcatggggtaccgaagtcaatcgtttcagatagggaccctaaatttacctcaaagttttggatgagtttgcaaaaggctatgggaactaatttgaagttcagcacagcctttcatcctcaaacagatggtcaatctgaacgaaccatccagatacttgaagacttgttacgagcttgtgtcatggactttggagggtcatggagtaagtatttg

SEQ ID NO: 373158 - DNA, 390 bp, Cannabis indica
aagaggagtgaagggccggttgtgttatgtgattgtgctagggttttttcaatcaaagaaaataaagcttttatatgaaataaatggctgtagggttttgttcaaatcaaatctgatttgaaaagggaatattcccttgagatccgcataaaaccaaaagtcagaattgcccttgcttttttgaacgttggtgttgtgtgtagggggcattcttggaactgccagctgtttcctacagtggtatcagagctcggggaagcaagaagttttaacaatacctggaaacaacgtcaagaaacaagcaagatcatcaaaacattgaagaagcaaaatctgaaattatcaagaagttgataaaaaggaaaactctaacctaaactttgtcttgtt

SEQ ID NO: 373159 - DNA, 506 bp, Cannabis indica
aaccatactagctacttgcccgggaccctttctgctcagggcatcggccactacattggccttcccagggtgatagaggatctcacagtcgtaatctttcactaattccaaccaacgtctctgtctcatgttcaaatctttctgagtaaagaaatacttgagacttttatggtcggtatagatttcacacctttctccgtaaaggtaatgccgccaaatcttcaatgcaaaaaccactgcggccaactctagatcatgagtcgggtatcgctgttcataatcctttaactgacgggaggcataagcgatgacccgatcggcttgcatcaacacacaccccaaaccctgtttggatgcgtcacaataaaccacaaacttctcgatgtctgaaggcaaagctagcactggagcggtaatcaacctctgcttcagctcctgaaaactagcttcacacttgtctgaccaaataaatcgctgattcttctttgtaagttcggttaggggca

SEQ ID NO: 373160 - DNA, 615 bp, Cannabis indica
ttgttccgtgcagacatgtctcagaagatgcttgatgctctaaataagagaattggcggaagctctagcgcatctcctccggccaagaagtctagaagcggtgaggggacctcttctaagggaaagacgcctgccggggaggtcattgatctttctgaggagctaacggttgctaacccctctactccaaaagttgctaagtgtaaggagtctcgaggagggagtttggacaggtctgaacaaccgaaaggtggatctgaactgatcaagaagggacccgagcagatgcggaccgctactccacctttgccagtgcttccagaggctaagaaaggcaaggagatgctcgcccactatatgaaccagttggttcctaaggttagtgagcaattggccggtgctgacaatgactcttctctggagttgctgatggatggagttttgaaggaattcacaagggtaagtctttcttgacgatttcctttaatcctctttacttggcccaaatactaagttttttctctgtgcaagccggtctgaagttggcctacacatactcccgggctaagtctgctgcttccaagaacgcggctctgtccaacaccatgagggtgg

SEQ ID NO: 373161 - DNA, 846 bp, Cannabis indica
ataaaaattaattttctaataacattctcattgcgtttcttatcttcttccaaaatcttgatttggtttcgcaatccaggtgtagcatctgtacttctcttaacatgtgatttatcgatccaacaaaagtaatcacatcctcgactttcatcgttctcctgagttgaaaataaccctattagtttatcatggctgcctaagtacagaaaacataaatgagaagtacttttgaatctaaaaagacaaaactcttacatagtgtggacatccgaagaatcgacgaccaggatttgctctactactagaagtccaaacataagctagatcaccacagtagcaatgggggtgtccctgaagtgaatttctccaaggcggaccacccccatcgaacccgcatgagtcttctccaccaccagccaccatgttcgatgtactataatttgtgaggtatacaatttttttttttgttctaactatggtggagataatgtgtgttactcacaaggaaagggggcacctgtttatatataggctgttccaaatgagttagtggtgggaaaatgaatattttttttaaaactttttcacattcacctttaacttgatcaatcttggtgccaaaaaaaaccccaatttcaaagcctaattcgtacaacataatagggcatggctgattgtttcgttgggaagcgtatcatgtcatgtcacaagcagtcctttattttaaaataatattttagtgctgtgtgaattgacaaggtacatcgagtgaacagtgtacgtcccatattacactgggatacacttggtccatatcatcatttctgtgggactgatacagtgaac

SEQ ID NO: 373162 - DNA, 539 bp, Cannabis indica
acaggaaacagaactgtagaccagtgctatgctgtgtgcaataccatagtgtgcaacaggaccttcttggacaaacctgacttatggcactacaggctgggacacttgaactacagagatctccgaagattggtgaagcttcaagctgtaaagggaattcctgacatgaaagtttccaaggaaagagtatgtggtccatgtcagcttggaaaacagcataaggcatctcatcccacaattaatagacttctcacctctcgtgtgctggaactaatgcatgttgacttaatggggccaatgcagaatgaaagtatcagtgggaaaagatatgtaatggtcttggtggatgactactctcggtttacctgggttgaatttcttagagacaagtctgacacatttggatcattctctgccttgatactgagattgcaaactgagaaagactccaaagttggaaaagtttttcgactaagaatgaccatggaaaagagttcgaaaattccatattctcagagttctgtaatggcatgggaatt

SEQ ID NO: 373163 - DNA, 531 bp, Cannabis indica
aaactatattatatggtagttattttgcaagacatattttaaaggacaaaattgttattatatatttaatattaaaaaataaaataaaaataataaaaatccattacccttaatggcattccttacaaaattggtgggagaagttctccctttcttttctcccttatttaatcaacttctccctttcttaattttaataatgcaagtaaacaaatgtaatggaatgattaccttactattgattcgcattacttattagtaaacatgccattagtagataaaatgtatatctcattcttatttataggaaaaatataacctaaaataaaattaaatattttcttcagtacatataattttttttcttctttttccttcgagtttattatttattattttttgttttacttattttaatttattgttaaagacataaaataacaataatttgttttacttattgttagttatatgaaaataatatttttttaataaatattaaaaaataaataatccaatctgcacttttgc

SEQ ID NO: 373164 - DNA, 588 bp, Cannabis indica
ttttattaatggatataaaaaaaaaagaggtattttcaacttatcccttactaaaataatagcatgttatactacattacaactaattagttttgaaaataaacttgatggtactcaaacctattaatataacctaaaaaataattaattgattattaaagtgttacacaaataagttttggaggtaacgaaaatgtattttaaattatataacataaaaataatatttttattatataaaaaagtaactaattggtttcttatcattataaggggatatttgcggcataaataccatatgttttcggttttatacacttaaatatcacatgtttattttaatatgccaaaataaactaatagatttattagcatatatgatagtatagcctatacgaaaagactattatgtaaataaagaatgaaaatttgtttcaatataccaaaataagctaatgtatgagtataggcatagtatagccatctatggcaaataaacttatgagcaagacatttgatgtgaacaaggtattttatcatatttaaatctttgacaagtgcatatattgtctaagtttactatgtaag

SEQ ID NO: 373165 - DNA, 382 bp, Cannabis indica
ctctctctctctctacctctcttctaaaccgtagcccatagtgaaagagtgagtgcccacacatatcaagtggtactcaatcatagtgtgtaaggctgtgaagaatccaatttcaagagaaggagattcggatcagatcttggtgatactctactacagaaaggatacaaaggttatctagatccttgtaaaataattccaactgcaagaacaacaactaaaactctaattcatgcaaaaccattttcttaaaattcaagaaaacaagagtaggggtttaaaggattatacctttgcttgagatcactatcaactagctgagaattactagaaaaaattccaaccctagcagccctaggaatttcgagagagagagagagag

SEQ ID NO: 373166 - DNA, 453 bp, Cannabis indica
gatattattatgattgatggagtggatagtggagagaaatcaggggagaagaatgtggacagtatgcagttaagagttgaaggaaaacaaggagaaaatcaagggattgtttctaaagggataaatgaaggaagtaatgagataatagcacaagtgggtctctttactactgatttgaagaggcgccgtataaatggggaaagtcaaattgaacaactaagtggaaaggaggtgggaccagatttggtacttgaagagattgagaggcccatcaatgtggaaagtaggccttttgaaaatgtcattattgaaaatggcatagaaaaagtggtggaccgtgggcttgtttctagaaatgaggaggggcttttgcaagtggattctgatgaatgcgtggagataaataatggtatttttccaaaaaacgatttattggcgggtactcattttggg

SEQ ID NO: 373167 - DNA, 1042 bp, Cannabis indica
tgaactcactggtgcacgggctaaactgaaattggggaagagtctttgcattacacatctcacctttgctcatgcatctctcatgcaatttgctcttagcaattggcttccaaactccaacaagattgtggtgtctcaagatgtggcctcattcctctaccgtatcacatccggagcatctattgacttggcctcccacattttgaaccaaattgtctcattttgaagagggaaaaagccaacttttaagcttgtgtttccaaatttaatctttaaggttttgtcttctcagaaaaatgtggcccaatctcatgaaactcttgagccttcattgactggaacaacattccaaccctcggagtattttgatggagtttttcaaaagaggcctaaagctggtgctgctgctgctgctgcaagctcgagttctgctgctgcagaaatccaggatgtcaagaatgaggttcaacaggtgaacgatcgtcttgctgccatggaggaagtttagcaagagatgtcaaagcagctgtccaccttggtcaagctttacagagactaagttttttttcttcctttctctttccttgcttttgttggacatattactattttcttgtttgttatctttggcccttagataaacaaaaagggggagtaatattttgatttttaactgtttgtttggaccaactcaggaccctttttccagggggagttgtgtttggtacttgtgaacttatttggtttagaagttagcatgttattttgttgttttaaattttcgattgtgttactcagggggagtagttatttggttatggctaactttaatttgcatgtactttgtgttaaaagatattttgttcatctaaagtgccaaaggaagagattgtaaagtccttttttggcaagttagttgacaaaatatttttttcatttatggtaagatggttttgcatacatacccgaattcttacattgtgttttcggatttagttgctcttttctttcttaggaaatttgcacttttcagctggacttt

SEQ ID NO: 373168 - DNA, 903 bp, Cannabis indica
agtacaggaacaagtactctccgaggacaggctttgattaggattggggatttttgccatgtgttcttttagttttttgaattgcctcctcgcactcgtcgaaccattcgaatttttggcatttcttcttgatgttgaagaaaggaatgcacttgtctgtggatcgggagataaaccagctcaaggcagcaacctttccggttaagctttgtacatctttgtgctttttaggagaaggcatattcaggagagcttcgattttttctaggtttgcctctatcccttgttggctgacaataaatcccaaaaacttccctgatttgaccccaaaagtgcatttcttcgggttaagtttcattccatatcttcgaaccacttcaaagcattcttcgaggtcatctgcatggctggcacatgcctttgatttgaccaacatgtcgtccacgtacacttccatgttctgtcccagaaggcctttaaacatccggttcaccattcgttgatatgttgcaccagcgttctttaattcgaaaggcatgaccaggtagcagtatacccccttatcggtcctgaagctagtgcattcttgatctgcaatgtgcatcttgatctggttgtagccggcataagcgtccatgaaggacaatagcttgaatccggaggtagcgtccaccatttggtcgatccgtggtaaggggaaacagtcttttgggcaggccttgtttagatcggtaaaatctatacatacccgccaagtcccatttggtttaggcaccagcaccggtttggccagccattctggataattcacgtcgcggatcatgccactggtttgtaatttatccacctctttctccaggggttctaccttcactgggtcgagggagcgtcgcttctgctgaa

SEQ ID NO: 373169 - DNA, 647 bp, Cannabis indica
aacgatgatattatggtggaaatatttattagactccaagattgtgccactcaatttcgatgtagcattgtttgcaagcgttggttctcaatcattaattttaattattatcgtcaacaacaaatagtaagacatcactctttgtcccaatgcatcggaccaatcaattttttagggggtctgatggtccgattgatagtgtgcatcggacccctaagtcgcaccatcggaccatacaatcggaccatcggacccctaagtcggaccatcagaccttcaccatcttcttccccagatccgaaacgcctcttctccattcacggacggatccgaatcccattttcgcttcgggtcgcctcagagtggtcgccggttgagcgttgacggtcggggttgagcgtcgacggtcctgggtccaccgtggacggccgtgggttgagcgacgacgtctgctgcgggttggggatttcgtgggttggttgccgtgagtgtaggtaagttgagagagaggaagagagaggctgagatgggatttgaaatgtgaggggtagttttgagaaattagtaaagtggtcatatatgaccaattttaataactatgcatttaggagaaaaattataaggtattttaagtatggaaattcaaa

SEQ ID NO: 373170 - DNA, 783 bp, Cannabis indica
cctatctaccaagaggcattttttgaagatgtgaatgctcttcaaacttatgggaattcatttgatagcccatttgctcagtccgacaatccaaattggagaaatcatccaaatttttcttggagacagaaccagcctccaatgaaccaagggcaccaatacaactcacccaatcagagtcatgcccaacataatatgccatatcctcaacaacaaagaaaaccatctttagaggataccctacaacagttcatgcaaaccacccaacaagatttacacacaagttctcaatccatgttaaggcttgagacacaaattggtcaacttgctactgttgtagctgaaagggaaaagggaacacttcccagtcaacccattcctaatctgaagagtcagtacgaggtaagtacatctagacctattgaagaagctaattcaatttctatccttaggtctggaaaaattattgaaaaacctgattacatatctcaacctgatgctaaaatgaacactgactcgttaaaagaaaatgaaaagagtcagcctgaaagctcacattccaaagactcggttgaaaaaatgagtcaaactttgtcgttcattccaaaagcttcattcccacagagattgatcccaatcaaaagaggtagtcagtatggtgacatcttagaggtattcaagcaagtaaatataaatatccctttcttagatgtcattaagcaaatacctgcgtactcaaattttttaaaagatctgtgtactgcaaaaagaaacaccaatgtt

SEQ ID NO: 373171 - DNA, 519 bp, Cannabis indica
taggactagaactcggactgggagtgggaccgggacccgggactcgggacccgggacccgatacagagacataggacctgagaacctaaccgtgacccagacacagactaggccaagacgcgagacctgcatcggacttggatcctaacccggacacggtcttgtacccagaccgggaccgagacccagacccagacctagacctaggacccgatcccggacccagactcggatctagatagggatctggatacgaacctggactcgaacccagacccagaccgggatcgaaacttgagacctagatccagacccaaaccgtgacccagacctagacctggacccgcaactgggacccgaactcggacctggacccgaacccagacccaaactgggatttggacctaaatctagactcggaccaagactcggaccaggactcagaccccgacctagactcagacccaaacccgaacccagacactaaatcgaaatcgaaactaggactaggacccaaac

SEQ ID NO: 373172 - DNA, 531 bp, Cannabis indica
agaaaagacctttttacccttaagataaattaaaaaaaaaataaaaacccccaagggcaaattggtcaatactaacccgaaaattcaatacttagcgaaataccccgaacaaataacgtacatcaaaatataagatatgactctctaaaggccccaacgccgctttccacagcttctgaacacaacacaaaaattaggtaattaaacataaaatagcaaaaaaacatacctaataataaatatatttccatgatatacatttcataattataaattaatctcatacataattcctaattatttaatgattcaaagcattaatcatatgcggtctttacaattatccccccgttaaaaggatttcgccccgaaatctacctgaacaattcaggatactgagccctcatatcagcctccaactcccaagtggcttcttccactttactatttctccaaagtaccttaaccaatgatatggttttagttcgaagaacctttttccttcatatccagaatttgcactggttgttc

SEQ ID NO: 373173 - DNA, 643 bp, Cannabis indica
tcttccagagatgtagccgtcctctttgagtaccaagaactaatagagaaggagcatactacttattagaacaaggtgtacgagagctcttcccattgcatctggaagaggtagcctttttgactggggaagattcaagtgtagtatcaatcaaagtagtatatagtagatggggaaggacagaagaacccattgctgaagaactgtgacatacacgcatactcataggcaaaattgattgatcagatgacactaagaacagtttagattgtacagagaccaatacatgttcttaaatgagtaaaagtttgagtatctaaagctttagtgaacaaatctgctaattgatttgttgtgggcacatgagatattgacagcatatttgactcaactagttctcggataaagtggtacctgatgtcgatgtgtttggtccgagagtgctgcacagggtttttagagatgtttatggcgcttgtactgtcacaaaagatggtcagtgtgtgttgaggatacccataatcagtaagcattttattcagccatatcaattgagtgcagcagctgcctgctgcaatatattctgcttctgcagtggaaagggagatggactgctgttttttgctataccacgagactaggt

SEQ ID NO: 373174 - DNA, 538 bp, Cannabis indica
atcaaggggaagagctgctaattttagtgatttcagcaaagaaactttgggagattcaagctaaggtaagccctaatggaacccttctttagtttttaagcttttgtttggtttgaggttatggttttgtaatattggggctgttaggtttgagaatgcttagggtttgaattttatgtttaatttgagtttactttaagccctagatattagttttgagctatagtgtgggaattaagcaaacttgagttttgaaactcaagtttaggtctttaatggcataatttgatttagtagttttttttgggatttgttggttggaaaatgttgtgaatgcattgtgcaggtgttctagagagtttggtaaagtttggttgaattttgagttcatgggggcattgttttggttcccagcacagaaccagaattctggttctgggggacctgtaacaaccggtcgaccgattggtgtcccagaacatgacttccggttgggaaccggtctgccggttgggggaattttcggaaccctagtttt

SEQ ID NO: 373175 - DNA, 1391 bp, Cannabis indica
gttccctaagagtgtactcagacagtcaaagctgtgtacacttatgtaggaaccctgtgttccatgaccgaactaaacatatagagattaaataccactttataagggacaaggtgactcaaggtgaaatacaagtggaaaaagttcctactgaggagaacccagcagatatgggaactaaggtggtcactctcaacaagttcaaacattgtatgaacctgttgggagttgacacaggatggtaaatggacacatattcaagcaatgaccctcaaagacagcaacaagtaaataaagcaaaggcagaaactgtttggactgctagtatggaaatttaggtggaatttgttggataaattcccatactattgtcccataaataaagttacaaggaaaataaattagacctctttataaagcctcaacagaccattataactcatagagttgtcggttctgttttcctaggcttaggtcttttatttcttaacaataaaaggaagcaaataaatatctcaagactctaacaactttcagctttacaaggaaaatatctcaacagattacaacaaactttctcagatcagaaacaaacacaacaacaacaacaacattataaataagtggttcaaccttccactttgagcaagataaccattcggccagcagaaggaaaatacaaggcagcccttgttttgttggtaacccacctcagaaacaagagagaaaaatagagagagttagtgagagatattgtatgaacaataccagaaaaataaaagaaagaaaagagagaaaagagcaaagagattaccagctgactttgtagcttggaatctccaaaatccttgtaacccgaaactgatttggatagtgaagaatcaagcgtctttgagggaagcttgacggagatgtactcttgatttcaaggggaactccgaaatcaatctctttgtcttttgcattttatttttctgcactttgtttctttttcgggtctactctcatcaacaaacaaagattattttatctttgttattaccatttttggttgtctatttttctgtgtagggttttataagaaagctcttgaagagcttgaaggagaagaagaaacactaaggtttcggctgggattttttggtgcagcaaagaggagttttcatggctgtagtaatgttgcagcaaggagaaagagaggaaaaaggggtttcggctgggctgtagaagaaggaagaaaataagctttgctagggtttgttcttgctgttcaaagaaaagagaagaaggagagtagaggagtgaagggtcggctgctagttgtgtgtgaagagtgaataatgtttctagggttttgaaaaagaaaatattgcttttatattaaataaatg

SEQ ID NO: 373176 - DNA, 508 bp, Cannabis indica
agacagcagggtgctcctgccaggtgcacctgcccctgctgtgcaggccgaaccagtggttgcagtaaactggatggaacctctgtatgaaaggttccgcaagcaagcacctccagttcttcggggaggtccggatgttatgaaagccgagcaatggctaacagtgattacaagaatcttgaatttcatgggtgttactggaaatgatagagtggtctgtgccacttttcagtttcaagaagatgccttagtttggtgggacatggtgtcaatgatacatgccgtcactacaatacgtgggaaaagttgcaggaacttttcaatgcaaagtattataatgaagcagttacgtgtgctaagagaaaggaattcactctcctgactcagaaagaaaatatgagtgttaccgagtatacaactcagtttgatcgtttggcgaggttggcctcgggaattgtgccaaccgatttcagtaaaaaggaaaatatctggatggattaaatgcgaa

SEQ ID NO: 373177 - DNA, 1757 bp, Cannabis indica
aaaagtattaatatgtatcagggagcgcgaatccccctttcttccccattttcattttgttctcaaacaaacctagccccctctctcgttctctctctgattccctctcaacctctttcaatctttcttaatttctctcaatctctctttatccctctcaatatttaaaaaaccgcaactatggtttatctttctctctctcaactatggttaccaactaaactcaaaatcaaaagaaggaaggaaggaggagcactggtggctgttgcctgctgcgagcctgcgactgggaacgaaaaattattagaaaaaaagggtttaagctaaaaaaatttctgctagtgaacccccaaactggtatgtctaagtctatctaatgtaaaaaaaccattaaatccaatttaatgggccttgttaagcccaaaccgttaaaaaccgtttataaccgcgatcggttacggtcggtttttgatgttaacggtcggttacggttttgtgaacaattacaccgtaaccgcctggcggtttggcagtaggtaaaaaccaaccgtaaccgaccgaatttcacccctatgtatgattatgtatgtatatatgtatatatatgcatatggtatgtgagtgtatgtatatgtgtatatttatgtatgtatgtatttttgtatgtagatatatatgatgttgtatgtgtaggtgagtatgtatgtatgtatatatgtatgtagatatgtatgtatatatgtgtgtatgtgtaggtgagtatgtatgtatgtatatatgtatgtatgtatgtatatatgtattatatagatatgtatgtatatatgtgtgtatgtatgtatgtatgtatgtatgtaaatatgtatgtatatatgtgtgtaagtgagtgtatgtgtatgtgtgtgtataagtgtatgtgagtgtatgtgtatgtgtatgtgtgtttatatgtgtaagtgagtgtcagtgaatggatatgtgtatatgagtgtatatacgtatatatgtgtgtatgtgtacatatgtatttaggtattaaatttttaatttggttttacttttttatgaaattaggtccatgttcgaccgctccggattaccgctagctgtctgcagttgttatttttgcactcgattgaggtatgtttttttttgctttctcttactagctagtagtttttgtttttagttaatatgcttatgcatgttagtgaagtaggttttgtgataaaattgactgttgttggatgggtggattatttttttgttcatatattgtcgtgaaatatttttgtttgtgttatttataggttttggaaatttttggtttacaatctttaagctgttatgctgcctaaattttagtagagataatgtaaaattaattaattgtttaaatgaaataaaattgatttactattaagaataaaataaaaaaaaattaattagttgataaaagaaaataaataaggtaaaacataaaattgaaacatgtaattaaaaatttagtaaagtaatactttttctaaaaaaaaagtattttaaatttaaataataaatgattagaaaaatatttaaattatgacatgtaatataaaatttaaaataataataaagtgatattataaattttaataagttagtaattttaatttaaataataatagattaaaaaataataaaataaaaaaatagtaatatataattaaaatgtaaataataagatattataaattttaaaaagttagtaattttaa

SEQ ID NO: 373178 - DNA, 1060 bp, Cannabis indica
cctaagtttgaaaaataaaattccttcaagtgatccccccaccgggtcgagggcatcctaaatctataaaggcgctcgtcgaaccctacgggcctaagactggcatactcgccaacagaaggaacataatgaactaccaaaggagacttaccgccggcgccggaagtgctggcaccaggagccccagtgttcggctcctgagccgaaggctgtggcctgggagcccttctctccgttgaatccccaatgtgaaggggcttcccggcaatcgcctgactccttctctccaccgggctccccacgcgaagtgtcttcccggaagccgcctgggccttagagtacgccttctcctgggccttccggtagagatactcctggtacttcttctctgccgtggcaatgatctcgtcccggaaggtcttctccgcgaccggcgccctcacgttgggacagataacccgggaaaggttagagtcctccacggattgatgcggaaggatgagttttgccttcctgcagttctccgtagtgaccagacccccgacgtcaagatcagcccggtcgtaagaggcaaaggcctgggctctccgaagaaaggcctgagtaggtgcagtccgttcatagggaggaatcctcacccactcagtaaggagctccggatggtccactgcccggaacccggaggagaagaaaaaacgatggcgatactccttaacgtgagtttgcctgttatacgggaccaccccttcgttagcagggtgggcccggaacccataaaaaccgtccttaagtttgtcccccttcttggggacggaaacaagttcataaaaatacaaaatttccgccgggcggggagatccccatccccgggcggaataaaaaataaataagcctgaaagcaggcggtatgcttggggaataagttggtatggcgcaaggccgacaaaaactagaaaattaacaaaataatcttgaagaggaagcatggccccagccatcagatgcgtctggctccaggccccgaagccgccgtagttatggttgggcgtctccgcgtcgc

SEQ ID NO: 373179 - DNA, 844 bp, Cannabis indica
ttgagatggaaccccatgattctcaacagtaggtttcttggattttttgctcacccctacctatcataacccacgttcgaaaattgtatacccacggtcaaaagtcttttctcccatcatcttctccaactcccttaaccgaactatccactcttttttctcctgttttttttgtttgaacttgtatagtacttgcgatagctcattcttcttcgtccccttatccattgccgaaaaaagcggctaaaatgggtgttaagttcgttgcaagcaaattcaaaagaaaaacgtccagttgttgaggatgatgacccgaactttgttctgctagtagtgaaatgcaacagtaagaagaaatctaaaattaatgttcctccaaaaatttcacccaccgagagtaggaaagggaaggacgaagctaatcatagttcagaggtttgttcctggttttatttttgtttttccccaacattaaaattttgtttatttatattgtgggttgtgtatattcttttgatttcagtttagggtttagatttgtgtagttattataatatttttgtatcgttatttaggggttcataaaatagccgatccaatttaatctgcacgatccaatctaatctaatctgcaaagtgcggatatctgcacttgtgcggattggaaaattcaaaattcgcacttgtgcggattggatgttgattgacatgtaaaagtaaccgatccaatccaatccacacatatttataacaaaattaaaaaattatatatacaaataacattaagaaaatagaaatttaaaagtctaatagatataatacaattatattacaaaacttaata

SEQ ID NO: 373180 - DNA, 563 bp, Cannabis indica
accttatggaagtatttttgtaaataaaacgttaatttatattttctatgtaataattcatttccataatgcattattttcatatctcgatcattcaaaactattgttattattatatttcacttgttgtctcattctatcttacttatttttattgtcgtatctcacctattgtcataactatatctcatcccttgtcattaccgtagttcacttgtagtcgtcactattatattttctaaatttatatcttaatcttaaatttcatcttaaattttaaatattttttttaaatatttataatattggagaaaattcattagtttgttatgttattattgatcaatatgttttaattattttataaatatcttaaataaaaaaaagaaaaaaaaataaaaaaaaaagtgatattttagttatgagaaatgctaaaaggcaatcctgttagtgtaattaagtagcaggtcccatataacttaaaaattaagatttagggaatatcgctaaccaatcatggggtatcacctatgaaaggtattgggcaattaaaatattatttc

SEQ ID NO: 373181 - DNA, 684 bp, Cannabis indica
taagttcaagtttgaaaataaccatcaatatatgtacagagtacttcacatcgtaaatacagtatggtgcaattatgtttactcaatatttgaatataatgagataatgagatttcttttcaaatgtaaactataatttcggacatatttattcgtacaatactttattttaatacagtttaaaccatttcctatttaggagttgtactaattttggactactacccattcttaatagtccccgttcttaagttgttgggaattatttaaaaattgtccaaataatgtaatcttcttaaccaagtatggactatttgctgtaattttaaattctaaatactcactaaaaaaaccagaggatgtcttatcactatttaattttctgtgtacgtcccactgtgtacttactgacgttaaatggggtatttcctatactttaaataacgtacgtcagcgatttcacagtgtaacgtcaaatcaaactcagtacattatgacatgcagatctcatgggattccctgatttgagttaattaagatactatatcaaaacacgaaacctacctatattacttaaggagatttaatattttttgggttctaatatactaatatgacctttttcttattaaaaattggacaaatcaattaggtaagaattaatacgatagtagtccctatgat

SEQ ID NO: 373182 - DNA, 426 bp, Cannabis indica
atttttaagtaataaaatagaacaaaacatcatgaaaataaatacacaaaacaatcaagtgttacaaatttaacatacaaaaaaatctaataactatatattatatttttcaatattttttattgcataaataattttttaatatatataaatgtaattggattgggtcggtttattagattttgagattgatattcaatagccaatccaatccaattagaatccaacttttagcatccaatctaattcaattgtaattagatatctaacattttgtaattggattcgatcggttcagttaaattatattggataatacccaccctattactcagtgttatgcatgtcttttcttctaaattatattattttatggaagattcaatttttttgtctacggttacaatttacaaattcttttttttt

SEQ ID NO: 373183 - DNA, 802 bp, Cannabis indica
gttgacgatcttcaactcggtcagtgagtttgtcgaaggctttactctgttgttgaaggtctctatcatcgaccattctgtcaatcgctccttcgtccacggctccttccattttcgatgagtttagcttgagcttctccactctctgccctctctgctctgtaatttggtttgtacagtcgtggaagatgaagatgaaggacacaactaaggctaaactaagccctaagaatactaccactcacttggcccataacaatagacccaatgttaagcccaaaattatatattccagcccagtattttcaaccaatccatttggaattactggaaattataattattttcataaatatacaaaaaaaggcaaaaaaaaatcacaaaaaactcagatttatttacatttttacggattttaaccttttttataaaaatatgggcgtttgttttcgttactttccataaatctgtaaaatatatatataaaaaaaataatgattttaagtatgttgaataacttttttaatataaaaaaaaatacacattttgttaatttttcctatcaaattataaatagtggcctattaataaattatgttttgtcatgttatatgtaggccgtaaaaaattaggtaagaaattagactttatattcttttatttttattctttttttaaagttaattcatttttatatttttttttaaattaactttactaatttgttctatttactttaattatactcttcatgtgactctcatgtcaggtatttaagttactactacgtataaaaagaaaa

SEQ ID NO: 373184 - DNA, 801 bp, Cannabis indica
acccttcattggtgaaacccgcagaaaacatattcccctgtctaaaatgtaacatctctgcacttcaggtcagcataactttctgcctgctttgaaaagcaagcatccaaattttgatcttatcaataccctcagtggtcctctacattaactttggacccaagtactttgtttctccaatctcgttccaatgaatagggtaaggacattttctaccatataacatctcataggaagccatccctataatactctggtagctattattgcaagagaattcaattaaaggcaagtgcttacttcatgaactctcaagtccatgacacaggctcgcagtaagtcttccaatatccgaattgttctttccgactaaccatcagtctgagggtgaaagactgtactaaactctaacttgatacccatagccttctaaagactcacccaaaacttcgatgtgaacttcgaacttctgtctgacacaataaatttaggggctctatcgaacgatcccctttacatacaactcagcatactgatccactgaatatgtagctttcactggtagaaagtgagctgattctgcgaatccgtccactatgtctcttactgaatcatacattcccgtagttctaggtattccaattacaaaatccattgcaatgtcctcccacttccacacaggaaggactaaagattgcagtaaccccgccggcctctggtattcggatttaaatttgctcgtaggttaaacacctggacacataaactccaccacttctcttttcatcccataccaccaaa

SEQ ID NO: 373185 - DNA, 587 bp, Cannabis indica
gtaacttgatatatagcttactttatattgtgtgtttatgctgaatacttaacaatttttttatgttgaatacttaataatttgtttatgcatttaatattttgtatagattacttgttatatatacagctaactataaattttgtttgttaatggtgtagatatggccaactcgggttccggatctgattcagacccagaggcagagtgtccatcagtaatacctacacgagggcctacgcaaatgaatgaaatatccaagctcatggatcaaggcaaaagattgaccctcaaggttaatgataaaggacaatactacagcaaaagctatgccaagctcatatcaactttaggagttagatgccatcaaacgataggcttgtcctataacaattggaaagaagttaaccctactctgaaaaataaagtttggaaagatatacaagtaagcagttatttgttaaaattttgatttgttctttttattatttcaaatgttcactctaaccatgtttgttttccttcaaactagacggggttcattgtgccagattccttcaaacatgattgtctcatccttgctggga

SEQ ID NO: 373186 - DNA, 605 bp, Cannabis indica
tgatggggaccatccagttgggttcttgcccaaccgttgctatggcctcttttattttgatgcttggctcttccaagcgttccacgggtactacccccagtcctttaatttcactgtcttaagctaacttagccaggcagtccgcgtgagcgttcttttccctggggattctttctactttataatccctgaactcgtggagcagttcccggactatcattacatatgcagccattctttcttcgcgcgtctgatactctcctgatatctggttcacggccagttgggagtcgctgtagacctctactcttttgtcccccacagcctttgctagtctcagccccgctatcaaggcttcatactctgcttcgttgttcgaagctgagaagtcgaaccgtagggctgcctggagtcgaagtccgctcggggatatcattgcaacccctgctccggatccatttttgttaggctctgtccacaaatactttccatgttgggtccgatggtaccggcgcgtttgcggttgcctcagcttcattacattcggtgatgaagtctgccaacgcctgtccctttatggagattcggggtatgtagtgtaagtc

SEQ ID NO: 373187 - DNA, 604 bp, Cannabis indica
gaacatgaccaaatctaatcgcattcgtatgattcgcagtatgtaggaccaaggaacggccttagcccgcatatatcaagatatatgcgagtattctcacgatcctcctacgaaaacatagaggtcgattctctatgttgtgagctggtcccgatgacccaacaacctcgataaatcgatatagactcacatgtcttgtttctatcagctcgtaatatgatgtccataaaagcgacttcacaaggacgcagatatcctagactcaactagtctcgaatgcttctcaagcctacgagcttatgcaatatattgtcgagtgaatttcgcaacaccaaattatattattttattaatatgaaagagaattttatgggtaatgacaagtgcgagtattcaacctagaatggcgagtactcgactgggaatgggaaaacaatcaacaaaaactggaaaataacagtaagacagagaattatagtggttcagtcagattatgatctgcttagtccactgtagcaaaggattcataggtgccgtttcatggtggattacctctttatatacaggtgtccaatcggttacacaaggatcacattcattgtta

SEQ ID NO: 373188 - DNA, 942 bp, Cannabis indica
caggctcacagtattgaagttttcacaaactaccccttaaggcaagttttggcgaaaccaaaaacatcggggaggttattgaaatgggcgatggagttgagtcaattcgacatcaagtataaaccaagaactgcgatcaaggggcaagccctagcagattttatccttgaattccccagcaccgaggtagcactcatagaggacaaaagtgacatcgctatagcgaatagcaaactgtggacattgtacgtcgacggagcctcaaatagcaagggttctggtagcggagtcttattaatcagtcccagcaattttaaggtacatgctgctttacgttttgaattttctacatcaaacaatgaagccgagtacgaggcagtaatcgcaggattgaaactcgctctcaagatgaaagtcgagtatcttcaggcttttagcgactggcaagaggcgggagattggttaagtatttagccattgtatgcgagctattgcagaaattcaaaaaagtaattatgtctcgaataccgcgcgctcagaattcacacgaagacgcattggcccatttggcctcaaccagagaagtcgaattgctcaatgtaattccagtagatgtactagctcacccaactgtaaatcgtgaaatgatcatggagatagataccgttcaggacgtcacctggattactccaatcgtcgcatatctggaaaagggcgtgttgcccgatgacaaggtagaagcaaggaagctgcgacaacgagccgcccgttatgtaatgtatgatcaaaggttgtatcgcagaagttttagtcaaccgctactcaaatgcatcagcggggaagattgtgattatatactccgtgacgtacacggggggatttgcggcaatcataccggaggtaactcccttgcattaaaaatcatgcgacaagggtattact

SEQ ID NO: 373189 - DNA, 524 bp, Cannabis indica
gtttgcttctcttgtggcttcgaggctccttactgttggctattgctccagtgttatcacaaagtaaaactagaggcttttccactccaggcacaacaccgagaccggtgaagaactttctcagccagactagttctttggcagcctctgcagcagctatgtattctgcctccatggtagaatctgaaatcgcggtttgtttagcactcctccaaaccactgctccacccccaatggtaaacaccattcctgatgtagatttcctgtcatcaagacatgcctggaaatctgagtcggtatagcctatgggatttaaagcaccacccttgtagactaacacataatgtcttgtactcttcaagtatttcagaatatacttaacagcattccaatgttcctgacctggatttgtctgatacctgctcacgattcctactgcatagcagatgtcaggtctagtgcacaacattgcatacattagacttccaactgcagaagcataacgtgttgggttttgtgcccta

SEQ ID NO: 373190 - DNA, 1197 bp, Cannabis indica
aggcatttaaaaaactaaaggaacacatggctaaacccccgatcttgtaaaaacctgttctcggagaagacttgttcctatacttggtcatctccgagaatgcggttagcgcggccttagtgtgggaagaggaaaaaactcagcatctcgtgtactatgttagcaaacgcatgataggggcggagacacgatacccggtgatcgagaaactagttttttgcctcctgatggcctcgagaaagctaagaccttattttcaggctcacccattcaaagtattaaccaaccacccgctccgacaagttctataaaaaccagaagcgtctgggagacttctcaaatgggccatggagttaacccaattcgatctacattacataccacgcacctccataaaagggcaggcgttagtagacttcatcacggagtgccatgaggcagaggctaacgcaagcatgcccacaacgcaagtcccaacgtggaaagtatttgtggatggcgcctccaacaaaaatggatccggagcaggggtagcaatgatatccccaaacggacttcgactccaggcagccctacagttataattcacagcctctaataatgaggccgaatacgaaaccttgatagcagggctgagattagcaaaggccgtgggggctaaaagagtagaagtcttcagtgattcacaactggtagtgaaccaagtatcgggggaatatcaaacacgcggagaaaagatggctgcgtacgtagcaatagtccgggaattgctccacgagttcacatactacaaagtagatagaatccccagagaaaagaacgctcacgcggactgtttggctaaattagcctcagacagcaaaattgagaaactgggggtaatacccgtggaacgccttacggaaccaagcatcaaagccaagagtaccgtagcggcagttgagcaagagctcaactggatgacccccatcatcgaataaataacaaaaggcgacttgccccaagaaaaggcactatccagaaggatacagtaccaagcgcaccattatgtgatgatggaaaatattctctatcaaagaggactcagcatcccgtacctaaggtgtgtatcagaccctgaagctaagaaaattatgctagaggtccacgaggggttcgtgcggagatcatacacgaggcctaagtctctcaaagaaa

SEQ ID NO: 373191 - DNA, 865 bp, Cannabis indica
aaaatagtcaaatggtatttttaaagtgaccttaaaaagtcatttcaagaggaaatacacaaaagtgatattttatatacactttatggtaaaaatgtgggggtgagccacaaatttaatcaaaatgtgttgagacattgttgattaatttatttgattttgaattcaaattctaaatcaaatttggctatgtgcatatgtgaaaattttgacatatttggtgtcaaattttggtgaaaataatttcaagaaggaaattaaatttaagaaaaattatagagacaaagtggtcttctatattttaaaatcaagatattgtcttgataatgaaatgtgaaagtgtgggggtgtatactctaatatgagaaagtttagacatacttggtgtctaaaaataaaatatgagaatttagacatgtttggtgtctaaattggtgtatttttgatatgtttggtatcaaaattattgagaatttgagttgtgtgaaaattaatcttttatgattgaattttcaaagcttaagtacttaaggagaaaagtggtcacaaagtgaacactatattttggcatgcatgattcacatggaatcaatagtgagaggttataacaaatcgcttaatctccgtacaagattaaagcatgaattttcgagggatgggacctaaactcccttagtgttttgctcattgatggtaacctatcttaacactagtaaacatctagtcttaagttcaataggtaataacaagtcaatagagtgaatatggtactcaattgtcccatctatggatgagtacatgttgtgaaaattgagggttaaaaccgaaaggttttttaatggagcttaagcttaagaaaactcac

SEQ ID NO: 373192 - DNA, 578 bp, Cannabis indica
attctcataaggaaatatgagaagaaaagtgaagagaaattttgctatagtttctttactctaaaaattacactaaagagatgtatatagagagattaagaggtatgtcctaagttatctcatctcttccctatttatagccaaagtgagtgaattaaaataattaataaattaattattttaatattttctagaaatttctagcataaatgaggtaggtgagatatgagaatggtagaatggtaaaatatacaatgtacaatttattggctgagagaaatagaaaaatgagccaaataaatgcaaacgaatataaaattgggaaacttacaaaaatactggaatttgagttaacttttacaaaaatactgtcacacggaaattttttcaaaaatactgcatttttataaaacaccagtaaaacacaaagcagaacaattcaaaacaacagtagaacactagtaaaacaccagtagaacaccagtgaagacttaacacagtatactgcagtatgaaacttatgaaaaaacacagtaaaaaagtaaaaaataccgcctggtagtatttttgtaaaaaaa

SEQ ID NO: 373193 - DNA, 686 bp, Cannabis indica
gtgtctttgtaaattaataacttagcaccctaaactttgacaattataaaattgtactcctacaaaataaaaatgaaaaagattcaatatatatatattttttttaaatcttaaaaaaaataatttagatctttagaaaaattactttgaatgattatgaaaattaaacaataaattaaaattttaaaactatttaagtgatttaaaaaatgattcattttttttaaataaacttagcaactttattaactagcaattgctaataataatataacgcacttcgttggaacgattctccaattgaagcacacgacctggagagaaacaagaatccctcgctaaaacatgagccagcttgtttgcagatcgtttgatataacacaactcaacattatttcaaggtaagagaagagtacgaacatcataaactaatagaccaaaagaggatgacaaagtaatttggctatcagtttccaaaatcaattgtccccacaaatgacgatcaatccagcttaaagcttcttttttgccaacaaattcatctattttaggttgcacctgccatttcggcataaaaatccctgccattttctctgctgcctccattcgctgataactactcgacgccatggacacccgaacgaacccagaaccaagaaccaataactaacgccagaaaccaataa

SEQ ID NO: 373194 - DNA, 704 bp, Cannabis indica
atctattcataaattaaatatttatttgtatataacacaatcacatacggcatgcttgttgtattgcaagaaaattatctgtatcattcaattaagtgaaaatttctttatacttgtcgaaatattgctctcttcgaatttttttcatttttttcaaatttgtttccttgttatccttgtatttaatttggggtttgttatgttcttgattgatgttctttcttaattaagttgttgttcattagtttgttacatattgtgtcttgtaataataagttaatgacccttttatgtgagctggaataatacaacaatgaacccttttaccattttgtgtcatgagcgtgtgtgtagtgtatgtgagagtttgattgagaaagaagataatctgaaatagaagcttaactaaaggagaaaggaaaggaagaacagagcaagagggtaaaaactaaaaaaaaaagccagcaactccgttttataatggaatttgtggggatcgcccaaatctatgtttggtgtgtagtagaaccttaattaaatcatgatgaagaaaaactccataactccaccactggttatggacagagtagaaagctctactctaggtctaattatgttgaccttgtaaatcaatcaattacattagttgatgatcaatcaatcaatcaattacattagttgatgagagagagagagagaagaga

SEQ ID NO: 373195 - DNA, 690 bp, Cannabis indica
ctcaaaatagtaaacttcctttgggccgatcaatacttacatgagaaacacacacacaaacatctaacattcctcatgagcaatctacacaagagaggtttctttggcgacatgcatcatgtttcaatcaacttatttagaatgaaagacaaattttaatattttagtatgccaaatttgaacttaaactcttcaataaaattgaagcaagaaaaatatgtgtatataataatatatatggtccaaaaaaacaagagtcatataatcaaaaaactaaaagcgatatatatgaatcatagaccataaactttcatccaaaataaaataattttgatataaattgcgttgaacataacatcatatataattataaacataacattatgtatagtatatgccaaaacctttgtagttgtattttctctaatatcagcagggtacttgtaattttgttgcccataatgtggctaagtgcgccttttcccacaagttggttggtgatattccgttatccaccatccctttgaacattttatgtaatgaatgaaattccgtattttaatattcccagtttgattatttaattaagtgattaattaaatgtggaataatgaaactggtactgaaaacagtttttccgtagttacagaatacaactctgtaactccagagaaacccagaaaaacaaac

SEQ ID NO: 373196 - DNA, 526 bp, Cannabis indica
tctgggatggtgtttactcttgggggttgaagagtggttcggagaagtgctaaacaaactgcaatttcagactctaccgtggaggcagaatacatagctgctgcgatttcagaacagattctgagatcggccaattctttgatcgacgcccgtttttcagcgattttgagctgcaaaagaacttgtctggctcagaaagttcttcacaagtctcggtgtcatccctggaatggaaaaaccactagttttgctttgtgataacactggagccatagccaacagtaaagagcctcgaagccacaagagaagcaaccatatcgaaagaaagcagcgtcagaacttagaattaattgaaatgtactgattgttttatattagtgcaagtcggagtttgttgggttttatgccctaataaaactcatctcaatgaaatttttatcttttaaacatcaataaggaacagaagtatttttcatcactttgtgtgctttttggttcatgttatcatttttcatgtttattttga

SEQ ID NO: 373197 - DNA, 745 bp, Cannabis indica
gaagggcgaggaaaccccgagcggatgacaaaggagaaaaccaaaatgcgagtggttccagaacgcctcgcaacatcctaaccatcattggaggaccccatatcgcaggagactctcgcaagtcacaagagcggtatgccagagaagctaaagaaaagccgttcaccaatgtcaacaatcttagtgagcggcccgagaaactatttaagaaggaatgcgacgacatcacctttatggagagtgatgcgagatgggtccatcacccgcattccgatgcactagttataatcgccaatattggcggggataatgtccaccgcatactcgtcgacaatgggagttcagtgaatctgttgaacttccaagcattcaaacaaatgggattgcaggagaaggacctgcgacctgtgacgtcgagcatctatggttttacaggcgacgtcataacaataaaaggaatgatcaaactcccaatcactttgggaaccgccccggtgacagccaagtcaatggctgacttcgcagtaatcgaccagtactctgcatataacgccgtgattggtcgaccgatcctgaaggagatgaagatcataacctcgatctatcatctgacaatgaagttccctactcccgctggagtaggttctgtgcggggagtccaagcagattcgcgggaatgctacaacacagcagttaaactcgcagagaaaaagacggtaaatgttatctacctgttggaggcacc

SEQ ID NO: 373198 - DNA, 835 bp, Cannabis indica
agctcgaattatttgggtaatgggggagttgggcggacgttccagtggaagggcttttgacttgccaggcttttgctcaccttctgctcgctgaatagcctcttcgagtttgatgaagccttcagcacggtccagaaaatcactcattgagtctacctggtcgttcttccttatgtccttccaaagttcaccaaggacttaaatgcccccagtatcgcggacaactttccatcttcagttacccatgagaccttggtcgctttcgtcatgaatctactgatgtatgctcggagaggctcgcatggtctttgcttaacttcgacaaggtctcctaaatgcaacggaagttgacgagaggaggagaattgtgcatggaattctgaggagaaagctttccatgagttgaactttccaggggccaacttgaaatacgattgctgggcggcttccgagagggtagcaggaaaaattctgcaacatacgtcacctcgtacgccctgcagatccatttgcatcttaaaatacttgaggtgcgaaagaggatcttctcttccagtgtacatcttctaggttggcattttaaacttgtggggtaacaccaggagattgatctcgggagaaaaaggggttccacgtgctcgctcccactcgagatcattgtttctttgtccggccatgccttggaacatattctttagttcgtccagttgtgccagcacagctggactaaccttttcggctttttggccgatctgagtcacatcaaaatgtttctgagcgggaatttaagcacgggttccgggctgcacgatcggcgtgccaagctgatcgtcta

SEQ ID NO: 373199 - DNA, 819 bp, Cannabis indica
gctttttctcgagctttagtttttcccgtttttgcgtaatttagggtagtggcatccaggttatcgatagggttaatcttagtttcaattttaaatccctcataagtgttttagcgtgtctctcatcgtattctgaatatttagtttagggccctgtaaagcgtcgagcttatttccactcaggctgaccggcatacttgagcacggaacgaggtaagatagcgtaagaatatatatatatatgaatatatgcttgttttagttgtttgcactactaacactaatatgaatgtgactattatggtgttagtatagtgttgtatattagtatggttaccgtgttaccaacacgagtaccaggagtacgtcgtgtttgtggcacaacacttagtaattctcgggagtacagttacggctctaccaacacgagtacaggattggtactttagtgcattttgtacagtggtcgtacttcccttaagaacgttcttattcatttggtgagcttaattaatgagctcagggcggcttaatcacaaagccggcaacacattacttatatatgttttgcatatcttactgagtctgtcgactcatcagtttgctaccgtgtgtaggtaaaggaaaagcaaagttggaggaacagtgagatagagctcggcagtgattgtacatatcacggcagtgcaacctggagggtttcggtcttttactattttggagtctgttttagatgttgcatgctcgcatgtttttttttttttaaaaaagaaaaaatatattgtatgtacatgtcagtaaaatgctttgtaattgtat

SEQ ID NO: 373200 - DNA, 697 bp, Cannabis indica
aatcaacaatagttaagaaacgataaccttcaatgctaatgatatgaaaaggtccccatatatcaaggtgaattaaatcaaaagcagcattggcaatattattgttagaaacaaaaggaggccgtttctgtttagcaaaatgacatatagagcacatataatccaaaggtttttcacaaaattgcaaacttttatttagtatactagtaatgttcatagaaggatggccaaggcgaagatgccaggggtccttcaaagtacaagaagagtttgcaaagatagaaacattggaagtgagaaaacgccgctcttgttcaaagaaaaacagttggccaactttcttagctatcccaatcgtagaagtcagggagggatcctgaatcaaacattgagtaaaagtgaatatgaatttgttatgacaatgttcaagataagcattaacagaaaataaattgaatttaaattctggaatatataatacatcatgaattattagtttatcagatagttttacggttccacttttgttgatgttcatctgatggccatttggtaaagtaacaatataagcaacagggttagtatgtagagaagtaaaacaatgaagagaatgacaaatatgatgcgtagctccactatctacaatccataaaaaaaagggaaaaagtttatcattaccaaagacgtttgaaaccac

SEQ ID NO: 373201 - DNA, 292 bp, Cannabis indica
gtggaccaataaaattgtgccacgtgtcctcgctccaatccaacctggcaattaacagctaaatttcaacggaagtgtgtttttgctaacagaatagtggttttgggggtttacccgcagaaatttgggttgtgggggtttagtgaaactaaaaccaaagtattgggggttttgccgccatttaccctttaaatttttgtatttagattgctactgccatgtttggggaagaaatcaattgagatgaagttgtgctttaatttttgcatttagatctagattagggatacat

SEQ ID NO: 373202 - DNA, 1123 bp, Cannabis indica
tttcgtaccccaaaggatgcaatcgtaggaattggtccaactggaatgggagtctgaattgatccactaatggccccatcatggctgctatttgttgaacaaggcaaacgttgcaacctgtggtttgtatgagtttcagcacctttttcagataaattactaccccaacatacatcacctaaaacactttggtcaccctccaaaaaggtcgacaccatatcatccggtatagacctagaaggaacatgacgctcaccaaccaagccatgtccaggagggttcacgggctgtgtttcttgtgaagtgatgtgtgccccaatttcggtggtaagatcctctccttctgtcggacctatcaaagatcaggtaatgattaatatatataaatgtgaatatgacaaagtgatgaaggcataaaaaaaagggggggaccgacattatcaatacataaatatgtaataaatggatatgcatgataagaaaaaataaggtagagtccatacccttttcgcgatcatgattcttactttgatagactgaccatatgttattttggcgcatccacaagtcagcaaactttgaggataccccaccctacctctccttacatgggagttggaacaagttatgcgaacattttgaaacttgaagagaacctaacaaacatgatttttatgccttttctagactccctaccttacgatcatgaggaacatgttggtcaaatctaaattgtctagccacacgatcaggacgatatgaaataaaagaccaagaaagagattttgagttatcttgaaggcacaacaaccaccgtggaagacaaatagcaaaccaaaatcctatactgccacacttccatcatacagggtgaaataagcatctatggtagtaagatacgggcggaagttgaattctgaaatatagtcaacgatatcagtcaattgtactgagccctttaaacgagaacgaaatcatgaccaagcacgagggcttccatccttcaaaaatttgcggggtggggcaagcttatgaaaacgtctcccaaaataacagttggaggaaagaagcatccacgacactaatggtcttcatacttccagaatttagtatcacaaactat

SEQ ID NO: 373203 - DNA, 570 bp, Cannabis indica
caggaagaatggtggcacttaactgattcatttcaaagtcatctgataaatgtgtgtcgttcttcaacatattgcgaggaaacaaaaagttcgagtagacaaaagagtgcgaagaggcctttcagagcataaaaaggcatctcccaatgcctctacttttggcgaaacccataactggagagacgttatttctttatttagccatctcaaaagatgcgattagggcagctatagtgcgagaagagggtaagcaccagcaaactatttactacgggagtaaaaggttactaggggcagaatccaggtatctccctgtagaaaaactcgcgttatgcctagtccatgtgtctcgcaaactacggccatacttccaggctcaccccataaaagtgttaaccgatcagcccttgagacaagatttatcaaatccagatgcttttggaagattgataaaatggtcgattgaactgggacagtttgacattgttggaaatattttaccaggatctagatttactaacaagtatattgaattaacatcctaaatatggattctctaaaacaatgaaa

SEQ ID NO: 373204 - DNA, 593 bp, Cannabis indica
ataacttaaacattattttatatattttaattgtatgcgctcatgtatcacgtttacaatatttttaaaatgatatttattatttaagtatattaattttgttatctttacgagcactacttaaaaaattgaatggtgaaaatttcatgaaataaaaatttaatctgaatttgatgttaacgaaatcttcagttatattgtatatttattttattttatttgtttttatttttatttttatttttttatatatatattttttttaagatatatccacttttatagataatatccttattatatttcttaaattaatgtaaattatgtatagtgagggtatatttaacaacctattataaaaataagtatatttaataaaatataatgtaagtgtaattttattaatgaacaagaaaaaaaaaaaagtaatttcttcacttattcttatatttaatgtggacaataatagagactattttttttttatttttaaaaatacaaataccaattaatagagacgtgagcaatagatctagatagggcacaatctcacaatgcatatatacaaaaacatattgtggctttcaaaaaag

SEQ ID NO: 373205 - DNA, 661 bp, Cannabis indica
catttcttaattaaatctaatcttcaaagaacataaattccaaaacgcataataattaatgaaagtctaactataaccccattctaataattcataataataccactttctaccaagttgaaaaataacaataataataataacttattctataaattctctatttccacatcgagatattaatactaatgtaatagaagataataattaaatattttagttattacaatctaccctccttaaaggaatttcgtcctcgaaatttacctaccagagaataactcagggtagtgtttctgcatgtccgtctccaactcccatgtcgcttctctatcagaactatcactccacaagattttaactaagggtatagtcttattccgtaagacttttaatcccttttctatcacaagcacagggtgtgccagataactcatgtcctgctgcaagttcaagttctcgtacttaagcacatgtgtcggatcaggtacatacttacgtaacattgaaatgtggaaaacattatgtgtttctgctaatattggcggtagggccaaacggtaagctacttgaccaactctgtctagtatctcaaaaggacctataaatcttgggcttaactttccccgttttccgaaacgcataatccccttcataggtg

SEQ ID NO: 373206 - DNA, 666 bp, Cannabis indica
gcgatgcatagtgtgcgactagaccatatctcggtcgcaccttctcgcaagttttgatcatgcaaggaaatactgtgggaattgctcccttatcatgcccctagttcttgcgatgacatgttgctgtctaatcgttgaacttttcttgagggacatttgatctgtcacattgcaggtgatctttagttttaccttatcgagattctcataatgactatcaatcatcatttatattttaaaaatgccctgtcagcagaactctttggagtatgtactgtccgttaggacggagaggcaattttttcatgaatcgtccaaataaggcatagatttggccatatatacgatgtgctagtattaaaagtaccgagcaccatcaggggtttgcaataaacttgttattttatcatgcaaaaatgagtctttggacttgcctatttatgaaaaataattattgcaatagactcactaaataattaagaaaaaatgagcgcacatagctcgccaatttgcgattacttaagaatgagcatagttggcccaaataattatgcaaaaaaatgagcacacattgggctcgccaatgaacgaataaatgtatgaagagcatacttggctcctaaatagccatgcaagaaatgagcacagacagtgctcgccaatttg

SEQ ID NO: 373207 - DNA, 708 bp, Cannabis indica
gaatcgagataataatttgaataaaatattttttggcttaacaactgcggaacttgacgggtggtcagaaatgtcacgacattaaaagaggaaatattttagaagtattctagtttagttttgaattttaaaagaatggagtttaatgaatttattctacttgattatgtgacttggagtaagttgaagaattcatatgaattgaaaccttgaatatattgtgtatgtgagaataaactgttctggaacttctaggttgttttggtgatgctagggtcgaatttttggaggaggaaagaacttttggttgctgccctactagaactggtcgaccggttggttctggtgtaccagaaccggtcgaccggttgcctacaggggagagtttttaagtttttcctccaggctggttctagggctcagggtggttttcagtattcagtgtggaatgtttagaagttgtaaagcctaaccaagaactattggaagttaatgattgtccggttttgggaattaaagattattccaaagatttgaatgaatgtattaattgagtgttgttgtcgtgacataggtcctaggatcgtcaagctttgattccacttagacgggatgcacgctaaacttctggactgaggtaagaaaagtattaaatattgtataaggttaatgttatgattcttacagttttgattaagatcgaaatct

SEQ ID NO: 373208 - DNA, 614 bp, Cannabis indica
ttgtttcataaaataaaagaaaataacgaagatttaaaataaacaaggtaaaagggacttgaagaataaatggtagagaaaagattattaagactttagaatttcacaatatgtattgataatatttaatagtgtattgactcccaagtttccttgatagttgaactcaataaactatcatttttaaaatatattttccatttaagtacaaagtattttcatatgataggaattttcttcacttataaaagtataatttcaatgcattaattgtgaaacaagctaatgaaactacaacaaatcaaagatattatttttaggtaaaaatataatttttatattctaagaattaggtgtgaacaatctaatgaaccacacttaatcaaagtaaattataatttttacacaatgaagaacgaagtgaaaatatgtgctaacaatccaaaatacatgatattaaagatgaaagacatatttgaagaagaaaatttcataaactttaaagcataaaaaaggaaatcaacacaccataagtattatttagttacatattgcttcatcttccatcttaacaaccttaagaggtttagaagctcataactttcttagaataa

SEQ ID NO: 373209 - DNA, 568 bp, Cannabis indica
aaccgctcaaaccgcccgcaccagactgcactgcaaaaaaaaaaatatggtttaaaatttattacagtgcagtcgcggtttgaatttttcctaaactgcgcggtgcggtgcagtttgcggttttgaattgttaatatgcggttcaaattgcactgcaccacacattataaaaataccaatttttatatttatttaggtccaatatgtgaatgtccaattaagttgaaaattttctagttaaatagaaaaattaattataaaaactcaaaattttctaatattacccattcatgggtaatacccattaaaaatgcactcatacatacatatataatatatagataaaaagaaaatacttaatgtatcgtaaccttgaaacaattcaagaactttaacaaaatacttatattggggctcgggcagagacttgtgcttgaagcttgggcagacactcatgctgataacgtattataaaataatatagaataatataaaatagatatgaagaaaagaagaagatgaagagagaaagagaaactgaatgagaatttctcagttatttatttca

SEQ ID NO: 373210 - DNA, 747 bp, Cannabis indica
gagataataggcattaaagaggcattgagttggattgcaactcattcgtgagatagagtcatgttggaaatagatagcttggtgtgtgtccaagcgattaagagcagtactttatgccttcacaatttgtgttttgtaaaacgatctacaaataagttggctcattggttggaaagagactcttgtttctctacaggtcgcgtgcttcagttggaggactgttcctctaaagtgcattctattgttttgaacgaatttattaattaataaatcttatggtttttattcaaaaagaactgtctaataagataaaatgtcaaaactaacatattcctaatcttataattttaattaataaaatatttttcaaaaataacaaatttgaaaaaaaacaatatgatatggttagcaaattttgaaatttaaacaagattatttttaaatataatattttaataccaaaatgagatcattaaaatttaataaaaaaatgtaatatctgatcttataattaaaataaatgaaataatctaaaattttaaaattaaccataaggctgtttttgtgagaaatcaaattttttaatatttaaagcctactaatatctaaaactaattttaattaattaaaaattaataaaaattattttatactcaccattagatttttaattcaaaattcaaattctacacaaaattctaccaaaatttgactttgtttcaatgaaaaacgatttttgaatcaaaa

SEQ ID NO: 373211 - DNA, 543 bp, Cannabis indica
ttatatttacttgttttcaaattcaaattacactaatatctaagcttaatttttaaaaattcaaattaatttatttctgatattagagttgaaaattgaaaagtaaaaatctaaatacaaaactacataaaaaattagaagttaaatccatgaaatagcatgaaaaatcgaagaaaaacgaaaaaatgcgagttgtatggacagtatgctatgcatactgcccgcgcgcgcatggaggttcactgccaagaatcctcgacgcaggggtggtgctgcagcatttctgcgcgcggagaaggggtttcagacacccctgggcgtgtttctcggacaaaaccttgtccgaacacgcgtctgaccgaggatcactcggttccgcgcacgtggatgagtgcatcattgcgatattttttcgaaacttcaaaacatcataactaattcaaattaaatcgaaattgagttctgtaaaaaaagtaaattctttaattttttccaaactatccaaaaaaataattccagaaacagagtttcaattatttttca

SEQ ID NO: 373212 - DNA, 473 bp, Cannabis indica
ttcaaataaaacatcataaataattatcaaaaaaaaaatcataaataattaattcaatttaataaataattttcataataaagtcctatttatctgctaatttccaaattaaagctaagcggtctttacaccaaacctctataacaaatctttgtgtttattgctttttcattttgtttgtgtaacacgtggcaagcatcagatatatacgacccagctgtcagctgattattttttgaggtcaacaagtaataaatgtaatatatgataagaaaataaataagaaaaacttcactaaaactaataacaaaattatataaataagttaaacactagaaataatatgtatattttagtaaaaaaaaatcaattatttactgtattttgtaatattcagtataaaaaaatattataaataattatgtatttttactacaataaatttgtaacgccctaatgctaaggcacgctac

SEQ ID NO: 373213 - DNA, 464 bp, Cannabis indica
attctttggtaggtccctccagcgttattcagtccgaaaggcatgaccaggtagcagtatacccccttgtcggtcctgaagctagtgcattcttggtccgccgtgtgcatctttatttgattatacccggcgtaggcgtccatgaaggacagtaatttgaatccagaagtggcgtctaccatctggtcgatcctgggtagcgggaagcagtccttcggacaagctttgtttagatcggtgaaatctatacaaactcaccaagttccgttcggcttgggcaccaagaccggattggctagccattccgggtagtatacgtcgcggatcatgctgttcgtcaaaagcttatccacctctctcaatagggcctcggcttttaccgaatcgagagggcgtcgcttttgctggactggtggcatgtccgggttgacgttgaggacgtgggtgatgacgtggggacttat

SEQ ID NO: 373214 - DNA, 502 bp, Cannabis indica
agaaaaattagagtgacatcatacgatgatttataaaccatttatctattgatatactatttaagcaaattcgaaatgaaaagctaagagaaaaactaataaaggataatttctaataaaagaagaatctaacgatgtcatgtttaggcaagagtcaaagttattcttattttataaatctcttcattgtttcatattgtaaacactagtctaagttgtcatctttggatgtacaattagatgttgtatttacaaatacttatctgtcgagatttaacactattttatttgtctaacggatgacaatcctttgggatttgttccattaaaaataacaagctaagttagaccaacaatgaagattcaaaattaatactacaacattaataacgaaaaacaacataggttcaatataaattcttacatattcagaaattatcataagtttagcaagtaagaaagacatgtgaaaaatacaaaacaaacacatcttaaataattt

SEQ ID NO: 373215 - DNA, 516 bp, Cannabis indica
tgtaatatctttccaaaatagtgattccttcttcaacaatttttcataaattttgtgataaaaataggtcctcattttgatggaccaaaaatcataattttctccatggaaattggaagaggtatagaagagcgattagactacgaactcatgttaatgagtggaaaagattacgcccaatgatatgatcgaacggagctctgataccactgatagaatcactactagaaaatttgattttagtgacacacattgagtaactctaaaagtgtatactgacacttcaacgcgcgtcactaatgagggtgactggaaagataatttttagtgacacttcagacgtgtcactgaaaccttttgcattcattttctgagtgtcactataggcatatagagtcaggttttgtttgactaaaaaaaaaacaagtcacacacataaagtgtcactatatctttttttttttctttttttattaatatttttagagatatagacacacaaaaagtgtcactata

SEQ ID NO: 373216 - DNA, 791 bp, Cannabis indica
ccacctgacagtattgtaaaaaaataacaaaaattagtataccatgtaaatttccctataaattaagtaataatgtggtttgaggcttataacatccaacccaacccacatagtaataattaagagggtaaataaataggtggtttggagggacaaatcaatgtcagcggaggttattctattggcaagagtagtccttaatcaatggagaagtgctcaacaaaggagaatggggtctttatttgttcctacgggttcaagaatggacttagagcattgggtgaaaccggttatgggaaagattaaggttaatgtcgatggtgcaatctttgcaagtgatagtcgatttggagcggcaggggtggcccgggatcatcagggtcgattcattgaaggcttcacggttttgcgtgaggggtgtgtggattcggctatggccgaattggtaggagttaaggaggctttgagttggataaagaggaaacaatggggatcggttgtgcttgaaaccgattccttggttgttgttcaggcaatccaaagtatggtgaacattccttctccttttggccttcaagtggcggcttgtcgttctcttatggccgatttgccgctagtcacaattaattttgttaaacgttctgtaaacaaagctgcacattgtcttgctcgtagctcttgtttgtattcagatcgtatttttagcgaggataatgttcctgcggattttctttctattgtaatggttgaatcttcttattaataaagttaccatttttcttcaaaaaaaa

SEQ ID NO: 373217 - DNA, 640 bp, Cannabis indica
ggatttaaattaagtatgtatagatagcatgcatgccaaaacaaataaacacatagtttgataatttattttatcttccatattagcataaatgtgtcaatgaattttattgtattttcaagtaaccaagaaagagaagaaagaaaaattgaaaactttataaatccttcataaacagccaagaatcacatttcataaagaaaaaaataataagaagagaaaaaagaagccaagaattacctgaacacgtaaagcagtaatgaaaaactactagttatctttcactgtttagccaaacaagggtcttgaaagaatttttcaagggtcttgagttacgtttaatattttgttctccctgtgacaatgtactttaacttaatatttccaaatcattaaggattataacacatgtaaaaaaggtatataaataatgaattaaagaacaatcgtcatttataatagtgtatactatatacacatacatttagataaaagactaaatatacataagtcaatatattagaaagtaaaaaacaagacattctattgtcttgaaatatgtaacctcatttttaattctctataaataattgctgccagggaccaccaagtaacaaagaatgcaatttttttttttttt

SEQ ID NO: 373218 - DNA, 583 bp, Cannabis indica
tcactcaaggttcgaatatgaagaacaaccaaggagggtttgaatcactatagaaggtgtttctcatctactagttgtctggcagaaaaaattaggtttgatttggttgaaggcatcaagataaattatcaaagtggatgagatgagagcttcatgttccttttatagtgtttcaactagggcttaggtttgaattatatggaataaaaaataataaaatattgggcaaaaatcacttctaaggccgaccacaaagtgaaccgctttctagttacaattttgccacgtttttcaaccacttattcttctttcaataataccatattttcaaattcaatcctataaatgccagaattattaatataataattataattaattatcaaataaaattgttatttatattatttattaattagaccatataaagtctcttaattaataaattaaccccaaaaacctcttttcttcacaattaagcccttgcttagtgaaaattcataaataagacatagtataattttcaaattataattaattaattaaaaccaattaactaagtctgcaagcagtattatctcaa

SEQ ID NO: 373219 - DNA, 598 bp, Cannabis indica
ggccgtagtctccgtggaaacgacaaaactttgtcatgtctctgttgctgacatctttcttcatgggcgcgggctttttgtacggagctagtgactgaggggccatgtaaacactttctacgtcttcactcaagatagtaaatgcagtgtactttgcttgattctctcggggagcttgctcgattttgttggtgaacttttccttcttcccattcccttgtctgttgttgttattgttggaattcttaccatttgagcttgaattatttgggtaatgagggagttgggcggacgttccagtggaatgagcctttgacttgtcaggcttttgctcaccttccgctcgttgaatatcttcttcaagcttgatgaagccttcagcacggttaagaaaatcactcattaagtctaccgggccgttcttccttatgtccttccaaagttcactgaggacttcaatgccccctagtatcgcggacaactttttgtcttcagttacccgtgaaactttggtcgcctccgtcatgaatttgctgatgtatgctcggagaggcttgcctggtctttgcttgacttcgaccagatctcccagatgcaa

SEQ ID NO: 373220 - DNA, 731 bp, Cannabis indica
attactaacctaaacctagtagttatctagaaatagaaagtgatggctcacaccaaatatggcagttaagcaattgttcagtaattcaggaaactgcctcttttagaaagttgagccttcccctttctctctatatatagccgaccctcttgttcttcttaaatgagaagagatacaatttcgaaatacctagtgaaagagtagtgcccactgcaacagaaaggattcaagggttagagatctgagtaaggagacatattattccgctgcacccaatgtaaggtttctcatactttatatgtgttttcttattatcgttttagaagttcatattatgttgttaatcaacatacttgtgagtagatctaagatcctggtaaaataattccaacacacgggtgctctactatgcaggaaagggtaaggctttagctgatcagccatgagttcaggagctgggcgaagaatgtacatgtctaagccacatcagacctagcgggttaagggtctaccaatgatatattttgaaactctattttgccgcttaggccggctgaaagaaaaagacttgtaataagcttgtaaatatttttgggatgcaacctgctgttaagtttaaattgttacaagttttattttcattctatttattattaaagtttaaattctgcgctattttgattagaaatcccatttaggagattagggtttcgtaagtaacttgggtagcg

SEQ ID NO: 373221 - DNA, 727 bp, Cannabis indica
attaattaataaaattaatttacaaaaaaaaatataattttcctattgaattaaatattgaagaaaaattccaaatatttaagtatcatgattaagaagggaaatttgacatttatgcttaaaaatgactaatggtgtttaattataccatcatcctaaaaattttgtaactatgctaatcttttaatggtaaccccaaaatgcccgctcttctcgcactctctctctctttcactttgtctctctttctcatttgctctctctatcactgccgctgccgccgactgccacctccaccatctcaacgtcccggccgactgccaccttcaacattttcaccctcaaagtccaccacactcaacaaagcaatgggtaagtgtttttcttagtaaatagtgttgttttttgttgtattgtatggatctgaacgttgttagttgtaatttgtggcttttgtgtccttcaaatggaggtagagtttgttccgaacagtctgtgtttttctgggtttttacgttttttgcgattttatgcgactttgtgcgattatttgtgcgatttcatgagaaatctgaggttaggggtgacatgattaattttggcgacattgtacgatagttatgcgatttagtgtgcgattttgatgttaggcgatttgtgtgcgacatttgtgcagcattatgcgattttgtcatgtatgttttcttgtgcgaccttatgcgatatt

SEQ ID NO: 373222 - DNA, 576 bp, Cannabis indica
ccaaccggcagaccggttctacaaccggaattccggttctgggaatcctagaacaccatccggaattccggttctgagcaggaaatacccaaaaattcataacttgctcaaatcattcccaaatcacaccaaaacttccagacctgctatttagaccctaaagaacattttcaaagcatcaaaccaacccagaaatcacagatactaaaagtgccattaaagctccaagctttgagtttaaaactcaaacttggcttaacccctctaacatgcattcaaacctgcttgaatctacccaaacatgcacataataaccgctgaaaacaacaacaagcatctacaacaagtgcagcaacagattccattatttcactttgaaaaacatagtttttgagccaaaattctaaactagtttaaaaccaaccaaacatgcatcaaaaacagtttcattctactcaatcaagcatgcttaaacctctaaaaacaacacataaacacagcagcaacaatagtccaaaactaagcatgcaacctatccattttcctaaaaaattcaagaaaataacaagacaagtt

SEQ ID NO: 373223 - DNA, 561 bp, Cannabis indica
acttgaatatctctgaatacttatccgattccagcggtcttgatatcgttgaaaagctgattcaatgaccaaaataaggtcttgatatctctctgaatacttatcatatttcctatattttatgaagaaacctcttaaaaattcggaatctttctatgtccaaaatcagtatttttatacagtttgtcgtgaattatttttctcatatttcctgaaaaagttgtctcagtaaaattggaatatctttttcaattctagcccgtttttaataatctatatatcattttaaagcttataaaattatctacattttcccttcagagagttttctctaatttggagttttccttggtcgaaaattatcgttttgttgctgtagtctaaagttcgtttgctttaggatttctaagaaactgtttcggtataatatctatatctcttacgttaaaactccgattttaaagattttagtgtcattagaaagggaattcgattttctaaaacttttatgaagagagtattttctgatttggaacatttcagtatcaaaactttgtattt

SEQ ID NO: 373224 - DNA, 513 bp, Cannabis indica
taacacaggagcccctctagcaattttgcaaccctgaatcttccttaactgttcatagtctcttatcaatgatgagaatccttccgcacacagaagaaacagataaggtgaaagaggatcaccctgtcttaaacctcgtgtaagaatgataggcccaatttcatgacccccagatgtgatagtgtaggagacagaactaacacattacattatcaacttaaccactagctcatcaaaccccaacctgctcaacatagcctgtaaaaagccccactcaacccgatcataagctttgctcatgtccaacttaagtgtcataaacccctccttccccgtttgcttccttttcaaataatgcataacctcaaaggagattagaatattatcagttatcaatcttcctggcaaaaaggctctttgggtttcagaaataacacttgggagaacaacttttaagcgattagccagcaccttggatacaattttataggccacattacataaagcaattgg

SEQ ID NO: 373225 - DNA, 682 bp, Cannabis indica
agtgttaaatgtatgaattttcttataaaaatattattattgttattatgtttttttcatcattgttggaaatctaaataataaaaatacaagaggagaattgaattaatatttctattttatactttacttcatattgtctgacggtttataaccgtcattttaagtagtgtattttgttagttatagtctgaataaagtgttttccaacatttcttaactgtcatttaaagtaactttttgccacaattataaaccgtcatttaaagagatgttttccatcacggaagtctttccccacggttataaaccgtcatttaaagtgactttttccaacatttcttaaccgtcatttaaagtaactttttgccacagttataaacagtcatttaaaattccgcatttttatgacacccacatagccaacggttttaggaaccgttgggaaatcatataaaagacagttataaactgttgggaatagcccttttgtagtagtgaacgtttctctttacaatgagaaataacaattctaagaaaagaggatctaaataagatgcattatttataaatgttgagacatgcacgtagaacatctgtttctaatatgagtgatcttgtaacgtccccgcttcacgagtacgccacactctggctgctttctggattgatgactggccct

SEQ ID NO: 373226 - DNA, 822 bp, Cannabis indica
ctggtcatcgtcgccatcaaattcatggcctcctgagccgagctgttggctatccgacaagtcgctcatctaaaagatagaagatcttttcagcgtgatgaatgtgtgaaaaacaaaaataagtgatctcacccgcattaaaactatagaatcgcagttgccagaatagtcagcatccttacgaatgctgaccaccccatttgtatgcgagttgaaacgcaagtaagtcgcgcatcctgggccaagtgatatatctccagaaacggctgggagaaactcagttactcaaggggcatgcgttctcaggcatgaccctgaaattactaagttactcccaccgttccgagactacctatcagccaaggagtacgctcatttgaatattaacgcatgttgcaaatggctgggtgtatctcagtatctcaaggggcatataatcgcatatatgaccattagaatactgagacacacccaccatttggaatagcgattaatactctcgcaattcaacccacagcatataaaatcctaaaaaatctagctaaatagtcaaaggtaaataagttatgtcagtgtgcgagtattcgaactgtgcatccgaatacccgcgagtattcaaagtatgaaacaacgtctatttaaatgtttcttacacagtatgcggttattccaaattacaggtcatttttcataaaattacccagttttttacccaaaaaatgtaacctcatacatatcccttacaaacatgcattttctaaaagccccaaaataccaaaacccagaaagaacaccctttctcaaatacagaaagcaagaaat

SEQ ID NO: 373227 - DNA, 550 bp, Cannabis indica
atgtacaacatgtggcgttatgtgactttattagaagtcaagtatataatttttggtataaggtatgcttacataacacttaaatacttagagtaattttagaataatattgatgtaatacatagggatgcacacgaggtgaaaaattagtagggagtgctctcccgtctccattcccacttcatccatgcttatttactatcgaggacagggcagataattctcaaatgggacgggatctaagcagtgaatcccctaatgtaaaaataaagtttattttaaaaatattaaattacataaaaattaaaaatataataaataatttattattcaatatactaattattatacagaagataacttaaaaaaattaaaaaaaaatagatactaatatactaaaaaaataacaaacacatgttataaaattattaaattacacaaacattaaaataattacacattatttattattctaatatactaattattatacaaacaataactaaaattaataaaaataatattaacatactagaaaaatacaaaaaca

SEQ ID NO: 373228 - DNA, 585 bp, Cannabis indica
tgtaccaaccaagtatatttaattattaggaacataaatcttttgtttcgtacattttgtcttcatatgctaaagctattataaaataataagagaagcaaataattatttataaaatgaaatatttgtgccaaaaaaaaaataattgttgtacacacaaaaaaaaattaaaatactaagagctccaacaaactgcttataggtcatttagttaatgatattataattatttttcttagttattgtaaattgtttagttagtctattattattaaatgtctagtttacttattaatagaaattttgtttattaggatttttatctcctgaattttaacatataccaaatcatgctcctaaatttttaaaatcgttaaaagtacctcttgaactattgagattgttggatttaaggatttttgtctaatttcattcatttttactatttcagtgattgtttatgcactaaacaatgctccccgaactttgatatctaccaaatcatgtctctcgaacttagacaaatactaaatcataccccctaaacttttatccatgttaggtttttttactaaaattggacaa

SEQ ID NO: 373229 - DNA, 798 bp, Cannabis indica
ctttattgtgaagaacataatctaccagtttggattgccgtacaaaatagtttcagataatggcaagcagtttgacagccaatccttcactgacttttgtgcgaaccatgctatcatcaaaagtttctccgcagtggcacatcctcaagcgaatggtcaagttgaagcagtcaacaagaccttgaaggatacactgaagaaaaaacttgaagatgccaaaggaaattggccagaagaacttcctgaagttctatggtcatattggacaactgacaaaacggcaaccggacagacaccatttgctatggcatatggatatagctatgttggctgtagaacttgagccaccatcccacaggagattgatgtacaaccaagataccaatcacgtactcctagcctaatcacttgatgaaatcaaagagaagcgagccgcagcaaacttaaagttgatagcccatcaacaaaaggtagcttggtatttcaacaaacaagtgaacgctcggaaattcttcgtgggagatatggtcctaagaagggtatttctgaacaccaaagacagtacgacaggtgtactcggacctaactgagaaggaccatatcaagtggtcgaagttctcgaattcagagcatacaaatttggttagtatgatgaaaaaatgcaacttgttctagtaccacggtattggaatggggaacatttaagaaaatactaccaataaagtatcaggtcggacgaccacactaagtactgaaagaacatttacttttaagtgaatggcctgttgggcggactac

SEQ ID NO: 373230 - DNA, 580 bp, Cannabis indica
ttgggaatgtcaggaatagttgagattttagagttaaaaaaaatacccataagtgattttatcattgtttagtgtgggcaagggcattttggtctttttgcccatttcatattttgtccttttgtggattaattatgtaatacaatcaggtttttaatttgattttggctgatattttaataaaacaaaagcttatttttattcatttataaaaaattgaaaaaaaaaataagaaaatgactctatctttcaactctcttcttctctctctggaaatccctagaaccagctaggatttgctctaattttcttctcaattcaagcaagttcagcaagatcgtagtgtatctaagttctaggtaagctcttagtaatctcctctttagtttcttgaattataagaaaatggatttttgcatgaaattgtaattttagttgatgttgttgtttgaagtatgtttctgaagtttcaatatgtttagatatgttgatttgagcatgttttgatagctggtttgttgattgagcaagctttgagttttagaactcaagcttggctctttaatggtgtttttcaatt

SEQ ID NO: 373231 - DNA, 720 bp, Cannabis indica
ctcctgcccgtgggatttttaggcttcctttcttctacggccaggatcacttcttcttgctcgtgctgtgctgttcggacatacctctcccgagctttgcccaaatctccagctatgtgcgggcatacttctgtaaatgcaggttattttttcttatcagtaattcaatttcccgcttcatattgttgcattcattggtgtcgtggccgtattctccatgaaatcgacaaaatttggtcatgtctctcttgctgacatcttttttcatgggcgttggcttcttgtacggggctaatggctgagtggccatgtaaacactttctatatcctccgttaagatggtagatgcagtgtacttggcttgattatcactaggagcttgcttggtttcgccagtgaactttcctttcttcccattcccttgtctattgttgttgttggaacatttaccgtttgagcttaaattatttgggtaatgggggagttcggtggacgttccagtggaacgagcttttgacttggcaggcttttgctctccttctgcccgctaaatggcctcttcaagtttgatgaagccttcggcacggtcgagaaaatcactcattgagtctaccggaccattcttccttatgtccttccaaagttcaccgaggacttcaatgccccccagtatcgcggacaactttccatcttcagttacccgtgaaaccttggtcgcct

SEQ ID NO: 373232 - DNA, 723 bp, Cannabis indica
tacttgatgcccttagagtgaattgggtcgggcagaggcccaagaagtctgccacatccttaaagtatttatgcaagggcatcaacgctccttgctggccatgggcacccgaccaggcgcacatccccttgtcagggtttgtggcacaattattgtgggcgggaatgtagtagtccagctcgcccaggtatctgccctggtcaagagtttgaaggcgtgcctccgtaatcttagacgaagggcttacccaccttgcacctaaggcaccctgccttctatgaggaaccgccgcagcaagctcctcactaacgtagtccacgccctcaaccaggacgtcttcatcagcatcgactggctccccatcctcgttgtactccccatcctcgttgtactccccataatttgggagttcaacctctgcctcttcctccgcctcggagggactgccgggactacatcgtccagctccttgatctcctggacctcagcattcttctcatgatcctcgtccatctggacagccggatcctcttcggcgctaggcaaagtggcgtgccgagccacttgaggatgagatgcgtcagccagacgcgtggttttccttggacgagccatcattctatggctgggtacagggtttgaagaatgtccttcgctagaggaaggaggacgtagaacaaagacaaggatgatctcgtgcagaagttgaagcaggtcctgatc

SEQ ID NO: 373233 - DNA, 498 bp, Cannabis indica
ggtttttctgggaggtcctgatgtcatgaaagccgagcagtggctaacggtgattacaaagatactaaaatttatgggtgtcaccgggaatgacagggtggtgtgtgccacctttcagtttcaagaggacgccttagtctggtgggacatggtgtcccagattcacgatgttacgaccatgacctgggaaaggttccaggagctcttcaacgcgaaatactataatgaggccgttagaagtgccaagaggaaagagttcacccacctgacccagaaggaaaatatgagtgtaacagagtacactacccagtttgatcggttggcaaggttggcctctggaatcgtgccaaccgatttcagtaaaaaggaaaagtatttggatggattaaatgtgaagatcaaggatgtcctaatgatcacaatagacgacaagaccacctatgctgagatggtggagaaagcactgcgagctgagggcgcagttgggtgtatgtcgga

SEQ ID NO: 373234 - DNA, 704 bp, Cannabis indica
aactagaaactaaaagtttccctatcgataaaaagcatggcaataccctaaacaacacagaaatgggaagaactagggttcccaatttttccccaaccagtagaccggttctacaaccggaattccggttctgggaggaacccagaacaccaaccggaattccggttcctacaagccatactgaaccagaattccgattcagtgcaggaaacttcaaaaattcatgtctcactcaaatcaaccccaaacttcatgcaaccttccagacctgttctaaataccccaaataacaaaacccaagcaatgaaaccaagcttcaaacacagaaacgagattcaccattgaaggttcaagattgagttcaaaaactcaaaacttgactaacccttcaaacaaccaccaaatcatgcataattcaatctatttcaacataatttaaccacagaaaacaccactaaacaataacaacaaccacagcaacgaaaatcatcatattaccttgaaaatcatagttttgagccaaaattccacactagcttaaaatcaactaagcatgcatcaaaatcagttccatttcactcaatcaagcatgcttaaacttctgaaaacaacacataattacagcagcaacaacaatccaaaactaagcatgcaacctatcatttttcttcaaaaattcatgaaaacatcaagaacaagttacc

SEQ ID NO: 373235 - DNA, 728 bp, Cannabis indica
cagatcctggttgttctgaccttgggttggccttgacatacttctgtaagtgcgggttgtttttcttaaccagatattctatttcctgcttcaggttgtagcattcgttggtgtcgtggccgtactctccgtggaaccgactaaatttcatcatgtcccatttgttggtatctttcttcatgtgcccaggcttcttgtacagaattaacgactgagttgccatatacacactctctatatcttcagatagaatagtgaatgcagtgtgtttggcatgatcacggggagtctgtctagatttctcagtgaactttcctttcttcccgtttccttgcttgcggttgttgcttgaacccttgccacttgaattgctggaataattgggaagttgggcggatgttccagtggaaggagcctttgttttgcccggcttttgctcaccttctgctcattgaatggctttttcgagcttggtgaagccttcggctcggtcaaggaaatcactcattgattcgaccggtccgttcttccttatatccttccatagttcaccaaggacttcaatggcccccagtatcgcggataactttccatcctcggttacccgcgacactttggtcgcttccgtcatgaatctgctaatgtatgcccggagtggctcgcctggtcgtttctttacttcgaccaaatctcccagatgcaatgggagctgacgtgaggaagagaat

SEQ ID NO: 373236 - DNA, 641 bp, Cannabis indica
acaaagtctgctcactttttacctgttcggacgaatttctccatcgatcagtatgctgagctgtatgttagagaaagtgtacgtcttcatggtgtcccaaagtccattgtgtcggatagagatccgaagtttacattaagattctgggagagtctacatcgagctatgggtactcagttaaagttcagcacagcttttcatcctcaaacggatgggcaatccgagaggacgatatagattctagaagacatgctacgggcctgtgtgcttgactttgaaggatcatgggtaaagtaccttcccttgattgagttctcttataacaacaactatcaggcaacaatcgggatggccccatatgagcttttatatgggagaaagtgtagatcgccattcactgggatgaagtgggtgaaagaaagttcttgggtcccgaggctgttcaaagaacaagtgcggcagttaagaagattagagcgcgaatgttcgcagctcagagtagacagaagagttatgccgatccaaagcgtcgggatattaatttccaggtcggggacatggtatttctctaaatatctctgatgaaaggcattaaacgctttgggaagaaaggaaaaattagcccgaggttcattggacct

SEQ ID NO: 373237 - DNA, 570 bp, Cannabis indica
gctctctctctctctctctctcgaaaatttctagggctgcaagggttggaatttttcccagtaattcaagtcattctcagctagtggttagtgaatccaagccaaggtatagctcttgcaacctcctctttgttttcttgaagtgtaaggaaataatttttgcatgctttgtggttttgcttgctgtggctgctgttagtgtttagttttgttttctaaagcttaattatgtttaaagaaatggatttaagcaggttttagtggttgttggttggatttaatcaagtttggagttttgaactcaaacttggagctttaatggtggattttgttcctgagtatattttgatgttttattgctttagatatgttctttggggtataaataagaggtctggagtgtttggtagaattggggttgatttgaatgagtatgaatttttgactcattcctgcactgaaccggaattctggttcagatgggcctgtaggaactggaattccggttagctcccaggaaaccccacagaaccggaattccggttggggaaactggtctaccggttgggg

SEQ ID NO: 373238 - DNA, 903 bp, Cannabis indica
gaaagataaaaaagagatctaaaacttttatgttttgactctgtccaaaatctgaacagaaaatagtcgaatttaagcttgaagtttcagctttattctctttcaaatttttctctattttatagatcattgttttccgaaatttgtccaatttatacattccaagtgtcgaaacctgaaaccaaagaaaacaagcgtaattttattccaaaaataataataaaaaagaataacaactataaaaatgtgacccaaaacttaggctaaaaatagactaacaattattatctaattaatgttagaaaattcgtaagtttagagaaattcgtaggtttagaaactgttttagtaaaatgaccatatctggagttttataactccgattaaggtgattctagtagcattggaaagataattcaaagatctataaattttatagaaataactataccataattcgtaatttttcaggtcaaaactaagccttaaagttacgagattgagagcacaatttaaatttaaaagttagatatttgtttatttaataatttatcatattattattgttattatgttattattattattcataaaactaaacctaataggagtcaggatagtataggtttcattaaccctaaaattatatcgttctgttcttctcatccatctgagaaagactaaccctaaaagttttcaagtcatctttccattacatctttagccaaatctatagcactcttcactcaccatcatctcgtgtctattgatccaagtagcttgaagtatttgaggtaagaaactctatatttactcatttattgatcacaataggagaatattagtaggtctcctttttttatttttttcagaatgaaatatgtcttagtaaaactgtcatat

SEQ ID NO: 373239 - DNA, 844 bp, Cannabis indica
aaattatgggagtaactctttagtgacccaccatatttttagtgacactcattgtaggatactaaaattgaatttttagagtcatttgtgtgtgtcactaaaacttatccctaaccgtttagtgacatgcacttttgtgcaggtcactaaacagtgtcactaaaactcaattttgtagtagtgaattatcacaacaaaaaattacttgtgactaaaacatagttttttaaatacaagttttcactaatttatttttagtcacaacaagtattgtgagtaaaaacatatttagtcacaataaattgtaatttttgtgactagctaatacctttagccacagactttttagtcacaacataaaaatgataatttataattagtcacaactttttacttttagtcacaaattttgttggactaaaagtaagattttttgtagtgtctatcacgctgtcgaacgccaaaattcacagccgtcgaacacgaaagttgagagccacaacgagcttcaaatatcgtcgacaacggaggccaagatccctgcacataagagagaaagagagagaaacagagaaatgaaagaataaggaaaaactgaccttggatttcgaggttggccggagatctgagaacttcggtgctggtttcttggtgagaagttcagtgctggtttcgaaggatggtggggcactggctggcagcagcgatcggcgaagaagaagaacatcgacgacatcaacgaagaagaagaggaggaggccttctagtcgtccgtcgtccgtcgtccgtcgcccgtcgcccgtcgcccgtcgcccgtcgctagagatggactggccagaaatcg

SEQ ID NO: 373240 - DNA, 548 bp, Cannabis indica
aaattctatatttgtaaaacaataataagtttcgccggaaaagtcaccagtgccggaaaaagtcgctagaaaagttattatcactggaaaagtcactggaaaagtcatcgtcgtcgaaaaagtcaccgtcgctataaaagtcattggaaaagtcacaagaattagatgtctcagctataaataaaaatagaactggttctataacataatgaataaaaacaaataacacaaaataactaaaaccagttataattagaatataatcggttctgtaacataatgaataaaaacaaataacacaaaataactcaaactagttacaattaaaatagaactggttctataataatgttacaatgaataaaaataagggtcaagatgcaaaatgaccctaaatctaacaattaagttaataaatgtcccttttttaaaaaaattaacaaaatgtccttttagttaaaaatttgatgataaaattacaattataacttttaataattaagtgttcggtatagttattttgcacaatagtatatcatttttatgtg

SEQ ID NO: 373241 - DNA, 579 bp, Cannabis indica
actccgacccgaactcaaacccaaactcgaactcaaaatcgcaaatggaactagaaccgaataaggactaggaccaggaccaagacctaaacccaaacctgaacgcagatcaaaaccgagacaaagacctaaacccgaactgagactaggactcgaacccgaaccaagaccgtgacccaaacccacacaataaccgggaccttgacctgaaatcaggatagggacctaggagatcgaactaggttcgggacctagtacatgacccagacccgaacttgaacctaggacccaactcgtgactctgcaccaaaaatggaaccagactggtacctgagattgggattcgaatctctactcagggcttggacaaaacctgtagtcggtgtctggatttgggacccagccctggacccgaaccctgacaaggacccgaacccacacctggacctaaacccagtcccgaatccaaaactagacacgaacttgtaccatgggacccaaaatcggaaccaaaatgggaagttgatagggactggaactaggacttggactttgaatcataactgaaattggacctag

SEQ ID NO: 373242 - DNA, 686 bp, Cannabis indica
taaaaaaaaaaaaaacgagcttcatcttcatcttggactatctccacccttttgtccaactatcagattcaactcgctaagatagcatccgagttcaagcagttgtggctgaaataagaagaaaacaaataaacatggttagtaggtccagaattaataatccaaatggataataattcactaaaacacatcagtttataggaaaagaaataccttgtttctttgctagaaatttagggcattggggtttccagtggcctttttcattgcaatagaagcattttccttttggtgcatcaccaggattagcagcctttttctttttaactgttttcacagcttgaacaggcttttttgctattcttccatttcttcttgttcttgggtttggaagtagaggcaaggtttgcctcagccttagtcgctccattaccatttccagaattaggagttttagaccctttcttctgtggtcctccaatcaaattttcaaatgtctgaaggtcgttaaccaactcgtgaaagtcttgttccttcttattcatgacataattggaggtgtagggcagaaaagctggagtcagactattcaagattagactaacttgagttgtctgatccatttgagctccatgattttgagcttcttggaaataacttgccatctggagaaggtgatcacgcac

SEQ ID NO: 373243 - DNA, 761 bp, Cannabis indica
aaaaaaaaaaaaaatcatcattaaacaaaaaaaaaaaagaaaaataatcccctatagatgctcaaatataattttagtacaatcaaattgtttttaatatttgattggcccgatttctttccctatcgcatgaggtaaaaattatatcccttactatagaatttctctctatatatatgcttatttgaataattttatgacggtgattataattttatcctttatgctacatatatatatatttaagccattatttatataacatgtaattctacgtcgcatattaaattttttattttcaaaaataaaaaaaagtcagacaccaaaataaaaaaaattaaaacttttattagtcattgaacaaactaaccagaaaccaaaattaacttatataattatttttggagaattaccccatatactattgttgcccctgatttcgcccaatatacgtggaccaaccggacagggacacgtggatcagataatttataaatatttgctaagtctttgtatgccacaaggaaacatcctggacataggtcccggaggaggcacccggagttcaaggtgctcccggaggctcacatagcactaaagcatctccatggggtgtcaggcttctcctgagcaatcaagtcgcattaaatgctgcatgggaggaagcgtgttgagactgcaacacgcaataaagtctgacggcacaacctccaaccagcagcgccacagtaatgatcatttaagtctagcgacggctacac

SEQ ID NO: 373244 - DNA, 576 bp, Cannabis indica
ctttccaacaaatctgactgaagtgtcagattaaataatttctcagtcaccaactcaatgtttgccctagtcatttccgaggctagctgagaggaaatcatgaccatgttggatatctgatcaggtccctttctgcttaaggcatcagccacaacatttgcctttccaggatgatacaggatttcacagtcatagtcttttaccaattctaaccaccttctctgtctcatgttcaaatccttctgagtgaagaaatacttgagactcttgtggtcagtatagatctcacacctttcaccatacaagtaatgtcgccaaattttcaaggcgaacaccctgctgcaagttctaggtcgtgagttgggtaacgctgctcataatctttcaattgccgagaagcataagctatgactttatctgcttgcattaacacacagcctaaaccctgccttgaagcgtcacaatacaccacaaacttttcttgatcagatggcaaggctagaacaggagctgtaatcaatcgttgcttcagctcttgaaaactcttttcacacttatctgaccatataaatcgct

SEQ ID NO: 373245 - DNA, 1006 bp, Cannabis indica
aaactagaaactaaaagttccctatcgataaaaagcatggcaataccccaaataacataaaaacgaggaaaactagggtttctgaaaatcacccaaccggcagaccggttgcccaaccggaattccagttctgggaattttcaaaacccatccggaattccagatgcacaaccggaatttcggttcctcgcaggcagaattccaaaaaattcataactcaaccaaatcaaatccaaatcacacaaaaccttccagacctgttctaaacatcctatagaacatttctaaagcaataaaactacccagaatacacagaaacaaaaagtgccatgtgagctccaagctttgagtttaaaactcaaacttggctaaagctcaccaacaagcatcaaaccatgattcaaactacctaaacatgcatactaaagctgcagaaaaccaaaacaaactcatgcaataaccacagccaccaaaatctcaatttcactttgaaaaaccatagcttttgcatagaaaattaaccaactaaagcaagaacaacaagcatgcatttcaacctaactaaacatatttaattcaatattttaaacatagaaacaaccacaacaactagcagcagcaacatcatcaaaaccatccatgcattactcatctttttcatcataatttcaagaaaaacttagaataaagttagagaaacataccaacaacaagagatcacaatacttgactaaagaaagcttgaaatccaagaaaaatggcaagaatccttgctgcacaaggaggccgaaagagaggggaaaagagagagagttttcctttgaaaattttctaatttttactaagtttggaaaaatgaaagaaatgccacataaccctttttcttcagccaaaaataacttaataaacacataatttccacatttaaaatccactaaagtacaaactaacaatggggcaaaatgaccattttgccccttcacactaaaatcacataaataacact

SEQ ID NO: 373246 - DNA, 456 bp, Cannabis indica
tcaactaatgatagcccgatcggagatcaatctttgaaaagaccgtcttcccctgaaggttatcaaaaagatgatcgatcctaggtaaaggatatttattcttgattgttagcttattcaattctcggtagtcaatgaacattcacagagacccatctttcttcttgacaaatagtaccggagctccccagggtgacacactaggccgcgaaaaccctatgtccagcaacccttggagttgaattttcaattcttaagttctgttggagccattctataaggggctttagaaacgggttctactccaggtgccaaatcaatgacaaaatcaatttctctctgaggtgataaacccagaagttcatcaggaaaaacatctagaaattcccaaaccaccttgatgtcttctagccgaacaaagtcaggctgagtggcatataataccacgaccaaaaa

SEQ ID NO: 373247 - DNA, 1046 bp, Cannabis indica
gggtcccagtctggttccatttctggtgcagggtaacgagctaggtcctagattaaagttcgggtctgggtcgggtattaagtccctgtcctagttctttttcccaggtccctatcatgattctgggtctaggtcccggttattgtgtgggtttgggtcccagtctaggttcggggtcgagtcttagtgtcggttcgggtttaggtctctgtctgggtttttatctgggttcgagtttgggtttaggtcttggtcctggtcctagtccttgttctgttctagttccatttgtgattctaagttcgagtttgggtttgacttcgggtgggagttgagtcttggtatgagtttgggttcgggtcttgattttagtctacgtcaaaatcaagctccgggtgtgggttctcgtccggggtcttggtctaggttgggtccgagtcccatgttccgatctcgatcttagtcttgattcagttctgggtctaactccttggtttttatcctggtctgggttcgaattagaattgggtccgggtctagcttttggtctgagtctatgtgtgggtgtttgagttcgggtccgagtttgtgtccgagtttgttttgcaggtcggaacctcgatctgggtctagattcgagtccaggtctaagtttgggttccgagtgcgggtccaagtttgggtttgggtgaggatctaagtccagatctaggtccaacatttcgatccctgtcttggtcttggtccgagtgaagtttcgtatccggatccctatctaggtccaagtctgtgtttaggatcggttcccagatttaggtctaggtccaggtgtcagttctcgtctgggtacacgaccgtgtctgggcccgagttccaatctcagtttgggtctgaggctaggtctgtgttcagttctagatctgcgtccgggtcctggtcacggtcctagtcttgttttagggtcctcgtttggcgattcttgttcaagttctaatttagggtcccaagtctaggtctgggttcaggtttggttcttcgtctgggtt

SEQ ID NO: 373248 - DNA, 641 bp, Cannabis indica
agtctattttacacgcttataaaataaaatagtcatgtgtgtaacacactgtttgaacgtatttttcggcgtgttaaacttttctaaatttcttaaaattttgcatgatgtcttaaataactataacgtacatgaccatgagaaaaaatttgactaaaaaattatttcgggtactaaaacagataaggatgcatcaatgtacccattttaagggggtgcattgtagaattttcctatgttatttttaatgagataattagataaagtactcttttttacaaaaaataaaataataataataataaataaaattatatttttatgtttaaataatttttttatatttttacaattttatatagaaataacgtgaaaataacaagaaaaatatataaaagtaatagaaaaataatatcaaaacaacaacaaaaaataatatacaaataacaacaaactaacaagagtacaatataaaaatatcgtattttctgtaaataaaattattaaaattattaaaaatatttaaaaattccgtacaactgtatttttataattttttgttatttttatgtaataattccttattttattagtttaaaaaaaaaaaaaaaaaacaaaaaaaaaaactaacttaactttaa

SEQ ID NO: 373249 - DNA, 513 bp, Cannabis indica
tggcgggtgtcagatcttcttcaatgatgctagtttggaggatagttttggtgaagcaaatgtggtactcatcccaaaaaagaaaacccccgaagctatgacggatcttagacctattgcactttgcaatgttatgtataagataattacaaaggttatggtcaacagaatgaagccattcattgattctattgtgtccgaaaaccagagtgctttcatcccgggtcgcttaatttctgacaatgtccttgtgtcttttgaagttttgcattatctaaaaaggaagcgtacagggaaagaaggatacatggcccttaagcttgacatgagcaaagcgtacgaccgtgttgaatgggcctttttagaagcaatgctaaggagattaggcttcacagagaaatgggttcatttgattctgaaatgtgtgacgtcagctcgatacaacattatccatggcagccacgaagttggcccaatcattccttcaagaggaattcggcaaggggaccctct

SEQ ID NO: 373250 - DNA, 565 bp, Cannabis indica
tttttacctctttttattttttaagatatacccatttttatggatgatgtccccattagattccttaagttaatgtaaattatatgatagatttgtgtagagagtgagggtatattagacaacccactcaaaaaagtagatttattttaataaaaagtagtataatggtatttttgattaatagatacaaaaaagatatatttttcaacttatccttatttattaagtctaacatattttaacttaaaatttataatgaaaaaatattagcaatagtattggacatcattagtactgatattaataataatactccagtctaactaggacgaagcctggactaaggtcatgagttatgcctgcgcttagagttcatccattcagatgctagaaaaaatatttttattttaaaattatatattttttaagttaatattattttagaccatgtgttttataaaaattactgattagactatatgttttattaaataacaaaatagaccatgtattttccaaaataatataaataagaccctgaattcaatttttaatattttttttt

SEQ ID NO: 373251 - DNA, 958 bp, Cannabis indica
aaaaaaaatatatgtactgatttgacacttttacccttgcaatttgttagtccactactcttacccttggttatcctcatatttattatgagagatgttatgtatagtagctagtactacagtgtttatagaagccatccaagaactaaaagacaagtttcttgaattcaaaataagtaaatagccaaatgggtgttatttcatgtctttgcatatttactatgacagacatctatatcagatatgaagaaaatcatgcccttaattaccatttttatttaattttcttggggttgtcagctatattgtttctgtttctttcagaagttatgacatgcatgaagattgaattcatatatataaatgcctctccatgtaatctagtccttttaagtctcatggatttgcagttgtgtcctgcatgctaatcatgtgaataatttattactaacaacaaaagaaattaatacataaaatactgccatcaaattattaactacacagaatgttgtttatattctacattaatttatatgggattttagcataggttattatgtacatatctttaaatatatacatatcatcattttcaatattgctatattctttcccatcaaaaatataattgatgtagctctgctattttttacgtgtggcactactgcttttgaaagtacctgtgagaaatgtagaagagaaagttaaaatatgtatatgaaattaacttgtaactattttttttaagagtaatttgtggtaaaacccctttaattatcaatttacttgcaaaaaaccatctaacctcatattttggtgggaaaaccctctaaagtactgtttcgtttacatttttaaggcgccgtctgttcaccctcgttaaatcctaattttgcccacgtggcaatgacaggtcattaaaaaattatcctacatggccatattttacaaaataaaa

SEQ ID NO: 373252 - DNA, 718 bp, Cannabis indica
cagtcagattgtgatctgcttagtccactgtagcaaaggattcgtaggtgccatttcatggtggatcacccctttatatacaaagtaggtgtccaatcggttacataaggatcacattcattgttaatccattatttacatattgaattgcaataattaaacccaaacaacgttaacattaataaatgagtgacagttactaagtccatcaacgtatgcgtcttccgcatctgcgagttgactgttcatgttccgttgttgagctcgcagggttatcattacgtttggactgtctgagtccttaagcaatcgcctcttgtagacatcgcatatcgagctgatagaacctagacatgcgagtctatagcggtttatcaaggctattgggtcgttgggaccaaatcgcaccatagagagttgatctctatgctttcgcagaagtatagagaggatactcgcatatgtcccgacacatgcgagttggatccattctctcatcctgcataacgcgaattacagttacgcgatccgactttggtcgtactcgcaagatctcgctggctttatcctggcgaggttcaaacttcgaggagtctctcatggacatttcagcttccattggaaatctgaatatacgtgtcctttaaataggagtcttgtctcgagtttctaggtgagagaaatctcactataacaatgtacataatgtatgaattca

SEQ ID NO: 373253 - DNA, 629 bp, Cannabis indica
tcaatcgctaaggaaaccaggcaattctgtgttcgaaaggttagtaacaacccatgacctaaggaacgatctaaacagaaggaggagaacagatgatcagaatgttacagcaaccgtgcagcccggagcccctactcaaatccccgctaagaaagatgctgacgtaatccaagttgaccagaatgccgagcaggtcagcccagccgtacaggctcagtagacgaactgaaaaatatgtttcacggcatggctggacaaagaaataatgatcttgagttagaccgagcacgcggaactcctttctcgccggagatcaatctcctgccactgccccacaagttcaaaatgccgacgtggaaaatgtacacggggagagaagatcccctttcccatctcaagtactttgaaatgcaaatggatttgcaaggggtacgaggagatgtatgctgcagaatctttcctgccactctgtcggaagccgctcagcaatggtatttcaagttggctcctggaaagtttagttcatggaaaaccttctcttcggaattccatgcgcaattctcctcctcacgccaactcccattgcatttgggagacttggtcgaagttaagcaacaaccaagcgagcc

SEQ ID NO: 373254 - DNA, 572 bp, Cannabis indica
atgttgaaacagaaggccaactatgagaagaagctgagttcggatgttcagcatgagtgcaaatacacagcttatggcttcgcacctctagtacaatattgggcgtatgaggtttagaggttgggaagaggtatggcacgaatcatgggattcggtttcccaagatgcttagctggacgagcaagggtgatatagggaagaaagaagtcagtgcattattttctagacgggtatgagtttcacttatgtttaaagtaattatttaacataaatacttataataaatgctaaatcgttttactctgatattttttgaaccttaaacagaatcttgaagtggtgaaggggctacttccacgaacagaagaggaggcatttgtgaggaccatctcttacgatggtgtggaaaacctggttgatgatggtgtggatgacacagaggctgaggcagatactcaggtgccagagactcaggtaccagaaactcaggtaccaatttttggaattttttttatgattgtataacttgattgtttttttctttttgtgctgtgatatttgttacattgtgg

SEQ ID NO: 373255 - DNA, 566 bp, Cannabis indica
cggaagaaaagaaaaagcgatggtggtactgctttacattcgtttgaggattaaaaggaaccgggccctcatttaaaggatgggcccggagggtgaaaaaaccgtccttaaacttgtcccccttcttggggacaaatacaagttcataaaagtataaaatttcagcggggctaggtgaagtccagcctctggcaacataaaaaataaataagcctgagagcaggcggtaagcttgcggaatcaattggtaaggcgcgaggccgcaaaaataagaaaattaacaaagtagtcttgaagagggagcattgccccggacataaggtgggtttggctccaagctctgaaccccccatagttgtggttgggcgtctcttcgtttcgaggcaagtggtgaaagaccccggacgcagatggcttgatacctgccgcagtcacaatcttctcgagctgatgagcacaaaccaaggtggaacgaagctcatccgcttcccagccgttggcgcgagaagtatagttctcctagggcccttcataacttcctctagagtggccaaggtggccgcccc

SEQ ID NO: 373256 - DNA, 1091 bp, Cannabis indica
ggcttgataaaacacgtagtcggtgtctggatttgggacccagccctggacccaaacccacacccggacctgaacccagtccaaaatccaaaagtggacccgaacccgtacctagtgacccaaaattggaacataaaccggaagttgaccaggactggaactaggacttggacttggcatcataactattattggaactagatccagaaccgtaatcggaccaagacccggactccaaatcagacctagacccgaatcgggagccgcacccggatcccaacccaacccttgacacggaacccgaacctgaactcagacccaaacatggaaccagactagggacataaaacaagggtggggacatagaatcctaccccagtctcgatctcgaacccaaacttagaaatgggacctaggacctgaaccataactagaccgagacccgtgacagtgatccagatcttgactcgagattcggctaacagggcctggaactcaaattagaacctgaacaagaatagccgaaccaggaacctagaataagagtaggaccgtgaccaggaccaggacacagacatagaaccgaacacaaacctagccttagacccaaactgagacaggaactcgggccttgactcgatcccgaacacagacttggacctagatagggatttgatacgaacctggactcggaccaagacgcagactaggatcgaaatgttggacctagatctggagcgagatcctgacccagacccaatcttggacccgcattcaggacccgaacttggacctggacccaaacctcgacccagataggggtccagacctggacacaaacccggacacagaatcagacccgaactcaaacccacacctagaataagacacaaagctaggatcggacccggactcaaactcgaaccaagaccaggataagaacaaaggacttagagccagaactgaatccaaactcagatcgggattggaacttggcactcgaaccacacgtagaccaagacctaggactcgaaaccacactcggagcctgatctagacctagactgaaatccgaacccaaacccaaactc

SEQ ID NO: 373257 - DNA, 596 bp, Cannabis indica
ggagatcatactacaacctcgtgagtgctttgaaaaaaagtaaatatgaagcttaacccgaaaaagtgttcctttggagtttcctcaggaaagtttttgggattcatagtcaacgcgaggggcattgaagcaaaccctgagaagatcaaggatatgatagatatcccatcacaaaccaaaccaatggaattttaggccttaacataaagaatgccatcacttaacagattcaactactacaaatatcataattcgtgacggtcctaaaaacatttttttcaggaactgtcgctaaacaaattaagtaactatttaaaaccatcgcaaaaaatttagtattcctgatggtttaaaatcgtagtaaacaaaataggcgaatttttttaataaaatgtgattttttaattgacccttataggcgagggtccattaaaaaattgtcacctacttctcaccacatttcccacgtgcccacctactttttttctattttccacatgcccacctttttcttatcacctgtttcttctccatttcctacatcataaaacgaaaatcttaactctccaaaaccccacccacgcctccacaccatc

SEQ ID NO: 373258 - DNA, 530 bp, Cannabis indica
gactaagggatttcagtatcattatccagatctgaagggagttcagattgaagaagtgttgaagagagctcatcattcacacaaggggatcttgtgtctccaatcaagggtcttggttggtatgggtatagattcactgtattttgtaaaagagtgtattgtttacaatattgttggtttttgtaagatacatctttgaatatagtgaaagttattaccctggttcggggaacccaagcactagccgcctagaatgagtttctagggcaggtgaagcttgtaaaattctggtgttgaatctttgattttgttctttttatattcaagcttaaatcaagataaaatcaatctaaatatgaaaaagataggttagacaagaacttggggcttacatttggtatcagagccagctatttctgttagaaatattgatccttagagttcttgcaagattcgttgtactgaaattcattgttgctgcaattcttgatttttctgcattttttcctttctgcaacacccagttggaa

SEQ ID NO: 373259 - DNA, 501 bp, Cannabis indica
ccgattgtaaaggtgattatgatgctttattaataatttaatagtttcttttctaaattatggtgcagtatagttaagatctaggcctataaatagccatataattaacttattttctcactcattcaaagaagccaaaccaatctctcaaacattccccgatctcgtcattaccaatatccatgccatagtctctttcttccattttgttattctcatttgtttcatctatagccaaaaccttaccccacaaacatcatatcatcatatactacctcaagctataccatacataaccataattatctccatcatcagattagcatcacatcaccatcattttacgttcaagttttagtgctcaactagatcttattggaagctaaggtatatcattttataattttgggtttctaaattcaaatttaaggtttcatatatatatatatatatgtatatatacccctataatgtgttctctttttggtaaagttgcacttt

SEQ ID NO: 373260 - DNA, 508 bp, Cannabis indica
tacaaaataactaccatatactacagtttaactgaaaaggggaaattagtcaatttaagtattctaattacgtttcttgataaagtaacaagataaatcactatcattctattttcaatcagctttagtaaacaacacattacaaatactgattctgattattcttcatttattttgttatatttctccattactttatttcgattctaaatattgtgtagtaaacgtgccattaatatttttattttgcttgcacttaactcccaaaacttaaatttgacggcaaaactctcaatactcgcgttctattaacagtttaagacttccatccaattttggatgtaaactgccatgctggactgtccatgtgtacgtcgatatagtgtacacatagcacaattttattggtccacgtaaaaaaattatttaaaaattttaaaaattaaaaaattgtaaataatttttttcttttgagtttttttttcatttaaaaaaaaactaaaataaa

SEQ ID NO: 373261 - DNA, 606 bp, Cannabis indica
accaaactgcgaaggcatctgaactgagcccgtgacagcctgcaccaccacaagcgaatccgtctcaatctccaccttcgaccaccccttacgcttgatccaactcagcgcttccttcaccccgataacttcagcaatctcaggccccacaacaccaaaccggctacccgaaatagcttcaattagctttccatcagccccacgagctatgcacccaaagtcgtatctgcgttcatccgcaaagatggcaccatccacgttcactttggttgtgtgcagcgctggttttttccacagcacctgacccgaatgtggactaagaaccagcaacggaccctgctgttccacacgagcagatgtccactgttgcagcgtggatcgggcagagagaaccacaccagcagccgtcctgtgtttgctcttccaaaaggcatcgtttcgagcattccaaatgctccaactgaccattgcagcatcaaccgaaacctctacagaattggactccaagatcatagaaaaccagttgccaaaatcattgttactgccatgaagcacattaggagaagctaaattccaacaagattgagagaaatgacattccaagag

SEQ ID NO: 373262 - DNA, 871 bp, Cannabis indica
agaagcaaggaagcagcgacaacgagccgcccgatatgtaatgtacgatcaaaggttgtatcgcagaagttttagtcaaccgctactcaaatgcatcagcagggaagattgcggctacatacttcgtgaggtacatgggggaatttgcggcaataatacagggggtaactcccttgcattaaaaatcatgcgacaagggtattactggccaaccttgcgaaaggatgctctcgcttttgcgaagaaatgcgacaggtgtcagcgaatagccacatatacccaccaacctccgagtaacctacattctatcacaagtccatggccctttgcagtgtggcgaattgacttaataggcaagctccctaaagggaaaggtggagtcaaatatgcggtagtcgcagtagactatttcacgaaatgggctgaagccaaagcactagcaaccatcacaacaactaaattgcgcgagcttgtttataactccataatttgtcaatttagtattccatacaaactcatctcagacaatggaaaacagttcgattgtaaagagatgcgacaactatgtgacgatctgggaattaagaaggcattctccgcagttgcttacccgcaaagcaacggacagactgaagctgttaacaaaataataaaacacaccattaaagggaaattagaagaacgcaaggggacttggccagatgagctctcgcaagttctttggtcttacaacacaactcctcgatccacgactggcaaaacacccttctcgctttcctacgggtgcgaggccatggtaccagttcaaattggggcaggttccctacgtagagatgttttcaacatctcgcagaatgaagaaaaacagtca

SEQ ID NO: 373263 - DNA, 483 bp, Cannabis indica
tgtgacctattcttccagaaaccaatgagatcaaaaaacaaagggagcaacacagactaagccttcatggcattcatagctgcaacattcattttcgcagtcctcaaagaattatacagaaacaaaatcccttcattcaagtcaagacgaccaaacacccaatgactttccctccttagattgatgatgaataacacatgatcggcttcataccaaggcttagaacacggaatgcgcaaacctcgaatgtaatgcgctattgggtgggcagcgtgaatgtgcgacatcttagtcttcattgacttggctttgttaaatttgtggtacaaagcttggatggaatcatcaaagagacaatcagttgtcgcaaaattcaatgtcacagcggaagaatatttaccttttttcctaaggtaatagaatatggtgttcatatgctgaaacaaaaacatcacagaaacacaaatcaaaaggttgaacaac

SEQ ID NO: 373264 - DNA, 668 bp, Cannabis indica
gagggtgagtctttcccgacagtttcctttaatcctcctttacttgactcagattcaacgtttttcctctgtgcagactggtttgaagttggcttacacttattctcgaactaagtctgctgcctccaagaatgctgccatgtccaacaccataagggcggaagtggacgtggccaggaaggacgctgatgaagccatggttcaacttggagccgtctaaatggaattgggtgaagtcaacaaaaaacttcttgctgccgagaagaaagtggccgagctagccaaagatttggaggcttctgatcaacttgaggctgccatgacctccttgtccaaagaagtgaccaacctccaggaagaaagggaggttcttcgaactattttccgtaggttggaagcagagaagaagtccaaggaggaggagcttaacgctgaggtcgagaggctcaaagggaaggtgaatgccttagagacagccggtcacgagattttttatgacttttggaaggctaacccttaggcgaattttgattacctgggcgaggccaaagacatgtatcttgagtactgtgcttcccaagtggcctatggagagttcgaggcaaccacttctacctccagtctgaacattaacatgccccccgcctagacaacagatcctccagctc

SEQ ID NO: 373265 - DNA, 582 bp, Cannabis indica
tgtaccttaaaattgttgggactaattagtatgattcaccaccggaaccttcgctattagaagccccatccacgtacaacgtccatccttctccatttggtacagcagtgtcgatcttgtcatttatgagtgccacttcggtacttgggaactcgagaatgaaatctgccaaggcttagcccttgatcgcagttcttggtttgtatctgatgtcgaactggcttaactctaccgaccatttcaacaatctccccgatgtctctggttttgctaagacttgcctcagagggtagtttgttaaaactttaatgctacgggcctgaaaataaggtcgcagctttctcgacgacattactagggcgaacgctaatttttccatttgaggatagcgggtctcagcgtctaacaggtgtttactaacatagtacaccggttactgtcgtccttgatcttcgcggattagtaccaaactaatcgcatattctgacaccgctaggtaaatggataagacttcgccgaacatggaatttgataggattgggagctaccccaaatgcatttttaatgcttgaaaagcctctt

SEQ ID NO: 373266 - DNA, 1195 bp, Cannabis indica
gtttgttatgataaattttgttttgataaaattataatattgcatttaaaaaaatgaataaaaattattgttcatttattggttaaaacatgtaattcagatatttttatatatggaaaaaaacaagtaaaatacatgaaataacccataatttggtaaatgattctttaatgtttccattattcatgaaataaacaacaaaataaaaaaatatatagtttcgtatatattcaaataaatagaaattgttgatttaatgttaataatacaaaaaaaatatttatcttaagagcctgttagtaattttaaaatctggtttgaaaaaaaatatatttcatttaaaaaaatgctgatttattggttaattattgttgtttaaatatttttctactataaaaaaatacaatttaatggacatactgttgaattgcagacaaaatggcatcaatactggtactagttcaaagcaatggacattgggatgagaacaaccagtacactggtttggaagctactgcgatatgcatccaaaaaaaattgcaaactatacagaaactagtaggacggactgaatgaaaaaaacataactgcaacagaaattcaagtaccatacaaatgcagtttcagatacagtctggatatccaacattaaaaggtcacaaatgatgacagcctgaagttttacttgcagttaaaatcaacagaaaaggacatgacaaaacatacctttgtgcataaatatagtccccaacacaacaacaacatcacaaatacccttttttacaaggttgacaaagaaaatgaagtccacatgtttgaatatggaactcagtcagggagaacaccaacacatcaacaacaagaaaacaaaaaagaagataattatgaatttgactttcttgagtatgctaagataattgctgcagaaatgatggctcaactaacaagacagacaaaggatgaacaagaaagcaacgatgaagaagcacttgtcaccacagataaacatcatccaaaaattgagaaatggcaaatgtacaagataaggaaactttgaagaacgtactcaactactttgcaataaaacaacaatttcattgcaaggtgaaaaaatcttgcacaaaggaatttcaaattgagtgtttggataaagattgcaaatggtcactaagagcttcaaggaatgaggcaatag

SEQ ID NO: 373267 - DNA, 757 bp, Cannabis indica
ggagaaaaaatgatagcatatctgagcagaatacatgatctgcttgcacagttcaaaagttatagcctcaagtagattccaagagaggaaaatacaactgcagatgcgctagcccgtttggcgagcaacaatataagtgacaaggcgaacctggtcttgatccagtttcttgaagagcctagcatcacaggcgcggaagaaatcaaaatgatcgacacatctccgaactggatgacgccaattgcagcctatctcaactctggggaactcccagataaccgaaataaagctcagaaaatgagaagaaaggtagcacggtacatcatcgtagatgggatcatgtacagaagaggattctcaatgccattactcagatgcatcacatcaaacgaagctgcacaacttctatataaagttgacgacggattctgtggaaatcatgcagccagacagagcttatcaaagaaaattttaaggcaaggctacgtctggccgacgatgattgaagactcgaaagcttacgtcaagaagtgcaacaaatgccagagattttcaaagataccaagagctccgcccaacgagctgacacaaatgcaaagtccgtggccctttgccatctggggaattgacctaattggacaattacctaaaggcaaaggcggagtgcagtacgcagtgatagcaatcaactacttcacaaagtggactgaagccgaaccactcgcaactatcacatcaaagaaggttcaagacttta

SEQ ID NO: 373268 - DNA, 1189 bp, Cannabis indica
aattataatcgtataaaactgaccgtacggtttttggcaatttttggtttggcagtttttggcggttttggcagtttttttagtttaactattttttaatttcaaaaactgaaaccgaccgccatgtcaaaaataccaaaaccgaaaccgactgccaaattcggtgatgacgtggagccaaaaattcgattacggtctggtcggtttgatggtcagttttagtttatcagtttttatgacacctctaatatcaagtggtaaccctggtaaatcctctggaaacacatctggaaaaccactaaccactgatatcctagggaactggtctaaattcctagactcatcaacgatcacaaacagattcccataatactctaagtttctgtttcaacctaaacatgcccttaagataagattttgtctcactgcactcatgttggctcgataaacaatgaaataaccactaggggttaaaagagtcactcttttatgtgaacaatccacaatagcttggtatttagacaaccaatccataccaagaattccatcaaattgccccataggcaacactaataagtttccagataacttgtgtgcctcgaacacaatacaaactgacctacatatggtggataccttaccgtgtccccccataggttcactcaaatgtaacgcaagactaaaagtttcccaactcaaacccaacatactagcaaatctcaacacccttaaccgagcttaccaaaaagaatcaacattttgtatggtcagacaaatgtgaggctagtttttaggagctgaaacagaggttgattatagctccagtgctagctttgccttctgacaaagaaaagttcgtggtttattgtgatgcatctagacagggtctgagatgcgtgatgatgcaagccgattgggttatcgcttatgcctcccatcagttaaaggataatgaacatcgatatccgactcatgacctagaattggccgcagtagtgtttgcttcgaaaatttggcggcattatctttatggagaaagatgtgaaatttataccgaccataaaagtctcaaatatttctttactcagaaagatttgaatatgagacagagatgttggttggagttagtaaaggattacgattgttagatcctctatcatcctaggaaggccaatgtagtggccgatgc

SEQ ID NO: 373269 - DNA, 769 bp, Cannabis indica
ttgaatatgtagaaccaaccactttgatttccaatctcccatattagataccatcccttctaccccgttaatttcagaagtcgcccatttgctaaagcagtagaaaccattgtgaaggcctacgctttttatatcgtagaagtagctgaactcttctaccgagggagccctatgaacgtactccatatacatcgcgtaaaaagccagggtggtgcgataactattgggagttagctggaaaggtgatacgtcatatcgtttgaggatagccgcgataaagggatggaaagggactgataccccacatcggagaatgggtattgagattaccacatcctctgtggggataatcgcaggatttgtaaaaggaaggtgcgccctctgagttggcttaggacgtaaagacgcaagtcgcagcaggttcagcctcgtaaaggtggtaaggtctgatttggtaaccctcgaaaccaaatcctcgcacgagaaaggctcgttcagctgggtgtcatcgaccgagtcagtaccgctcccttctgcctcttcctcttcatcgcctgattcgcgagctggggccgtccagtcgtcgtctgtctcctcgacctcgacatcaggtgcatgcctcgaatgaataaggtagtcgcgggctgacaccgtggactcgctgtctcgaatatcaatggtcccaggctcagcgagctcttgcacatttttctctatgtccgaagaagacattggacctagctctatgcctacggtaggcgcgatgtcc

SEQ ID NO: 373270 - DNA, 1125 bp, Cannabis indica
aagaaaagagattctagggtttatttattaattaagagacttcattaagtatatagaggtaaaaatttgcttgatatttgtgatatttttgagaagtccaatacgcaagtcagacgagcccattaataatggatccaacaatattgggcccaataagacagtcagacggattcactaggccttgaaatagactaacgagtgagcctatgggccacaagccggatcgtcccgcaaccggctccgagcccagccagtcagccaaacgggtgaaatcaagtaaatatggaaccagtcaggaagacggttactactccctaataattagggaagtaaccaatttgaacgagtcggacgagtgacgtggacagagggcaacaacactaagaacacactataaaaggaaccatacgatagacgctggagaggacacattcgagactcacactactcactgactcaagcagacagtcgccttttctaagcttttctcttaagcctcaccatcggagttactcttttagtccgtctgtctgcttgtccactcatccgtccggctaccatttatattacatttattttccattattattattttttactacaatcgtactgacttgagcgtcggagtccctttggctgacaccccaccggtgctcccaattgaacttttgtctctctctttgttcttgacaggttgctggtgcccaaattccgtaattgtagatttcaccttctacaaagtctaattaataaatatgttaaatgacaattttatttgataattaattttaattattaaataaatagttttggcatttaagtggttagaattggaaaaatggcatttctgagaaaataagataaatagttggaaaaatggaaaaattgcaaagtgggggcccacatcctatggtcgcccactattgctctatttttaccatttgttttatttttttaatgctaaataatttaaacgtaaacctaggtggttccctataaatagatagtgatgaccacaaattgaaggatgatgaacacacttgccttcagtcaaaaatttgagccttcttccctatgctattcgaacctctcttctctcttcctctcttcatatttttcatacct

SEQ ID NO: 373271 - DNA, 819 bp, Cannabis indica
tggtgtcatcaaaagtttctccgtagtggcgcatcaccaagcaaatggtcaagttgaagcaatcaataagacattgaaggatatactaatgaaaagagttgaggatgcgaaagaaaactggccggaggaactttttgaagttctatggtcgtactgaacaactgagaaaacggcaaccggaccgactccatttgccatggcatagggatatgaagcaatgctacccgtagaaatcgagccaccatcccatagaagattgacgtatagccaagaagtaaatcacgtactccttgccgaatcacttgatgaaatcgaagagaagcaaaccacaacaaacttaaagctgatggcccatcagcaaaaagtagctcggtatttcaacaaataagtgaagactcataaattctttgtgggagatatggtcctaagaagagtatttctaaacatcaaagacaatacggcaggtgtgctcggacctaactgggaagggccttacaaagtggtcgaagttctcgaattaggagcatacaaattgggtaagtatgatgaaaaatgcaactcgttttggtaccaaggtattggcatggagaacatttaagaaaatactaccaatagaagtactaggtcggatgaccataaacaaaacaacatttactcttaagtgaatggccttctgggcagaccacacccaaaggttcagataaaattacaaagtactcaagtgggatgaccaccatttaaagtacaatttctaatttctacaatttgttttatttcatattaagctacagatcagattagatcaaattaatagctttg

SEQ ID NO: 373272 - DNA, 632 bp, Cannabis indica
ttattttttaattttattttctagatgatatttaatttatttcaattcaaatataaatatcatataacagattaacagaaatcagttaaatctttttattttaatattatctttttaattaaatagattatccaataatatatttgattcaataattaaaagataattaattaatttaatttgatttattttaatattaaaataatcaaacaaaattaacatgggcttttatatgtcaacctacatgtgtgggctaggcctacatgtgtgggccatattttaaggtccaaaattaattttttaattttaccacaaataagatttattatttattttaccaataaataataattgattaattctcattaaactcttatttcacaaggatttaaataaatttattttcactaaaataatatacttctctctttaagaataatattacatttaactagtcaatatagttttatcaaataaattaaatagataaatactattcaattacacaattcataaccattataattatttaaaataataaatttcataaattactatttggcccttaagaattacttctcatacaaattaattctcacccaaatttactcatcaaataaaatcttccccta

SEQ ID NO: 373273 - DNA, 657 bp, Cannabis indica
cataccaacatgcccatttatgtctacgtggcgtagacctatgtgttgcgctcacacatctatttaaatctacatgacgtagacccacgtgttgctctcacacgtctaaatacattaaggccttagaagtggttcatctcggttatgagtaccgagtccaacctgattatgccttgagcgcataatccctaaatctcatttcaattaacatggcatggcatttatacacatatatcactagggtaataaccctaggctattagaccgttcctattagggtaataaccctaatcccggttactaaacattcatgcatatcattctcaatataagcgccactgcgcatactctacgtgctaatcactgtcttacctgttgtcccgcaatagtagagattccaaatccccgggtgctcctgaccaggtgccggtaatcctagtcacaatactgggatttacacaaatagggttaatccctaaattcacttccacaaaaatataaaattggcatcggaatcacagatcatcacatagagctcaaaaagagctttccaacggtataaagaatgtcccaaaaggagtccctagtcaaaagttatggggaaaacaaaaacttaaaaaaaataacaatctgccattatcatggtcgcgaccactg

SEQ ID NO: 373274 - DNA, 457 bp, Cannabis indica
gagacattatttcaaagtccaagtcacctggttcaaaagcaatcgtgactttgggtaaaaacaaaggcttagccaaagtaataaaggacacactgggaggttctggccaagctgcatctcgcaagaaacggcgtttgccttcaatgatttattgcaagaagcgcctgtggcaactagcattatcttcctaataggctctcactaagtgttccctaaccctaacatcgtttaactctaatttggatgtgggttttgaaggattgggtttataagggacagttgattttgtaggaaattcaagttctaaatcttctggacgataaatttctgaaccagattggaacattgctgcaaggagaaagcaatcccaatccttggaaagaattttatcaaacctgaaggtggtgagttgaaggttctaaaaaaaaaagaaaaaaacctacatattgcctgaacc

SEQ ID NO: 373275 - DNA, 536 bp, Cannabis indica
agtattatctcaactagtgaggggaccatggacctatataatcgagctttcaataagtaggtctagaactaaccaagtcaattctctaactcataattttgccttgcggactatagatttggacttgaatacaatctcagttatatagaacgctccatatgtaccatgatatagatacgttatgattatccattgttacaatcctaatagtcaaagatcctctatagatgatctacactgaatagggacaaatttaccgttctacccttcaatgtattttatccttgaaacacttagctacctatagatgatcagtaaactaataaaattactgaaatgaggtctcaatcatttatctctattcagccaagcttgaaggaaatcattgtttcacttctaaatacttatagaagctgtagattttatatctatgatcaatgctcctactcaattgaactaccatgtccttaatttgtatgtcacgagaagatccaattggccgactttaacgaacaaattgaagaacataaataaca

SEQ ID NO: 373276 - DNA, 657 bp, Cannabis indica
taattacatccaattctcagtggggggccatgagaattgaagagtgtaattggaacccctcaatttcttctaattacacagttacactgtaattatatggtcagacaaacatgccaaattgtgtaattacctccaattacacacaaatccaattacatcgtggcttttccaaacgcaccctaaaagtttttggtgattacagagtgtaattacattcaatttttatgggggtcatgagaattggagagtataattagaactactcaattacctccaaatacacaattacaatataattacatggtcacacaaatataccaacttgtgtaattaccttcaattacacacaaattcaattatattgtagctttccaaacacgccctaatacttttgttaaagaataaaaaattattattccctttgaactttgtcacttaaattagtgcgtgctctatcatattagtgttattaaaaattgtccccttaactttatcaattagtaaaaattaagacttcaattatttttttaaaaaatttaaaggcatgacatggtggacaatacaatgacatgttcatgaattaattttaaaagtaaacttaatgaaaaaatagagaaatttgcggtcaaacccccctatgtttcaattgttaaacac

SEQ ID NO: 373277 - DNA, 776 bp, Cannabis indica
gatcgggactaggtttgccttgtcagttatattgctactcgccaatcgggctagcgcatctgctgttatattttcctctcttggaatcttcttgaggctatagcttttgaattgtgcgagcatatcatatattttgctcagatttgctatcattttttctccccgagcctcgtattcgccagatacatgatttaccactagctgtgagtcactgcagatctcgatgtgctcggttttcatttccttcgctagtttgagtccagcgattagggcttcgtattcggcctcattgttggaggctttgaatccgaatttgaccgctgcatgcaggtgttgccccccaggtgtgacaagggcaattcctgtgccggatagctgatctgtggctgatccatccacatgaagcttccaagtcggcttattttcagtgctattcggctgtggtgttggctcgggatcgccttctgggatgctttcaatttttcctgtgcattaatttttcctgtgcattcaaccacaaagtcggccaaggcttggcctttgatagctgttcggggttggaagttgatttcgtattgccccaattccactgcccacttgagtaattgcccagaggcatctggcttttgcagtatttgttgtagtggtttttcggtgtacacccgaacaggaagagcttgaaaataaggtcttagctttctttttgctaagaggaggcagtaggtgagcttttctatcaacggatattggccctcggcctcgatgagtctttactg

SEQ ID NO: 373278 - DNA, 922 bp, Cannabis indica
ggagacattgtcattgaaaattgcaagatcgagtcgatgttagtagatcctctaaacaaagggttaagtgtcgtgttgtttaataaccatgttgttaatatggacattttagaatcttttgatcttttgagttagtggaagttttcttttctgtttgtttttagaaattatgattatttataattttctaaataaagttatgaactacattttatgtttcaatattttattattgaatggatatgttttcaattatgttttgttatattctcgagaatgattgaattgaaagcatgtggttcatattgttgtgatcaaggccggctataatggagtgcaaagtgggctactgcacagggccaaaaaaaaaaataaagggcccaatatattttttctttaatgctcaatagtttttttttaatgaacctaacttttgaaagagctaacaatttgtcattagtcacttctatccaatgcccaaagcccattttcaattctataatgcttttaagtaaaaaaaatctattactgttatttattatttttttcaaattttttatattctttttttcttatattctttttttttgttctattggaatcaataataatttttataaatagttggagttttttggtgttttgtaaaatatataactgaatgataatatttaaaaatattatttctaaattacatttttttgtaggggcccaaattttaaattagaacagggcttccaaaatgtttaagacggccctggttgtgatcattgtcttttttaaattaattgcttaatgacaatggtattttgttggcttaatttttaagcatatttagtgacactaacttattttaagtagtgtatgattaatttcactggcttatttattaaacctcacggtatcagtgaaattgaggact

SEQ ID NO: 373279 - DNA, 1220 bp, Cannabis indica
acttatgaaatggctttggcgatttcctttagaatcaaactcactttggcataaagtgatcaaaagccgttatgggagagcagaaaattgttgggatactaaataggtcatagactatctccaagaggtccttggaaggatatttcagatctttatggtaaatttttggaattggtaaaattcaaagtgggcagtggcacaactattcggttttgggaagatatatggattggagatacaacattaaagagtcgttttctgacctggcagtggtatcaaaggcaaaaaattcaagtataaaagatcttgttgccattgaaggagaggtaggaaattgtgttgcgagctggaattttaagtttagaagaaacttgatggagagggaaatgcctaatctaattgttttattgcaactactggaacatattaggctgctcaacatattagaggatatcagattatggaaaccagatcctagtggaattttctcttgtaagtcaacattcaactggtttacttcagaccaaaattttggtgatttgttttggacgaagactttatggaaaagcacgtgtcctattaaagttaaagtctttggatggttggtggcattaggaaaaattaatgtgcatcctatgatgcaaaaaaggcgaccatttatctgcttgtccccggggtggtgtgtttgttgtaagaaaagtagtgaagaagtggcacatttgttcttggggtgttgtcttgctcaaagactttggataaagctgctgaacgcctttgagatccaatgggtacttcccggatcagtcccattaatgatggtgagcaaggtggggggtagaaagggtagatcatacctatggaggacagctgttctagcaatcatttgggttattggctcgaaagaaataacagaatttttgaagggattgaagcctcagttgaagatttatgggaaaaagtcagattttggacagctgtttgggtttataaaactaaaagtttcgagcagttttcgttcttagatttgaatagagattggagattgttgtgtaatgtggcttaatagtacctgaattgtttatgtctcgttggattggttttgtttcaaatgttttatatgtttttgatatagcacttgtaatcatggtattcctccgccacaagtgaggctatctatatataacgggggaggagtcagtcttagacaaaggcctctttct

SEQ ID NO: 373280 - DNA, 1044 bp, Cannabis indica
ctagcttgctaaatgctaaagctggccaaaaattaacattcattcaacatttcatcacaactaattgaacaaagacaagattacttagtcattgcaaaaatcaaaatactagttcatacaagggttcataaccacccaaatctcaaatattttagttcatagctgaaattaaaaacatcaaaccagaaaatgaaatgttcatggagtttaagagagtattaaagattagaaaatgataagaggagagcaagagaaatgagtggtgagctcaaatcttctcttttgaggttgccttcttctcaatcttcttcttctactctttgtactctcttcctttcctttcttttttctgtacttaaatctgaaaatttgtactgctatatcattcaaagtgcagccaccatttctatttatcccccttctcttttgctccccaattagggtactaaagtttaccctaattggaaatccaagtcatggtccacttgcccttcattttccacctattagttgagtcattggccacattttcgccacctcagctcttttttttcttcattaatgccagctggactttctgccaaaatacacttactgggctgacaaattgctacgcgatgattgctatagcaatgccagtcagcaataagcctttttctgctccttttcctccttgtcccaaacatttccaaatacctattcttgcattttttctgcttaatacacataaaaacaacaacataagtctatttaacacttactaacacacacacttccatttattacaaagacacaacaaactaaacacaattacataatatagacactaattactctattatttagcttgaaattcaagtttaaagatatcaaaataactctaaatcttagagttatcagcaagtctagaaatctgatgtggtgttgtctaagagtattaaatacacccttatcgactaacatatagttcctcttcttgatcttaagattcacttgattgctttacaatgttcctatcctggattaatctgatacctactcatt

SEQ ID NO: 373281 - DNA, 646 bp, Cannabis indica
ttacaattttttcgaaccccactcagggatccaactcatcttcttcagccaattctggctcaatggtttcccggaccatcagtatgggcaggtgggttgcaacgttgtaacattgccttgcctccccctgatttcctctcaccgtccctattccagcttcctgggtagggaactttaagcacaagtgtcgtatggacgtgactgcgccgaaatctaccagggccggtcggccgaggatcgcgttgtaagcggtcgggcagtccaccaccacgaaagtgcagtatttgaatgtgctttggggggtgtccgggcacaaggtgacaggaagtctcactttccccattgggatgagtgtcgttccgttaaaccctgtgagttgggaaccactgggtgagaggtctcggtccgtcaggcctattgcagtgaaggcctccttgaaaagtagattcacggaacttccgttgtcaatcaagactctggccaccactttattggcgatgggggtctctatgaccaacggatcatggtggggaaaacgcaccgccttggcgtcttcttccgtgaacgtgatgggttgatccatcagccggggcctttgagctgggagttgagtaacctcccaaacctcatcgtgctttacggcccc

SEQ ID NO: 373282 - DNA, 592 bp, Cannabis indica
taaaataatttccaacagatcatactacaaaattatcctaaataattaggagcaagccattactggcacaaaaatattaaaagggatcaaagtaggattgggcatccgatccaatctaatatgtttctcctcattcgatccaatccaattagtaattgaatttagaaaatcatcacccgatccaatccaattagaccacaaaattcaatccaatccaatctaattactaattggattggattgattttttaattggatatctaattacacacttaaattttaatattaacttaaaaatatgaagaaaaatacgtaaaaattaaatatcactctttatttaagttcaatactccataaacataccatcgttacaagtgtaatacaattaaaagtgtcaaataattaaaattacaacattgctaagcaataaaaaataaatacacaaacaaccatgtgttacaaattcaacacaaaaaaaaatccaataaaaatatagttaatatattttttaaaatattatttattatagggtaaatacaattttggaccctaagttttgtaaaagttattaattggaccatgtgttttgtta

SEQ ID NO: 373283 - DNA, 381 bp, Cannabis indica
acgtaatacgcctaaattagttagggtgttacaggtaatgcgtgaattagagtgctttatgaagcactgagattatggagttattgtaatgtgtgaattagtgtgttttatgaagcaccgaaggtgagtatttataatgataaatgtttaggaggttgtatgaaacacagagattgttgattataaataactatgaatatacttgattacgtaataagtgtgctcatatagacattaagttatttatgcgccttgagtatgtatgacctattggtatatatattacattgtaatgaaatttgctggcattttctatgattttatattgtagcttttcttgctgagtcattgtgactcgcgggtgcttcgtggtgcagataa

SEQ ID NO: 373284 - DNA, 597 bp, Cannabis indica
aaccttcgctttgttgaactggacggaagttgggatcaatatttaggacgtgcaaaattacagaaggatcgattccgaccatatcctcatgtgaccaggcaaaaacgtccaaatttgctctcctaaattttatcaatgttgattttacctcgagcaacaaaccttttccaatttttagctttctagccaaaatatctggatcgatctcgatcttttccagttcttccacaggtccaacattgctagttgggtccccaagtcgacgatccacaccttcatccctgccttgggaagttccctacctagaaatgttttttcccttgtccatgctctggctagaggatacttcctttttagccttggcaacggcaaggttataacattcccgagcaatctaatggtttcctcttagacaccctaccccattctttgttggaaacttcaagcatgaatggaatatcgacgtaacaacctttaagtcatacaaggatggtcagcctaacatgacgttaaaggttgatggaacgtccaataccagaaattgtgccattgtagttatgctcatcagagcttgcccaacagtgaggggtaggcgaa

SEQ ID NO: 373285 - DNA, 870 bp, Cannabis indica
gtcattgatctttccaaggagctaactcctgcacccctctaccccaaaagctgcttagtccaaggagtctcggggaggaagcttggacaagtctgaaccactgaagggtgggtctgagctggtcagaagtgaacctgaacaggtgcgggcacctactccaccttttccggtgcttccagaggccaagaagggcaaggagatgctgacccactacatgaaccggctggttcctgaggtcagtgagcaactggctggtgctgacaatgactcttctttggagctgctggtgggcggagttttgaaggagttgaccagggtaagtctttcttgatattcttctttaagtctctttacttggctcaaatactcaagttttttctttgtgtaaactggtcaaaagttggcctacacttactcccaggctaagtcggccgcttccaggaacacggctctgtccaacaccatgagggcggaggtggacttggccaagaaggatgctgacgacgccagggcagaacttggagctgttcagatggagctgggtgaagccaacaagaaacttttcatcgcccagaagaagataactgagctgactaaggatctcgaggtttctgaccgtcttgaagagaccatcgacaccttgtctgctgaagtgaacagtcttcaggatgagaggacttctcttcgagcagttcttcatcgggtgaaggaggagaaggaagctaaggaggaggagctgacggccgaggtgacgaagctgaaagagaaggttaatgccttggagacagccggtcttgagctctctttgacttttggaaggctaatctcaggtcaactttgactactgggtgatgctaaggacatgtatct

SEQ ID NO: 373286 - DNA, 832 bp, Cannabis indica
gtttccttttagttaagggttatgtcaaaacccgagatgttaattcttaatttccttattgaatgttaatttctagtttctattatatatcaaattgtttcttttcttctatgttcaatgtcatgattattgttttaatcttgtttagacggtcgcttaattaagttttactttaatctaccgtcatcttaggattaatattcacctaatagtttaggattctaagtgtttgtgataaattgcaatttttaatattgtcaaaggtattttagttgtgatgaagaataaaacctaagttaaataaattatatgcttcattaatttattgcctagattaatctatttccaaaaatctcaaagccttatctaagttaaataaattgcatgttttgtggacttactgcttagataaaagagttaattattcagtgcttcaccttgattacatgtaatagggagattgggataatgactgcttctgcgggattagtagtttgattggaaattgaaattacattcattaataagaattaggaatgattgtagagggtggtgaataacctttaactagtttctcatatcgtagtctcttttttaatttatttttatttttatttatgttattttcttctaaacataaaaacctcattttctaactattgtcactaatttttgagtaattaaataaacatagccctcgtgggatcaacccttacttacaattatactaaaataattggaggtattagagataaatcttagtaaatttgttgtggcttacgacacgcatcaaatttttgggactgttgttgttttattttattattcatat

SEQ ID NO: 373287 - DNA, 805 bp, Cannabis indica
aaataacttttattagttgagaataaataattaataattgaataagtaatgaatttaatatttaataaattcttacaatataaaatattaataaataattatattaataaacaaaaaatataatatttcattaaataaaaaataaaaaaaaattgagataataaaaatttttgttattttaataatttataataagataatattttcttataaagctggtaacaagttattttaaatggacaattatttaaattaatatttatttaataaaattagtgaaatgaattctaaaattaagtattttaagtaaaaaaaatgtttgtatattttatgaaaaataataataagcaattaaataattataaattactttaatgagttgaatataaataattaataattaaataagtaataaatttaataattaataaatccttgcaataagaaaaattatcaaataatttgataaataatataatatttaattaaataaaaataattcgcaagtattgttgaatatgatgacgcaattgcctcagacgtctcatgtgtcagagccttggatgccacaaatgtcacagatgccgcaaaatgttcagatgtcgacacaagggcagcaatatcagaacacatcgcagacgatgccgacacaaccatggggagcaggacatctcaaatgatgccgacacatctaggacaacagacttctcagatgatgccgacacaacagggcagcagacatctcaaatgatgcccgacactacatggggcagcaaacatctcagatgatgacaagttcgcaaat

SEQ ID NO: 373288 - DNA, 606 bp, Cannabis indica
atttttgcactctgacgtggcatcaaacgatggtgacacgtggaatcaactttgagtatctgcttggaggatatagtctgaaaaggatgcctcgctggcatacccggagcgaagcgatcagcaatccgcacagagtaaccaacacttagcaaattcagcttttgcattgtgagtcatcaacgaaatgcctataacttggggatcagattacagagatatggcatacccacgatctcacgatcagtgtattctgcatttatcccacaatcagtgtattctgcatttatcccacgatctttctatttatatccattgtaacgagaagggaaacacttcctctccaagttcacagctctataaatagtgacgcatgttcactaggcaaagggtggcaaacagtttagtcgagactttaccctagaaatattatctaagaattcatattcagagatactgttgtaagagctataagaaaaggaacctttctccttgctcttgagtcaatacaaataacgaggattaggctattaccgatctgctcggggttgaacctctataaaattcttgtgtctttatattgctttactatatatcgatcgctataaa

SEQ ID NO: 373289 - DNA, 871 bp, Cannabis indica
ctgaaggcagtggttcaatctatacccacatatgctatgagctgcttcagattaccgcataagttttgttaccaaattgagtcaatgatggctaatttttggcggggatcaaataaaaatggtaacaaaatacattggaaaagttagaatttgtgtgcaaatcaaagtttgaaggtggtatggggttccgctctttcgtacattttaatcaggcattattggctaaacaagcatggtgcatctttgaaatgccaaactctcttctcagccgtttgcttcaatacatatacttttccaatacatcttttttggaatcaaacattggtccttccccttctcttacttggcaaggaatctgttggggtcgagaattgttgctcaaaggccttcgatataaagttgggaatggtatgcatattaatgctaggacatcaccatggatacctggccatgttcaacacaaaccagtcttttattcaggaccttccaacctgccagtttcatacttcataatagagacaagagaatggaacttgacattgttggaagctcacttcaaggagattgatatagacagaatcctttcaattcctctaaactttttttgcaggtgttgataggcttatatggcactatacaactgctggtgtatacacagttaaaactggtttccaccttgctactgatcttgaagatgctgataaggaatcttcctcgagctcctacacgactggtggaaattattttaggaatctcaaactaccatcgaagatcaaaaaatttttgcgtggcgtgtaattcaaaactatcttccagcggctgctgcactttttaagaaaaaagtactcacttctgcagcgtgctctttatg

SEQ ID NO: 373290 - DNA, 654 bp, Cannabis indica
gatttatctaacttgcaaaccttatgttcctggcctgggatcacgaacccttcaggttgatccatgtatatttcttcttctaattcaccattaaggaacgctgtcctaacatccatttggtgcacaactaaattgtgtatagcagccagagaaattaaaactctaatggatgttattctagtgacaggtgaaaaagtgtcaaagaaatctacattctctctttgtctaaaaccctttgctactaagcgagctttgtatttgtcaacagttccatcaggtttcaatttctttttcagaatccacttacaacctatagttttgcacccaggtggtaagtttgtataatgccaggttttattcttaataagtgagtccatttcatcatcaacggcctcttgccacaggtcagcatctatggaagacaaagcttcttggaggttggcaggatcctcctctaaggtgtaagcacaaaaatctgaaccaaaagttttttctactctactctagctctcttgcttcttctaggttctatttcattactctcagtgtgctcattatccctaatggtaggaacattgctagtagatgtacccccactatttcttaatttaaagggaaatctatgttcataaaattcagcatcattagattcca

SEQ ID NO: 373291 - DNA, 671 bp, Cannabis indica
cctctcacctgaaccctctttctctccctaaccctctctacattttcaagctaaattgagtgaattgcttaactcttgaagcttggaattggaaggatttcaagcttggaattgaggtattttctagctgagattatttggaaatttctgttgtaatccttgctggtattaattgttgaaaaagcatgtttgggattgtgaattgcatgttcttgatgatgatgatgataggttgcatgatagtggtttctttgattaggttgagcatgttatgcttagatttttgatgttgtgcttggttgagctctagatggagttttagggcaactctcttgtgttttattctggttatttctagtgtttgattgctggaaattaattgaggagcttggctttgaagttcttgagtatgagcttcagtattgctagtttgaagcatgactttatgtgtgtcatgcaatctcaaatcttgagtttattgctggaaatttgtgtttgaaacatgagttttaaatccctagtgattgctagtaactttgaattatgatttagaagttttggttaggagttggagtgagtttgattagagtttcttgctgaaaattcgaagttttcttgctagtttttgggttctgcaccaagatgtcggggcatgctctggagcatgccgc

SEQ ID NO: 373292 - DNA, 498 bp, Cannabis indica
tcttcctctgcttgtgttcttcttctcattcccctcaacatgagcctcagttcgcaaggctgctgccacacagtcaggttgttaaaggtcaaaggggctattgggcacgtatcgcaggcctcaaacgacgcatgaattgttcaatcaccaagggttgatcaaatatccccttgtcttagaccatcaaatactccaataagagccctcctgtgagatggactaaaatattgttccctgaaaacttcctcaaattctcgccaagtcatcccatcagtttccattgtcctggacaaggtctcccaccaatctgctgcaccaccctctaacttggacacagcgaaagtaacttggtattcctcaggtgttcctattgtgttgaaatttttctttatctgcctcaaccacctttcagctaccatgggatcttgtccaccctcaaactcaggcacttggatccgatgaaagatttgaaaatgatgactctgtcgagcggcagga

SEQ ID NO: 373293 - DNA, 677 bp, Cannabis indica
tggaattccgaggagaagctttccatgagttgaacttccagaggccagcttgaaataaaaatactaggcggcttccgagagggtagcaggaaaaaatctgcaacatacctcacctcgtaccccctacagatccattttgcatctcgaaatacttcaggtgggaaagaggatcttctcttccgctgtacatcttccaggttggcattttaaacttgtggggtaacgccaggagattgatctcaggagagaaaggggttccacgtgctcggtccaactcgagatcattgtttctctgtccaaccatgccttggaacatattctttagttcgtccagttgtgcctgcacaactggactaacctgttcgacattttggccgatctgagtcacgtcagaatctttctgagcagaaatttgagcacgagtttcgggctgcacgatcggcgtgccaagctgatcatctactcctatccttctgttcagattatttctgagatcatgagtcgttcccaactttggaatacagatacaccttgttgtcttagtgattgattggtttggttaacgtgctaaaccgacactgttaacctggttggaattatcaggtatgacttcttccgatgaattctaagctaaggtctgcccactactgcttagcccacaagtggaacctgtgact

SEQ ID NO: 373294 - DNA, 1062 bp, Cannabis indica
accaaacgacgaggacgtggcctcaagagaaactgtgggttctgagaaagaagcaggagcccctgatgatgattacgaaggaaacttcgatgagtacgcctacgacgaaggcagctactcagagttggtactcttaaggcaaaaggctgtcgatcatgaagctgaaatcgcagcccaaaaagagcaaagccaaaagatgcaagaggtgatgctggccatgcaaaaagccatggaggcagcaggaatccacgtgcatccgaaagccatccctgctggacttggaaaggaaccagaggaatcctcgccaagcacccaaaagtagaagtctagggaaccaagccctataaggtatcccgctgaagggaaccaaaagaaaaaccctacttccactcctggaaaaaagaaaaaggtgcaggatccgcaaaaggtccgctcagatttcccgaaagggaaaggtccgcagaggggcaaactccaaaaagggagtcttggcccttaggatcgagaggaccgaaagagcgtttccgtgcaccaagagctcggagggagaggaagaaggggccagaaatgtcctcccattgatctgcgaaatcagattaacgggaaccaaggtgatctccgggatcacctagaccaaaagaaatacggacctgcggtctccacgggaacgttaaatgaaggaatcatggcagaattttccatactccgaaaagacatcgcccgagtctcccggagacacaaaggcgacgactccaactcagattgtgaggaccaggagccgtgtgctaaacacatcctagaagcagctctccccaaaaactttaagatgcccgaaatggcagcttatatcgggaactctgatccaagtgaccacctgtcgcggtacaaccgagtcatgacagtcatgagggtcagcaatgatgctaagtgattgtgcttcccgcttactctaagcagattcgcggaagaattgttcaagaaattggaaccaggatccgtgggttgttggaataagttacaaaccaacttccgaagacagtttgtcgccgcaagaaaagtcaa

SEQ ID NO: 373295 - DNA, 590 bp, Cannabis indica
attcataactatcatgcggtctaatttctaaaaattatggctgccacatacgaatgagtggccccagagtcaaataacacagagaaataagagttgttgactgagagctgacctgttaccactcaagggctggcttctgcatcagcttgagttattgcgaacaccctagctggagtgggtttcgctgcggtcttcggtgccttagttctaagctaggggcaatcccttttgtaatgccctggcatgccacactgaaagcatccctgccctttagactcccccagatggtgctttttacaactggggcactctgggtaattgtatcaggttttggtcccactctggcgattgccccaaccctggttcccccagaacctcttgttctgactcgagccactggttgcagtggatgcctttcttttttggtacattgtcgaaccactacctcccctgctaaaacctgatgcaggaggggtacgagccccgccaacaactggagtcccaccagactctatcatgcatcctactgcgccctcagctcgtagtgccttgtccaccatttaagcttaggtggttctttttgggtttta

SEQ ID NO: 373296 - DNA, 740 bp, Cannabis indica
tagtgacgactactttatgagggatcacatcaatcaagaagggacaaaggattatatccacctaacccctaagatacctatagtataggctatgtatttcctattttgcatcgactaggaatatgtgcccctatcgaacctgcacagaaagacacatgattcagttctagggatcacccagaaaaacactataaataccccccaaacgcactaagacgggggtcgataattcggggttcataagaattaaagagagcaactaagagggacatctaccaagaacattctctgtaataaatactctcataaataaaaaagactcgtggactaaggctcattaatactccaaccacgtaaaaatctcatgcattaaacttcctatagctttcttacatatattattaaatttgttgccgaaaacctcggtcaacattttggtgctttaattgagagctgaaggaagcgtctctagatagacaacagtcttataagctcaagcaacaatggtggaaacttgtaacacacgtcagccacgtcctcctcaagatgctcaaaaccctgaagatgaggaagtggcttcaagagtcaacgtggattctgaggaatgagaggaggccaatgatgacgagtacgaggaaaactttgacgagtacgacggctacgacgaaggcagttacacagagctgttgttcttgagataaaaggctgctgatcatgaacctgagatcacagcccaaaaa

SEQ ID NO: 373297 - DNA, 537 bp, Cannabis indica
ccgttcaaacaacagatcccccaactcctaccggcccaaaagatccaaaccaagagcctgggactccaactgtttaaatacttcttcttttatccttctctttttatgtatcttattcggccacaaggtcttttttaagacatcatgaccggccaagcggtctttaaacttagaattatttttcattttacagacaactggctgactgggcagcttttaatctcgatattatgtgcttttgttatctttaatgaatttcattctttgtttataatcatcgtgcaattgtgactgttttatctttaccaaatgctttgtacaggtataggtgccccccaagtaaccgagcagacttatgactcttggtcacttatttatcacaagtatactttttatctgttaggtgctttaggttcgacaaaaccttttgtacgcactggatggtaacttagagaaatgctgataattttgactcaattttaattttgaaataaacatctttattcatttattgatcgaaaatgtgtttgttaccgt

SEQ ID NO: 373298 - DNA, 839 bp, Cannabis indica
gatttttggggaaaaatcacacaaaaatcgggttttgggactgctggcatcaaggctgcacgtgcagcccaaaacaggttgtaatggctcaagcacgcgcgcagacaggggagattgcagccctatctgctgagaaatctcggcgggctgcagggttcccatgggcgtgctgcagggtcctgggcgagacgcacgggcgtggatcccaggtggtccgagtgcctggtgcacaacgatgcacccactcgacagccatgaagtccaattttccaaaattcataactccttcgtttttttcggaattaagttccgtaaaaacaaaaattgcttaattttttacaaggaatccaaataaaatttttaaaaatagaaaaaataattttcatggaaaaaaaattctgtacaatacatacattcatcaaataacacataaaccacatgaaactatccaaatcaacacaaaacctcgttttaattaaaatttcatgaaagtaaataattaccatggctctgatactagttgttggaaatattttaccaggatctagatttgctaccatgtatgtttcattaacaacctaatatgaattttaaaactatgaaataaacacatataaagtttactaaaccttacattgggtacagcggaatataatgaatccttccattcagatctctagcccttgattcctttctgtagcagagcattatcaagatctgaatctggatttctttctctccttcctttgatgcggattctcttttttgttgtttggattcttcatagtcttacacactatgattgagataccacttgatgtgtttgggcactactctat

SEQ ID NO: 373299 - DNA, 1038 bp, Cannabis indica
gttatgtcaagttcatgaaggagattctgtcaaagaagagaaagatggaggactatgagacagtggctctaactgaagagtgcagcgccattttgcagaagaaactccctcccaaactcagagatccagggagtttcactattccttgtaccattgggagaattgaaggaataaatgcactatgtgacttgggagccagcattaacttgatgcctctgtcagtgtttaaaagattgcagttgggagaagcaaagccaaccacggtaactctacaattggcggatcgatcactagctcatcctagaggagtcattgaggatgtgttagtcaaggttgacaagttcatctttccagctgactttattgttctggatatggaagaagatagcaatgtcccaatcattcttgggagaccattcttggcaactggccaagccttgatcgatgtccagaagggtgaattaaagctgagagtccaaggagaagaagtggtctttaatgtgttaaaggcaatgacatacccaaaggcaagtgataactgtctcttcattgatttgattgatacaattgtgagtgagaaaaagctgctagatgatcctctcgaactgagcctaactgaagatgaattgacggagcaagagggacaagatgtaatgggttatgtgaaatggcttgactcctatgggccattgaacagaaggtattatgaggagttgggagtagttccaaaagagctgatgccatctactgaaaaacctccagaacttgaattgaaggtgcttcctagtcacttgaggtatgagtttttgggtgaagacaaaaagctgccagttattgtgtcagcctctctttctgatgtggaaactgatagactgctgagggtactccgagctcacaacaaggccattgcttggacactgggtgatgtcaaaggaatcagtccttcaactgtgatgcaccgaatcctgatggaagagaatgccaaaccaacaatcgacgcacaacgtagactcaatccacctatgaaggaagttgtca

SEQ ID NO: 373300 - DNA, 776 bp, Cannabis indica
tagtggtggatgtttcgatcttggaaagaatcttgtttcatggcacagtaagaagcaaaactcactctctctgtccactacagcggatgagtatattgttgtgggtagttgttgtacccaatagttatggatgaaaaaaatgatggaagattatgagtttgatttgaaaactttaactattttttgtgataatactagtgctataaacatttcaaaaaattcttttcaacactcacacacaaagcatatagacatccatcatcactttattagagagcttgtggaaaatttgtcttagaatatgttaaaactagcaagcaaataacagatatttttactaaagctcttgactcggtccgatttatctctctaaggaaatccttagggatttgtactatttaatgtttgtgttcttcatgatctttgatatttgagttgacttagggttcataatgtcttgtatttttctttgtcctaaaagaaaatcttaaccttataagaattacaatcattattttattgctaatgtttttggtgttatggtttcatacaagtttggttcaggaaaattgttcactcctcccagaaatattcaggttcatcaaacagtgttatgtaagctaccattttcacataaaaatgtttaaaaactgtgtgtttaagctccattggatgaatagagctacatatctcaatgtgtgaaagccgtctctgagtaagttggaactatgtagttaggagttatgtaaaagatacgctaccattgaaaagggcta

SEQ ID NO: 373301 - DNA, 1386 bp, Cannabis indica
cctagagtgcgtacaaaaggttcagtcgaacccaaaatactgaacagaaaagcaatatatttgcgaaagacaagtgacagtctttcgtctgctcggtcacttgggaggcacctttacctgtacaaagcatctggtaaacataaaacaattacaattgcactgcaattataaacagaaaatgaaattcattaaggataacaagagcataaagtaccgggattaaaagctgcccggtcagcccgttgtccgaaaaatgaaaataattccaagttcaaagaccgcttggccggtcatgatgtcttaaaggccttaaggccatatataatatatatatataaacaggagagataaaaagatcaatgtttaaacagctggagtcccagactctgaatttggttcttctgagtcgactggagcaggaggatttattgttcgagtaggagaagcatcagcagcctggtcagaagcttggccggaagttgaagcagccacctctttcccaccataggcaacttgggccgcgcagtactcaaggtacatgtccttggcgtcacccaagtagtcgaagttggcctggggattagccttccaaaaatcaaagaagagctcgaggccggcagtctccaaagcatcaactttctccttcaagcggtctgcctcggccgcctgagcgtccttatcttccttcagccgaagaaggacctgccgcagagaagtcctctcatcttgaagacgatcaacctcagcagataaggtctcgatggtttcctcaaagagatcagcagcctcgagatccttggtcagcacggtgatcttcttctcagcggcaaacagcttcttgttggcctcacccaactcatggcgaacagctgcagtctccgccctggcctcctcagcttccttcttggccaagtccgcctccgccctcaaggtgtcggacagagccgtactcttggaagtagcagatttagcccgggagtaggtataagccaacttcaaaccggcctgcataaaggaaaaggtcagcatatgaagctaagtatgaaaagctaaaagggagtgtcgaaaagaaaagactaaccctggtaagctccttcaagactccgcccaccaacacatccagagatgagtcgtcagcaccagccagttgctcaccgacctcaggaaccagccggttcatgtgatgagccatcacctccctgcccttcttgacctcaggcagcacgggcatgggtggagttggtgcctgcacccgctcaggaatcctcctgaccagttcggacccagatgttggtggcccagactccttagacttggcagatatgggagtggaaggatttgcagcagtcagctcctcagaaaggtcaatgacctctccagaaggcc

SEQ ID NO: 373302 - DNA, 489 bp, Cannabis indica
tatatatatatatatagtagagagagagagagagagagagagagaggctcaaatttcactgaatgcttaagttgcatcaactgtcagttttgagtccatcactatctatttataggaatctttctaggtttaggtttgaattatttggcattaaaaattgataaataaatggtaaaaagaccttaagtggctagccattaggatgtgggcccaccatttataattttgccatttttctcaactatttactcttttctttcacaaatgccatatttatcaattcaaccacttaaatgtcaaaactatttatttaataattaaaattaattattaaataaatttgtcatttaatagatttattaattagacttattaacgtcacttaatgaataaatagaccctaattttttttcttcacaattaagccctaacttagtgaaaattcattaataagacgtagtcaaattttagaactataattgattaatt

SEQ ID NO: 373303 - DNA, 542 bp, Cannabis indica
aaaataataaaataaaaaaattttaaaatgtagtgtaaataatttttttataaaacttatatagaaaaagtttttaattagcacgtgaatgaacattgcaaagggatttacatggtccccaatttcacctttaatttggaagaagagttgtagcatgcaaatattaaatatagtcaaatatatacaaatccaatttaaagacgttattccataaaaaaaagaattaaagacattatattatattgacccagttctatttggtataagagggataaataagaattgcgaacttctttttctttctccacttttctcaacataacaatgtataatatcgatcgagtacgtttacttttaacaaattttgtgaaaattccaaatgcaagaatacttaaattaaagttcaaacaactaatcactacaaaaaaattaaagataaagaaattgtagttaattataaattattactattatggtttgactaaaaggtccgtaattaaaaatattagttacaaaaattacaatttgttgtgactaaatgt

SEQ ID NO: 373304 - DNA, 780 bp, Cannabis indica
agctcggccttccgacagttcttcatcgtgactaagcccccgacgtcgagatccgcccggtcataagtctcaaagacctgggcccgcctaagaaagatctcagtaggcgcggaccgctcgtatggaggaatcctgacccactccgtgagaagctccgggtgctccacagctcggaacccggaggagaagaagaagcgatggcgatactccttgacatgagtttgccgattgtaagggaccaccccatcatttgaagggtgggcccggaaaccataaaaaccgtctttaagtttgtccccctttttggggacggaaacaagttcataaaagtacaaaatctccgccggactaggagagccccatccccgggcggagtaaaaaataaataagcctgaaagcaggcggtaagcttggggaatcagttggtatggcgcaaggccgacaaatacaagaaagttaataaaataatcttgaaggggaagcatggccccggacatcagatgcgtctggctccaagccccgaagcctccgtagttatggttgggcgtctccgcatctcggggcggccggtggtacgtcccggatgtcgagggcttgattccagccacctccacgatgttctccaactggtgagggcaagttagagtggagtgaagctcggccgcctcccatcccgtagcccgaggtttgtacccctcctgggcaacgggacccagcatgacgtcctccagggtagccaaatgcttaccccccttcttggaagattttgagccagatgca

SEQ ID NO: 373305 - DNA, 354 bp, Cannabis indica
ttcatattaggatgttaaagaaacatacttgttagtaaatctagatcctggtaaaagatttccaacattagtgtggtaggatatggtgtccatgatacatgatgttactacgatgacctaggaaaagttccaggaacttttcaatgccaagtactataataaggccgtcagaagtgccaacagaaaagagttcacccacctgacctagaaagaaaatatgagtgttacttagtacacaacgcagtttgaccggctggcgagattggcctcaagaattgggccaaccgatttcagtaaaaaggagaagtatctagatggattaaatgtgaagattcagttgggttttatgcccta

SEQ ID NO: 373306 - DNA, 835 bp, Cannabis indica
tgctccttagacttgcgaaggtcttcaagctctttgtcctttctagccgcctcttgtttcagtctcttcatgttctcctggagctgggcattgtgcctcttcagcgagtcagcttccttagaaccagcggcaacaactttcatgaacagagtcatcgactgcgaagccaactccacagaacgcggaacaagctcctcagaagggatcttctccgccttggatatgaactcctcacccacgaacttctcctgcatagccagaaaatcgcgggctcggacagttggctcgatcatgactttcttccccttgtcctgcgtggtcttagccagcttcttggaagaatctgcggcaagagtagttacaacatcgctcttcctcttctgggcgataacgggcgatgtcgtcgctgttccactctttggcttgattttaaggacgggcgcggacttcaaaaaagtcatctctgcgaggataaataaggataagtatgaataaatttcaaggcactagtttataaacataagatatgttacctgagactggtcgagaagtttgcttggagaggcgtttgtctatccgctcttgttgtctctcagatggttctttgtatactggctctctttgaagactcgcgttctctggaatcagctggtgttctcgcagcttggcagttgtacacagtattcgccagtcgcgatcttgtaccggaaggctcccgagaatttcagctgtttctctacgagagttgtttctctacgagtttcgtcaagtgcaggtcgagctggtctatctacgagaacaaaaaagagcgagttagcatgagatctcaaagtaa

SEQ ID NO: 373307 - DNA, 983 bp, Cannabis indica
aatgggccaaggacttatgatggaatgcaagttgctcggaggttgatgggcatatgtggctatccgctgacatttgtcgcatttcttcgcgaaagtgaaagcgtcttgtcgcaaagtaggccagtaatacccctgtcgcatgatttttagggcaacggaattaccaccagtatgattcccacaaatacccccatgtacttcacggagtatgtagttgcagtctttcccgtcgatacatgaagtaatggttgactgaaacttctacgatataatcttccatcataaatgacatatcgggcagtgcgttgccccaacttccttgcttccatcttatcatcaggcaagatacccttctccaggtatgcgattatcggagtcatccaggtgacttcttggacggtatctatcaccatcgtttcttctcgatttatcgtcgggtgagcaaatacatcaacaagaattacatcgagtaattcagcttctctagtcgaggccaaacgggccaatgcgtctgcatgtgagttgtgagcacgcggtactcgggacacgactacttccttgaatttctgcatcagttcgcatactatggcaagatacttaaccaatcgcccgcctctggccagatattctccattcacctggcatacgacgatttgggaatcgctgaaagcctacaagtattcgattctcatctcgagagcgagcttcaatcctgcgattaaagcctcatactcggcttcattgttagatgcagaaaactcaaaacgtaaagcagcgtgtaccttaaaattgttgggactgattagtatgattccaccgccggaaccttcgctattagaagccccatcgacgtacaacgtccatccttctccttttggtatagcggtgttgatttcttcgtttatgggtgccacttcagtacttgggaactcgagaatcaaatctgccaaggcttgccgcttgatcgcagttctcggtttgta

SEQ ID NO: 373308 - DNA, 1064 bp, Cannabis indica
ttcattgttgtatgtttgaaacaccttgatagtggaatcgagctctcaaattcgaggagcagctcaaacggagacgtagccaatttattggtgaacttcgggaaaaaattttggtgttttctaaccctaatctttctggttttgtgggtgtgggtgtgtttagatcagatcattctagatctgatctttggtttgtgtttaatctgggttttctgggttgattgaaacctagcttcgagtttctcagagagaaactctctgctagggtttcgaggaaatcagagagtgagggagtgaatgagaaggttctcgattccttccttggttttgttcaaagacaaaacgaggccgttttggggactaactttgaaaagtcaaagtgaacagggaaaggttgaaattgaccttaaatattgattggtttgttctgttggtgtagggccaagatagtaaattcctatcttaaatttcctacagtataatgggcgttttgaccatatttgtctactaagatttttcttattttccgatttggcttgatatatatactttgggtgacaaaggcaattataaatatttccatgtattgtttttcatttcttcgtaaaatttatatattaaattgaaattttaagacaattatataagagtttgatatccaaaaaattgcagccaatatatattagtttttccttttcaaaaaataaaagcaaatcatgtgctactcatttctagaataatattgtattttcgaatattctaataaaaatgatgtgcgaaactaaacaatttagtatatattggaccaacaggcaacaaacacgtaacaacagaaaataataaattaagagatttcagaattcaagtaatgaattaaacagtaaaatagaaaagaataacactagatttaacgagttcgagctatataactctacatcttgatcggaatagcaacagacatatctttattgatatcaatatttacaaggttacaagaatcttcacaaactcttagagattacgagaagaaatttttctttttagtttagactctctctctctct

SEQ ID NO: 373309 - DNA, 592 bp, Cannabis indica
cgcacccataggaaagcgagaagagtgtttcaccagtcgtggattgaggagttgtattgtaagaccatagaacttgtgagagctcgtctggccaggtccccttacgttcttcgagtttccctttgatggtgtgctttattattttgttaacaacttcagtctgtccgttgctttgtgggtaagcaactgcggagaatgctttcttaattcccagatcgtcacataattatcgcatctctttataatcgaactgctttccattgtctaagattagtttgtaagggataccaaatcgacaaattatggagttgtagacaaactcgcgcaacttagtcgctgtaatggttgcgagtgctttggcttcggcccatttcgtaaaatagtctaccgcgactactgcatatttgaccccgccttttcctttgggtagctcgcctattaagtcgatcccccatactacgaaaggccagggacttgtgatggaatgtaggttgctcggaggttgatgggtatatggagctattcgctgacacttgtcgcgtttcttcgcaaaagcgaaagcatcctgtgcaaggttggccagtagtacccc

SEQ ID NO: 373310 - DNA, 615 bp, Cannabis indica
ctttttaaggcacatatcatttttattttatttttatttattttttttttttttatgcagcagaagttttatttaaaaccagcagaaaagctacaaaccagtagcaacaaggggtgctacttccccttcagtacagacccgtgagacattgttcacagcagcccaagctgcaagcttgtgagccaccgaattggcaacacgaggcaaccagaaaacacctaaaccagagttcattttcaggtaagaaaataaatgcagaaaaatattagagatgttccacacaggaatagtaaaattcctaacagcagtagcaagttgaaggcagtcagtatagaagttagcatccttgcaattcaactttagacacaaggaaaaagcatggcaaagagctaggctctcggcatgaagagcagaggagaccgacaccttggctgtgagagcttccacaaaggcgccttccttgttgaacacaacaacagccacaaacgcccaattgccacggactgctgcatcagagaagaaattaaaatccttcggcgccagctgcagttgacagggaggatcaagcacctccaatctttccatagagatcctcaacttgctagcaataaagtc

SEQ ID NO: 373311 - DNA, 265 bp, Cannabis indica
acttaaatttataccaaatatacatgagtaattattctatcttggaccactactactaatctaactctaagtctgatttgcccaaagtaagcatatacaagtacgagattgtaagattgaggatttatatcattatgggatagaatgtcgggaatataatcaaatacattattcaatttcttaagagaattagaatgacattatatgatttataaaccattcatccaatgatatattattaagctaattcgaaatgaataagcta

SEQ ID NO: 373312 - DNA, 631 bp, Cannabis indica
atacacaaatgaatgaaaaaatacttttgttattttattgatattgaataatctggattacattgaaataaagttttatttagggcataaaacccaacagtaacattcccgagcaaattgttggttccctctaagacaccctaccccattcttggttgggaacttcaagcacgagtgaaatattgatgtgacagcttttaattcatgcagggcaagtcggccaagcattatgttaatggctgaaggaacatctgttggactcagatctgtgccatgatagttatgctcgtcagagcttgtctaacagtgaggggtagcaagatttgtcctacaggtgcaactccttgaccggagaaaccatagacaggctggaggcatggagttagatccttgagttagagccccatcttctcgtaagaaatcttgaacaaaatgtttgaagaagctccattatcaatcatggttctagccaccattttgtttgctatctggacttccacgaccagcgggtcgttgtgcggaaatctaaacttgacagcgtcttcatcgttgaaagttatggttggctctcctgctcgtggaactttgggcttcctttcttccacgaccaggatgacttcttcttgctcct

SEQ ID NO: 373313 - DNA, 594 bp, Cannabis indica
ttgttgaaaaggtgagcctacgaggctaaaggccgaccaaaaaaaacttcacgtaaagctaaagtatgttttacgtttgtattgaaaccggtttttaatacttgtgttgttgttttttttttgttaatatgaaactggtttatttttattaggatccttctgtcgaagaagaaaaacctgttgaagttgaaacgaggaaatctccgcgtaaatccaaagtatgctctatgttttttttgaatatgtttttttgctgtttattcatgtttttgtttatttatttttttggatgaaactgattttttgttgttttgtttaaggctgataatgttgtggaagatattcccttgaaagctccaacaagaagatctccatggaaacttaaagtatgtattaaattttactgaatccggttttgcatttattttatgtctcattgttgtttggtatttttattgtgtttaaattttcaagtatttgttcctcgaaaatcggtttttatcctttatatatttgttattagatttgagtatgttatataaaaccagttttttttgtttgtttgtgttttttttaatttgttctgttttgttt

SEQ ID NO: 373314 - DNA, 1299 bp, Cannabis indica
aaaaattatttaaatttattttattattttttattttaatatttttttcttttctttctcttttctttcttcacgcctccttcttcttctctctctaacttcttcatctttgaaaccctagcccccaaaatcagccccatcaaaccccagccgactccccattccagctccaagcacagccaaccaagctctcaattccatctccgattccctcctagaaaacttcctcttcatcttttatatatttttttctttttcttttctttcttcttcttcttcctcggttggatgaacggggcttggatggtgtcgactggaatggtgaaatggaggtgcttgtttgcttcctcgattgctggtggtgtactggtgtgtgcgaacagagtcggagctggagtggggtcgactaggtggttcgcttggtggtgggggattcacgtaatggcttcgggtgaatggaggttactgggtagtgcgatttttgctgctgggttcggtttgggtgatgagggcttcgggttagcttgctggtggcgattttggtgaacggaggtgggacgtggtgatgggagatggtgaaggtgggtcgtttgcaggtgagggagtcgctggttaatgtggttcgagtgggggtttctgggttagtgaatggaggtgcgaaggtggagggaagagggtctgggttagaaggaggaagaagaagaagaaagaaaagaaaaaaaatatatatataaaaataaattttttaattttaaatgttttttaatttttaaagaaaagtaattttttttttattttttatttttaaaataatttatttttttattttaattttaaatatttattacgtggactaattaaactgtgccacgtgtacactgtgtacacgtagacattccaacatggcacttcacacccaaaaatggatggaaatgactaattgctaacagaacttgggtttaggaggttttaccatcaaaattttatagttgggggttagttgtaaaaacttggccacttaaggaggttatgccgtaaataactcttttattatatataacaagaaccggtatgaaataaaatttttatacaaaagtcatttaataataaagattagtattcataaaatcataacagatgatcatttatcgattaacctaaatcatgagtattcatgaagacctgtttatgttaattgaattttttaattcatttgttaagatctttgagtctagtgacttttgttttagaaatttaataacatggatagctgggaacatgaattaacaaaaaagaatc

SEQ ID NO: 373315 - DNA, 542 bp, Cannabis indica
gcatgtttagcttgatctaagcaagcctgacagcaatcagctgcactttctttgtggaacgttagcccccatctcacggctgcaccaccgtaatccgtatgaagttcagcatgacattcggctggaactggtctgccgggcaaaatgtcttcctctagaagaaaaagtacatcaacaacaacatatgataaatttccactcgcaataataaattaccacaagcataactgaggaattcaatatattaccttcctcttcgccttcgggtttatcatcatgttctttgttaatagcttcaggaggtatccaaaggccaatttcttcagataccacagcccagttcgactccaaagctcttactagcatatctacaacccaacaatatacatgagaaaatgtgttaatgacatcatggactaaaagtactgcagattgaagtatttcataaaatataacgtgtggattctacaaaaagcatacccgcctcctcacgggaaatagttgacaccgcattatctctctcaggggtcaactgcttagtt

SEQ ID NO: 373316 - DNA, 454 bp, Cannabis indica
ccttgtatcatttctgtcgcagagtattattaagatctgaacctggatctctttctctcctttctttagtgctgaatctccttcttattgaatgtctttcttcacgatcttcctcactatgattaaggtatcacttgctgtgtgtgggcactactctatcacaaagaggttcgaaatttacatgagagaagaagagagtgaaggtggcagctaggtatagagagagaaggcttatgtttttctctgaatgaaataagatgtgaaaagtgtcaagtgtaaatttcctgaagccttcactatctatttatagcattccacatagggttaggtttgaattatttggcattaaaataatgaaaatatcagatgataaagcctataaaagtgccggaccatggcagtatggatttgggcctcactttttgcaattttgctagttttatcatttctgcat

SEQ ID NO: 373317 - DNA, 658 bp, Cannabis indica
tggagttgtatcttcagttcttttaattctgcaggtgccattcggtagggtgcttttgaaacaggttctgccccaagaattaggtcaataataaaatctatctcccgctgaggtggtaaccctggtaattcctcaagaaacacgtccaggaattccttaaccactttaacctcttcatgtccaaagaacacatgtttactatagtcaactacaaccgctaggaatcctacacacccactgcgtagtaaatccctagctttcaatgctgatattcttgggacacgagaaccttgaattgaaccaacgaaaataaatggttcctcattctccggttgaaaagttaccattttccgtttgcagtcaatattagcagagtacttggacaaaaagtccattccaagtataatatcgaactcggccaaaggtaactccacaagatcagcgctcaattctctgccttcaattctaattaaaaccgatctaacccattttcttgaaataattaattccccattaggcaacatggttccaaatcccatctcaaaaacatcactaggcctaccaagctgattaagaactctcgatgatacatatgattgtgtagcacccaaatcaaataaaacagtaaaagcaaaaccgttgataagaagctgacctg

SEQ ID NO: 373318 - DNA, 873 bp, Cannabis indica
ccacgaccggccactcgcctttctcaatggcgtacggttgtaaagcgatggtcccggtagaaatgttattcccgtcccacaggagaacgacttacgatccggctacaaaccaagctttattacaagaagcgctggatcaagttgaagaactccgggacgagtcacaaatacgaatggcagcttaccaaaagaaggtgaccaaatattttaactccaaggttaaaaacaaaaaatttactattggggatatggtcctaagaagagtcttcccagccacccaagaacccggagtgggggtacttgggccaaattgggaagggtcatatgaaatcgaggacgaaatcggctccggaacttataagctaaaaaggatggatggaactattgtaccaagggcctagaacgtcgatcacctccaaaaatattaccaatagtccaaatgtataacgtaggctttgtttaaagggtttgtaccgtctaaatgtatgcaacctctgtattttaaataaaactgagtgccttcaaaactaagttttcatgccactcaggggggtactaaggcataccacacggacagacgaaaaacaagccaaaagtaaaatatcctgacccaaagggcaggtccaaaaagagaaattatgcatcaaaaaaagatcatatgtataaatatcctgaccctaagggcaggtccaaaagaaagaatatgcatcgaaaaaaaaatatcatatatataaaaatcctgccctcgaggacaggtcaaaaaaaatatatatacaaagggcccggggacaggccttaatcattgtctccccttagaaaataaaacagctattaaaataaagattgtcttaaacaaaagcaaaatagctgtaa

SEQ ID NO: 373319 - DNA, 963 bp, Cannabis indica
actttactttttattttttcacacatccatcacgctgaaaagatcttctatctttcagatgagcgatttatcggatagccagcagctcggctcaggaggccacgcatttgacggtgagtctgaccaggagagggacagttttctccccacggatatttctgaagtggaggccgctcaaatggaattgggtccgatgtcttctgtggacatcgagaggatggtgcaggaactcgcagaacctgggaccatcgatattcgggacagcgagtccacagtgtcggcacgcgactatcttatacatacgaggcatgctcctgacatcgaggtcgaggagatggacgaggaatggacgactccagctcgcgagtcaggtgggaagaggaggaggcggaagggagtgggacagattcggtcgacgattcccaactgaacgagcccttcgcgtgcgaggatttaatctcgagggttgccaaatcagacttcaccacctttgtgaggttgaatttgctgcgactcgcgtttcaacgtcctaaaccgtctcagagagcgcaccttccatttactaaccctgcgatcatccccacggaggatgtggtagtctcaatacccatccttaggtgtggtgtatcaatcccctttcaccccttcgtcgcggccattctcaggcgatatgatgtgtcgccctttcagctaactcccaacagttatcgcactgtcctagccttctatgcgatgtacatggagtacgtccatagggctccctcagtagaagaattcagttatttctacgacataaaaagcgtaggtcttcataacggcttctactgctttagcaaatgggcgacttctgaaatcaacggagttgagggaatggtgtcgaacatgggtgattggaaatcgaagtggttttacgtctttaaggttcctgggattaggactgactttaatcgcagacccagtatg

SEQ ID NO: 373320 - DNA, 513 bp, Cannabis indica
aagtccttaataaatcgtcggtagaaaccatcatgtccactccttactccttttacagaaactgaaggtggcaaattctctattgttgaaactttagccttatccacctcaattcctgcttttgaaattttgtgtcccagaacaattccttctgttaccataaagtggcacttctcccagtttagcaccaagttagacttctcgcacctaattagcaccttttttaaattttctaaacaatgatcgaaggaggagccaaagaccgagaaatcatccataaagatctcaatacaagattcaatcaagtctgaaaagatagccatcatacacctttgaaaagtagcaggggcgttacacaatccgaatggcattcttctgaaagcaaaggtaccgtagggacatgtgaaagtagtcttttcctgatcttcaggtgctatggctatttggtggtatccagagtagccatcaagaaaacagtaatatcttgccccgccaatctgtctagcatttgat

SEQ ID NO: 373321 - DNA, 650 bp, Cannabis indica
aaatcaaatttatttttaaaaataaaatacttatactaaataaaactatttcatatatatacttgttatattatatgaaatctaattagtttctacgataaacttaaaaggtaattaaaaatgtaatttcaaaagatttagcaatttagcaatttaaatattttactagttatttttttttttgaagagattttactagtaagttatgttgttagttttttttttttttctactttattgtgactttattaatttattaaatagacttgaatgtaacataaatattgtgtaaaagtatttaaacaacaaatcaatgtaatataatctaaaaataaacacatagatttcaaagtaacaaaaatgtatataaagtaaatggtagcttattatattacatgataactcattagtttcaaaaataaattttaaggttactcaaatgtattttacataataatataccataatacaacttaaaataaatatttgattattaagatgtttacaaataagttttagaggtaactaaattgtatctcaaactatatgatataaaaataaagttttttttttttaaatgtaaaagtaactaattagtttcttatcggcattataggtaaccaaaaggttacttttgaaaacacaggaaa

SEQ ID NO: 373322 - DNA, 713 bp, Cannabis indica
tctttctccctttgtgcggatcataagggaatattcccctgtaggaaattatggagttcgaaactgcccctacacccaacaccccaacagtcaaaaaccaggggtaaaaatgtctttctccctttgtgcggatcacaagggaatattcccttttcaaaaaccagatattccttttcaaagccctactgccttttatggcagtataaaagcctcccctttttttgttgatgaaaaccctagcaacaaaatcactcttcttcaaagctagcagccgaaaatacttcagcctccctctccatcttgttttcttctatcttagaaaccctagcagccgcccctcatctcctcctacttcaagctttgtattgcagcagcatccttcttttcttcctcctttcttcttcaagctacaacaatagcttcaatggccgacttcttgtttcccttcaaacctgcaacacacatacaaaaccgagagacaaaatagtagcaacaaagatctaaaatgatcttcgttggttttagaagataaaagccgaaaaaacacaacaaaaaataaagaagaacactacagatttgatttcggagttccccttaaaatcaagggtacatctccgtcaagcttccctcaaagacgcttgaatctccactatgaatgtcaaagccggattacaagttcatggatattccatgctacaaaccagcaggtaatc

SEQ ID NO: 373323 - DNA, 679 bp, Cannabis indica
tggagcatgggaataagcttactgttgaccaccaattcagactcattcggccgttcagcaagaaggatgttaaagaagctttatttagcattcactcgtccaaaagtccgggccctgatggttttggagcgtgttttttcaaagaactttggaatgatattggggacgatttctcttgtgctgtgttgggcttctttcaatctggaaagcttcctcaggaagtgaatgctacgtccatatctctaattcccaaaattgataatcgtcaaggagcttctgactacagaccaatagcctgctgcaccacaacttacaaatgcatttcaaagatgatttgtactagactctcggaagttctgcctgagcttattcatggaaaccaaggtgcctttgttaagaagagacttttagctcataatgttttgattttgcaggatcttctcaaaggttatactaggaagaacatttcttctcgctgcatcatgaaaattgacttgagcaaggcctatggtacagttgattggtgctttgtggctgatatcttaaaagctctccgcttcccgtcaaagtttattagctggattttaagctgtcttcaaggagcttcctatagcctgttgcttaatggaagaatccaaggctcctttaagggtgaaaaaggccttcgtcaaggggaccc

SEQ ID NO: 373324 - DNA, 580 bp, Cannabis indica
ttttgtgcgacattgtgcgatgtgtatgcgatatgtatgcaattagtgatacaatttaaggtctgtttcgttgtgggattgtgtgtgcgatttctgtgcgattatgtgcgattatttgcgataaatgactactgtatctgcaattgttgaatttgtgcgattttgctcgatgtcttgtgcgagtttgtgcgatttatgactactgtgtctgcaattgttaaatttgtgcgattttgtgcgatttatattcaaatatgttgccagccagcaaacataattaaattatttctggtagtgcgatttatgtgcgagcttgtgcgatatagtatgttattaagtggttgttatgcgatttctgtgcgattttcatgcgacgtatatgcgatttataatctttctgtttgtatttgcagatggctccagaactcattctccccttggctgagcattttcctgggcgtatcacttaccgaggaaatgggcactttgcttcaattaaagcaaagtgtgaagcctttaacctgactgagagggtgaaggaaactcctttggagttttttggaatgcgaatgatctgaaa

SEQ ID NO: 373325 - DNA, 651 bp, Cannabis indica
taccaattcatcataattaagccataaaaaagtgaaaaattcataaactagacatagtctaattttagaattcaaattgattaattaaaatcaattaactgagtcctacaagcagtttgtctcaactagtatggggaccatgggtctatataaccgagcttccaataagcagatctagaatttaccaagttaattctctaacttattaatttccccttgcaccactatagaatttggaattgcactctcagtcatatagaatgctctatatgttccacaatatagatacgctattagttattcattgttataatcccaataatcattgattctctatagatgatttacattgtatacggattaatttaccgttacacccttcaatgtattttatccttcaaacacttagcaacctataaatgatatttcagtgaactaatataattactaaaatgagcgctctatctaggcaagctcgaaggaaattatcgtttcacttctatgtccagatagaaacaatagatttcgtatttatgattagcgctccaactcaattgaactaccatgttattaacctatatgccacgggaagaaccacttggtcgactttaactaatagattaaagaacacaaataatgcaactgaactag

SEQ ID NO: 373326 - DNA, 659 bp, Cannabis indica
gtgggatcgataggcccaagaatgtaggggctgctcctcttcttcttcaacaataggctctcgttgccgcctacgcccttgcggtgcatcaggtggaggttggccatagggatgtggctctttcagcctgttgacaaaggcgatgtccatcttgcgaagtggcaacaccgtgttgtcatactccaattggggaacttcatatgccccgcagagttctgtgataactcccgccaaaccaaaaccacctcccgtggctccttgcacaatctgatcaatgctatgccttatgacttgtccaatgtttatgttgtaccccttcattatggcgtacacatattttaggtgatccatttggacatcggagaagtgcttattaggcactaaccgagcacttacaaagtacagccatgttttcgccatcaggttcagttcacaccggtataggatgtttggcgacccctctgtgccatcattgtcatggaacctcaacccaggaaatcccactgttttcgccacatccaccatatcaaattgctcctcctcctcaataattcggaggcgttgttcttccctagtgtaatcttggacagagaacatcacattaaacgcatcagcagtagcgggcactttctttccctgcaccttcacttccccatttc

SEQ ID NO: 373327 - DNA, 1494 bp, Cannabis indica
tgtgcatggaattccgaagataagttttccatgaactaaactttcctggagccaacttgaaataccattgctgtgcggcctccgacagagttgcggggaagattctgcaacatacgtctcctcgcactccttgtaaatccatctgcatctcgaaatacttgagatgagagagaggatcttctctcccagtgtacatcttccacgttggcatcttgaacttgtgaggtagtggcaggaggttgatttctggcgagaaaggagttccgcgtgcgcggtctaactcaagatcattgttacgctgcccggccatgccatgaaacatattcttcagttcgtcaagctgggcctgtacggctgggctgacttcattggcattctggtcgggttgggctacgtcagcgtctttctgagcggggatttgagtatgggctccggactgcacattcgttgtagtattctgctcgtctgctccccttcttctgtttaggtcatcccttaggtcacggggtgttcccaacctttcgaacacagaagaacctggctgccttagcgattggttcgcttggttggcaggtggaatggctccattattttgagtggatccatcgagcatgactcctcctgatgaattcccggacaaggtctgtccgcctacctcttggcccacgagtggaactcgtgaccggggattggacggctgaccgttgtttgtctgggaagcattcaccgttgggtcatcctcggcttctccaaggggaatgacgctcggcgcctgctggcctacagtctgataggctcttcgtatcagcacagtagcttgccgactacgatcttcgatttctgcatggtgagcccttaatgcctccatctctttatctctccactcggcgaacatacgcctctgttcgtcaaacgcgaggtttactgcggcacgtaactcctcctgatcgtgatgcagggtattgttgtggccctgcatgagtccaagcgcagcacggagattttgcaattcggttgcatctccgatggttgtctgggcgctgatgcctggtggaacagtcatgttatgaacatctggctgtgtgcggaaccgttatttccggtctcttgcacaccaggcgcagtttcagtaacaggagttgttccatcattcaccacgcttcccgtctgtccaggattgacagcgggtggaaccgtcgaactccctgggtcctgcaacatcggatccagcgtctgtgagtttgctgggtctgacaggcctctgcgagtttgcaccatcgtgtcgaaagagcgatctgtgattcttctctcaatgaaagcaccaaaatgttgacttcgcttttagccaacgacaatgagtcttttaataagcgataaacgatatgtcgtaataagaatacgtaataaagcaaataataataataagaagacacagaaattttatagaggttcagccccgagcagttcggtaatagcctaatcctcgttagttgt

SEQ ID NO: 373328 - DNA, 741 bp, Cannabis indica
tgcatgttattgctggtttgaaaccagatgaatatgtgcattcggttgttggtttgggacatgttgttgctggtttgaaaccaggtgaagatgtgcattcggttgctggtttggggcatgttattgctggttttaaaccagatggacaagttgagttttggattgatgtacttggacatgcttgttgttgtataggtttaaaaattgggagtacaacatcagggaacaacttgtgtatttcagatgtggatattgatgaaaccaaaggaaaaatcatttcatggaagacaacgtctcgcgaaacataaacttgtttggtttcaatatcaagtaaagtataggctttcatgccatgagggtaaccaatgaagatagaagccctacttctaggtgtgaatttatgtcttttggaaggaagggtggagccataggctaggcacccaaaacttcgaaggtggtcatatttagggggtgtaccatgcagaatttggtacgaagttaaacctttgaataatttggagggtgttctattcattaggtatgtagccgtttggactaggtaggaccaataaaccaagggtaaattggattgaaattctagtgctcgggctatatttagtatgtgtttgtgttttcgttccacaacggagttttgttgtggtctttccacacaagagtggtaattaataatgccctttgaggcaaaaaaagattgtaggttcaattcttttgcattgtccg

SEQ ID NO: 373329 - DNA, 557 bp, Cannabis indica
aattattttggtaatttgaaattttttcaaaagaaacatagtgcttggagtcaaaaattgattgaaaaagaaaaatgtctagcttgttttttttagataaaagtgttgcttctcaaatgtggtattttgacagtggttgttctagacatatgacaggtgacaaggattttttagtgaatatcagaccaatgcaatgtggtgaggtcatgtttggtaatggtttaacaggaaatgtcattggtatgggaactctcaattttgaagggttaccaaggttgaaaaatgttatgcttgttgagggactaaaagctaatttacttagcattagtcagatttgtaatcaagggtataccgtcaattttgacaatgatcattgttttgttcttaacagtgataaacaatgcattttacaagggtttagatctgttgataattgctatactctcacatctattcttacttgtcattctgcatgtgaaaataccagtgccataaatatttctaaaaatcctgttcaacattctagaacaaagcacattgatataaggcatcacttt

SEQ ID NO: 373330 - DNA, 609 bp, Cannabis indica
gaaaaattgatcaaaagaaaaagagtatagtgtaaactaactctccctcatttaggcattcgtagagatcttctaatcgatgaatttcgatctagtctgccgtcttctcaaatgttgatgttggtgataactaatgcggaaaagaaagaatgatctgaatgttattgattaagaaaatgaagagaaaacaggggagaaatatatacaggagggcagagctaaagtcaacactaaaccagctgccaaccaccttaactaactctaacagtcctaactaacattctaacataaagcaaagaaataggaaagaaaggataaccgttagtgaagtatatatgctatcactgacaataattacaattggacaaataaactgggacacaacttagacacaacttaataatagctttgtgaattagtttgcaagattgacacttgattgaatttgttgaacaccaatatgcattttcttaaatgtataaagaagaatttagtgaaatgtgttctaattctatctccttcaacgtaccctccttttaattgagcgatgcaaccattattatcttcatagagaattgcttgtgttgatacttctttattgagtgcaat

SEQ ID NO: 373331 - DNA, 660 bp, Cannabis indica
aaaaaatagtataattgatggataacaatctttggtactccatattctatttttcaaagcccggaatcgtcatagtttatccaccttatattttttttttgaataaaaagaaatgaaggcaaatggagatggcgcttgaaattgaaaagccacaaatccaaaagtcttacccattggacgttgtctctgttaaactagcattaataaaatgactaaactaccctctcgtaaatccaacacaacaaacaaccatccgtaccgccaatttaacaactattcaggagatttatttaataagtcggcgctataaatacatcattattacaaatctaggaaaattaaaaccctagctttaatctcagctggtcaaatattttcctggttcccaaacagtgtttatctgtttagctggttgaagctgatcccaaatatattgggaaagaaagatggatagataaagaagaacagaggagaggagctcgtgcccgttttctcccacctaactccacagagtcgactccagtctatccgtggagcccgagcctacctttttcttttggatttctagggttaaaggtttctgattccgattgcctagccaggtgagatttctaacagatttatgttgttcctcttaatctttcttcttctttttttttt

SEQ ID NO: 373332 - DNA, 579 bp, Cannabis indica
tcctcttagtttgtattgacttaagaacaaggaatataatcccttttcttagagctcttacaatagtatctctgaatatgaattctttgataagttttttgaccctttgcccagtgagtatgcatcactatttatagggctataagcttcagagggaagaatttcccttctgagtacaattgatataaagggaaagattccatattaaatacagaatacactaatcaagggatttggacagctttccatatctctgtgatctaatcccaaaattatagagatttcttcggtgactcacaattcaaaagatgaaattgctaagtgttggcatgctgtttagactgctcactgcccgcttaagaagccttcgtccaagcaaatatatgtggtgccctgttcggcatatctcttgcgaggaggtacataaaattgatttcacgtgtcaccatcatgtgatgccacgttagagtgcaaaaatagggataacagtatgaattcattctaatatagttaatgtgacttttaacacatagtggattattttagatttttattccacattcataatttcttgcaagg

SEQ ID NO: 373333 - DNA, 489 bp, Cannabis indica
tattagttttatttaaagttttattcttttttttattatttagattgtatctaaagatatgattatgggaatgatttcttttattaaagtaatatttgtgctattatatttggttagtaaaatataattgggtatatataagtcataacaaaatagtacttattatttacttattgaaaatttagaagaacaaaatataagttttgcaaaatttaaagcaaatattatgtaacaaaaattaaaagaaaatgtgtgattttaaaatagaagaaaaaattattaaaaaaagtctaaatatatggaatattattagaaaaattaaaaagcgtatagtgaaacttcttcctaatcttccattggtttagctgcttgaatggtgaattgattgtacttcgaactcgtagttcgttttggatctacatacaactaaattctccattttttggccgataatttctccgtaattttttggacaaacaacctatgttt

SEQ ID NO: 373334 - DNA, 595 bp, Cannabis indica
tatttaattaaataaagaaaaatacaactagtttatcttgaattatatttcatcaaactagtgtgtttttcttaaattaattttaaaataatctaatgaaaaattaatttcatatattttgaaattaattatgttgctgatcaattttattaggttaaactagtttaattaacctattacaattattcaaatcatgcaaatgggccttcacaaatgggcctcctaactgtcacacaaggcccaaaggagaagaatttaaccttaatttaaacaactgttattaattgaatagtcccaatagtaattgggcctaaataaaaaatatcaaatgtgacaattttatttagcaacctagtctattttaattacaaaaattaaatgggctccctatatgcatctaagtccaaagcaaatatataggctcacacatgcacactgattcggatgaatcctattatgttactaggtttatacatagatgaaagaagattgcaaaatttacctattacaaattatttatttgacctattgacaattgaaccattggttaaaatcagatcattggatctgtcaacaagttaaccatggcaattta

SEQ ID NO: 373335 - DNA, 385 bp, Cannabis indica
caattagcaatccgcgcagagaaccaacacttagcgaatttagctttcgcattatgagtcatcaacgaaatccctataactttgcgattagattacagggatatggcatacacacgatcccacgatcagtgtattctgcatttatcccacgatctttgtattcaacattaatcccacgatctttctatttatatccattgtaatgagaagggaaacacttcttctccaagttcacagccctataaatagtgatgcatgttcactgggaaaaaggtcgcaaatagtttagttgagacttaaccctagagatattatctcagaattatattcagagatactgttgtaagagctataagaaaggaacctttctccttgtctaagtcaa

SEQ ID NO: 373336 - DNA, 538 bp, Cannabis indica
tttgcaaaagttactaattgaactctttgttttgttaaatgataaaattaaccctatattttccaaaatggtaaaaataggactctgagcacaatttttaataattttattttttaatataatcaactttaagacaatttctaatacgaacagatacagaaaatgtaaccagttttatcataacatctctagatcaaattattattaagttttattttgacaagaaatcagttcagagtcttatttgtacaaatgttagaaaatacagaatccattttatcatttaacaaaatagagggtctaatttgtaacttttacaaatcactgggtccaaaatagtatttacctaatttatatcttattcattgaataatggttccttttagtattatttaattatgaattgaactgagctatgctttctatacctccgagtttggtctggactaagacgggctagcctacgcttagggcccactgatcaatttagaaactgtaacgtccccgcttcaagcctctattgggcccttacacccac

SEQ ID NO: 373337 - DNA, 1078 bp, Cannabis indica
ttctcatcttgatcgaataaaagattgctagaatgtttgtcattttagatgagttgactactctattcaatgaatggtatctttgactctcgcctaaataggacactggtattagtttgttggaaaccttggaaattatttaggattgtatgttttagtattttcacttgtcattccaacttactaaatgctaataatttctgaatatgttattgtgttaaaccttaattgatttctatttattgttatttgcagtatccaatatgactatgaacaatcccatggtgtcactgttgactgacaacaagctctctggagctaacttcatcaaatggagagagaacattattattgctctcattggtgaaaattccctgtttgtgttgactgaagaggctcctgagtagccaggtgagaatgcgagcaaggcagtcaaggaaaagttcgagcattgacagaatgctaacaataaagctcgatactttatgctgtctagcatggtcgacaccttgaaaacaaggttttccaatactctcacggctacagaaagcatgaactagttaattgaattgtttgggatggcttcaattcaagctcgctttgaggcgaccaagaatttcatcaatgcacgggtgaaacctcatcagaacgtgcgtgatcacctactccagatgactagttacttccaagaggctgagaatcatggagctgttatagatcagacaactcaagtgagtttgatcttgaatagtttgactccagctttcctgccctttacatcaaattatgtcatgaacaagttggagcttgacttcctcgagttaatcaacaaccttcagacatttgaaaatttgattgaaggaccacagaaaggaggaactaaagctcctagttctggcactgctaatggtacggtcaaggctgaggcaaacatagcctctgcttcgaaacccaacaaaaagaagaactggaagaatagcaagaagcctcttaaagctgtgaaaacagttaaaaagaaaaaggttgctaatcccgaggcaaagcaaaaaggaaaatacttctattgcaacgaaaaggg

SEQ ID NO: 373338 - DNA, 801 bp, Cannabis indica
taggatgttaatgaaacatacatgttagtaaatctagatcctcgtaaaatatttccaacaaggacatcctggttatttcgagagggccgcatattgcaggggaaagcattaacgcttagaagagatatgtgaaggagataaagaacgagcagtcggtatttgcccaaaaaccttccaagaaggtgaaaaccaaggaaccccccattacattcacagaagaagatgagaagaacgtgtgataccctcacgtcgatccactggtcataaccattcaactcgctaataagaggatcaagagagtgttaatagataatgggagctcggtaaatatcatttataaggagactctaaagaaaatggggctcgaataggccaagttaaggccttgtatagtgaatgtttgcggattcaccggggatagcatcgctagccttggcatagtcaagctcgcattaattttaggcgaggcacctttgactgctactattatgcaagatttcttggttgtcgacctgccttcggcttacaacatattgttgggtcgtccagcactgatcagactagaggcagtcagttcgatcaagcacctatctttaaagttccaaacaccagatggcgtgggagtggtgcgtggcgaccagatgttggctcacgattgctatcgcaaagagttacaacatagaaaggcttgtcatgagttgatgacaatcttggcaggagataacgagaagaaagaggaagatcttaatccccgagttcaagatgaaagaaacctctaaaaccaattgaagaattggaaga

SEQ ID NO: 373339 - DNA, 540 bp, Cannabis indica
tgggtctaagtccttggttctgatcctggtctgcgttcgagttttggtccgagtccgagtctagctttgggtgtgattccaagtgtgggtttgagttcgggtccgagtttgtgtcagggtttgtgtccaagtcttgaccctgatctgggtgtaggtttgggtctaggtccaagtttgggtcccgaatgcaggtccaagttttggtctgggttaggatctcggtctagatctagttctagcatttttatcctagtctgagtcttggtctgagtccaggttcgtatccagatccctatctaggtccaagtctgtgtttgggatcgtgtcccagatttaggtccaggtcttggtctcagttccgatctgaggctaggtctgtgttcggttctaggtctgtgttcgggtcctggtctcggtcctagtcttgttctaggctccttgtttgggaattctcgttcaggttcaaagtttgggtcccaggtctaggtcagggttcgggtttggttctttgtctgggttctggtcctagtctgagtccca

SEQ ID NO: 373340 - DNA, 501 bp, Cannabis indica
gagcttataccagaatatgaacagccaactcgagcaatagaagtcgcatacgttgctgtatttagtgaatcgaaactgttattcatttattaatgttcacgtttttagtttaattattatgaatcaatgtacaaacggattggcaatgaataacaatcttggtgtaattaactggacacctgctttgtatataaaggggtgatccaccacgaaatgagaactacaaaactcttgctacagtggagtaagcagaccgtgatctgactgaaccactataatcccttgccttcttattatttccagttttttgttaagtatttgcgttcccagctcgagtactcgccattttaggttgaatactcgcatttgtccttcaaacaatttcttcttattattagtattatcatatacttttggtgttgcgaattttgctcgacaacagaagctcacatatataggctcatggtctccatactagttgagacaatactacttgtaaga

SEQ ID NO: 373341 - DNA, 579 bp, Cannabis indica
gaactaggacttggacttggaatcataactaaattggacctagatccagaaccgtaaccggaccaggacccgaactccaaataaggcctggacccaaattgggagccggacgcagatcccaaaccaaacctggactcgagacccgaacacgaacctgaactcagacccaaacatggtaccagactagggacatagaaccagggtcgggacctagaaccgcaccccgtctcgatcctaatcccaaactcagaaatgggacttgggacctgaactagaactagaccgagacccgtgatagtgatccagatctttactcgggattcgggtaacggggcctggaacagaccagtagtcagtgtctagatctaggactcagaataggaccagaacctagacacagaaccaaacaaaaacccaaacctagacctgggacccaaaattagaatgtgaacaagaatcgccgaactagaaccctagaacaagactaggaccgtgagcaggacccgaacccagacctagaaccgaacgcagacctagcctcagacccaaacctgaaactagaactcgtgcccggacacg

SEQ ID NO: 373342 - DNA, 970 bp, Cannabis indica
gccttgtaaaggtagtgaggtcttgtaactctcaaaaccaagtcctcgcacgagaagggctcgttcagctgagtgtcgtccaccgaatcagttccactcccttttgcctcttcttcatcctcgcctgactcgcgagctggggccgtctaatcgtcatccatctcctcgacctcaacgtcaggggcatgcctggagtggataagatattcacgggctgacaccgtagaatcgctgtctcgaatctcgatgccccctggttcagcgagctcctgcaccattttctcgatgtctacggaagacatcagacctaattctatacctacgacaggtgcgatcccctcttctgagatcgaagtcgggataaagctatcctccctctggtcctcgtcaccgtcaaatgcatcgcctcccaagccaagcagctgactatccgacaagtcgctcatttgacagatagaagatcttttcagcgtggtgaatgtgtgaaaaacaaaataagtgatctcacccccatataaactataaaatcgcattaaaagcgaatactgaccaccccatcaatatgcgaatagaaaaacgtcccaaaaaatggttaggagcgtcgtggtaacctcagcgacatgcgtctttaggcatgaccttgaggtgacgaggagacacccaccatttcaaggagtccaactaaagtcgcaacctgcgaataaatcacgcatcttgagctaagcgatatacctctagaaacggctgggagaaacacagtgactcaaggggcatgcgttctcaagaatgaccctgaagttactgaggtactcccaccatttcgaggatatctaccagccaaagagtaagctcattagaacattaacacatgtcgcaaatggctgggtgtatctcagtatctcaaggacatataacccgcatatatgaccattagaatattgtgacacatccacccatttgaaaagactca

SEQ ID NO: 373343 - DNA, 1073 bp, Cannabis indica
cagaattcaaatttcttgaatttaggataaagcttgtggtctcgtaaccgttgcaaaactgatatgagatgcaactcatgtccctcttctgattcagaatacatcaagatgtcatcgataaacacgatcacacatctatccaggtaatccttgaatacccgattcacaagatccatgaatgccgccggggcattggtgagtccaaaagacatcacaagaaattcataatgtccatatcgagcacggaacgcagttttcgggatatcttcctctcgaattctcaactgatgatagcatgagcaaagattgatcttagaaaagaccgtcttccccttcagtttatcaaagagatcatcgattcgaggtaaaggatacttgtttttaatggtaagcttgttcaactcccgataatcaatacacattcgtaaagacccatctttcttcttcacaaataataccgaaccaccccatggtaagtagctcggtctaatgaatcccaaattcaataactcttgcagttgtatctttaattctttcaattccgatggagccattcgatacagtgcttttgatactaggtccgctcccggaacacactcaataacaaattcaatctcccgggtaggtggcaatcccggtaaatcttctggaaaaatgtcgaggaactcgcacaccaatcttgtattttcaggtccagatgtcacaggttggctggtatccactacaatgactatgaatcccaaacaacctctgctcattaggtccttagcttttaaaagtgttattcgtggtatgcgcaccccctgaactttacccacaaacacagctgggttagcactaatgggctcaaacaccaccatcttccgcttgcagttaatcgttgccccatacttagacagaaaatccattcccaagattatatcaaaatcagacagttgcaattctattagattggcggttaattcacaactgtgaatccagaaggacaaggaccgaatccacctagtggatactataaggtctcccgaaggtagcagggtaccaaaccccgaagcataaatatcacatggttt

SEQ ID NO: 373344 - DNA, 1326 bp, Cannabis indica
ctgggcgtggccgggagtttcttcttcctcttcaatggggtcacctgctcgtcctcagcctcatcttcaggattcaaaggctcctaagcatactgcttggccctagcacctcccttcaacttagcctcgcgcttaagttgaatgagctcatcctccttattagctcgttcaggccagccagcaccatacttcctcttcttccccgcaatggacttaggagaaaagtcctcagggtaaagctcatacttcaccaaattatcatcggaggtcaactagatgatattcctatccctaagagcaagagtgaggggaggacggtgatatgtcagaatctactgaaaccgagtccgggtaatgttcggatccttcaccttgaagtactcatcagcaaaatgccctattttgttgatggccttgtcatccgtgccggtcaaccacttgaagcctggctgagagaagtagaagtaccccgacctgccttgcttgggggtatacttcaggtcaaagaaccaggcaacctcgtggggagaaggagcatcccatccttgggaagcgtagtggacgaagagggcggataaatacttgattcccttaggagtgttctgggccaggcagagaccaaagaagtctgccacatccctgaagtatttgtgcaagggcatcagcgccccttgctggccgtgggcccccgaccaggcacacattcccttatcagggtttgtggcatgattgtcatgggcgggaatgtagcagtccagctcgcccaggtactcgtcctggtcgagagttcaaaggcgcgcctccgtaatcttggacggaggacttacccacctggtgcccaaggcaccctgcctcctatgaggaaccaccgcagcagcctcctcactgacgtagtccacgccttcaaccaggacgtctccgtcagcatcgactggctgcccagcctcgttgtactccccgaagtttgggggttcaacctcttcctctccctccgcctaggaaggactgcccggatgcgcatcgtccagctcctcaacctcctagacctcagcatcctcctcgcgatcctcctccatcgggacggtcgaatcctattcggcactgggcagagtggcaagccgagccacttgaggatcagtagcgttgaccagacgcgtggttttctttgtacgagccatcatcctatggctgggtacaagttcagaagagtttccttcgctagaaggaggactggaacgaagacgaggatgatcctcgtgcagaagttgaagcaaatcctggtcgatctgatgcccgagtccctaagactcacctaagttcatctac

SEQ ID NO: 373345 - DNA, 1019 bp, Cannabis indica
gataagaaaaccgggtctcagcatcaccctgacggctgcctctactttggtccctcagaacctcttgttctgccccgagccaccagatgcagtggatgttctcctcttctggtccatggccgaaccactacttcccctacttccccgccactcgctcgagtactagccgactccgacatacatccaactgcggcctcagctcgcagcgccttctccaccatctcagcataggtggtcttgtcgtcggtggtgatcataaggtcatgtttaatcttcacatttaatccgtccagatacttctccttcttgctgaaatcggttggcactattcccgaggccaacctcgccaaccgatcaaactgggtggtatactcagtcacactcatgttttcccgctgggtcaggtgggtgaactctttcctcttggcacttctaactgcctcattataatacttggcgttgaagagttcctggaacctttcccaggtcatggtggtgacatcatgaatctgagacaccatgtcccaccagactagagcgtcttcttggaactggaaggtggcacacaccactctgtcatttccggtgacacccataaagttcagtatcttggttatcaccgttagccactgctcggctttcatgacatctggacctcccagaaaaaccggaggtgcttgcttccggaacctttcatacaggggttccattctgtttgccgctactactatctcggcctgagcagcaggggcgggtgccacaggaacttctggcacaggcactgcaggagccccctgctgcctcaatctctgtatctcaagatcttgctcctctatcctggcttgcatttcagcaaacctagtctcccaattctgggcttcttgctcggcttgggcagcctgggcagcctgtggcgggttatcatcaccccgaccacgagccctgcccctgggacctctaccacggcccctagaatgcgggggaaactgggctccctgaccctgatttgaccctactga

SEQ ID NO: 373346 - DNA, 636 bp, Cannabis indica
ccaaacccaaaagtggacccgaacctgtaccctgtgacccaaaattggaacaaaaactaaagttcaccgggactagaactaggacttggacttggaatcataaatgaatatggacctagaaccagatccgtaacctgattggcagccggacttggatcctaacccaaacctggacttgggacccgaacctgaacctgaactcagacccaaacatggaaccacactagggaaacagaacaagggtcgggatctagaaccgcaccccaatctcgatcccgacccaaactccgaaatgggacctgggacctgaaccagaaccagaccgagacccgtgacagtgatccaaatcttgactctagatttcggtaacggtgcctggaacagactagtagtcggggtctagatctgtgactcagagtaggaccagaaccagaacgaagaaccaaagcgaaacccagacctagacctaggacccataattagaacctgaacaagaatcgccgaaccaggaccctaaaacaagactaggaccctgagcaggatccagacccagacgtagaatcgaacacagacctagcctcaaacccaaactgagactggagctcgggcccaaaaacagtcgtgtacccagactgg

SEQ ID NO: 373347 - DNA, 593 bp, Cannabis indica
tcttagccacgggccgagcattaatagatgttcaaaagggggagttaaagttgcgagtgctagatgaagaggtcagatttaatgtttttgccccaaccgacgttcctacctgttgcaagattgagatggtgaagggtttttttgttaaagctgataagaagagagcatagcctaaagagtgacttcgaacgattcaatgtcgttggaaaagattgatgtgtggtagttttgaaggtgaacttactcgtgcaaaactctgaaattagcaacattggaggtcaattttcttcatttggtacaaggaccctattggatgcaagaggtggacttgatccaatttgaagcagtattgagcccaaaccccttctgatgagggttcaataagtccttctcaccttgaatattatatcaccttggggacaatgtgaatctttagtttggggggagcgatttagaaaaaaaaattattttctgcacttttaattttctatttttagttaggaattggcaataagctagaggataattgtgtgctgctgtttattgtaatgtgctctaaaattgcaaaataactgtgtgcttaattctgttaa

SEQ ID NO: 373348 - DNA, 562 bp, Cannabis indica
tcttatttctgcaatttgttttatttcatgttaagctaaaagatcagattatatcaaataaccctgatgtaagttactacggtaccaaacacattttcgatcaataaatgaataaagacgtttatttcaaaattcatattgagtcaaaattactaacgtgttgctaatttaccatccagtgcgtacaaaaggtctgctcgaacccaagactcggaacagataaaaaagcatacttgtaaaaaacaagtgaccaagagtcataagtctgctaagtcacttggggggcacctataattgtacaaaggatttggtaaagataaaataaacacaattgcacgatgattataaacagataatgaaattcattaaagataacaaaagcacataataccgggattaaaagctgcccggtcagcctgttgtctgtaaaatgaaaaataattccaagtttaaaaactgcttggctggtcgtgatgtctttaaaaaaggccttacaaccaaataagatatataaaaaaagggataaaagagaagtatttaaacagctggagtcccaagctct

SEQ ID NO: 373349 - DNA, 507 bp, Cannabis indica
cagctttggccttgcccttacctacacataaacatagcactgtgagtcaacaaactcagtaagaaaagcataaatcatataacatacataaatcctgagttatgattagacgcccatacccctgaccacaaccctaatccccgtgtcccacacggtactgagtctcgaacgtttgtacgacgatacttttgacatggtaacaacctatactcggtacgctagtcatactctagccgtaccattgtgctactgtattagcctatactcggtacgctagtcatactctagccgtatcgatgtgataccgtcaaacagtacggtgctattgaccataatatcagcctatactcggtaccctagtcacactctagccgtaccgatgtgatactgtcaaatagtgcgaaagccaacatacatatctaatgtaatctaacaggcttactaacatgcacgctagataagtaaatacataagcatactattatactaatcttacctcaattccga

SEQ ID NO: 373350 - DNA, 866 bp, Cannabis indica
aacatggcatgaagttggattatagtgctctcttcttcttgagagaagggaccacgcttaataccaggacgaagataatttgtccatcgaagccgacaactttttccacatcgaagtaaacctgaacaagtagtcagataatgtttgtttcttaaccttttatctatacaagtagtagtttaagtatattatatatatatttatacgaactaaaaacatctataacaaatgtaaacaaaagagagaccagcatgcttaggaagagaacgccaggtgccatgaccatggcgtttgatgtagttgactaagatttggtcttcctctggtgtccatgcccctttcttcactccattcttgtcacaacatgctatctttcccatctttacctcattgagattcatactcccacacctctaccacattatatatatttatacacaaacataatatttaattttagtactacgaatgaaatccttgcattaaattgacgtgtcccattatagctacgctggatggaggagttaattctactagctaaattaataaaaattttatattttcttgctaaatgtacatatcactgttcattatcataaaagtattctttatattatatatatttttttttggctaattagtaatttttcttcccgaactttgacatgtaccgaatcatgctcctgaactttttttcccgttaaaaattttccctaaccattgagattgttagatttaaggacttttgtctaattttagtaaaaaaattctaacatagatgaaagttcaaggggcatgatttagtacatatcaaagtttgagggggcatgatttggtagatatcaaagtctagaaagcatggttta

SEQ ID NO: 373351 - DNA, 371 bp, Cannabis indica
tctctttttctcattgatctctctttctcactctctctccctgacccttcttcttccttccaaccttaaatggatgacaccttaacaccaaaatttgaaattaaaaggttaagtgtaaaggtagggctgaacattttgaacgggtttgacccgaacccgagcaacccgcccgaacgcgaactagtgaacccgcaaaagaatttttttaaaaaaatttcgggcgggttgagattttaggggtaccgggtttcgggttgaacccgcgaacccgcccgccaacccggtttataaatatattatatatatttcttttattactctttttatatatatatataatatggactttagatttttatggactatggata

SEQ ID NO: 373352 - DNA, 634 bp, Cannabis indica
tattgttacaatcctaatagtcaatgatcctatatagatgatctacattgaatagggatgaatttaccattctaccctttaatgtattttatccttaaaatacttagttacctataaatgatactctagtaaactaatataattactaaaatgaggcctcaatcatttatctctattcagccaagctcgaaggaaatcattgtttcacttctaaatacttatagaagctatagattccatatctatgatcaatgctcccactcaattgaactactatgttcccaagatgtaaatatctgctagaaccataggttagcatccacaaacaacttgaagaacataaataatacaactaagctgagcctaaccatattaagattacaatccatagacctaagatcaacaattgatattgacttagaaacatataacggtaagtttatgatatcttatccaagatcaatatcggtccattccaatgtatactccatgcacctgatacttgtaatctttgccaatgccctggaaaggacataacacttatccaaggtgtaagcatacatcacacagtgaactgacaaatcatgggaattaaacttttaaacatataatcatgattatattccactgtgct
